United States Patent Application Publication US 2011/0214205 A1 - sequence listing, part 8

SEQ ID NO: 24977 - DNA, 1492 bp, Setaria italica
  Peptide Sequence Number=SeqID_90951
accaatggagaggtagagcttagccagatccatttcaaggaaggttcatgcaggaagaagttcagcatggcggcaagattttgcaagaccgaaagattgctggtcgggttcgggaagcaatcatggagcctgtcgaggttaaggatcgcagaaatgagtcaaatgagaagagtaaatctccaagattagatgatgctgtctatcgcatagaggctattgccagagatggagcttaccacaagaggcttcaggaggcaaacatccacacagtgcaggacttcttgaaggccttgaacaaggattccgaagagctttataaaatcctaaagatgaaaaagaagggcaagtcttggtcaaaaatgacagggcatgctaggaagcgtgttctagaagacaggcatgagctcaaagcgtatcagactgaagatgggactttgatgctctttttcaattgcgtgcatgatcttgttggagcaagatttggtagtcgttacatcgcctgtgaacaatttgacataaatcacaaggcttcagtgaagaggttgaaagagcatgtgtacaacagattggaggacattccttacgattatgtaatgaaaggcaatgctcctgagcgaatttctttaggcactggtggtgctgctggcccgtctgttgtatcagtggacgcaaggcaaccaaattctattgctaataaccttgaggcttatcaagatcaccaagtggacgcaaggcaaccaaattctattgctaataaccttgaggcttaccaaggagctggagcacctgaaaattgtcccagcgatgttttcaaccctgttactgagccgattgacacatatgcgtatggtcccatgtacactgatcctctaaacacatatgattgccaaggtcaaggaattccaccaccttttcaggagcagacaactctgctttcagttgggcctgactggcaacaaaatgcacaagtccccacgaattctcctgacctatttgaggagttcaacctctgctcaatccaacattgaaccgcatcaccttcgtcaaccccatcaaatggcgcctgctgctccacaagcatggactccagcgcaaccatcgttccctgagcaagcttacggacccagctgccctctgtttccaggatcaggccacggcaacgactggtagtgactagtgagcagagcacagaggccctggacactgcagtttaaggctgtaaatagcaatgttagtttgtaattgtatgttgttgatgtttatcagtttatgtaatatgtgcattcctttttaactgtttgtacaaacatgatgtacatgtgtttgtactagtatggtgtacaggtgttgctgataggttgtatatatttcgtgtaaatttgcaaatgtacatgcgttagtgtttgctagtagaaacaaaatcctgtattttgcaatggcactatttttctaaaggagtacaattcatactagactgaaaagagtcttcaac

SEQ ID NO: 24978 - DNA, 1087 bp, Setaria italica
  Peptide Sequence Number=SeqID_90952
tgccggttagggacgggggtcggcggcggtggcggcgtgttgtcgccgaggagcctgacgctgcggcagatcctgctggtggtgctcttccttgtgcgagcgagcgcgagggtaacggtgacggccagcgtctcccagatcggtgtcacgctcgatcgcaccttgcgcaagtatgttgaggtgttttctagcaagctggacagcttccagaggcaggttgagggcaaactgaaagctttccaagggcaggttgagagcaaactggaaacttttcatgggcagattgagggtctccacgaagaagtgagacaactggctcgcctgcattccaatcaccatcctgaacgacacaccagattagagccaaaccaggagcatgctgcttccagtggatcaaacacaaatatccatctgcgtttccggaacaaatggaaggcacccatttacacggataaggacataacagatgagaacaaagtggcaatcaaagttgaggtgttcgaaggtgacaagatgatcacaactggtcctctttccaaggcgaaaattgagatattggttctccatggcagcttctataaaaaattccatgacaattggactgaagaggagtttgataagcacaccgtgcaaggtcgagatgggcaaatgcttgtgctgggaactgtgcagttgaccaatggagaggtagagcttagccagatccatttcaaggaaggttcatgcaggaagaagttcagcatggcggcaagattttgcaagaccgaaaagattgctggtcgggttcgggaagcaatcatggagcctgtcgaggttaaggatcgcagaaatgagtgtatgagataagacttctttttgtcaggtttactattatttttttgtcgaacacgcaggagagctgcgtatctttatattaagagagaaaaaaggggaaagatccacgtacaaagcagtctcatttactattattatttgatttaggttaagactttttgtcaggtttcctactgttatctgatttggtttatccccaaaaattgggtccttgttgcagcaaatgagaagagtaaatctccaaactactcac

SEQ ID NO: 24979 - DNA, 307 bp, Setaria italica
  Peptide Sequence Number=SeqID_90953
gcgggggagatgcagcacagtgggggagcagtagggcagcagcaaatccgatccctacgagggggactaacctagagtaacggtggcggccgccatgggtgtgtagtctgccggccccgacgctggcacgcagcctccctccacacctcagctgctggtgtagcagaagcaagttgcagcgcaacagcaaagatggccaaggcctagccattagcagcggaggtagaaaagagacgaaggaaggtaacccccttcaggataaaggtcaaggaagaacgaatgactagtagaaaagagagagaaaaag

SEQ ID NO: 24980 - DNA, 359 bp, Setaria italica
  Peptide Sequence Number=SeqID_90954
aagctcaaatttgttggaacaacggaaaaaacaaatttatttgtaatatttgaaacaacctgtgctacgtacaagacggattaattctatgacgaaccggtgctcctcaccgtgccacgccgccactggcttgcccagctttcagtcgcttcgccgttctctccttggacagctccttcgccaggtcttcaagggcttgagcattggtcctgttgtcccctggcacatcctcgtacttcccggtcttcacgttgaccctcgtcactcgctgatctagcatgcgcttgccgatctcgatgagcttcttcatgttctccggcgtcgccacgtccaccgctgcagtggcgctgcagagggtg

SEQ ID NO: 24981 - DNA, 727 bp, Setaria italica
  Peptide Sequence Number=SeqID_90955
aaagactccgacagcagtagacactttaaggttacaatttgatctaatttctcttgctgacgacacatttcatcctgatatcttacagtagcaactcatatgagggttagtgtatctcaaaattctgaagatgaaccagaagatgggattactgcagtcctatcaacttttggccagtcctatctacttttaaatttccatatttattgggccctcaacttttgctctagttttgaccctgtcattcataatccgctagctgttcccagctcagaggccaaattaaagtggaattcatagctggaggtgtcaaattaaacaatattggagttcggggttacaattagacagctgcatgagttgagggcaaaatggacttattgctataggtttttaccatcttttaataatgtaactatcagttagcaaactgaagtatcaaatgctcgcatcttgtgcggtacgcatgggtattacagttgtctttcttcataacaatttgtgtatgcacattacttatttggagaaaagctaactattcatatatgattatccatgctcactactttattcagagatctgtcgatgtttaccacctttctccttgaacctaaaatgtttcaactacaaaattaacttgtttatgggcaagatactaaactacgtggttatgttgtttccatatcagccatcgaaaaatacatcccacaactagcttcaagtggtc

SEQ ID NO: 24982 - DNA, 1397 bp, Setaria italica
  Peptide Sequence Number=SeqID_90956
cagctgccgtatgcccgtatccgcccgcgggcgagggcgaaaccttcttgtttccgggggcggccttgctccgcatggatcagaggaaggctatcttccgcgccaagctccgcgagaccaaggacaagcagcagcggcgcatcgacccctcgctcgtcaggtacaatgaatttgatcagcccatatgcagagtctgcaatattacgctgaagtctgaagcactttggcctgcacaccaagtgtcacggaaacatcatgaggcgaaagctgctgcggctgctaaggttgcacctgcagcaggtgcagggcctcgattgagtaccaagcaggaacaaccagtggagtctcacaaacaaaaatcttccacactacctaccaattttttcgataatcagggaacaaaaaggcaaagtgatgatactggttctgaaggaaggtctgtgcgccgtgaagttgctgttactcaactgaaggccaaagaagcaagcacagataaaccatctgttaggctagatcaaatggcaaagaaagagagtcaagccaataccaaaggaatccttccagggaatttttttgactatgcagatgaagaggaagctcctgctcctaacgagcttagtacatctggaaacattgccaattccaatcacatgcaggtgaaaggtgtccctgatggcttctttgataacaacaaaactggcaatggcacgcaatctagtgaacccacttcattctctaaagaagcaaagagttcagaaaccactcaagtaaaagcctcattgcctgaaggtttctttgataacaaagatgctgatctccgtgcacgtggtatccaacctcagaaggttgacatgaatgatgcgtacaaagaattcgagaaggaaattcaagaggacttgcaggaagttgatgaccgccttgaagaagaggagattgatgctgctgccgagagggaggaatacttgactctagagcaacaggagtacaggcagcgagtagatatgttgaagaaacagctcgtagagtcaaaagccgcccggactgctaaagtaaatagcaaacctgttggtatggacacagagtccagcagcgactcatcaagtgaggaagaggatgacaacacagattttgcggttgactggagagcgcagcatttgaaatgacagaaacattttgtaacttgtatcaacctaccatggaaattagaatccaccatcatcgagaattgtagcccagttcttcaggttttattacatgaagaaaactttctgtagtttcacatctttccttctctccctcagtagaaccattggcaactctgtatacagtggagttttgactaccatgaattgactgcaaatcgcttaaggtgactgattgaaccttgttggaaaagt

SEQ ID NO: 24983 - DNA, 1130 bp, Setaria italica
  Peptide Sequence Number=SeqID_90957
tcccaattgaagttgttattgaagtggcagccaaagagataagggattcaagactaaggactcacatattgactgttttaaaaatatgatgtcacttagaaggaaatcatccggtaatataccttcaggaagtagtgattcatctttctctgctgttgatggcaataatcctgtggaacttttcggcattcttggagtctgcgaaaaacaaaagaaccctggggaggcactcctgaataaagcaaaacaaatgcagtggtcgttgctagccatgattgcttcatgctttccagatgtaactcctctctcatgcttaagtgtttggcttgagattacagccgcaagggagatgtcctcgatcaaggtggatgatatttcctcgaaaatcgcaaagaatgttgaatctgctgttgtggccacaaacaaattgccaggcacttgtaggaatgtggaatttcgttacaatagaaagaatccaaagcgaagacggtttcttgaagcctcaccggaaaagttcacaatgtgtttctcgttggatagctcatgtgggccaaattctgctgcaacttcctatcctgcagatattgatgctcatcaagaaagtggaaggtcaatctctggagaaactataatgtctgttgatattgatgaaaggcttgcatgtttatccagcatggtagcagtgctttgtgaacaacaactgtttctaccattgcttagagcttttgaaatgtttctgccttcttgctcccttctttccttcatacgttctctgcaggcattttctcaaatgcgtctgcccgaggcttctgcacatttggcatcattttcagtgagaataaaagatgaagcttctcatactcaactaaactcctctaaggaagtgtctgttctagcaggatgggtagctgctacagctgttaaagctgcagatgctgtactctcaacttgtccatcaatttatgagaagaggtgtttactgcagcttctttctggtgtggattttgctgacagtggctcttcatcatcttactttagccgaagatattggaagattaacctgtccgaacctgatttgcataaagacactgatatctacgactggaatgatttcatggatgacgcttgtc

SEQ ID NO: 24984 - DNA, 569 bp, Setaria italica
  Peptide Sequence Number=SeqID_90958
ctcgcctaatgttgcgacacgtgctcgtgaggtgcatgacttttggcacgtgctgttcggccttccaacaaacctgattggcgagacggccctcaaggtgatagaatttgaacagatgttcctcccaatgtgcatgctgtcagttgtcgggggctctgcaaggttcagtgagaaaaccaggtcgttgttgtctctgcattacttcccatgggcaacaaaagcaggtctcaagtgcacggacctgatgtctgtatactatgagaagcacttccatgaagatctggaggaagtgagaagaaactggggaattctaccatgctctgatcccaaaaggagaggtgtgtagactgagactggcatattctgcgtgaacttgtatttaggtttcatctttgcttctgtcagttcgttcttttggaataacgtcatgagcaatgtttactgataccttagcaagttacaaagtatgtacgcttctgacatttgcaatgctctgggagtcgaacaagttgcttatattatttatacctgagaattacttacgaaaaaaaaaaaaaaaaaacaaaaaa

SEQ ID NO: 24985 - DNA, 411 bp, Setaria italica
  Peptide Sequence Number=SeqID_90959
agcgagggcatcaaattggcatccatcttcccacccatgcctgaattccatgaaccaaaggagccaccaaagtttctcatgcctgatggaaagcgcatgctacgatcaccatgcctaagcggactgcctggcgcaataggtgaagagggaagaacaggacttgtcagtggacttccagcataaccaaggttaaatccaagattgccatagtaaccatattgcttttggccctttacttcagtcacaaaagcaatatggttactatggcaatcttgcttttgtgactgaagtaaagggccaaggttagctttctgaggaccaagtaagtccatgtaagaatttcccagatggcccctgtccatgagaggatcatcacagcgtctttatttcttatttcttacttagttctta

SEQ ID NO: 24986 - DNA, 708 bp, Setaria italica
  misc_feature (1)..(13): n is a, c, g, or t
  Peptide Sequence Number=SeqID_90960
nnnnnnnnnnnnntttaggtagattttgaaataggcatgcctgcctataaatcaccttaaaagttatgtctgtcgcaagaaaaacattcacgacatcttagacctggattacatgggactccattagcacaagatacataacaaacagtccaggaaagctgatactaataacaacagcttaactgtaaacaaaggccagtgcgcctcggcttatgttacaacaaaggccaaacaacaggaagccgctactatatcaacagatgaaaacaggggggctaatggcttcagcttttctttttagacagctaacagcttacttctctcactctaagatctaaatttaatttgtacagcagcagagtaattaacgtgcttcttagtcctccaccttcctcctctttacagcagcttgcagatcaaacttgcatgcatatcactctcctcccttgattctgcgtagggtcttcagctacagaatcaatgtacactcttcggcgcaaacgtacagtatttatttccggcaaggccaaaagggccttatataaggtttttagtagagaaaaaacgtgagtgcaaacctagcaactgttagctgtacaactagattgtttgcccttcaggcagcagtgcatgctggttgaagcccaaggcgcttctctccagcagcaacaagtttctctacgcgtgctactatgtgcttcccaagtg

SEQ ID NO: 24987 - DNA, 1682 bp, Setaria italica
  Peptide Sequence Number=SeqID_90961
aaatacatcagtcatcaatgtgagagcttgaggcatgatttctgagaaaccatatctttttcttcagtactggctgtttctagcttttgttgtatgaaccggctcccgtattgatccgcactaaactcaacaacatggcctgctatttctgagagctcatatgatttacttttgttgctcttgaattcctccagaagcgagggcatcaaattggcatccatcttcccacccatgcctgaattccatgaaccaaaggagccaccaaagtttctcatgcctgatggaaagcgcatgctacgatcaccatgcctaagcggactgcctggcgcaataggtgaagagggaagaacaggacttgtcagtggacttccagcataaccaaggttaaatccaagattgccatagtaaccatattgcttttgtgactgaagtaaagggccaaggttagctttctgaggaccaagtaagtccatgtaagaatttcccagatggcccctgtccatgagaggatcatcacagctagctgcaagttgagcaaggtactggatatacgctggatcgataggagtctgaagggaaggtgatgcagttggacttccaattccactgtagtttagcatgttagacataccagctaaattttgtcgagaagatatagtcccgccaggggatctggaaccaattctaggggaagcaaagccagatccaagtgacaaattgtcaaatgatgtgaaactgccagcattaatctggtttctcatcgtagatgaattggccaagtttggagaatagccatcaggtactttagactgtccatgctcaggacgtctcatgtaggagtgctgctgattgccatttgattggtcaccctgtcgatcaaacagaaatttctggacattatcaacatcctgatagagctgagactggtccatagtttgcccactcattgccctagatgataagctcatcccagataaagctgccacaagatcatcagattcacctatagcagatgaactacggcggaaagaagacgaaccaccattaatcttcttgtcattagcaccaactttcacaccaattggaggcagagatggactaggggccctcctcacaagctcaggatctggagatgcacttcgagaaagcgatgaccctaaaatagaagcatatgtatttgatgataaatcattgttctgaatttcatccaagcctcgtgaattattactagagtgcaggcctcccatagctccagatccacgatggaggccatactgtattccagaagaacctagcaagtcattactactgtggttggcagtctgcctatccatatcccgttggtatgaatcatcctgaaagacgttggagaagctcctatgacgaccaagatcgatcccgggcagccccaccgtcccttctgcagccgccgccggctgctgctgcctcctgccgtccccgatcccgccgaggccggaggagcggaggcggtggtgcgaggagcgccagtcctccttggagagcagcggcggccctcgaagtcccggtccgtgcgcattggagtagtagtagctctggtaggccgggtcggcgcggaggtcgtcgtcgaggaagaggctgccggcggcggcggcggcgcccatggcgccctcgacggtgggcggcgcggagccgctgcggag

SEQ ID NO: 24988 - DNA, 1621 bp, Setaria italica
  misc_feature (39)..(39): n is a, c, g, or t
  Peptide Sequence Number=SeqID_90962
aagcataagaatacagacattacttagccccctatgaanacagacacatagtgtgagaggtactggagtataggccacatataccagatcaaacttgcatgcatatcactctcctcccttgattctgcgtagggtcttcagctacagaatcaatgtacactcttcggcgcaaacgtacagtatttatttccggcaaggccaaaagggccttatataaggtttttagtagagaaaaaacgtgagtgcaaacctagcaactgttagctgtacaactagattgtttgcccttcaggcagcagtgcatgctggttgaagcccaaggcgcttctctccagcagcaacaagtttctctacgcgtgctactatgtgcttcccgtaggtgtacttcttgagggtgttcagatgtgtttttatccttgtaaggatcatctctctctgctgatcatcacaagtttctaacaccttctgcaccacatagttagcaaactggtctttcatcattacctcaagaggttcgctttcactagtggatccaagcatctcgccaatcagaacctggcgctctacaggatttccaaaggctaagcacttctcaatgacatttgaagcaaacttttgctggctcatttgcacaatttggccaattaacttctcaataatagcagatctctcatggggtttgccatgttccagaacatgctgaacaacgtaattgccatactggtcctgagctagcaagcaaacagactggagaatctcatccatcattatttgctgtgttttaggatcatcacagtgctctagaaccctctgaataactcgacaaccatatggatgagtggatagcattacaacttggccatagaacgttgagacaataaactcgatagcatgctgaggaatgcactctatgcatttttgtattacatggttcccattttgatcacgtacacaacgcatgacatgtccctccagctccgcaaccattttagtctgcagatctaaatcaacgacctcgatagccttctgtataacccggcacccatacatctgaagactgagagcaaggacacgtccaataagttgaccagccaattcctttatctgggcagtgcttccatgctcaaaaaacttttgaacaacataatttccaaatacatcagtcatcaatgtgagagcttgaggcatgatttctgagaaaaccatatctttttcttcagtactggctgtttctagcttttgttgtatgaaccggctcccgtattgatccgcactaaactcaacaacatggcctgctatttctgagagctcatatgatttacttttgttgctcttgaattcctccagaagcgagggcatcaaattggcatccatcttcccacccatgcctgaattccatgaaccaaaggagccaccaaagtttctcatgcctgatggaaagcgcatgctacgatcaccatgcctaagcggactgcctggcgcaataggtgaagagggaagaacaggacttgtcagtggacttccagcataaccaaggttaaatccaagattgccatagtaaccatattgcttttgtgactgaagtaaagggccaaggttagctttctgaggaccaagtaag

SEQ ID NO: 24989 - DNA, 408 bp, Setaria italica
  misc_feature (378)..(378): n is a, c, g, or t
  Peptide Sequence Number=SeqID_90963
atcgctgttcatagtgctggaggagcttgagaaggaccccgggtaccagcgacgccattgctgtagctcctaaagcaacatttaacctttgtcttgaaacaggagactgccgaacccggcgaggccgatcccctcctccgctgcgaacaattgctgtgaggaggagacggttcttgtctcttcttcttcctcctgtgaacacgcgccccgaggctactgcttcagcagcctacgatcctacgaaaagagaggcctccgcctcggctcgcttgtcgcatccaggaatcccgccggttggctctgggaggcggtggcgactggcgagacgaaccaggaggcggtgcctgccgtctctggcgcttctctctctctcccctnagctctcgccctctctctctctctactaaa

SEQ ID NO: 24990 - DNA, 394 bp, Setaria italica
  Peptide Sequence Number=SeqID_90964
cgtggccacgtcatgcgagccttaacgtggggaaacctttgctatccacagccacaagtacggtgttgctgatcgcttggagcaccaaaaaattccaaaatggggagataaaaggttttggatttggaccggaaggatgtcctgtttgtttgagccacaacttttgagtttttctcaaaatctgctgcagttttttttcctgataagccaacactaatctttccagcttttcatataaacttagcttttctagatttccagtttttcggaagctacacgagaaattcactatttgtttaagcttctagccttttacattgagaagctgctaagaagctcaaacaaacatactgaaaacactggaaaaagaaaatagaaaattaaaggattccgc

SEQ ID NO: 24991 - DNA, 266 bp, Setaria italica
  Peptide Sequence Number=SeqID_90965
cgaatgggcgcgatgggtcggtgccgcagctggtgcaggagatccaggacaagctcgcccgcggcgcggtggagtgcatgatctgctacgacatggtgcggcggtcggcgcccatctggtcctgcgacagctgcttctccatcttccacctcccctgcatccgcaagtgggtgcgctccccggcctccgccgccgacgcctcccctgcagcggaccccgcctcaccgtcctggcgctgcccgggatgccagtccgtgtatgacccg

SEQ ID NO: 24992 - DNA, 250 bp, Setaria italica
  Peptide Sequence Number=SeqID_90966
cctgaactgctgcatgcctgcatcgttctgctgtccagtgcctgtctgatttctttttcctttggttgaccgaccgacggaaagagataagagaagggtgggcggagcaggctatggttacccaggtattctacacggatgttcgtcctgatgctgctatgttttcttttttcccgatcagagatcgggtttgcgtcaccccaccatcccgtcgccgctccatcgttgacactcccgaggatgaggttgt

SEQ ID NO: 24993 - DNA, 254 bp, Setaria italica
  Peptide Sequence Number=SeqID_90967
actaagcaaagcatgcatctacagttagatcctgatggcaccgaaagggaaagatgaaagaagtggaccggactgctagagcagaagccgaccaatttcttgctttgttacggaaagcagccacgccaatgcgtcgccaacctccggacacgcaaacgacaactcattccggctaaccaagcagccgactaatcttaaccaagaagggatttttattactgtttcaccaaggagatcaatcactaataatttta

SEQ ID NO: 24994 - DNA, 283 bp, Setaria italica
  Peptide Sequence Number=SeqID_90968
gcaggggtgagctcgatgggggtcaccggcaacggcaaggaccagctggaggtggtcggcgacggcgtcgacaccgtctgcctggtcaagtgcctgcgcaagaagctcggccacgccgacatcctcaaggtggaggaggtgaaggacaagaagcccgaggagaagaagccggaggagcccaaggtcgtggacctgccgccgtattactaccccggttactactaccaccaccaccatctgccggcgccgtggtggtgacaactgaaaagcccagtttttgcag

SEQ ID NO: 24995 - DNA, 496 bp, Setaria italica
  Peptide Sequence Number=SeqID_90969
acaagacaaaggggcagctgttgggtttcgttgcagcagagtgcctagccatccagcaaaacccatcagccgccgcgtcgacctcggcgtccggcgatactttcgccgatcccgtccctccctcagggcctcagcggcgggggcacgccatgacgaagcaaaagatcgtgatcagggtgagccagctggcgagcgagaagacacggtccaaggccatggcgctggtcgccaaagcggacggggtgagctcgatgggggtcaccggcgacggcaaggaccagctggaggtggtcggcgacggcgtcgacaccgtctgcctggtccagtgcctgcgcaggaagatcggccccgccgagatcctcaaggtggaggaggtgaagccggccgagaagaagccggaggagaagaagccggagccgctgccatactggtggtaccacaattactaccactaccacccgccgccgccgtgctggtgaggtggtggtgagccggt

SEQ ID NO: 24996 - DNA, 450 bp, Setaria italica
  Peptide Sequence Number=SeqID_90970
ttgttagtcatttcttgtgtaagcatgatcaggaacctttgtcatccagttgtaggcctgggcggtgacatggaatgggtcccaagcttaatagtggtgcttaggttagcctggcgtattggacacactcctgaaaacattcagttccagatctgtgtccgagaggacacgtaagggatccgagtggtttcagaccctttttttttttgttgatatgcggtttcagacaaagctatcgctgctctcagatctcactcactttcatctcagttggagaattttcacgcaatgcacaggataaacacaaacgtaccatttgactgctaccgaataatccaaatagatttcgactattgcagtgctctgtttttgtgcactctgcttcatgcatgcatgctataaaaaacaatgctattctcgagttccctaaaattttaatataactttagc

SEQ ID NO: 24997 - DNA, 241 bp, Setaria italica
  Peptide Sequence Number=SeqID_90971
tggaaagcctgctgccatcctatttggcatgggttatgttacaaactctgccatcattccctgcctaattggaaagggtgggctgataattagtgattctctgaaccataactcaattgtcaatggcgcaagaggatccggtgcaactgtcagggttttccagcataactccccaaggataactttaatagcagagataacttgttgcactgctggtggtgacatggaagtagcatacaga

SEQ ID NO: 24998 - DNA, 944 bp, Setaria italica
  Peptide Sequence Number=SeqID_90972
gtaagaaaagtaaaatctttcataacttcatatctaagagacatattcttggtcacatataacgtgaatatgcaaaatgcatggaagcaaaaggcattcatagttgtcagtggtcccgcagcagaaaatcttagggatgttctactgaaagtttatattgcatctaattgtattacatatcgataatggattaataacagaacaattgaacttgaccagctatacacatttggaaggataattgtacaatcaacaaacaatagtcagctaatgcgacagatcctggactcgcatatcgacaaaatcccaatgaaactgctcaatatgtgcttgtttccgtaacgatttgttgataatttcccaagggattctaacaacttcaatcattcatgggtaactcagggtttgttcctactccagcttatcatgaccaacttcagcaatctttggtggttccgcagggaagtatttgatgccaacaagatcaccaactctgctgataacatcaagggctttcatcaggtcctccctagtgtgtgaagcagaaatgcagattcgtgctcttgcaagaagaagaggtgtcgcagggaatgccacggtaacaacagcaaccttttgtctaaggcactccctagaaaatgcaggaatcttagccggattgtaaagcattatgggcatgacaggagagtcattgtcaccaagaacctcaaaacccatcttcttgagctctgacctgaagaaattactattctcacggatgcgtgcaagtttttgggcacctctattggagccatcctccccaaggataactttaatagcagagataacttgttgcactgctggtggtgacatggaagtagcatacagatgggccgggcaactatgcttcaggtgctgaattatctcctttgatgcggcaatgtatccaccacatgatccaaaag

SEQ ID NO: 24999 - DNA, 1534 bp, Setaria italica
  Peptide Sequence Number=SeqID_90973
tctaaggttcggtcgcgccgtcgccattgacgaacccctccacgctccccctcccttaaatccctactctcaccgcatcgccctccatccccatcgacgcctcattcgctcgagcctcaccgcatccaaagccaactcgggagatctccaagaagccatcttggaatccaagaacccaagaatctgaatcagagtcagccaagattcgaattccgagcgacaagctctccggacgaagtcggagaatttccgcggagagcgcgtggaggcgtctcgggaaccagaggaggagattccggaggggattagggagggggcaagatggtgaggctgccgtacacaacggcgctgaccactctgttcagctacgggctgctctttgccttcggccagctcagggatttcttccgcaagctcgtcgactggttcaaggccaagaacgtcaaggggtacgcgccgatctgtctgggcctggaggatttctatgtgcgccgcctgtaccttcggatccaggattgctttggtaggccgattgcaagcgcaccagattcctggtttgatgttgttgagcgcacctcaaacgacaataacaagacactgcagcgtacctcaaataccactagatgcctcaatttgggatcctacaactaccttggatttgctgcagcagatgagtactgcaccccacgtgttattcagtctctcaagaaatactccgcaagcacctgcagtgttcgtgttgatggcggcacgacaaaacttcacactgagctggaggaattggccgcacgttttgttggaaagcctgctgccatcctatttggcatgggttatgttacaaactctgccatcattccctgcctaattggaaagggtgggctgataattagtgattctctgaaccataactcaattgtcaatggcgcaagaggatccggtgcaactgtcagggttttccagcataactcccctgctcatttggaagaggtcctgagagagcagatagctggtggtcagccacggacacacagaccatggaagaagatcattgtcattgttgagggtatctatagcatggaaggggaattgtgtaaactccctgagattatagctgtctgcaaaaaatacaaggcttacacatatctggatgaggctcatagcattggtgccgttgggcagtctggccggggcgtttgtgaactccttggggttgacccagctgatgtagatataatgatgggtactttcaccaagtcttttggatcatgtggtggatacattgccgcatcaaaggagataattcagcacctgaagcatagttgcccggcccatctgtatgctacttccatgtcaccaccagcagtgcaacaagttatctctgctattaaagttatccttggggaggatggctccaatagaggtgcccaaaaacttgcacgcatccgtgagaatagtaatttcttcaggtcagagctcaagaagatgggttttgaggttcttggtgacaatgactctcctgtcatgcccataatgt

SEQ ID NO: 25000 - DNA, 423 bp, Setaria italica
  Peptide Sequence Number=SeqID_90974
cgtatagcagagtcttgattggtcatttgttccatgacaatgggaggaatcttatgtagggggatcctggatgccttcgatggaactgtaacactattttgtgaacacttgctcctaacgcatgatggggcttcttcagtcctccctgtcactgatccttcatcatcaatgtcaaatatcagctgatccagatcactggctgatgtactccccggaccttgtgcacttaacttgtctcctggtccagtgtatccatacccatttattagagcaatgtattgtgcttcagtatcttcatctgatgagctccctaccataaaatgtacatggtgctcatcatcttcatctgtaaatagatcaatccttgccatgacactccccggctaatctgaatcagaattagacttactacaaccaaccgaa

SEQ ID NO: 25001 - DNA, 560 bp, Setaria italica
  Peptide Sequence Number=SeqID_90975
tatgttgccattcttcgttctccacttcttgcctcctcttcatctcttgcatccttttcttcatcctcttcatcacgtatctcaatttttttcagaacagtttaaggcaaagaatgcacttaaacatgaatgctaaaataatatttttgctatagattttaccaggaagatcctcttgccagggcgaccttcagaagaaacaaaagttgatgatatcgtgactggcgaggtgaatgggcttgacaagtggaaaatatctctaattgaacaatatcatagcatatctcctagtcatcattttctttactatattccaggacaagataattacagtgtccagtaataccaatatcctatgagcgatggaggtaatgacaggtaaggtttcattcgcttatttcataaagtaaggcgattgtgtcccaattgcaagttacagactatagaaaaatgttgacgcccaccacgttccagaatacagattaatgccgaccctacagacatggtttgggttacacaaactgtaagttgaggcaatgcttcttgccgtcgcatgttta

SEQ ID NO: 25002 - DNA, 255 bp, Setaria italica
  Peptide Sequence Number=SeqID_90976
gtttcaaggtttcgagttgtttgccagactcagacaccacagagaaactgtcacgttggcatcagcaacagaccaacaaaaatatgacgaagcaaaagattgtgatcaaggtgcaaatgacgtgcgacaagtgccggagaagtgctctaactttagctggctccacgtacggggtgcaatccgtggcgatcggagggggaggagcgcgaccagctggtggtggtcggcgacggcgtggacgctaccagcctggcg

SEQ ID NO: 25003 - DNA, 751 bp, Setaria italica
  Peptide Sequence Number=SeqID_90977
aatgaatacagctgaaggcattttgctgttgcaaatttgaacaaatacttgaaagtttagatacagtgcatgacaaaagataccacggttcacaaacactaaccgagctggaaaccgaatctgcagcatagttgggaagtctatcgacagaatagtaagaaactacttaagtacacgaggctctactcccgacatgagaactgtctaaattcactaaccttcaaatgaaatgaatagcattgcaggcctggataacaaaaagggaaaaggagtaaaagcaaaaaacaaaagtagtatgctgtacacctactaaagccaacaaccagaaaaatagggcaactttgcaaagcacctgtagaaacattgacagaataatgttagttagtcttcactttccgacgcaaacttatactaatgtaaaccgtcagaatcccaagaaagtaggtataatccctcaactttttactagagattccactagcatgagaactgcgacatgagccaaacccataaaaactcgacatataccaacaggagatggagtgcagctttctgggctatccagatccagactacatgattcttgatgctggtttgacaatacaaatgataaagccgtaccctaaatgaacaaacatgaacataacaaccaaataaaggcagatgatcaggcaatatgcaagcttacagcccattgtaacagtctatcgtaagaagtaaggtgagatttccatagcagtcgaaccaacag

SEQ ID NO: 25004 - DNA, 249 bp, Setaria italica
  Peptide Sequence Number=SeqID_90978
aagtctagtcctgaggcaaacctgggctcgtaatttttttcatcatgtaatctatcagtatgattatggaatttttcctgtagaacttctagattagatgatcaatgatatggtcaatggaccacttgcagttgtactgaatgcatgaatcaagctgttgaaatatcgcaagcaactgcttcaatggttcagtgcaacttagtttttcaaagagcctgcttttacatagtgaaatcggtcatgatgatt

SEQ ID NO: 25005 - DNA, 969 bp, Setaria italica
  Peptide Sequence Number=SeqID_90979
aggggacgaaggacctaacgcgcggctcgaggaggccgccgcggagagggcgcggtcgctgaagctgctccgggagaaggaggcggaggtggcggccgtgtccagcgaggtcgcgagattggaggccctgttggcggagttgcagggcaagaactccgagctcttcggagagaagggtgagctggcggagaaattggaggaggccaagaaggtagttcgggtggtgtcgagtgagaagatggaggtggagaggcacctgcaacagttcaggaaggcggctgagacttatcgggtggaaatggagtgcaaactgaaggcaaaggtggaggaattgaaggtgctgggtgccaagaaggtggagattgaggccagagtagagtcattggagacgaagctggtggctgcaatggctgagaaaagggaactcgaggctgaggtggtggcaaagaagagggagtctgatttggtgaagggagaaaatgataagctccagtctgaggttgtggctgctgagaagaagcacacagttgctgtcgcagaggttgaaagtctcaggacggaattggggacagtgctgacagcgaaagaggctgctgctaaggcatttgatgctgagaaggccagacttgtgggcgagttggagggcctcaagaggaagttggaggaaacccaggctgacaaggaagcagccgagggagcgactcgtgagaaggatgctcaggccggtaagctgagggccgaattggaggagctccacacttccatgtcccagctccaagcttcctgcaatgatcttgacatgaagcgtttgcgcctgcatgatgagaagaattcagttctgaaggctctggatgctgagaaggctgaagctgtaaagctgagctcaaaaattgaggagctcgagaagtgcaatgggaagaaggatggtgacattgggaagctgaaggcagcattggaggaaaagaaggg

SEQ ID NO: 25006 - DNA, 386 bp, Setaria italica
  Peptide Sequence Number=SeqID_90980
ggggggggcgatgggagggcgcctaggctgtcgctgtcagcgtcctcatccgcctccatagtaattgagcgaggtagcaagagcgaggaggaggaggctgcgcgatgggaggggcaatgggagaaaaagaggaggaagaagaagacagcaggggcagcgtggtcattttccatggtcgatccacgctggcatgaggaggtggctcgccatgtcatcaaaagtggcaatattgttgcttcgtttgttcggggatggcaaatatgtaggtgcattcataaggatggtaattgaaggagtgccatccgtaaggatggcaaatagttaaatatcccgaaaaaatgggagggggccaagggataacaagctatataacttaaaattaaaat

SEQ ID NO: 25007 - DNA, 322 bp, Setaria italica
  Peptide Sequence Number=SeqID_90981
cagcccaacccgacgcgaccggcaggcaggcagcggcgcaccaacgcaaagcgaaggttaacccacccacccactcacaagcccgctcgctcgcccgccgcgacgcgctcctgcccgcgcccccacctccctcctccacctccgcagcgcccgcggtaacctcaccacgccacgccgcatcgcgtggtgcgagccccaaccgtcgccggcccgccccaaattaagccgcccccgcggagcgatccggtggccaccgcctggtccgctgccgccccgccggagccgaggaggaaggggggagcgcagggggggatgctagagg

SEQ ID NO: 25008 - DNA, 447 bp, Setaria italica
  Peptide Sequence Number=SeqID_90982
cttaggttccgtaaaatcttcaaagaagactctgtcatcctgccttcactgagaagtggagataactttgagattatgccagaggaaaccaggtcaggttttatatcattatcagatgaaatcttgcagatgatcttcagagcgaggtctaggcacttggtatctccactgtctaaagctccaaacaccaaaggagcaacaatagaggccatgagactagatttttgacaacgttgttcctggagcagttcatgcacgatcaaaagagcttcccttttgaactcggaatcaagtagtaatgcaatcagaagcaccacatcttcacaaactgaaggaattcgatccctgccactagaaaggaaagcaagaaaaaaatgaattccagctctccgagcttgcagtgtgcatgttccactatcatccttaaggaattcatggaatgcttct

SEQ ID NO: 25009 - DNA, 250 bp, Setaria italica
  Peptide Sequence Number=SeqID_90983
gttccattcaccgatgaggaggagagccgtggagctgtggaggaggtggtgagactctgtagcttccagcacctcaagagcctaccggtaaattcacagggagtgactgaacgcattggtacggataattcgttattttttaggaccggaaaggttggagattgggcaaaccacatgacagtagagatggcacggaagctggattgcatgacggaagagaaactgagaggatctggacttaccttttgat

SEQ ID NO: 25010 - DNA, 195 bp, Setaria italica
  Peptide Sequence Number=SeqID_90984
cgccacgagcccggcggcctgcatcgcctgccggtgcctcagcagcgggtgctgctgctgcagcgaagactgcgccagcatgggcagcttcagcccctcgacctgcccgaggggtcctcctccgggcatgagcaggctcggcagcaacccagagccgccgctgccaccgagggcggcggaggcgtacgccgggta

SEQ ID NO: 25011 - DNA, 411 bp, Setaria italica
  Peptide Sequence Number=SeqID_90985
gattgtgcgagggaggaagaactctaagaagcagccggaggaggaggaggagcacgccaccaccgggtccagcggcggcgcgtcgtcggagcacaccaccagtggctacttccctgcggtggcggtggagctgcacgagcaggggcggcacgcggagctgttggacccgaggctggagggccgcgccgacgtggcgcaggtggagcgggtggtgcgggtggcgctctgctgcctccacgaggacgcggcgttgcggccgaccatggccatcgtgtccgccatgctcgacggcagcatggacgccgccgagccccgcccggatctcctccgctacctcaggatgtacgggcgcggcctcgtcgacctgcggcccgccgccgtcgggtggatggccaagggctctgacaccac

SEQ ID NO: 25012 - DNA, 979 bp, Setaria italica
  Peptide Sequence Number=SeqID_90986
caatttgaatcttttgatgatgacttggcatccacctatatattatgatctgttactctgtcctgccctccttttggagtttttagtttgatttttcttgttgaagggtcttatttgttgttcctatcaaataattttcagctgagagctttgtctctacagttttgtttgcatcaattagaaaggctgatttctactacacaatccacatcactacatgcaatttgttgcctaggcactaggccttaggatttttaatattctttaggttaaaaaagtagtcgttctcaatcatggaaattgcaaatccattgcccaatctgatgatacttttagtcctgtatctattgcaaacaattagcagtcctatgctaatattctttgttgcataagtactataaatcaatgatttacctatacattctgctttgggcaagttacacatgttgaatacacgtagtgagcaggtttatttcagtggtttagaagttgcctaaccagtgctgaaagctctcgcacaaggtgagggtgaggggtgggggctctttgtctgggaaagtaacgtaacctaggtgattggaaatccctacttattcactattagttaagtagtctctgatacagacattactgtcacaacagatactggattctgataatagcaaccttcatcttgtttgtatatccccttctctgttgtggtcccttgtagatgtgatatatagcgactccaggagtacttatttacttacataagagttacactctgcaactagcagtcctagaacagtaacaaatccttttagtgccaagcaagttgggtaggctaagtagcagctctacagggtaaaaatactattgcgtgatatggcagagattctagctttttctacatgtcaatactaaatttctggaacttacaaaattttgatgagaaggttgttatacgtaatgttctcatgataataagttggtcgtg

SEQ ID NO: 25013 - DNA, 264 bp, Setaria italica
  Peptide Sequence Number=SeqID_90987
tgcgccatcccgacgtactcctctagagtcaccgcccactcccgcagcgcgtgcgtcctcccgcgggcgtccatgtacgacccgtcgtcccgcaccggccggccgtacacgctcacgtagtgcgccgccaggatcaccgtgaagccgacgaggtgcgcgccggagctgtagaggagcaccctccggtcgctcggcacgcggccgggctccagtggcgaccgcgtcagcagccggatgcgcgaccgccagaccttctgcgccagc

SEQ ID NO: 25014 - DNA, 945 bp, Setaria italica
  misc_feature (881)..(945): n is a, c, g, or t
  Peptide Sequence Number=SeqID_90988
gtggaggggaaggggatggggtcgtcgtcgaaggtggtgcggccggaggacgtgctggagtcgctgaagaacgacggcagcatcgacgcgctccgcatgaagatcatcgcccagctcaaggccaacgaggatatgaagaaaaacactatgatgatggtggagcaaagcaaggtactgaatactcctggagctgaaaaaaagaccaagagggagttgtttgatgcacttcgacaagaacttgagactccagtccttgagaaagcttcgaaggcagtttgggagctgatacttgacaatggcggattagggaaagagataaccgaaacagttgagaaagtcttctgccgactcagtgggattgacatgatgccgccgcctccaccgtcagcagctggtgctcatcaagagaaagttgacatggctattgatgagggtgagaagagcaaggagatggattcgttcgaaccatcctcatcgaggaagagacccttcagcgacgtcaaccgaaaaggagcaggtgctgtaccaaatggcagtgctacagaccagcatgatgagtccgatgatagcgaccagaagatgtgatgctggtctgtgctgtaacttttagttcttagaggatgaactagcttttgtgcttgaatggtaagaagttgaaccggatcctgcatattgatgtagtttacaatctagggttgtatgttatactggcaagttatacttcctgttcataccagtaagttctgtaagcagctgctgtataatgtttcagttttcaagaaagtggatgttcctgtgtttcattcttctgaaatctgaatgtagaacaaattggttgattagttcctcctgaaagctttgtggtatcttagaaaaggttnnnnnnnnnnnnnnnnnnnnnnnnnnnnnnnnnnnnnnnnnnnnnnnnnnnnnnnnnnnnnnnnn

SEQ ID NO: 25015 - DNA, 512 bp, Setaria italica
  Peptide Sequence Number=SeqID_90989
agactagactagctgctcgggttacttaggggtatttcggattattctttggaacttttggaatgagagtcagaggcttcgagtatctggatttccattctttgcctctgtacattaatatctgttcattatcgaatgataaaagaacacagggaacaagatcctgcaaatatagatatgtgaacaattttagctaaggggtcagaaagaagatatatacaggattcacttccacgataggtaatgaaatgaaaactgtgaaattcatggggatgaataggacccttagttttgctcctatctttttgtagtcgcttggattcaaaccctcacaatcaatcttcaccaggtcatttccttcaaaagcatctcgcacatccttgacaagagtgatatatattccattttttgctagtttacaaattggcggcagattccgccctttgcctctcatttcatctgcttcttcttttgtaagcccttctggagcttccttgatgagttttggatat

SEQ ID NO: 25016 - DNA, 1204 bp, Setaria italica
  Peptide Sequence Number=SeqID_90990
gcacagttgagacaaatcacagatttgtcattgtcattcattattgatggtgatgatggtaggtgcagccggttctttacaagtggtgaatacgcacgccacacggctaaagttaattcctttacatcatattggctggcgaatcgctgaaaattctctggaaacggactgcgattggagcacagaatgcttatacaatccaagaatgcaatttgatcatcagcagttaacccccaacgtactggactgctattccagttcactcactgttcagctgctctatcatagtgtcgatcggcagggatcccaatggcaccgatgactccagacgctcaagcatgtcgagttcaaagtgttcatcgctgctgagatcaggtgattgctcaagctgttcctcttggtttccagcaatgcttgtttcagactcatcgtttatgtattctgcacttggagattcggtgttcacctcacaattggccacaagcagagctggaaatgagtgctccactgcctgagatgtgacgctgaactcctcaaccctcgtcaggagtgaatcgggtgtcagatcatttgcttcggcatcatccagcagcaatgccagagacgagtccactgcactctcccacaatttaaacattttgggcctcaatacttctcttactgtgaattgagtgttggcatcagtggcttcattgacatctgaaccacttgcatcagaagacattgtcggattattctttggaacttttggtgtcggattattctttggaacttttggaatgagagtcagaggcttcgagtatctggatttccattctttgcctctgtacattaatatctgttcattatcgaatgataaaagaacacagggaacaagatcccttagttttgctcctatctttttgtagtcgcttggattcaaaccctcacaatcaatcttcaccaggtcatttccttcaaaagcatctcgcacatccttgacaagagtgatatatattccattttttgctagtttacaaattggcggcagattccgccctttgcttctcatttcatctgcttcttcttttgtaagcccttctggagcttccttgatgagttttggatatacaggagtagcaggtttccagagcatcaggggatagcgaggacgagtccgtacgtcataccgtagggtacaataaatagtacttacctacgaata

SEQ ID NO: 25017 - DNA, 891 bp, Setaria italica
  Peptide Sequence Number=SeqID_90991
ggtttgtattgtggcacttggttatgcttaaaatgtaatctagtacatggtgcagagcaggattcaggttcctacaacgaataggccattccccatactgctttttggtcagaaacaagaaatttgtaaaagacataaaaacaaataaaaggccatctggttttgcaacaagtatggcctggtcactttgccgggtttgagaatctgaacaattatccataagaatcaagtggaccagtaaattaatacctagtttacaaattggcggcagattccgccctttgcttctcatttcatctgcttcttcttttgtaagcccttctggagcttccttgatgagttttggatatacaggagtagcaggtttccagagcatcaggggatagcgaggacgagtccgtgggtcataatgtcttcctcgatatagaaaaacaacgccacctactcggtgaatgacctttcctcctgacttttcctcaaggtgataacagagattgttcatatcaacagttggaacgcctcggcatctaactttgcagacttcctgccgcctccaatgacaatgtatcatttccaacatgttgtgagtcaagccatctcttccaatgttgagctgtcggttgtgcgagatgtgaggcttgacgagcgcacgcacctcggcgggggtgagcggctcgccgagcacctcatctctagtcccccgtcgccgccgacaacccaagaaccacgccgagcagccttccgaagacctccatcatgatcccgtgcgggctcaccgtctgcgccggctcctgcccgagcggcgtgtgcagccgcacgccccggcggcgcgccttctcctccttggtcagcagcggcgccttgcccgtccaaggccgcggcatggtcggc

SEQ ID NO: 25018 - DNA, 326 bp, Setaria italica
  Peptide Sequence Number=SeqID_90992
agaagaacctctcttggtagctaactgctgccctgcctataggacagcgatcttacgccatgagatcgatagtagttcttctcctcctcaccctcctcctcaccgtccacatagcccgagctgacgagaagcagtctggggacaaggcgcatggttctgactccaagaaaggtgatcaggactcccagggaggcgatgcagggaaaacctccagcaaaggtgacaagaacgaccacgaaggtgacggcgggcaaagctccaacaaaggtaacggtgataatggggttgggccggtgaagaaaccacactgcaaaaagccaggccat

SEQ ID NO: 25019 - DNA, 301 bp, Setaria italica
  Peptide Sequence Number=SeqID_90993
gtccggaaagaacaccgttctgcaagccagcattgaggaaaaggttaggctggatagtctccaccatcctcaccaccaactgatgcctggacctctaggaataggagtgactctggtgctgatgatacactctgcacacttagaggctgcaggcagtcatcagggtccagcgagaggatacggatggtgttatcataggatcctacagcaagaaatctggacctttgcctaccctcaggaacgggcgcaatggccaggcatgcaacatcgccagacatgtcctgcttctccacctccatga

SEQ ID NO: 25020 - DNA, 268 bp, Setaria italica
  Peptide Sequence Number=SeqID_90994
ggtgtggtggcggaggaggacggcggatctcgcgaaggaggcgaggtcggcgtcggacctggcgcggcggagcgggaggagcgcgcgcggcgacgcggcggcggcggaggagagcgggcagaggtgcggggacggcgggaacctggcggtgcgggagcgagggaggcggttggcggagagggaggcggagcgggtcaggcggggggaggtggcttccatcgcttgtcggatgtcgtcaggcggcggggccgattgatcgatgggctgg

SEQ ID NO: 25021 - DNA, 562 bp, Setaria italica
  misc_feature (540)..(562): n is a, c, g, or t
  Peptide Sequence Number=SeqID_90995
tagttaagtaggacaaagactacaagggacccaaacgtagactaaaataccaatagaagttcaaggatgggtacatgatttcttctggtcatcctgtcaacctatatattgactcagctgtgaggcatgttctcctgagacagggtgtgcttggtatcaaagtaaagattatgcttgactgggatcccaagggaaagcaagggccaatcatgcctttacctgatcttgttacaattcaccccccctaatgaagaggatgagctcatgaggccccttgcaccagaaatcccagttgcttgaagtaaaaatgtttaggtgaaccaatggttgtgatccagtttttgcgttcatgtaatgttcgttattaacgttgtcacaagttaaaaagagctatacttttaaaagttccaaactaattggtctaattgcaatgaatatataatttctgcttcttttctcaatcttgttggaggtttatatggcgcatgaatatatactgaaatatattgttggcaactcatcacataatttaggtgattnnnnnnnnnnnnnnnnnnnnnnn

SEQ ID NO: 25022 - DNA, 984 bp, Setaria italica
  misc_feature (942)..(945): n is a, c, g, or t
  Peptide Sequence Number=SeqID_90996
aggggtttttattcccgcctctctcctgccgccgccgccgcaccgtcggcccctcctccatcccttctaccaatggcgaccactcacgcgatcagcaagaagcggaagttcgtggcggatggtgtgttcttcgccgagcttaacgagatgctcacccgcgagctcgcggaggacggctactccggtgtcgaggtccgtgtcacccccatgcgcaccgagatcataatccgcgccacccgcacccagaacgtcctcggcgagaagggtaggaggatcagggaactgacttctgtggttcagaagcgcttcaacttcccggagggcggcgtcgagctctacgcggagaaggtgaacaaccgcggtctctgcgccatcgcccaggccgagtccctccgctacaagctcctcggtggacttgctgtcagaagggcttgctatggtgttcttaggtttgtcatggagagtggcgccaagggctgtgaggttattgttagtggcaagctcagggcccaacgtgctaaatccatgaagttcaaggatgggtacatgatttcttctggtcatcctgtcaacctatatattgactcagctgtgaggcatgttctcctgagacagggtgtgcttggtatcaaagtaaagattatgcttgactgggatcccaagggaaagcaagggccaatcatgcctttacctgatcttgttacaattcacccccctaaggaagaggatgagctcatgaggccccttgcaccagaaatcccagttgcttgaagtaaaaatgtttaggtgaaccaatggttgtgatccagtttttgcgttcatgtaatgttcgttattaacgttgtcacaagtaaaaagagctatacttttaaaagttgcaaacaatggcaatgaatatattatttctgctttttttctcaatttcttctaaaaaaaaaaaannnnaacctaagaaataacttaagttaaacaaaattaacaaac

SEQ ID NO: 25023 - DNA, 551 bp, Setaria italica
  Peptide Sequence Number=SeqID_90997
atctagcagaagctaattcatccttcccattcattgtgaaaccacaagtagcttgcggagttgctgatgcccacaatatggtttgctttttgtcattgtatttatattcttatacgtgttgggccatatgctaagatcgttttctgaatcatcacctcttatcatcatttccatggagaaaaagtattcccatgtgccacaacattaaatccaaccttctaaaattcagagtttggctttacttttcctcacgcagctgaatcatggtttttgctgtgtgcaggcgttagtttttcaaattgaagaatttagcaaccttagtgtgcctcttccagctgtactacaggaatatgtcgatcatggatccaagattttcaaattttatgtaattggagacaaagttttccacgccgttaggaattcaatgcctaatgcaagttttctgaagccatcttcaggaggagaacctcttacattcaatagtttgaagactcttccggtggctactaaggagcagcaactgcaaacgagggtgcaagacagcaaatcgg

SEQ ID NO: 25024 - DNA, 1086 bp, Setaria italica
  Peptide Sequence Number=SeqID_90998
tagacaaaggaagaaggacgacaatttaccccaataatatcctagtaaggatggtcttatctttgttcctctctcattcgaacttcctttaagttcacaactgcaagaagttgatatggtcctccacaaaataactgatgagattgtcaagattgatccaaactgctccatcgattttccaaaaggcatctcattttctgcaggaatgtctgaaattataaggtttgtggaagagcaccctgatttttgcatcatcgatccatttagaaatatttacccgttgcttgatcgtcttcaaatccaaaatatcctagtccaattacaagaacttggcaccgaaggaaagccaaaacttcgagcaccatattctttgaaggttgataactttcatgatggtgaattagataagcatctagcagaagctaattcatccttcccattcattgtgaaaccacaagtagcttgcggagttgctgatgcccacaatatggcgttagtttttcaaattgaagaatttagcaaccttagtgtgcctcttccagctgtactacaggaatatgtcgatcatggatccaagattttcaaattttatgtaattggagacaaagttttccacgccgttaggaattcaatgcctaatgcaagttttctgaagccatcttcaggaggagaacctcttacattcaatagtttgaagactcttccggtggctactaaggagcagcaactgcaaacgagggtgcaagacagcaaatcggtggatactgatttagtagaggaggctgcaaaatttctgaaggaatcacttggacttacgatatttggattcgatgtcgttgttcaagagggcactggagaccatgtcatagtggacctaaactatctcccatccttcaaagaagttcctgattctgaggcggtgcctgcgttctgggatgcaatcaggcagacgtacaagtccaagagagggaaggcgcaaacttagttcaaggcttcccaatgagtgaatcaacctgatagagtactaagacaagattgtctcttagagaaagcaggcgagtttgtgattgcactattgcaggcagg

SEQ ID NO: 25025 - DNA, 1004 bp, Setaria italica
  misc_feature (988)..(988): n is a, c, g, or t
  Peptide Sequence Number=SeqID_90999
ttgtttacttaaggttctttttcttggtaaaattggttcacgagttcacactcctttggatatataccacttcttgcaaaaagtggggattgttctccaaatgaattaatgttagaatggggtcgagcaagttcttgtttttatgtgacttcaagagttgacagaggcttaatttctgagcttcagaatcaccactggagagttgtttctgtaggtgatgaatgcagcatagaggtccctggggttttaaatgttggaaggcttcaggagttacttctcactttggctactttaataaaaagggaaataggtgcctcgtctgttcttgtaattgggtatgtaatgaaacaatcacgtgaggaggactttgcaaggagaggcgcatttcccatatatcctagtaaggatggtcttatctttgttcctctctcattcgaacttcctttaagttcacaactgcaagaagttgatatggtcctccacaaaataactgatgagattgtcaagattgatccaaactgctccatcgattttccaaaaggcatctcattttctgcaggaatgtctgaaattataaggtatatcactaggccctacttagatttgaaggaagtaatttcgtgggcgtgtatgtgagtatttttctaatgcttaccctagtaattatgttatggcaacaattgtttgaaacattgctgtgactctgtattatttctacatagtttctggtgagctatctttagcctaccaactttctgtaatcaacatattgatttaactatcagaggaagtcagctttctgaaattgttttccagaacactgttaaatcccaacctatcagaatgctgtaaagaagctttaactccatagcccaacttttttgtgcattgaccaattaggagtggagattgcctttgccttggtaacaacttgctgttcccaaacataataaaaaatgtaaggacaataacttgctgtatacttgtntgatgttagttctgca

SEQ ID NO: 25026 - DNA, 220 bp, Setaria italica
  Peptide Sequence Number=SeqID_91000
ccgaaagaaggaacccgaatccgaatctcggagcccgcgcaggccaatcggggtcagcgaggctacagctacgccacggcgaacggctctgtaggagcctgcggcatggtaggatctttgctgaagctaccgccgcatgggatcaacagctagcggactgaattgtctgaaaaggaggtgctccgagcttaaactgcagtgatcagacagaaagatcgcg

SEQ ID NO: 25027 - DNA, 452 bp, Setaria italica
  Peptide Sequence Number=SeqID_91001
tcaggtccgccgaggtgttcgaccccgccaagaaccggtggtcgttcgtggccgagatggccgcggcgatggtgccgttcctcagcgcggtgcacggcgggcggtggtacgtgaagggcctcggcgcgcagcaggaggtgctgagccaggcgtactcgccggagaccgactcgtggtccgtcgtgctcgacggcagggtcaccggctggcggagccccagcgcgtgcctcggcggaaggatctacgccgcagactgcaaggacggatgccggctgaggacctacgacgatgctgcggacgcgtggaccacctgcgtcgacagcaagcagcaccgggggagctcccaggcggcagaggcagccgccatcgtcgtgctccacggcaggctctgcgtcgtccgcaacgacatgagcgtctcggccgtcgacgtcgcagccggggcggggaacctg

SEQ ID NO: 25028 - DNA, 1714 bp, Setaria italica
  Peptide Sequence Number=SeqID_91002
ccgccgtcgccgtcgccgtcgcaggtcgtcccggccccggtcccgccgtaccctgcgctccccgtgcgggcggtgtgcctcggcgggtggctcgtcaccgagggctggatcctgccgcccctcttcgacggcatccccaacaaggacctcctggacgggacgcaggtgcagttcaagtcggcgctgcgcaagacgtacatcaccgccgaccagggcggcggcggcgccgtgctggccaaccggacgcaggcctccgactgggagacgttccagctgtggaggatcaacgagacgacgttcaacttccgtacgtccggcggccagttcgtgggcatcggcgccagcgacggcatcatcgtcgccaccgccaccgcgccggcgctgccggagaccttccagatcgtgcgctgccccttcgacaagaacagggtccggattaaggccgcgaacggatacttcgtccaggggatagcaaccggcgaggtgatagcggactacggcgagccgacgcggtggtccgactgggacgcgtcggtgttcctcatgaccaaggtcgggcagcagctgcaaggggagtaccagctctgcaacggctacggcaccgacaaggccgcacccgtgctcagggaccattggagcacctacatagttgaggacgatttcaagttcatcgcatcaagcgggctgacagcagtgaggattccggtagggtggtggatcgctagtgacccgaaccctccggctccgtatgttggaggttccctgcaagccctggacaacgccttcaaatgggcagagaagtacaagctgggcgtcatcatcgaccttcacgcggctccaggatcacagaacccctgggagcacagctcctccagagacggcacgcaggagtggggaacaacggacgccaacatcgctcaaactgtgcaagtgatcgacttcctcgcatccaggtacgcgacgagccccagcctgttcgcagtggaactgatgaacgagccgctggcgccccgggcgacgctggacagcctgaccaggtactaccgcgacggctacaacgccgtcaggaagcactcgccgacggcgtacgtggtcatgtcgaaccggctggggatctcgtcggcgaactcgacggagctcctcccgttcgccggcgggttccagggggcggtcatcgacgtgcactactacaccatgttcaacaagatgttcgacaacttcaccgtgcagcagaacatcgacttcgtcaggaccaacttctccggcgagctcgccgccgtcaccacccagaatgggccgctcacctttgtaggagagtgggttgcagagtggaaggtgccaaacgcgacgaaggaagattaccagaagtacgcgacggcgcagatgaacgcgtacggtcaggccacgttcggatggtcgtattggactgtcaagaatgccaataaccactgggatctggagtggatgattaagaatggatacataaatttgaaaggctaggactgatgatctagcctgcgtgatgacctataagtaagtgtgaaggcgaattagttggcgttagattattggagtctctgatgacatcagaataggcatcaggggcgtcggagatattgtatggcaaagttcagtgcacatggctttgtaaaattcatcctatatgataaggatctgtcgataattgtgtacccaagccctcgcggcgacattt

SEQ ID NO: 25029 - DNA, 326 bp, Setaria italica
  Peptide Sequence Number=SeqID_91003
gcctcagggagatctgcgaatgccatgtgattctgaatggcgtctgacagtggttgaagcaggagtcgatgaacagcccccagttgctcttgcattgagcaaccttcaaagcctcgacaaattccttcctgaattcattcattgcctcgatttgtgtggaagtacagtttcgaatatcagctttgcaacgcgaccatgactgtccaggatcagatccgcctggcgccactacatttcctacctgatatgaatcgtaaccagagttccggataaatggtgggggtgcttatactcttaataagctcagcaaggaaagaaacactcta

SEQ ID NO: 25030 - DNA, 417 bp, Setaria italica
  Peptide Sequence Number=SeqID_91004
atgttcaaaggcgagatgtcatgcagcttcagtgattccttggtgtagagtcgatcgaaggttgcagagagaccggactgcaccaagcgatgggcttcgtcttggttacgcaccaggtgtcttaggcagctaagccggccggggtacgggggtgcaacgtctacgcacaagttgtagggcttccaaacttcgtctactttacaagcgccgtcaccgccatcagatggctgtaggctgccatggtcggcctggcggacatatagcattgcggctcgtaggtactcgtgaagcgaatcgatctcacccttttctgctggacctgaagagtcgtcaacgaggctgttgatgctcactctcttcaggtcccatggcttgcatacgcatttggtaattccacacaagaacaaagcagtcctg

SEQ ID NO: 25031 - DNA, 295 bp, Setaria italica
  Peptide Sequence Number=SeqID_91005
agaaagttcaatcatgttgtcaaaagcaggctgaggtggtaaaggaatcatcgctatacttgttctccaaaagttgtgctcacacaattcagaccactgtaatctttctgccggatctttcatgagtaagcaatcaattagattttgtaaagaccttgatggattatcaggtaaaggtggagtaggatccgaaattatagatttgactaactgtgtaaattctctacccacaaaagggggccttcctgtatagcattcatacaaaacacaaccaagtgcccagaaatcagaagca

SEQ ID NO: 25032 - DNA, 246 bp, Setaria italica
  Peptide Sequence Number=SeqID_91006
ccgtcaagctgaactgcttccaagtcagctaagtagtggaggctaccactagtgcaacactggtgttacgcaaattgcaagtgtcttcattcttcaaggccttctacttccaaacatgaacaatgaatgaagtacactgcgtgtgtcgttgcatctgtctacttgtccccctcctcctttgatgctttcctaagacttaatatgacacctccgctaagacaggtggtaacgagagcaagcgaagct

SEQ ID NO: 25033 - DNA, 568 bp, Setaria italica
  Peptide Sequence Number=SeqID_91007
ttttttttttactatgcataggtgataaattcatttgacatctcaggtcagaagcattagctacaaggatgaaatataatgaataatttcatatgctgtaatatattaagcttgagcatactattgtttaagttacactgtaaattgtggttttgatgcccatcatgttcagaatatactctatgtgctaccttaagcaacaggcattacaaggaccggattcctatgtttttgccctgcagtctttgattgaccactgacccaaaaccgtttggttcagaactaaactcatggaacttccagattaggatcaggcaccaatgtcatgccttgatcgcgtctgccattctcagccgtcaagctgaactgcttccaagtcagctaagtagtggaggctaccactagtgcaacactggtgttacgcaaattgcaagtgtcttcattcttcaaggccttctacttccaaacatgaacaatgaatgaagtacactgcaccatgggaaaagaacagtttcgatgtaagtaccaatatatctaggaacgggaaaaagatttccactctgcaagg

SEQ ID NO: 25034 - DNA, 686 bp, Setaria italica
  Peptide Sequence Number=SeqID_91008
aaggacaatacaaaaaccaacaaatttaacagtgtaacttaaacaatagtatgctcaagcttaatatattacaaggaccggattcctatgtttttgccctgcagtctttgattgaccactgacccaaaaccgtttggttcagaactaaactcatggaacttccagattaggatcaggcaccaatgtcatgccttgatcgcgtctgccattctcagccgtcaagctgaactgcttccaagtcagctaagtagtggaggctaccactagtgcaacactggtgttacgcaaattgcaagtgtcttcattcttcaaggccttctacttccaaacatgaacaatgaatgaagtacactaagtcctcgtcagtttcaaacatggttgatacttgacacgattcttgctcactgcaatcagagcggcgtttaaaggatggtatagaatctacatctagaatttgcactaactaaactaaaatgtttattataggtattagcaatccaatgcttcatgtgaggtgatgtaggggtttcagcatgatgatggttcagcacaaagtttggcgaggttatcacaaaagtacactctgtaggtaatcctgttcgcaacagcatctgaccagatcacctcgacaaaccctctggaggcgttacatgcaccatgtcatgtgtagctaacctgtggaacta

SEQ ID NO: 25035 - DNA, 646 bp, Setaria italica
  Peptide Sequence Number=SeqID_91009
tgagcacatagagtgaccgcaaacctacatggtaatagttccatcaagttagttctcaacattgtacagaagtgcagaaaaactgcagtatacacaagatttagaccaagcagatagcaaatccaccactatggcggaggtggttcttgtaaaaaattttaagctaacaaatgctaatagttgtataccaaaaaaaaaaaacagactgaatttttaccagaaatagcaaaaatatttgatgatagtattataagtggatcccttgtgacgccgaagactgctggaattgagtcaatctgtggaacacaaatgttaacctatacacttggaggtcatgacagagaaaataaagtacatgaaataacgtgggaaggagcctacagcaaaagcaatatcactcagctcaatcactgccaaagtcaagagtaatggtgtggcctgcatacattgaccaaaagaagaaccacatcttcaggaacatatataactttacgaagaattgaatatagaaaaattccatgaaattatccacccaactatgcatctgtgttgttgtaaaaagaagcttaatgatggatgttgaaatagtaacaaactaaaacaatggagaatggataaaaattgcaaattcccggacatagtcatt

SEQ ID NO: 25036 - DNA, 1530 bp, Setaria italica
  misc_feature (1)..(46): n is a, c, g, or t
  misc_feature (1476)..(1476): n is a, c, g, or t
  Peptide Sequence Number=SeqID_91010
nnnnnnnnnnnnnnnnnnnnnnnnnnnnnnnnnnnnnnnnnnnnnnttttagttttttttttttttttatttaaatgaataatttcatatgctgtaatatattaagcttgagcatactattgtttaagttacactgtaaattgtggttttgatgcccatcatgttcagaatatactctatgtgctaccttaagcaacaggcattacaaggaccggattcctatgtttttgccctgcagtctttgattgaccactgacccaaaaccgtttggttcagaactaaactcatggaacttccagattaggatcaggcaccaatgtcatgccttgatcgcgtctgccattctcagccgtcaagctgaactgcttccaagtcagctaagtagtggaggctaccactagtgcaacactggtgttacgcaaattgcaagtgtcttcattcttcaaggccttctacttccaaacatgaacaatgaatgaagtacactaagtcctcgtcagtttcaaacatggttgatacttgacacgattcttgctcactgcgtgtgtcgttgcatctgtctacttgtccccctcctcctttgatgctttcctaagacttaatatgacacctccgctaagacaggtggtaacgagagcaagcgaagcttctgttggaatatgatagccaaaaaagtcaaagaccatctttgtcccgatgaagcccaaaacaataccaatagaaggctgtagatactctaattcagccatgctttcagaaatgagcacatagagtgaccgcaaaccagaaatagcaaaaatatttgatgatagtattataagtggatcccttgtgacgccgaagactgctggaattgagtcaatagcaaaagcaatatcactcagctcaatcactgccaaagtcaagagtaatggtgtggctttccctaagccatcttgaatagtgaaaaaccgatcaccatcataataatcagtgactggaatgaacttttggcatgttttcacaatgaagttatcggatagatcagattcttcttcttcttcagcaaaaagcttgtaagaagtgaatagtaggatcaaggccaacagcagattcaccgcctcaaatttctcaatggtagctattccaaggacgatcatcgcagcccgaaagaccactgctccagcaataccataagaaagcactcggttctggtattcctttggcactttgaaatacttgaaaaccagaacaaaaacaaagagattgtccaccgacaaactctgttccaataaatacccagcaaaatactccgatgccttttcagatccatccctcaaggcgatgctaattccaaagagcactgcagcgagaatcaccagtgtaacccttctaatggccgaacctttcccagtcatgctggactccagtacaggctccgtgcccttgttagtttgagcacgtggtggagtagaatttaccggctccttttcgganctgagcgagacgccttcctcctgctcggcaccctggcgcgccgcctccgcgtcc

SEQ ID NO: 25037 - DNA, 399 bp, Setaria italica
  Peptide Sequence Number=SeqID_91011
tgtgttgttcctgcaattccgtgatggacttgaactccagtttaagggtcctcaagtttgagcaatgtcatgttctgaaggtctttcccctctttgagagctggaagaaattaaaaattgagcgcaagtcatggttgccctgtgttaaggaacttaccatctgtgaatgtccccatttaatggcaccgaatcctctaccaccttctagtaatgtttgtaaactacacatcgcaagagtttcaacactcccaacgatggagggatcatccagcgaaaaactggtaatcggagtacaaacttggagagaatttgataagaatggttggctgacggacctggatgacagaaattggagaggaattgataagatgattggctgacggagctggatgacagaac

SEQ ID NO: 25038 - DNA, 570 bp, Setaria italica
  Peptide Sequence Number=SeqID_91012
ctttttcttcgtcgtcgaagaagacgaggcccctgtcggcgtcggaggtcggcccggcgtcggcggggacgaatgcgttgtccagcgactggtgggggaagtacttcttctcgaggcggtagagcatgcggtagtgcttgtccttctcccacggcatggcgaaggtgtcgtggaagtagagcgcctcctcgcgcgcgtggagccgcgggaagtccaccacctccggccggagctcgacgaactccgacgaggaggacgaggagggcttggcgccggcgtccgggtccgggaggaggcggctgcggcgcttgcggaggtaccggcgcttggcccggtcgagcgtctgctcgtctggggcggactgcggctggcggtcgccgccggcgtcggaggaggatctggggggcttggggtcggcggggcggtggacgatgagatcgtagtagagcgggtagggagtcgcggtgagcgagaggaagcggcgtgggagacggagcagcggcgacgaggaggatggcagcagcgccgccgccgccgccgccgccatggctcccggtcgaggcatgagtt

SEQ ID NO: 25039 - DNA, 256 bp, Setaria italica
  Peptide Sequence Number=SeqID_91013
aacctccccagcagcatgcaaatgcaacaatgatagcaactacgaatgtggagaagtttgacataaagtgacccatctgaagaaagtaaggaagcttttttaagttttgttaccatcaagtatgtttgggttagtgaatcttgcagagttgcagtgggtattctaaagggaaaattaataccttttcaccaattgcatcttgtattacactcatgtggttggttgctccaagcaatgatgtttgcagtggacaagt

SEQ ID NO: 25040 - DNA, 323 bp, Setaria italica
  Peptide Sequence Number=SeqID_91014
acatgatgatggagaggaggattttggtgttgttccatattcaagtgagagtgagtggagtgatgaggatgttgtgttgatcgcattcggggatgttgagttaccggtgactggcaagagccgggctgagggagcgttgactgttgttgcccataggttcgccacaattgacaaagggcataagaagagcaacagttttatcagcacttgctggatttctatttgcaccagtcgctgatagcttgaagatccaacatttccggaggagaggaaaatctgtttctccctcaagtagaaagccaaccccagcaatgggaggattg

SEQ ID NO: 25041 - DNA, 408 bp, Setaria italica
  Peptide Sequence Number=SeqID_91015
ggcctctagtggccacttattttcattatttaaggaatgtcatttattaatttgcagatactggaccaagaaaccatgatacagagagcagttggtacactttcagtttatcggacactcaacctttttacactgctcatgaaggaatgtattctattagggtctttccgtaaaccgtcaggataacatatgccactgctaacatccaggccatttggatttagagcagaagcagcttggcaaacattatctgcgtgaaggcctcctgctaatagccagccgttcttgctttcagcagatggcattctgaatttctcccagttgaaccctttgccactgccaccccttgcactgtccactaaaaaccagtcgacaacatactcttcacttggaggagctatttgtatt

SEQ ID NO: 25042 - DNA, 226 bp, Setaria italica
  Peptide Sequence Number=SeqID_91016
ttgtcgtgggacgggctgcacatgacggaggccgtgtaccggatcatggcgcgagggatcctcgacggcccgttcgccatgcctcccatcatgtccagatgtaagaggggcatttaattttttaccactgcatgcgataatgttcacttagcccctctcacattcactcctctcacgtagtggcaaatctgttgccactgaccccctaatagtggcaaaaaattag

SEQ ID NO: 25043 - DNA, 1254 bp, Setaria italica
  Peptide Sequence Number=SeqID_91017
tttttttttgtctgaaaaaaattgaaataatataacttacacatcatacaaaaatattgtggccttgtattgacgccagaggcatcactttaaggttctttgactattcgcccctcctatacatatctactgaaaattgtaggatcgtggcagttagtaattttagtgttcaaagtagttactggaaatctcgctgtacatagagctgcacagcctctatcgtctctctcaggcaatgtgatcacttggaaatgaggcaaaaagcttcataggggttccaccttctttacccggctgtggtcatctcaatagggggttgtagagcacatgcacgagcaatctgttccattggtgcctctttcaaacaggcgtttgttacggttagtcaacaactttatcagtggtgcttttagggatacttggcgccatatctcattgactggtccattcggatcttcatactcaaagaattgttttaccttttttatttctctctggtactccagaatcctctctgaacttactcttcgtagcattgaagttaagtatccaggttgtacggccttgcttgtctcaacaaatattgctatgttactgtagtctataacatcttcaaatggtagctcgatgtgatcactcactataacaggaatgcataaactgacaagtgcatcaaacaatctgcacgctgagggggtgtctccagcaggatggaggcaaaattttgatgagtgcattcctcgtgtagctgcacgccgactctcccttgattgtgcgccatgttttatggttacatcttcctctttctcaagaatttggaaaagtgcatcacggaccttcccaccctccttgcggtagcgattgcccatgaagaacagcaatgagggccgaccatctaccccgacatcacccttgaaggagttgattcggtgtgagtagggcaggatgacatccttgacgagggacgcctggtcgctgcgcaaccggccaaaatcagagaccaggagtacagcattgctaatccggtcgatcaccttgtacagcgcgttgggatcctggcagatgaaaatatgatccctccccctgtgctgctgccagtacggctgcagctccagccacgccagcagctcctcctgcatggcctcgtcactgtacgctgccgccaccccagaggcgttggccgccgccgggggtcggatggggttgacaacgaggctgagggaggagaagaaaggcacgtagaaaaggtcggcg

SEQ ID NO: 25044 - DNA, 347 bp, Setaria italica
  Peptide Sequence Number=SeqID_91018
agtgatcacatcacagttttggatggtgctgagcctgtgtgccaccactatacttgtcctgccgaccaacaatcggtccagagcctcttgtacaaccctctcagagtgtctgtccagtgcacttgtagcttcatccagtagcaagatagcagggttcttcatgattgcacgggcaattgcaacgcgctgcttttggcctcctgacaattgaactcctcgctcaccgcaccatgtgtcatacccatccttgaggctgctaatgaactcatgtgcattggcagaccttgcagcattctcaatttcttcctcactggctattcagttccatacacaatgttctctctgat

SEQ ID NO: 25045 - DNA, 200 bp, Setaria italica
  Peptide Sequence Number=SeqID_91019
ctgggccatggaatagatatcgtaaataatgggatgcaagcaatccgtgcagttcagcagcatcaatatgatcttattctgatggatgttcacatgccagaaatggatggcctacaagccactaaacatatacgttcttttgagaacaccggctattgggacgcttctgtaaagcctgaagatgatcagatgaatagctg

SEQ ID NO: 25046 - DNA, 416 bp, Setaria italica
  Peptide Sequence Number=SeqID_91020
tgcgccatcacggccgccgccgcggactcgcccttgcggccgtctccggcggcggtcggcgcgccggcgggcgggtggtagtacagccgcgcggtctgcgggcagtgggagtggaaccgcgccgcgatgcgcacccccatgtccagcagctccacgtacttgcccatctccttcttcaaatctctctctctctgtatctgcctcttcttcaaataaatcccaaatcttctcttctcctccccttcttcttgaaattatcttctcgaacaaacaagaagggttaagagggaagctagctgcaatggcggattggagccaggttaggcgaacggattagagctgctggtgcttttcgtggaaggaggtgtcccaggcacagggcgcggccatgggagggcggaggagatgagtgctca

SEQ ID NO: 25047 - DNA, 314 bp, Setaria italica
  Peptide Sequence Number=SeqID_91021
ttttttttttgtaatcatatatgcagtacttcagtgaaaccttatttatgaacacgtactgtactcttacagaaagctatatcttgttgcatatgtacaataattacaccatgactaccaaggagtcacccttccaggcactagacaaagaggttcccagtcactgaagccgacaatgatttactaacataggtcgattctgtctcggaggtttccggtagaaactcatccgtcgaggtaacctgagaagaaataaacgtttagttcaaaactggttttcaggacctagtacaaatctatttaatattgattta

SEQ ID NO: 25048 - DNA, 797 bp, Setaria italica
  Peptide Sequence Number=SeqID_91022
gctttcctcccggctccagcaggcaggccagcctgccaaccgagcggcgcaccagccagccgccgtcttcttctaggctgcagcggagcggagatccacccggagtccccaccgcttcctccttctcctggttctacgatattcaatcagagctgttggtactgtcagttgcccctatgtattgccaccgttcttaaaactccatagtagttacttggagatcagatgcgacaaatatgcacaccaaaggggcttcttcagatgccatcagagttagcacatctagtgcccctagtacatcaagtcatggttctgcacaagatgactatgattcctcaggtgacgtgtacgtgtggggtgaagtcatttgtgacaacaccgtaagagttggttctgacacggtaatcaggtcaactgggaagaccgatgttcttctgcctaagcccttggagtccaagttagttcttgacgtgtatcatgtggattgtggagtcaagcacgctgctctggtcacaaaaaatggggaagtgtttacatggggtgaagaatctgggggccgtcttggccatggatcaagggaagactctgttcatcctcgtctagtcgagtcgttagcaattagcaatgtggacatcgttgcctgtggggagttccacacttgtgcggtcacaacggctggggaactgtacacctggggcgatggaacacataatattggacttctaggcaatggtactgatgtaagccattaggaattacctaaaaaggaatttttaaggtaagtacgtactttagta

SEQ ID NO: 25049 - DNA, 375 bp, Setaria italica
  Peptide Sequence Number=SeqID_91023
aaatgattaggattcaatggcggcgatggcgatcctcgtcgtcctcgtccccgtcctcgtcctctgcaaggtgggtaggtgcaagacccctggctccgacgttgaagaattcggtgatgacctcgagcggcagtcccttggtctccggcacgcgcagcgccacgaatgccagggcgaggcagcacacgacggcgtagaagccgaagaccccggcgaggccgacgcagttgagcatgacggggagggagtaggtgacggcgatgtcggcgagccagaaggcgagggagcagatggcgatgcagaggccgcgcacgcgcgtggggaagatctccgcgcacaggattggggggatgggccccgaaccccatgacgaag

SEQ ID NO: 25050 - DNA, 856 bp, Setaria italica
  Peptide Sequence Number=SeqID_91024
ctcctgggtggcttccctcttgctcgtgcacatcaaaaaaggcccgtacctcagcctgttccaacgaaaatttcatggttagtcctttcacatagatgcaaaaatatagtgaagaatatgctataatttggaatcatttttaacttatgatatctaatgatctcctcggtgcacgtaatggaatataagaatagggcaggcagctcatcatctcgaactcacttgaattattgattatgtaccgatcattaagcagatacttcaatcaattaacgttgaaaagccatttttgttaatttttgcagttcaaagtaggcaagttttttttatctaatggtacctagggtttcatgtaatattttgtcagctctactagaaactaatgaagcagcttatagatgataattagcaaccatttctagtttatggaatgcttataggttggttttgtgagacaacatatatcagttacatctgtgctgtcaccatctctacctttggacttaagctactaacaaaagcatcttgcctattcagtaaccatagtcaccactcaccattgcagcaggtgtaattaaaaactcaaatcaatcatttgttctaaaagatgcttaacacacctaaaaagttgttgaattacaagaccatccaacctccagtattcaaaccaatcagttcccacatcaacaagtgagttcagtagaaccacttgcatcaagaaccatatcgtgtaacttgaaaatatagcatgtgctatcttgtgaccacctaggatagtgaccacaagaaggttttctattacagcataccagtataaaaaccaaaacaatcatgaaaccaaagaagtacggttagt

SEQ ID NO: 25051 - DNA, 432 bp, Setaria italica
  Peptide Sequence Number=SeqID_91025
ttttttttgtcgcctcaacactacaaactgtttaaaccttcatgcgatgagttcaaaattgaaagagaaaaacaataactgcaggaatttatattttgaatgttattccggcagcagtgtaacatctcaattctgaagaaatcaatggcccgccctgcctttgaggatcttggaaacggcccgaatagtcgaaggcgtggtacggcagcatcctccgatgaggctggccccggcctcatgccatctcttcgcgagcgcgtcgaagctcttgtgacccaagcactcggccggcagccacctctttgctatcccgtcccagacctctccgctgtttgggtaaacagcaatcgctttcttcgtttgcttcctgaactcgcatatgatcgccctcgatgaattgaggaggagtgcagttcactcctaacaacagcc

SEQ ID NO: 25052 - DNA, 499 bp, Setaria italica
  Peptide Sequence Number=SeqID_91026
tcttcgtcctccgagtccccgccgacgacgccgacgacggcgatcggcgcggccgcccgttcacagacgctgagatgacccccatcgtgtgggagttcatcctcgcaggcaccgagacggtcgcgtgctccgtcgagtgggtgctggcccatctcgtcgcccggccggaggtccaggagaaggtacgccgccaggtcgccgggcaggaggagcaccacctccggaccacgccgccgtacctccgcgcggtcatactcgagtgcctccggatgcaccccgcgctgccgtccatcatgcgcgaggtcggcaccgaagcggcggcggccgcggcggtgggtggagcaacggcggcggcggacggcgacgcgacgatgcacttcaagctcaacgcgagcgacatcggcaggagcagggaggcgtggaaggaccccgacgagttccggccggagcggttcctcgccggcggggagggtgagggtgtggccctggttccagggcc

SEQ ID NO: 25053 - DNA, 294 bp, Setaria italica
  Peptide Sequence Number=SeqID_91027
ccttgatgttgtcgatgacggtgaagcctctcagagaattcctgtttgggatcgccccctgctcgccggtgaaggtcgacgtgtcattcaacagaaccgacgcgtcgcagccatcgacgaagcagtcgtggaagtgcatcctgagcagcgacgcccccatgcgcggctcgttgttcacggccgacgtgacggcgctcttgatggtggacagcgcgttggggcacgacgtgtcgtagaacgtcgacgacagctgcgccgccgccgacgaggccagcgccagcagcaccaacaggg

SEQ ID NO: 25054 - DNA, 581 bp, Setaria italica
  Peptide Sequence Number=SeqID_91028
aagagttgaacagtttacagcaccacctcctgcaacagatttattctatctcgaaaactaacactaactattttttagaattaccattcaagaaaaggtcatgtaaatccaattggtgtagctcaaagcctcaaaccatctagcagattgtcatacagtaaactgaggacaccgaatatgtaggagagatgcgtatcatttaattaaagaataataataaatacaaaactagtccaaacatccattccttacaacagatgcacaccagacaaattaaaatacaaccaaatagacaccacggaattaacccatagtttgcttcttctttttttgtgaaacccatggtttgcttgagctccttagaacgcaaaaaaaaaaaactatatttcacaaaagctaaaaacctataacatacatcatctatgttgttataatggaacaaagacaccaatttcatgagttgtatgtgtgtaaaaagatgcataaaatatgttctgcaagaagcaaaacatctagagttcagttccagtagtacgtgaacactctgttcataaaaagtaacaaatttatgagacccataa

SEQ ID NO: 25055 - DNA, 580 bp, Setaria italica
  Peptide Sequence Number=SeqID_91029
tagttaaagttacttaagttctttgttattgtccttactattattacttctaggtttgccacacggtttgctgagttgcatgacacctctgctagaatggccgccaaaggtgtaattggtaaggttgtggattgggaagagtctcgggccttcttctacaggagattgcgaaggagagttgcagaggatgcacttgccaaggaagctaaagaagctgctggtgagcagctgtcccacaaatcagcactagagtgtatcaagaaatggtatctagcatccaagggaactgaaggagatagtgaaaagtggaacgatgatgaatcttctttgcttggaaggatgattccaagaactacgagaactaccttgaggagttgaaggctgaaagagtatccaaatggttctcgcatcttgctgaaagctcagacgtgaaagccctaccgaatggtctttcgctcctccttaacaagatgaatccttcgaagagggagcaggtcattgatggcctcaggcagcttcttggttgaatacgaataggttagtactttagacaatacccaaaccaaaataaatagtacca

SEQ ID NO: 25056 - DNA, 4953 bp, Setaria italica
  Peptide Sequence Number=SeqID_91030
ctcttacgcgtcttccacctcctcggtggtgccagccggtgcctgtcgcggcggcgggcaggcggccaggcgcgcgccacgcctctgtaactacgaacaaagtctgaacttcagagggtgaaatgatggcagagccctaccagatgaatggcatacagaatgggatgcctaatttgaggcatccatcgtctccgtcagaggtcgatgaattctgtaaagcgcttggtggtgactcgccaatacacagtgtgctagtcgccaacaatgggatggccgcggtcaagttcatgcgcagcatccgcacatgggccttggagacctttgggacagagaaggccattctcctggttgctatggccactccagaggatttgaagattaatgccgagcacataagaatcgctgaccaattcatagaagttcctggaggaacaaataataacaactacgcgaatgtacagctcatagtggagatagcagagagaactcgtgtatctgcagtttggcctggctgggggcacgcatcggagaacccagaacttccagatgctcttaacgaaaaaggaataatttttcttgggccaccttcagctgcaatggctgcacttggtgataagattggttcttctcttattgcgcaagcagcaggagttccaactcttccatggagtggatcacatgtgaaagttccaccagaaagctgccattcgattcctgaggagatatataaggatgcttgtgtttcaactacagaggaagcagtggctagttgtcaggtggttgggtatcctgccatgatcaaggcatcatggggtggcggtggtaaaggaataaggaaggtacataatgatgatgaggtgagggcactgttcaaacaagttcaaggagaagtccctggctcacctatttttattatgaaagtggcatctcagagccgacatctggaggttcagttgctctgtgacaaacatggcaatgtggcagcattgcacagtcgagattgtagtgttcaaagaaggcatcaaaagatcattgaggaggggccaatcacagttgctgctccagagacagttaaagagcttgagcaggcagctaggcggcttgcgaagtgtgtgcaatatgttggtgctgctactgtagaatatctgtatagcatggaaacgggcgaatactatttcctggagcttaacccccgattgcaggtagagcatcctgtgactgaatggatagctgaaataaacttactagcagctcaagttgcagtcggaatgggcatacccctctataacattccagagattagacgcttttacggaatggatcatggtggtggctatcattattggaggaaaatatcagctgctgcgactaaattcgatttggataaagcagagtcagtgaggccaaagggccattgtgttgcagtcagagttactagtgaggatcctgatgatgggtttaagcctactagtggaagagtggaggagctaaattttaaaagcaaaccaaatgtttgggcttatttctctgttaagtctggaggagcaattcatgaattttctgactcacagtttggtcatgtttttgcatttggggaatctagatctttagccatagccaatatggtacttgggctgaaagagattcagatccgtggagagatacgcacaaatgttgattacacagtggatctcttgaatgcagcagaataccgagaaaataagatccatactggttggcttgacagcagaatagccatgcgtgttagagcagagaggcccccatggttcctctctgttgttggaggagctctatatgaagcatcaagcaggagctcaagtgttgttaccgattatgttggttatctcagcaaaggtcagataccaccaaagcacatctcgcttgtgaatttgaccgttactctaaacatagaggggagcaaatacacgatcgagacagtgagaggtggaccccgcagctacaaattaagaatgaatggatcagagattgaagcagagatacattcactgcgagatggtggacttttaatgcagttggatggaaacagtcatgtaatatatgcagagacagaggctgctggtactcgccttctcatcaatggcagaacatgcttactacagaaagaacacgatccttcaaagttgttggctgatacaccttgcaaacttcttcggttcttggttgcggatggctctcatgtggatgctgatacaccatatgctgaggtggaagtcatgaagatgtgcatgccactgttactgcctgcctctggtgtcattcacttcgttatgcctgagggtcaggccatgcaggcgaatgacctaatagcaagattggaccttgatgacccctcttctgtgaagagagctgaaccatttcatggctccttccccaaactgggacctcctactgctatttctggcaaagttcatcaaaaatttgctgcaagcgtgaattctgcacacatgatccttgcaggatatgaacataatattaatgaggttgtacaagatttgctaaactgcctagacagccctgagctcccttttctacaatggcaagagctaatgtctgttttggcaacacggcttccaaaagatcttaggaacgagttggatggtaagtacaaggagtatgaattgaatcctgacttccgcaagagcaaggatttccctgcaaagctgctgaggggggttattgaggcaaatcttgcatactgttcggagaaagatagggttaccaatgagaggcttgtggaaccacttatgagcctggtcaaatcatacgagggtggaagagaaagccatgctcgtgttgttgtcaaatctctatttgaggagtatctgtctgttgaagaactcttcaatgatgaccttcagtctgatgttatagagcgtctacgtcttcaacacgcaaaagaccttgaaaaggttgtacacattgtgttctcgcaccagggtgtaaaaaacaaaaataaattaatactacggcttatggaagcattagtatatccaaacccatctgcttacagggatcagttgattcgcttctctgccttgaaccatacatcatattctgagctggcacttaaagcaagccaacttcttgagcacactaaattgagtgaacttcgcacaagcatagcaagaagcctttcagagctggagatgtttactgaggaaggagagcgggtgtcaacacctaggagaaagatggcgataaatgagaggatggaagatttagtatgtgctccactggcagttgaagatgctcttgtagctttgtttgatcacagcgatcctactcttcagcggagggtggttgagacatatatacgtagattgtatcagccctatcttgtaagtggaagtatccggatgcaatggcaccgagctggtctaattgctttatgggagttctctgacgaacattttaagcaaagaaatgggcaagatgtgcttctgcagcaagtagagaatcccattgataagagatggggtgtcatggttgtaatcaagtctctccagtttctagcaactgcaattgatgctgcattgaaggagacttcacagtacagagcaggtgttggaagtgtctcgaatggtaaccatgtaaactctaatcaaagcaatatgctgcatattgctttggttggtatcaataatcagatgagtactctccaagacagtggcgacgaggatcaagcacaagaacggatcaacaaactatccaaaattttgaaggataatactattacatcacatcttaatggcgctggtgttaaggttgtcagctgcattatccaaagagatgaagggcgtccgccaatgcgacattccttccaatggtctgttgacaagctttattatgaggaggatccaatgctccgccatgtggaaccaccattgtctacattccttgagctggacaaagtaaatctggatggttacactgaagtaaaatacaccccatcacgtgatcgccagtggcatatttacacacttatcaagaacaagaaagatcagagattaaacgaccagaggatgttccttcgtaccatagtcagacaaccaagctcaacaaatggtttcctgtcaggaaatattgacaatgaagtaggccgcactcatgcttcatcatcgttcacatcaaacagcattctcagatcattgatgggagcactagaagaaatagagttacatgctcatagtgagaatgtgagatcgggtcattcacacatgtatctgtgcttactgagagaacaacaattgcacgaactaattccgttttcaaggatggctgatgaaattgatcaggatgaagcaactgcatgcacacttttgaagcatatggcgttgaatttgtatgagcatgttggggtcaggatgcatcgtctttctgtgtgccagtgggaactcaagctctggttggtttgtgatgggcaagctagtggtgcttggagagttgttgttacgaatgttactggtcacacctgcactgttgatatttaccgagaagtggaggaccccaatacacatcagcttgtctaccactctgccacagccacggctggtcctttgcatggagttgaattgaatgaaccgtacaagcctttggatgctattgacctcaaacgttatgctgctaggaaaaatgaaactacatactgctatgatttccccttggcatttgaaacagccctgaagaggtcatggaaatcaagtaatcatggtgttactgaagctaatgagcataatcaactttatgctgaagtgaaagagcttatatttgctgattcagttggagaatggggtactccattggtttcagttgaacgccctccaggcatcaatgatattggcattgttgcttggaacatgaagctgtccactccagaataccaagaaattaccccaaagtaggaccgggaag

SEQ ID NO: 25057 - DNA, 2696 bp, Setaria italica
  misc_feature (2655)..(2696): n is a, c, g, or t
  Peptide Sequence Number=SeqID_91031
aaaagaaaataaaagaaaactaaaaattaaagaaaacctaacaaaacgttaatagactagactaaggaaaaatagaaaaactaaaacaaataaactaagactaatagaatttaccccttggacaatttgaaacagccctgaagaggtcatggaaatcaagtaatcatggtgttactgaagctaatgagcataatcaactttatgctgaagtgaaagagcttatatttgctgattcagttggagaatggggtactccattggtttcagttgaacgccctccaggcatcaatgatattggcattgttgcttggaacatgaagctgtccacaccagaattcccaagtggccgggagattatagttgttgcaaatgatgtgacatttaaagctgggtcctttggtccaagagaagatgccttttttgatgccgttaccaatcttgcttgtgagaggaaacttcctcttatctacctggcagcaactgctggtgccaggctcggtgtagcagaggaaataaaggcatgcttccatgttggctggtctgatgatgagagccctgaacgtggttttcactacatttacctcactgaacaagattattcacgtctaagctcttcagttatagctcacgagctgaagctagaaaatggagaaaccagatgggtggttgataccattgttgggaaagaggatggacttggttgtgagaatctccatggaagtggtgcgattgccagtgcgtattctaaggcatacaaggagaccttcactctgacatttgtgactggaagagctgttggcattggggcttatctggctcgtttaggtatgcggtgcatacaacgtcttgatcaaccaattattttgactgggttttctgcactgaacaagctactgggacgggaggtttacagttctcatatgcaactgggtggccccaaaatcatggctacaaatggtgttgtccaccagaccgtgtcagatgatcttgaaggtgtttctgctatcctgaaatggctcagttatgttcctccctatgttggtggccctcttcctattatgaaacccctggacccaccagaaagacctgtaacatacttccccgagaatgcttgtgatgctcgtgcagccatatgcggcatccaggacagtgaaggcaagtggttgggtggtatgtttgacaaggaaagcttcgtggaaacattggaaggctgggcaaaaactgttatcaccggaagagcaaaacttggtggaataccagttggtgtcatagctgtggaaaaccagacagtgatgcaagtcatccctgctgatccagggcagcttgattctgctgagcgcgtagtccctcaagcaggacaggtgtggttccctgattctgccaccaaaacagctcaggcattactggatttcaaccgtgaggagcttccactgttcatccttgcaaattggagaggtttctctggtgggcaaagggatttgtttgaagggatccttcaggctggatcaacaattgttgagaatctgaggacatacaagcagcccgcttttgtatatatcccaatgggtggagagctgcggggaggtgcctgggttgtggtggacagcaagatcaatccggaccacattgagatgtatgccgagaggactgcgaaagggaacgtccttgagccagaaggattggtggagatcaaattcaggcctaaggaactggaagattgcatgctaaggcttgacccagaattgattggcctgaatgctaggctgaaagagatgaagaaacaaaatgccagcaactcagaaatggagaccatccgtaggagtatgactgttcggatgaagcagctgatgcctacatatactcaggttgccacacggtttgctgagttgcatgacacctctgctagaatggccgccaaaggtgtaattggtaaggttgtggattgggaagagtctcgggccttcttctacaggagattgcgaaggagagttgcagaggatgcacttgccaaggaagctaaagaagctgctggtgagcagctgtcccacaaatcagcactagagtgtatcaagaaatggtatctagcatccaagggaactgaaggagatagtgaaaagtggaacgatgatgaatctttctttgcttggaaggatgattccaagaactacgagaactaccttgaggagttgaaggctgaaagagtatccaaatggttctcgcatcttgctgaaagctcagacgtgaaagccctaccgaatggtctttcgctcctccttaacaagatgaatccttcgaagagggagcaggtcattgatggcctcaggcagcttcttggttgatcgatggttgtctttgcatcccaaccaaataatgtcctcttttttgcacataagcactcggcggtggcatatcaatcctaaactgtgtctgctctgttggatgtttgagttgagttcttgctagagcggagtgaagcatgaaatccaccttaattgggcacgagttttactgtttgtagtcatgtatttagctgttttaaccttgtaattagttgcgtggcttttctcaaggcgatgtcatacagatacaacagatatcctgatcaagtaattatttatttttcaacccaaataatatgcgattcctcctcaaaannnnnnnnnnnnnnnnnnnnnnnnnnnnnnnnnnnnnnnnnn

SEQ ID NO: 25058 - DNA, 249 bp, Setaria italica
  Peptide Sequence Number=SeqID_91032
gtcgtgtaccagaaggggctcgcgctgtcaagccagtcgaggcagagccgcaccagcggcgagatgatcaacatcatcagcgtcgacgccgaccgcgtcggcatcttctcatggtacatgcacgacctctggctggtgcccttgcaagtcggcatggcgctgttcatcctgtactccaccctcgggctcgcttcgctcgccgcgctcggcgccaccgtggtcgtcatgctcgccaatgtgcctccgggg

SEQ ID NO: 25059 - DNA, 309 bp, Setaria italica
  Peptide Sequence Number=SeqID_91033
cttaactttttaggttaatgtcgatagtgtggttgctggcaccacttggcctacccagctccctccgggctagacagtcgagtgggatccctccttggacggtgagggcagggatcattgatgtcatgatcggctttgtcatgatatcgtgtatcaacgtttagcttcctcttgttttatttcatctggttgaacctcgcaaacttgtttgaatttcgaaaaactctgatgtaataaattgttgaactatgttaatgtgatgggaatgttgcaatctctgtgctactcaccttcatgtgagcaatgctt

SEQ ID NO: 25060 - DNA, 296 bp, Setaria italica
  misc_feature (12)..(12): n is a, c, g, or t
  Peptide Sequence Number=SeqID_91034
tcgcggcagccncgggggcactggcgggcgaggatggagcacgtgggctccgacccttgctcgccatgggtgttgttgtagcagctcacgtaggtggggggagagccggggctcatgtacacggggatcacgttcgggtccgacatgatggggttgttcgggtccatcggctgggcgcccaccgccgcgacgaggaagacggtggcggcggcggcgcaggcgagcagcgcccggacggaggccatggcaatctggttgaagggtgaggccgaggatgagacgatggcaggtaaagg

SEQ ID NO: 25061 - DNA, 483 bp, Setaria italica
  Peptide Sequence Number=SeqID_91035
gtcttctagctaagtgctgtgcagccgctggctgtgtactgtgctgtgcagcggtttgctcctccggtcttcctcactgcttcgccttgctcgtttttcacaccggtgttggtgatcaatcgcccggtgggggagtgaccgggcttctttgatttctgatcaggccggatttcttcgtcacgagggggaggaggaggagggggggtgctccgtttcttgctccagtccgttggagagatccaatcaggattgagccggccttttgtgcttgcttgccgagatattttcccccacaaagtttgttgcttggaaccgatttgagccaagaaagcgccgaaaggcgccgcaaatccgttaccatcccagaaaatcccaaaacacctcgtcctatttgatcgctggcgacgcagctcgatccatctgagccgaggaagcagcagccgccgccgtgagggaggggggagggggggaggaggaagagga

SEQ ID NO: 25062 - DNA, 329 bp, Setaria italica
  misc_feature (4)..(4): n is a, c, g, or t
  Peptide Sequence Number=SeqID_91036
tganactttcatagcaaattgaattcatatgagtgctctatactagcaattcagttacatgtaaaagaaagcaaaacaaggtatcatataagtaaatttcttgtttgtttattaggaatattgcacatttaattaccatgcgaacaactattgaaatatatctatgacaatatgttgattgattggtgctcttgttttgtctaaatgaaacatgtactctcgttttagaatagaaaaaggacagtttgtttacagtggtgaagcatgtcataccctttatcatctatgattgagcattgccagacaacggaaaatgatatgttatctta

SEQ ID NO: 25063 - DNA, 338 bp, Setaria italica
  misc_feature (48)..(48): n is a, c, g, or t
  Peptide Sequence Number=SeqID_91037
tagaggcctctgttcagagcacggaggacattgtcgaggagccgaagngggaaaaatagtactggagcttcgagattgtgatgggtcggagggagcactggggatcgagccgaacgaagcgagcgatctgggagggcgagaggccgaaatcacggagcccggcgaagcgcggggctagggtccttcaacctcgcagacaaggagtggcgggtagcgggcgacggcggcggcgatgtcgtgggccgagaggccgaggccggagaggaaggcgagcacggcgtcgggcttggaaggggacttgagatgggagagcgccttggccttcgacaccttccggg

SEQ ID NO: 25064 - DNA, 412 bp, Setaria italica
  Peptide Sequence Number=SeqID_91038
aggggggaaaaattctcatttaaaagcataagcatgtagtttagtataatctgaactacccattagattggaacactgtatatttttgaggttcatgtattccttaagcattttatacagtagagatgcattaaaaaaatccagagccatggtctattagggcgatagtgctacagtaaaggcaatataaacaaaatacaaaattgacttgcatgatggtatttctgcattgaggaaaataaacatatatcacagaccctcaacaatctacagaatctagaaagaaacaggaaggtgacggcttattgcagcagcaacatgcccttgctttttgaaacttctactaagaaacacgaagatgtcattataagatggaatcatggttttctcagcctgcgtgagaaggtcttat

SEQ ID NO: 25065 - DNA, 264 bp, Setaria italica
  Peptide Sequence Number=SeqID_91039
gcggaaacaaggaacgaaatcaaaagcaccgatcaacctcgtccgtggcgcaaagacgagcgcgcgggcggtcgcgtgggaacctttaagcgtggcgcgcgatgtctttaaaggcggccacggcgtggggcgtggtggtgcggcgagggggcgctgggcgttggcgagcggcctttgtacgtggctggctgcccccgtgagggaagtgaggaagagagagagagggacttgacggcgagtgagctcaggtggcgtacgccctcg

SEQ ID NO: 25066 - DNA, 286 bp, Setaria italica
  Peptide Sequence Number=SeqID_91040
gttggaagcgttaccttgattatcttatcatgtcgctatgtagcgaggagaaggtgttcagggagatggagccactgcttctgcagatattgcgaattggcttttttgaaattctcaagcttgatgtaccagcttatgctgccgtggatgagaatgtaagtcttgctaaagtagctttaaggcctggtgctgggaacatggtgaatgcaatcctgcgtaaacttgtagtgctaaaggagacaaactctcttcctcttccaaagatagaaggtgatgatcgtgccca

SEQ ID NO: 25067 - DNA, 432 bp, Setaria italica
  Peptide Sequence Number=SeqID_91041
acgtgttaacgtgggccttgagatggtgatggagccatcccttctaatcctggatgaaccaacttctggcctggacagctcctcatcacaacttcttctcagagctcttcggcatgaggcacttgaaggcgtgaatgtttgcgctgttgttcatcagccgagctatacattgtacaacatgttcgatgacttgatacttcttgcgaaaggaggattaatggtttacaatggtccagttaagactgttgaggactacttcacaacccttggaatccatgttcctgaccgcgtaaaccccccagaccactacattgacattttggagggcattgtgaagcctgactctggcatcaaagcgaagcacctaccagtgcactggatgctatacaatggctatgaagtaccaagtgacatgcaagatgatgtcaaagg

SEQ ID NO: 25068 - DNA, 257 bp, Setaria italica
  Peptide Sequence Number=SeqID_91042
tatcttgagggacaaaaataatgttttgaagttagttgaggccatcgatcccattgttcgaaccattgatggcattgtaggagagagtgtctccatgagagtagacttgcagtattcaaatggccagaatattcttggattatttactcatagaaagctatccatatcggtcggttatgcagcagctgcatttgttttagcgattcttgagggcaacacacagccaggcgtctggtttccggaagagccagagggaa

SEQ ID NO: 25069 - DNA, 406 bp, Setaria italica
  Peptide Sequence Number=SeqID_91043
gagggctcttgttcctgcggcggcgatggcggcgcttgtggcggtgtccgccgtgatggaggcggcggcggcggcgacgacgtacacggtgggtgcgccggacgggctgtgggacatgcagaccgactatgcccagtgggtcaagaccaggaccttccaccccggcgacaagatcagtgagcttctcttctttttttttccttctttttggtcctggtgtacgtggatcttctgtatgtactgtctgatcatatcctctgggacgacgtacgttgcagtgttcacgtactcgccggagctgcacgacgtggtggaggtgaccaaggcggggtacgacgcctgctccagcgccaacaacatctccgccttccgctccggcaacgacgtcgtcgccctcgccgacgtc

SEQ ID NO: 25070 - DNA, 315 bp, Setaria italica
  Peptide Sequence Number=SeqID_91044
tgactgtcctccatcatttgtatatggggacgagggctcttgttcctgcggcggcgatggcggcgcttgtggcggtgtccgccgtgatggaggcggcggcggcggcgacgacgtacacggtgggtgcgccggacgggctgtgggacatgcagaccgactatgcccagtgggtcaagaccaggaccttccaccccggcgacaagatcatgttcacgtactcgccggagctgcacgacgtggtggaggtgaccaaggcggggtacgacgcctgctccagcgccaacaacatctccgccttccgctccggcaacgacg

SEQ ID NO: 25071 - DNA, 328 bp, Setaria italica
  misc_feature (21)..(21): n is a, c, g, or t
  Peptide Sequence Number=SeqID_91045
cctgcggcctcacgggccacngcgacagcggcatgaagatccggatcgacgtcgtgtccgccgccgcgcctggcccagccgccgccgccgccgggccgtcctcctcctccgcgtccagggccgcggcggcctcttccgccgggatcgccgccgcctgcttgctcctgcagcacgccgtcgtcatcgcgcggctgctttggtagccatacccatagcttgtttgttagacgcgtcttaatattgtgcttagacgtttggtgttgctatacattacgtacttaattgtgtacgtagttttgttttagcctgtacacttttgttatttcaa

SEQ ID NO: 25072 - DNA, 519 bp, Setaria italica
  Peptide Sequence Number=SeqID_91046
ctgccaccgccggcgccggcttgacaccaaaactcgcgtcagttgcattgatgtagcccgacggattgttggtagagtggaggtacttgaagagctggacgcactgcgagtaggagcagtgagccgccgcgacgaggtgcgggtccgcgagcacggaatccccggagccggcgtcgttgcagaggaccatgccgaggccgcccgcctgcttgacaacgagccccttctcgaccctgccgttcactcctctgacgcagacgacgatcttgcccgtcactttggcagggtccagggagccagccaagcacagcgacgagttgctggtaggctggtatgcggcgttggcagtctccccgctgattattggatacgcctggccgaggggcagagtactggccccaagactttgccccttaatggcgaggttgtcgccgaatctgacgtaagccgggaagtccctgtccatggtgctggcaccaaccgtgaacatccacggggccacgttggtcaccgtgcccg

SEQ ID NO: 25073 - DNA, 413 bp, Setaria italica
  Peptide Sequence Number=SeqID_91047
gtctcctcgaagagaatcacaccactcaggcacgggagggcaccagggcagcagaagaggagctcacggagggcacggcggttctcctcaatgttctcaacgttgatgcttgagagacgcttgccaatggtgccagtggactcatcagctgcaaggatacccttgccaggggtgccaatgtaggcagcgttcttgatgagctcatctgtaaaatagcaagcacaaatgtttagctaaaaagtagtgcagcacatattgacaaatcacaatcactacacacaagaatcagtccactctaaaaggtatgaaacaactatgccacaaacatcatgaccagggaataaagatagcatggtataaaatggttcatttgatcagctaacatagatggaactttcatatctcaaatccag

SEQ ID NO: 25074 - DNA, 612 bp, Setaria italica
  Peptide Sequence Number=SeqID_91048
cgtatattaagtagttcgttggtgttaattaatatacgaaatgtaaaggtaacgaaccatcatccacaaagggaagcaggttcaggttttcttgatgtccggatatatgctctaaggagcaaaccacactcagcaacaggtccgaaacggataccgcaaggagaggcagatcagtacttgtagtccttcacgtggaggctctcagagacaccctcgccggcggcagcgtcacccttgtatgtgccgagggtagcctcagagttggccttgcacctggcgaggaaggccgccctagccttctccacgttctcctccttgccagcccaggccttgagggtgctcgcctggagggcacggccgaaagagaaggacagggaccacggcttcttggtgttgagctttgtttctattggtcgtttctaggttcagggtggcctcctcctcgctctgtccacctgagaggaagacgatggcgggcacagcagcagggacggtcctctggagggtgcggacagtgtactcagcaatgacctcaggagtcaccttcttggagtcagacccaggggtcaccatgtcctccttgagggtaccctcctgaagcccaactaatta

SEQ ID NO: 25075 - DNA, 682 bp, Setaria italica
  Peptide Sequence Number=SeqID_91049
gagatcctcgtcgatggctctcatgacattgagcgctgtgcttatgtctctgaggtggtccttgcagatgatggcatagcgagcaagaccctgagcgttcaggtcaatggcaagctgcgatggctcattggggccgatcttgaggacagcacgccacttggcaaagcgggcaccagcctcgtagtacttggcgcagcgcttgccaaggtcatcatggccctgggtggtggtctccttgtcagtgccagcaacctcaatggtgcccttgtcgaccttgatgccgggggagaacacctccttccttgaggacatcgacgaagggcttgccatccttggtcttctggtacagggtctcctcgaagagaatcacaccactcaggcacgggaggggcaccagggcagcagaagaggagctcacggagggcacggcggttctcctcaatgttctcaacgttgatgcttgagagacgcttgccaatggtgccagtggactcatcagctgcaaggatacccttgccaggggtgccaatgtaggcagcgttcttgatgagctcatccttgtacttgccgcagtaggccgacatggtcgatgctcggcggggaggcgtacggggattgcggaggggagagttggggggaggggatgggtttggcaggcggatggggacggggcatgagcaga

SEQ ID NO: 25076 - DNA, 1455 bp, Setaria italica
  Peptide Sequence Number=SeqID_91050
ttttttggacataaaatgtttttttcccattatataaccagagcacgacgacagaagaaaaagtggctgctcgatttaccgtcggcaggaccgagattacacagattggcaccaaaaaagactaatatatgaatgtaaaaagtaaccaaccatcatccgcaacgggaagcataagttcaggattattaaaaccgagtttcgatgtccaaacatggagctcagacgggcaaaccacactcaacctaaatcatcgtaggcaggtccaaagggggaggcagatcagtacttgtagtccttgacgtggaggctctccgagacgccctcgccggcggcggcatcacccttgtacgtgccgagggtggcctctgagttggccttgcacctggtgaggaaggcagcccctggccttctccacattctccaccttgccaccccacgccttgagggtgctcgcctgaagggcacggccaaaggagaaagacagggaccacggcttcttggtgttgagcttgttcattgcgttgaggttcagggtggcctcctcctcgctctgtccaccagagaggaagacgatggcgggcacggcagcagggacggtcctctggagggaacggacagtgtactcagcaatcacctcaggggccactttcttggcgtcggagccgggggtggacccatgttgggcttcaggagggtaccctcgaggaggacatgatgctcgttcagagccttgtagcaggcagcaaggaccacctcggtgatataagcgcagcgctcaatgtcatgcgacccatcaacaaggatctcaggctcaacaattggcaccagaccgttctcctggcagatgatggcatagcgagccagaccctgagcattcaggtcaatggccagctgcgacggctcgttggggccaatgttaaggacagcacgccacttggcaaagcgggcaccggcctcgtagtacttggcgcagcgcttgccaaggtcatcatgaccctgggtggtggtctccttgttggtgccagcaacctcgatggtacccttgtcgaccttgatgtccggggaggacgcctccctcattgaggacatcgacgaagggcttgccgtccttggtcttctggtagagggtctcctcaaagaggatcacgccactgaggtactggagggcaccaggggcgcagaagaggagctcacggagggcacggcggttctcctcgatgttctcgacattgatgctggaaaggcgcttgccaatggtgccagtggactcgtcagcagcaaggatacccttgccaggggtgccaatgtatgcggcgttcttgatgagctcatccttgtactttccgcagtaggccgacatggtcgatgcgcgcgtgagagcaggctacgagggaatcgggaggggagagatcgggggaggacgaatgggttggttggttgctctgagacacgcaa

SEQ ID NO: 25077 - DNA, 943 bp, Setaria italica
  Peptide Sequence Number=SeqID_91051
aggcatctgactgtttgcatgaatctgtgaattgagcagggatggcattgcaaggccatcttcagtattccgtataaccaaagaagaattctctgcattaaaccatgaacttgcgcagagcaaatctctcttttccttcggagaattgtacatctttcatttgcctcaagtagagctctttgtgctttgcgatatgctctaagagcttccatttcttcaacttcacattttcttctgtgttcctgagcatcctccaattccttctcttgaagttcctccatttcaaggagcgagaacaatcttgtgctccggcattctgcgcctatctggttgctacagttcatctggtgggcattctcctctccaggtttcaagtgcggcctcctgtctaacactgctgaaggaccaacaggcaatacctgttgcccagcttgggcggaagcagcaggcatcaaagcactagtatctttagaaataatttgtgtattagtcaatgttgctgctgcaagcctgccattcaactcaatcataggatgatttccagcaacttctgacctttgtggtgaggaagattcttagttgcaccaccattgtgcatctgacctgaaagctctgttgtgactctgacctctgtttcatcaacattagtgttcatggtaattccatttgcaaagtgatcccccatttcagaagattgcagagtgttttccttgatgaaccaccactatgtgcaagtgttaccgagtcactgtgatcttggttgtaggaatgctgctgattgagcttcaaccttttaattggtcttccatcatgttcaaacggactattagggcgtgaacattcaccattgttggaagcttcaaaccctatcttttctgatggcagccttgcctggttggaggacaaatctgtattcttcatagcaacaggggctaaaggtctt

SEQ ID NO: 25078 - DNA, 936 bp, Setaria italica
  Peptide Sequence Number=SeqID_91052
tatttaaaaaacgatcatttaaatgtagcaaaatttgagcctgatcttggtttggatcctgttctcgatctcgttcttgttggatctgaatggcaattcaaaatccaaagtcgagcaagcatgtggcaagacaatctggtggtaacatcaacacgttccgtggatcaggatgttctgtcacctagtgaggctgcaaaggtttttgagtcacagcttgcagaatcgttattagaaggtgacggacagcttgcattcaagaagcttgcaactgcaacgcttgaaactttgatgccaaggattgagggcaagggtgagtttggacaggcacggtggcggcttgtttatgctccgcagatcccaagtttactatctgtggacccaacagttgatccactaaaatcactggcaaacaatatctcttttgccacggaggtggaagtgcagcttggaaaacgccttcaggcctctgtcgtcaggcaaatgaaagattcagaaatggcgatgcagtggacgctgatatatcagctaactagtaggctccgtgttctcttccagtctaccccatccaataggcttctcttcgagtactcagccacatcgcaggattgattcatttttgccattgcatgcagcaagaacaccgggcgtagcagctgtgctacacaaagattaggtcccctgattaattgtttttgtagatatgcaagttttgacaaggagctgtacgtgtacatttgctctgtggtagttacattctttctcggaaacaaagtttctgaggctgtaaataataggtagcgatcttagcgtcggttgtaaagaaacacatgtataaacagaaatgctatgtaccgggcgtccgatgcgagctatgcacatcggacgcatgtagcacactggctaggcaagggcattgatgataacaaatcaccggac

SEQ ID NO: 25079 - DNA, 2375 bp, Setaria italica
  Peptide Sequence Number=SeqID_91053
ggggggagtggatggatgggactagaggttcctggtgctgaagtagctgaaatgcttcctttagcaaggcttctttcacgaagtacagacccagttattcgttctagatcaaaggaactttttatgcaatgtctgcaatctgttgggttcaatgctgaaagtcttcgtgatcagctaaaggcattagaaatgtatcatgattggttggacgacgacacaatggaagatataacacttcctggcttagctgaactgacaggctattggcgtggctctcttgatgccagtgggggtggtaatggggatactatggcagattttgatttcagtggtgaagattgggaatggggaacttacaagacccagcgtgttctcgcatctggttcattcagcaataatgatggcctgcgtcttgataaattgtttattcagaaagataatgccacccttcatgctgatgggtcgattcttgggccactaacaaatcttcactttgctgtgcttaacttcccagttggtcttataccagctttagttcaggctatagaatcatcaaccacagactccattcattttctgaggcaatggttgacacccattaaaggtattttgcacatggagggagatttgaaaggtactcttgcaaaaccagaatgtgatgttcgaataaggctgcttgatggcactattggaggcatcgatcttggaagagcagaagtattagcttctgttacccctacaagccgtttcgtatttgatgcaaatttcgaaccaaccatacaaaatggacatgtaaacattcaaggtagtatcccagtcacttatgtagacagcagctcgacagaggaaagtctggaggaggaagatgggaaacaaggtatcataagaatccctgtttgggcaaaagacagaggaacaccgaatgagatcagtgaaacaagaattgtgagagacaagacggaggagggctgggaatttcaattagctgaaagcctgaaaggtttaagttggaacatgctagaaccaggtgaagtgagggtaaatgcagatataaaggatgggggtatgatgttgataactgctttgagtccttatgcaaactggcttcaaggctatgctgatgttctcctccaggttaaaggcacagttgatcagcctgttgttgatgggtctgcaacatttaaccgagcgattgtggattctcctttccttcggacaccattgacaaattttgctggtaccattcatgtcatatccaacagactatgcatcagttccatggaaagcagggttgggaggaaagggagattgtcgatgaaagggaccttacctctgaaaaatagcgagccatctgccaacgacaagattgatttgaaatgtgaagttctggacatacgagcaaaaaatattttgagtggccaagtagacagccagctgcaagtcacaggctcaattttgcgaccagatgtctctgggatgatccggttgagtcacggtgaagcatatttgcctcatgataaaggcaacggtgctgctgccactaggttggcgtcaaacaagtcaagctatcttgtttctggttttgaacaatcaaccacttcgcaggatgtctcacgcattctggggtcactgtcaacatcaccagacagggaacaatcggacacagaaaggactcttgagcatggaagctttaagccaaacattgatgcccggctaaatgacctgaagcttaccttgggaccagaattaaggattgtttatcctctaattttgaattttgctgtcagcggtgacctagagcttagtgggatggttcatccaaagtacataagacctaagggtatcttaacatttgaaaatggtgaggtcaacctggtagctactcaagttagattaaaaaacgatcatttaaatgtagcaaaatttgagcctgatcttggtttggatcctgttctcgatctcgttcttgttggatctgaatggcaattcaaaatccaaagtcgagcaagcatgtggcaagacaatctggtggtaacatcaacacgttccgtggatcaggatgttctgtcacctagtgaggtgagtctgctacaatgagtaataataactgagtgactttactgtaggactgataataccttgctttggtttcaaattttcaactattgcacaataaggtgacactgcatatgtttatgtacctcttgctgagtgtctgctcattccatttgagacgactgcaggaagattagagtcattgaagaattggcttgctgcactatttcccccatcatatgttaatatggagctcgtaaacctgctttctttgtcttttaggctgcaaaggtttttgagtcacagctttgtcagtaatt

SEQ ID NO: 25080 - DNA, 299 bp, Setaria italica
  Peptide Sequence Number=SeqID_91054
ccccggacgccgccctcctccggtatggtcccctccttgggcttccccccgccgagtcgcttggcgagggtggcctttatgtgcttggccggtgatggcggcgggaagggccgcttgaagaacctcctgggcgtcgacctcgccggcgacggcgacacccccgcggggagcgggcttgcccctcccgcggggtacgggctcggccaggcgaccccgggcgtctggtgcaccggcgtggtcgatccggacttgcggcgcctcggcgtgccgggcgcggtggcctgcgcctgctgcggcgg

SEQ ID NO: 25081 - DNA, 459 bp, Setaria italica
  Peptide Sequence Number=SeqID_91055
atgtaaccgagaccacttggctgtgaagaggatcatcttctcttgaaatgagctgctgtagcgacaggatggcaaatgatgcagcaacaataggatccacgtttaagtgtggggtttcagccatcccagttttaccttctatttttgcttcatagaaacatacagcagcttgcgtgggtcctggatgagctgctattacaccagttggtatccgatagtcaacatgcatggcaaaaatggcttcgacaccatcaagagcaccttcttttatcatatgagatgcaccagcaccaccttcttcagcaggctgaaaaaggagtctcactgtccccttgagctgatccttacgctgactaagcaactttgctgcccccagcagcatcgccgtgtgcacatcatgcccacaggcgtgcatcaccccgtccactttgctcttatgctcccaaactaaccaaacta

SEQ ID NO: 25082 - DNA, 847 bp, Setaria italica
  Peptide Sequence Number=SeqID_91056
agaccgcccttaaccaacctctttaacccttttctgtagacggtaaaggccttcagtagtgatgcttctcaaagtacccccaaattcaacaattgcaggggtggcatcaagggcttttccagctttgacatatgtaaccgagaccacttggctgtgaagaggatcatcttctcttgaaatgagctgctgtagcgacaggatggcaaatgatgcagcaacaataggatccacgtttaagtgtggggtttcagccatcccagttttaccttctatttttgcttcatagaaacatacagcagcttgcgtgggtcctggatgagctgctattacaccagttggtatccgatagtcaacatgcatggcaaaaatggcttcgacaccatcaagagcaccttcttttatcatatgagatgcaccagcaccaccttcttcagcaggctgaaaaaggagtctcactgtccccttgagcttggtaaccacctcgcttgtacttaagtctttgtaccacaaatcaatatctattaattaatccatgtacatgtatatgcaaaccaaaaaaacttgtgggaatttgaaatatatgtagttaagcaaagtatttgatctagtttcttaagggaaaatatctggtcttaatattgctctacagaattaagctaacttcatgcagtcttgcatcagaaaattcctatctacaagattagatttaggacgaaatcaagttccacaaaagcatctgccttcactcattcagaggcaaagaaactcaatattaggatagaaaaacaaattctaggagctgctcctacagtcagtaatcaggaaatacaagaagaaattaaaaaca

SEQ ID NO: 25083 - DNA, 1362 bp, Setaria italica
  Peptide Sequence Number=SeqID_91057
gtctgaaatctgaatttacatagttgcacaattctttggcagaagcatatggggcactcgtagtttgaaaccagttatcagagaaaatgcaccagttttgcgcggtaatgctatgtatacttatatattgcccattttaaacccatctgttcgactcaagaacatcaatgagaccgcaagtcccctcctccgttcagagcatatgcctcagagagatacagttctgctatggcagtatgcaaagctgccccaattggaatgacatcctcatcaacgaagaaatgagggttgtgagctgagtgaacggagccgactttctcgtttctaattccgatgccaaacataacgccaggagctagctgctggtagaaagcgaagtcttcccccgccatgatcttctctccgggattcaccttgtccgggccaagcaagcgcctgccgacatcctctacatggtgatgcagcttccaatcgttcacaacagcagggtacattgggtactcttcacccttcatgtcgacagttcctttgcatctatgcaccacagcctgcccttctactacctctttaacccttttctgtagacggtaaaggccttcagtagtgatgcttctcaaagtacccccaaattcaacaattgcaggggtggcatcaagggcttttccagctttgacatatgtaaccgagaccacttggctgtgaagaggatcatcttctcttgaaatgagctgctgtagcgacaggatggcaaatgatgcagcaacaataggatccacgtttaagtgtggggtttcagccatcccagttttaccttctatttttgcttcatagaaacatacagcagcttgcgtgggtcctggatgagctgctattacaccagttgttatccgatagctgctattacaccagttggtatccgatagtcaacatgcatggcaaaaatggcttcgacaccatcaagagcaccttcttttatcatatgagatgcaccagcaccaccttcttcagcaggctgaaaaaggagtctcactgtccccttgagctgatccttacgctgactaagcaactttgctgcccccagcagcatcgccgtgtgcacatcatgcccacaggcgtgcatcaccccgtccactttgctcttatgctcccactccactaattcctggagcgggagcgcgtccatgtcggcgcggagcgcgacgatggggagcgcacccgagccaacatcagcgacgacgcccgtcccggcgacggcgcggctgctgatcccgaggcgctcgagctcctcgcggacgagggcgctggtgcggtgctcccggaacgcgagctccgggtgcgcgtgatgcgcgccgacaggtccac

SEQ ID NO: 25084 - DNA, 575 bp, Setaria italica
  Peptide Sequence Number=SeqID_91058
ggggctctgcgccgctgcgtgcttcttcctctgcttcacggacagtttcctcgacgccagggggaccgtgcggtacgcggtggccacgtactccggcctgtgggtcatcgacggcacgccaccaccgccgcccgaggaagccgccgggaaacggctcaaattcatcgacttcttccacgcgttcctgtcgttcatcgtcttcatgtccgtggccatgttcgacaggaacgtcggcgcgtgcttcaacccggtcatgtcctacgacaagcagcaggtgctcaccgctgtgccgcttgccggagggttagtcgggacgctgctcttcgccgcgttcccgtcgacacggcacgggctcgggttcccaattcccgccgcctgagatgcacacattctagctgtgaattatcggctgatttccctgtgttgcgtcttctgttgtcagatgtttgtatcattgcttgggatattccctgacgtgcattttctgcatctttagtttgcgtaagtagtagtgcaagcatattgtacgatttatttcagtattccaaatttccaagtttggcttggtgtgacga

SEQ ID NO: 25085 - DNA, 453 bp, Setaria italica
  Peptide Sequence Number=SeqID_91059
tctgaacatgaagggattggcatgcagtagaacaaaggacttttactaaggctaccttgaaccttgctgctgatctcaacacaactagctaaaactacagcaaacctgatccatcactaatccgcccggggcggcccggctggattgagtgaggtgaccatattatcagaggccgtggcggccgtggtgcctgtggtggtggtggcggaggaagaagttcatcatcggcgacggcgccggagccggggatggaaccggagggaagaacccggtggcgttgaacactgtcgccggtagcatggccggggccggggccatgggtggcggcgcgaagggagccgccggcggggcggtgaggtgaggcgggcactggtagcacttggcgaagaggccgaacgtgttgacctgctgaacgaagttggtgatgctggcccagccgccgaagccgaagcc

SEQ ID NO: 25086 - DNA, 416 bp, Setaria italica
  misc_feature (6)..(6): n is a, c, g, or t
  Peptide Sequence Number=SeqID_91060
acacanagggggctaaaatgagcaccctcctttgttctagccatcaatgcaagtacatcaagggttccaaacttgtaacattgtccaaactgatgccagataaacacaccaggagtgcatgaataataaaacagcactgcgagtaatctggaagaacttcactgagaggaaactggttgagcaactgacgaagtgaccgtgaagcactaatcttaccttctaaactcccttccttaagcactctagtcaaagccaagacaatattatcatctaaagcttctttagcaatctgtgcatctgataagagatttgctaatgcagcaaatgctgtttcagcaacaacaattgatgatgtcttcgccatctctataaggggtcgcacatcaccttcagttaagcatgacatcttgtttttg

SEQ ID NO: 25087 - DNA, 293 bp, Setaria italica
  Peptide Sequence Number=SeqID_91061
gagcgagcgagcttcagttcagtgagccagtaggcggcgagagccgagagaggcggcagcgagcggcgccgcccgtttcgttgtccagtaggcgaggagctctggtggcccgccatggctcgcctccgctgcctgttcgtgctcgccctcctcgtcgtgcagctgcccggcgacgccatggccgggcgcgggcaccacggccccgccgcgcacgactacagggacgcgctcgccaagtccatcctcttcttcgagggccagcggtcgggcaagctgccgccatcgcagcgcca

SEQ ID NO: 25088 - DNA, 383 bp, Setaria italica
  Peptide Sequence Number=SeqID_91062
aactacagcgactggtcagccgcacacccggtcagcgtcggcgacaccgtcggtgagcttgatcacgaatcctggtctctatgtcggcgaatttttttggctctatgctgtatctgtctatctgatcgagacgacgtacgccggcgatgacggcggcatggcgaggtatgcagtgttcaagtacgcgccgccgcacaccgtggcgcagctgtcgtcggaggcggcctacaaggcgtgcaacctcggcagcaaggtgttcttggacagcagcggcggcaccggcttcacgttcgacgagcccggcacgtggtacttcgcgcgcgtcacggggtcgcactgcgcccggggccagaaggtggcaatcacggtgacgggctccagcg

SEQ ID NO: 25089 - DNA, 234 bp, Setaria italica
  Peptide Sequence Number=SeqID_91063
ccttgtactgtccgatggacgcgccatgggagacggcgtagtcggcgagctcctcgaaggtgcccgaccggacgacccggatctccaatggcccgatggagccgtccgccacccggctctgccggtacaccgagttcatggcctcctccatctccaggcagcaccggcccagcacgtcaccgtcgtcgtccacgctctcgccccgtcgccgaccgaccactcagctcccacgta

SEQ ID NO: 25090 - DNA, 261 bp, Setaria italica
  Peptide Sequence Number=SeqID_91064
ggggaggtgcagatctcacggcctcgcgccacaccgccgaaaagggcatggacatcgactgccgctgcgcgcttctagaatcttctggtccattcgattcgcgagggaatcccgtaggatcgagcgggacggggggcggaagcttggttggaaggaggaagaggggaggaggaagatgatattgctccagtccccgtcgaggttcctgctccagatcctgcaggaccgcgtcctcagcggcgaaaagggcatggacatcga

SEQ ID NO: 25091 - DNA, 422 bp, Setaria italica
  Peptide Sequence Number=SeqID_91065
tttggagctactgggtcttgcttttaccatgtcccgtgatgtgttgcttcataaatattacctttttgccttacagtaggtagtggaagcatatttgagtggttattttgttcctaggatctcattgggcgattttttattcttatgctgattcggccgagacttggtagattccttgtgccttgcatccactagccacacatatggaccatacttattcttatggtgattcggctgagacttggtagattccttgtgccttgcatccactagccacacatatggaccatactcttgtgccagcagatcagaaatgccaaactttttattggaggaatttagtttactttgcatgacgaatctctcagcctggagggtgtggtcttgttatgtgccaacaaaacagaaggttttcatggcca

SEQ ID NO: 25092 - DNA, 1250 bp, Setaria italica
  misc_feature (1216)..(1250): n is a, c, g, or t
  Peptide Sequence Number=SeqID_91066
gctgcttagctcatcagccgctcaggccggccggctcgaataatccttccctcctccataggaccaaagctcccacctttcccctcgattccgaacgcccgctggattccgcgcaggaaccacatcgctgatcccgctcgtccagatttcagctgctccgtgcgcagccgattggggacttctttcactgaaaattcttttggggtcattatctgaactactagcatgggggctgtacttggacgccaggacacccaaaagcggagtttccatggttcaaagctggaggcaaagatggtggatgccatgcagcagagagcgtcacatggaacttcactgaaatcgttcgatggtattgtcatgaagtttcccagaatcgatgagagttttagaaaatgcaagactatcttcgagcaatttgatgaagattccaatggtgaaatagataaagaagaactgaagcattgttttcaaaagctggaaatctcattcacagaggaggagatatctgacctctttgaagcttgtgatataaatgaagatatgggcatgaagttcaatgagttcattgtctttctgtgccttgtttatcttctcaatgaaccagctgtctcagaagcaaagataaagatgggactaggaaatcttgaggcaacttttgagaccttggttgatgcatttgtcttcctggataagaacaaagatgggtacgtgagcaaggatgagatgatccaagcaataactgagaccacaacaggagagcgctcatctggacgtatagccatgaaaagatttgaggaaatggattgggacaagaatggcatggtgaccttcaaggaatttctgtttgcattcactcgctgggtagggattgatgaaaatgaggacgacgatgaatgaggattgcaaagggtggtaattcgtcaagtgttaggaccagatcagccctaaagaggctggaaatgaatgacagataaaagtagttgatgtccattggttgcttgttgatcatggtggtcatgttattgttaatagaatgtctcatcatattcctagtaggatggttcgcatgtctgagcaccgatatcaatggtacagttgctatctgttccttattacagtttacaggtactagtaggtaaaaagaaaagaaactcttatgtcagtctcttgtttacagaacttaatgacaaaaaggaaaaaaaaaaaaaaaaannnnnnnnnnnnnnnnnnnnnnnnnnnnnnnnnnn

SEQ ID NO: 25093 - DNA, 569 bp, Setaria italica
  Peptide Sequence Number=SeqID_91067
gaatccagacctgaaaggtgactgtcctacttccatgatccagctgaaccaaaacgtgccatcatgcctcttgcattttcaattggcaacttgctgcaatatttagagtttcggtatcagtttgatttgcataatgccaagtgtacttccaatccatgtttctgaacaaacattgaccagttctatctaaagaacaaacctcatgaagaccacaaggaaattgggtccaacgtgtcaggaccattctgcctgagattgtgcagtgagttatcaattgtaatggtcattaggaaatccaatttaaaagtatgaactgggtcctcagattgttcatgcacattgcaattgtatctgataatctgaatgaccggattaaacattttcagcagtccatactacttgctcgacagcatcatatcacttcttcatttggcagtctggatcactggcatctcatgtgaactccatttcgttgcttcttacatggacctacaagattgcaactaggcatctagctgacaatatgataggcatgttcttggaccagagctcagaatatgtagtgctga

SEQ ID NO: 25094 - DNA, 1257 bp, Setaria italica
  Peptide Sequence Number=SeqID_91068
ccaaccgacttttacataccgaatttaccctcatacaactagtacattctaggaatatgctgtacatttcagtaaagaaagaataacgagtcacgcgttacacaccgcctgggtcacgttcgcaaacgccgcctgaacatgacccctttcttccgcaccttcactcggatgacccttgaacgcgccttggatccttgactgcgaacgtgcccaggaccttcgcaccctctccttggaattgccttgcaccttcgctccgcctgattgactccgcacagacaacgaatgctccggatcttcgccaatgacccgacgaagttgagcggcaaatgaatgacgttagggatgaacgagggtgaaattcaatccggtaggctctgcggcgattccattcccaaataatgtcgagctgagggtgatgatcaaaaaccttgatccagatccccagcacaagttagcgccagtgttcattcattgtacagatccttttctgcacaattaaatgactgctcaccattgggcaacatgtttcttcagcacaattttctgaatccagacctgaaaggtgactgccactccatgatccagctgaaccaaaacgtgccatcatgcctcttgcattttcaattggcaacttgctcatgaagaccacaaggaaattgggtccaacgtgtcaggaccattctgcctgagattgtgcagtgagttatcaaattgtaatggtcattaggaaatccaatttaaaagtatgaactgggtcctcagattgttcatgcacattgcaattgtatctgataatctgaatgaccggattaaacattttcagcagtccatactacttgctcgacagcatcatatcacttcttcatttggcagtctggatcactggcatctcatgtgaactccatttcgttgcttcttacatggacctacaagattgcaactaggcatctagctgacaatatgataggcatgttcttggaccagagctcagaatatgtagtgctgagcattgtgtagttttgattagatctctttggggacatctgtccggcacttgttggagccactagtcacaatgcttgggccactaggatatcacaatgtgcagccatactgccgtgcatcatggatcatgaggaccacatgttatatcaggtctagtttgtcagaagcagttcttccagcgatcatgcaaacgaaaagaacccattgttattttgtcttattttgtctaagtttaccttaattacttta

SEQ ID NO: 25095 - DNA, 393 bp, Setaria italica
  Peptide Sequence Number=SeqID_91069
cgtgagtatgagctcaatcttccaaattcaaacaggggacttgacgttggaagggtctattttgtgatccttgagatgtcccgtaagacttctattttctattgcattgcttacaagaggctcgtgaaacattgctgttggcaacaaattgttctcctcggttgtgatcctttcgaaaagaactgatgagcttttatttggtttcctggatcacttgttaaaatgataaaaggttttggtcatgcagctgttacatatgttgactcgagtgctgttcaagctcttaaagcttgcaccaagaatacaaagcacgtcatattcagattgccatagcgaacccaaacggcaggtgcacctgctgctgtctagatcaggcatcattgacttgatagg

SEQ ID NO: 25096 - DNA, 399 bp, Setaria italica
  Peptide Sequence Number=SeqID_91070
ccggcgcagtccgacgccggcgactccgagaccgaccggtccgtcaccaccaagtcccaagccgaaccatgactagctcagtcaggctcacggtctcacgtatagctgctactagatgcttagctagctgtacatagcggaaatttttttcgttctcttaattacggaggggagaggggtcgccggagaagaagcgcgcggaagaacgcacgcatcgatcgacctgagcagttggccggtcggcgtggttggaactggatggtcggacatacgacggcacacacgggtatccttggagcattttgtgatgatgaggatatacatagtgtgagggaaatagattggttaatttgtaaatctacggatatatatgtataatatatatgtaagttgtgtgga

SEQ ID NO: 25097 - DNA, 275 bp, Setaria italica
  Peptide Sequence Number=SeqID_91071
gggagggggagagggggaggacgtggccgagcgtgcgtgccctcatcacacgacaaggacgactggacccgacggaccatgtgctacagtggagccgcgggccggaccaggcccagctcagctttttacgcgcgccggtgggcccgcgtgtgtaccgccaccaccggatgttacggtgccgtcatgcacggtgggagagccagccaggttgacgggagcagtaaaaatctggaggacgtaaaattgcagagatttctacagtagtactccgtaag

SEQ ID NO: 25098 - DNA, 852 bp, Setaria italica
  Peptide Sequence Number=SeqID_91072
ggggtaggtacgttggccgagcgtgcgtgccctcatcacacgacaaggacgactggacccgacggaccatgtgctacagtggagccgcgggccggaccaggcccagctcagctttttacgcgggcccaccggatgttacggtgccgtcatgcacggtgggagagccagccaggttgacgggagcagtaaaaatctggaggacgtaaaattgcagagatttctacagtagtactccgtagtaaaatttcaagtctagagataaggttggagctgattagcccccggtctctctatctgtatttatttactttactgttaggttcggggagtcatggctagctggctattgaggcctgtgagggtgacccggttgcgctctgccgcatgctcctgtggatgttcttgaatgttccagcaagtgtgtgttaataacggtcattatcaagactacggaaggcttaatgacagttctccgtgtgtagtgtactaaccccttgaaaattaagttgtgatatttagaatatttggagcttaggcatccacacatctctttcaacggtcaattatttctttcttttggacaatggtttagctgaatttcaagcttttgttcctctatctaacaataagcagcctcgatgaataacttgtgtaactaggtacagactactctaaaaaagactaggtgcagacaaaatgaatcgtaagtgaacctttacctttctatccccagcaaaaaacgttctatgggccgggaaagaaatcccttctgcctggacgcctttgaaagagccaaactggatattctcttgcttttatattgttattattttccttcttcaccggaacaaa

SEQ ID NO: 25099 - DNA, 387 bp, Setaria italica
  Peptide Sequence Number=SeqID_91073
tcggcggagttggagtctgtggcggaggagctggtcggcggcggcgaggaggggaggaaggcgagggagaaggccatggagatgaaggccgcgtgcaggaacgtcgtggagaagggagggacgtcgtacgctgccacgcagagagtggtgcaggatatgatagaaagctacgcgcccaagtaaaaccagcagaagatatatgaagattggatatgaattgtcaacgtatatgtatgatcgaaaatggccgaagcctatgtgatcgcaccgcaggtaaagtagagtgcaatttcactgatcatatatgtgtttgttattacacatgcataatatgttttcctgaaatcggctcattcctatctctaaatatatatttttataataaaa

SEQ ID NO: 25100 - DNA, 516 bp, Setaria italica
  Peptide Sequence Number=SeqID_91074
caaatggaatggtaaatttgtaactaccacataaagttacagttcctcaaagggcgatgctgttgctaatcctaaaaaagctgcatcagctccttgcaatcttgacccccaagttaaacccttggcgcggcatgctgcccacaagttctctcccaaattcagactctggcaggtgctcctctactgcaagcaatgctttttgctaattctgcagttaagtcgtagcctttccattcagttcacagttatgttgtatgcagacttgtcactttaattctcatttgcatcaggatcaacatggacgaagaagcttgcagcaactatgaggtagcataagatgagcataagtcctttaaaataatttgacgtgccctcctgtagcatgaatgccaccaccagtactgttataaatagagttgctgtctcaaatagttgaaaattcaagtccatttcttgccccattatccagccaattactacacagaatggaatcacaaacatggagatctgtgttga

SEQ ID NO: 25101 - DNA, 947 bp, Setaria italica
  Peptide Sequence Number=SeqID_91075
cggtggcgccgccgtctgctgcttctgcctgccatggcctttcgtttaccacggcgtggactcgggctctgctgctcgtcacagaggtgatacacgggtcgctcctgatcgtggaaggattcctcttgcagcttgcacctctgcaggacaagtagattcaatggatactttccgcgctcctccaaggcctttgccttatgatgatcctcgattcagccctccgatggtgcaacacccaatagtgtcaggacacgacaaatcatcaacacattttcagaaacctggacaacttacagaaagaaagaatactgatattggatcaacttgcacatctcaaaaggttgatgggtcatcagtaaaacatcacttaggaggttcaagaattgatggaatacaagtctctgattcttctgacaatgaggatgactgtcctatatgcctagaagaatatggttatgagaatccaaagattgcattgcagtgcaaccataatttccaccttagttgcatttacgaatggatggaaagaagtcaagcttgcccagtctgcgcaaaggttatgttgttcaacgatgatgaatgaccctgctgaggcagagtcttcatcgatggcaaatggaaaacccaggctaaatccaatattctgtgtacatagcactgatggaatacagtcgctagattgtttgctgaaacttccagcggcgcgcaaagatttgattttctttgtagagtagagaatccatcccccacttttgtttgttttgtgccaatttacatttgatattctaaactgatggggtcattgatgttacatttccacgatgatggttacgttaggttttcatgctgaaaatcttaggttgtgcaaacctcagtttgtggctgatattcaaagtgaattaacaagaaacagattagtggccataagtggtacccctaccttcttt

SEQ ID NO: 25102 - DNA, 286 bp, Setaria italica
  Peptide Sequence Number=SeqID_91076
ggatcttttcactcaatctgataaaactccctgtgtatctcgtacatgtcgagccccgaggggagcacgtctcgaacgctctccctctccgcgcacctcctaacccaccgtaacagcgcggggcactccgcctccatgtccaccccgccgtgctgctcgtacccgtagaacatggccgagaagggcacgaaggcgacgtccagaaacccgaactcgtcgccgccgaagaacgccttgtttccgagcaccgcctccagccgtcggaggtggccgaggagctccgcca

SEQ ID NO: 25103 - DNA, 322 bp, Setaria italica
  Peptide Sequence Number=SeqID_91077
ccaaaaaaaaaagaaactgggaggataaccaacagttttcaatcaccggcacgagtcagcaagaaataaaggcttcagttcagaagcactggccacaagcattcaattgccaaggcactcaaatcacagaaatagcaattgtgcaggattggaacatcaagaaagatcgggattggcatatttttccagtgcaagtgcaggcagaaggtggctgcaaccttataccattccataggaaacgaagggttgcaatttatggtcttgcctaaagaatagcacattactgatatagaaaaagtaatgatgtaaaattgtactgctg

SEQ ID NO: 25104 - DNA, 1842 bp, Setaria italica
  Peptide Sequence Number=SeqID_91078
ctgcatgtttagtacctttattgcaatcactgatccatcatccaattctcctttgaagactttaccaaagcttccggcccctagcaagttatcatctgtgaagttgctggttgctcggacaagttcgtggtatgagatcaactgatacttatgcaagtctgtgtctgagggtactgtcatctttcttcctatattcaccttcactcttaccaacatatacaggcatgcagctaaaacaaaaaatgccaggattgcaggtaatatgacttttaataactttggttttagccgtgactgatcatggttgttctgacatggtgctattcccaggcgtggaaggccacagagtgcatcgttccccatcaatgataggagggtgatatttgagaacacacctctttctggtatctgtccatccaagctgttgaaagagaggttcaagtttgcaaggtgactgagattggtcatggtttctggaatggaaccggaaagcatgttggaggagagatccaactcttcaatactaagtaactttccaattgaatctggtagtgatccttggaaatttttttttctagaatacgcaggagagctgcgtatcattcaattaagaggaaaatccttggaataaattgctggatagattcagattggtcagcttctgaagattaccaatggaagttggaatttcacctgataactggttgcttgataaatccatattggcaacagctgtcagttttccaacatcagctggtagggaaccactcaaagagttcgatgacagatcaagctcaacaagtttctgaaggtgccatagagttgtccgtatggttgaagacagtgaattttgtgataacgccaaaacttgcagttggcttagactactgacactgcttggaatagaaccgcttagtttattgccaccaagattcaaataaactaggcttgttaatctacttatttctgctgggatggtgccagacaagctgttgctggagaggttgagttcttggagattcttcatcgcagagattgttgtggggatcttcccactcaggttgtttctactgagagaaattactaacatgttgctcagattggccagtgtactagggatgcttccagtgatcatattgtaatccgctatgaagtactgcaataccgtgctgaggtttcccatgtagggtggtagcatccctgtgaatgtattgtttgctatgttaatggtatccaggctcctgcatttggataatgctgccaggaaattgagattcccactgagctggttcccattgaaccagatgcgacggagatttagcaagttttgaaatgacactggcactggtccagttaatctgtttccaaacaagtctattatctcaaggttagatagattgcctatggattctgggatgacacctgctatttggttgtttgcaaggcctagaaacctaagatttcttaaatttcccagttctggtggaatttccccctcaagattgttctcactgacatccaaaccaagaagcgttgtttggttgctcagctcagtcgggatcttcccagtgagatcatttgttgacaggtatattttggtgaggtttggcagtgttgccagccatgaaggcacagtaccagtgaaattattcactgcaagactgagcgcttcaaggttctgacaggcggagagacccaaagggataggtccattgacctggttttctggcagagataacacttgcagcatagggaggtgaaagctctcatttccaggaattggacctgagagattgttccatccgacagccagtgcttgcagctgggacatattgaagagaa

SEQ ID NO: 25105 - DNA, 574 bp, Setaria italica
  Peptide Sequence Number=SeqID_91079
agaattaaaaatgtaccaaacagaattagaaaaccaattaaagtgcgctagaactattcaaggcggaacagagtgatactgcactttttttccataagattcttgacaccagctgctgctggaatcggagtaattagctgtcaaggacgtcgagtcctcggctggccggaccgcgactacgaagctcgtagccgtcggccgtcttctccggcgaggttatacccctcaaccgtaggctttaggagacaaggaagataagatatgtaattcttgcttaattgatctcacgagtacagcagtttatatatggccaatggcctaaccaaaacatagaaagtaaagctacgtttccatccttagtcgctagagtttgatgcaagcagcgcttgctccgcacgctcagcagctcggcgtatgtcgcgggcccgccggcgcctgccgtatgtacgcccgtacatgacatcttgtttaacttcactaccacatcattcattggtatcctttcctcaggtgcagctctcgagcatagcaaggccaactcaattatggatgccaggtaggtattcaagatgct

SEQ ID NO: 25106 - DNA, 1184 bp, Setaria italica
  Peptide Sequence Number=SeqID_91080
cttgctgatcagattgcctcgattatcacccagatgtggttgaagttgggaactgcgaactgtagtctgacttgaaactgcgaatgtagtctgacatcttgtttaacttcactaccacatcattcattggtatcctttcctcaggtgcagctctcgagcatagcaaggccaactcaattatggatgccaggtaggtattcaagatgctgaagttctcaggaagactatttgcatcttcaatgccattattcagctcatctagcactatgttactgtcaacaacatttgaaagttcatgtgggaatgcttgactaacccactgtctcaagctcaactcaccaataaacattgcatcagtcggctttttcctagtaaagacttcaaggagaactattccatagctataaacgtcactggcacgtgatgcttttcctgttgacccgaactcaggagccatgtacctacagtgccaggcatgcttgttaatgtgatggagttttcatctccaactagcagcttggaaatgccaaagtcagaaacatttgcaatcatgtccttgtccagcaagatattgcttggctttaaatcgcaatgcaggacagcttcaaagtgctggtggtgcagatactccattgccattgcaacatccagcataatgccaaccctttggaggaaactgagttgcctcccatcatttgagtacagccaatcatccaaactaccataaggcttatactcaagaattagtgctctgaagtcgagattggagcaagtactaattatcttcaccaagttccggtgccgagccattcgtagtgcacggcactcggtgtcaaagctcttcgaagctaaatcatgctgcatgtttagtacctttattgcaatcactgatccatcatccaattctcctttgaagactttaccaaagcttccggcccctagcaagttatcatctgtgaagttgctggttgctcggacaagttcgtggtatgagatcaactgatacttatgcaagtctgtgtctgagggtactgtcataccaaaaaaaaaaaaaaaaaagtggtgagattatataagaacaaggatatatgctgtattatatattgcaaggggaatttaaacttaccaggagccatgtacctacagtgccaggcatgcttgttaatgtgatggtagttttcatc

SEQ ID NO: 25107 - DNA, 361 bp, Setaria italica
  Peptide Sequence Number=SeqID_91081
gtttttagcttgcttttcttcatttattctctttcaaggtgaaggtattgttcccaggaagtcagactaccaaaatgtgattgtttttcaggtaattattatattttgcctgcacccatgccacctgcgattgttcatgtgtggctggctcacagggagagggatgagtgcgcgtacaaagagatcattatccagcttcccttttgctccattaaaaatcacatgaaggtgcaatacattgcttggttctgaagtcaaaaggagactctctcatgggcaaatggtatgtgcagtgggcttcgaacttgcagcagctggtattgtatctcaacacagtcaatatccacggctcacttctact

SEQ ID NO: 25108 - DNA, 764 bp, Setaria italica
  Peptide Sequence Number=SeqID_91082
ggaacctgacaaagtttgtcaacaaaaatagcttgtggatgggaaggtcacgggtgaacaagtttgtgctcaccaccatcttgatgttgctggccaaggaaagaaaggcttcgaaaggtacacaagggtaattattatattttgcctgcacccatgccacctgcgattgttcatgtgtggctggctcacagggagagggatgagtgcgcgtacaaagagatcattatccagcttcccttttgctccattaaaaatcacatgaaggtgcaatacattgcttggttctgaagtcaaaaggagactctctcatgggcaagtaagaaagcaggttgtgcgcattcgagtacaattgagaaatacacaaacctgatcatttttttttcaatttgagatggtatgtgcagtgggcttcgaacttgcagcagctggtattgtatctcaacacagtcaatatccacggctcactctacagtcaatattgtatctcaacattaagtgatgaagcggactgctggtagagtataaaaaagagtcactaaatttgtgatacctgaccttagttgtctcagtgtttgttcaatattgtaactcgctaacttgtttaccatatgtttgtgaaaatgcctacacagttttacttgccattgccatggacatgtgtgtgtcatcactgataaagagaaggagagtctacagggatggaagcctcagagtagagagatcacagctaatttgggagagttcaacttagacttacttactta

SEQ ID NO: 25109 - DNA, 324 bp, Setaria italica
  Peptide Sequence Number=SeqID_91083
cttgtggatgggaaggtcacgggtgaacaagtttgtgctcaccaccatcttgatgttgctggccaaggaaagaaaggcttcgaaaggtacacaaggatttaatgtcagaagcaacgaagtttcagtgtggatttgaagccagatcacttgtgtggatataacttggctcaagtgctcaaccacataaatggtggccagctgaatgtgtgatctgctacctgcatgtccaggcatgcggccatcggcctcacgggcttgtccgcattttatatattccaatcggacgtagcctgacttgtcatttgcaagattgaagcttggctt

SEQ ID NO: 25110 - DNA, 511 bp, Setaria italica
  Peptide Sequence Number=SeqID_91084
tggtttttggtcctaaaactttttcttacttcttggttttgtattttacattttaggattttgggtatgttcctgtttttctaattttttatttataaataatgcgtatctttaacctggatttaatgtcagaagcaacgaagtttcagtgtggatttgaagccagatcacttgtgtggatataacttggctcaagtgctcaaccacataaatggtggccagctgaatgtgtgatctgctacctgcatgtccaggcatgcggccatcggcctcacgggcttgtccgcattttatatattccaatcggacgtagcctgacttgtcatttgcaagattgaagcttggcttccatatacatgcttgttagtcttgaagcagctgtatattgtttttgaactattgagtagttgagatttttctggagggcacaatgatgtcttaggcaatgttgatatgatgtacatgcccagattttgattctgataaaaaaaatgttctgttcttcctgaaa

SEQ ID NO: 25111 - DNA, 355 bp, Setaria italica
  Peptide Sequence Number=SeqID_91085
gccccctccatggctccatcctctacatcaatacattactggtggctctcttggagatctggttactggttgctaaagtccatatggcatatcctatatgcattttgataatgcacaggccagtttgtgaggctatgatcaggctgcattcgtgctgtactcgtctccttaaagccagcctgctccctgtctacgatgccaccatatggatgagccgagcgggccggggccacggtatgagcgggccggccggtaacgtacggcggcggcacggcgaccatgcatggtagggcgccggcggcgacctgcccggccggcgatgagttgacccgcggagctagctcgcgagggagca

SEQ ID NO: 25112 - DNA, 2549 bp, Setaria italica
  misc_feature (2542)..(2549): n is a, c, g, or t
  Peptide Sequence Number=SeqID_91086
aactacctagaaaagactagtaaagtaggaagttagttgaaccccaagagcgcagcttgtcacgaaaaggtagttgtaatgaagcagttgctgaggagaaaagaagaactcaagtcttcagtgccagtgttgctcccaggagagttagctctgaggcttggagtgctggagagaggcaaaggcctcctttaactggaatagctcagcaggctgtggttgatgaagagtcagaaatgctactgagtcggttatttcatgattttataatctctggtgcagttaatgaggcacttcaaaagcttagagatgcaggagcgtttgacaaagagggtgagatgaatatatttgttaggatgagcaaatcaattgtaaacacattagctaaacactggacaacaaccagagaagctgaatttcttgcctcaacaattgtttcatcccttgttgagaagcagcaaaaacatgagaaattcctccagtttcttgtcttgtcaaagtgccatgaagaactcacttcaaagcaaagagctgcaatgctaactatcatggagcatggtgaaaagctttctggaatgattcagcttagggaattacataacgctctcatccagcagcgctcaagtactcatttatcacctcagttaaaaacccaagccactggtgccctttggaaccttattcagttggttggtgagaaagctcgaagaaacacagttctcttaatggatcgcgataatgcagaagtgttctatagtagagtttctgatatagaggatctattttattgcttatctcatcagcttcaatacatcattagtagagaagaacacccttctgttcagatgcaacgtgcacttgagttagcaaatgcttgcagcaccttagttcatgctgcattgcactacaggaaggagcacaaggagtggtatccttctcctgaaggactgataacatggaacagccaccttgttgtacggtctggaatatggagtttagcatcatttgttatggagcttttgggagaatttggagctgcagacatgacaatgaagtctaatctatggtctcagctggagggactcacagatattctactggaggcatatataggtcttttaactgccaaatttgaacgtggtgatgaacatggtgtgctagtccaagaatattgtgaaaggagagatgaacttctcaggtcactctacaaccttgctaaacaaatagtggaggcaaaataccaggagtcaagagatggtaaagacaatttggatctgaaagaatctatatttagagaggttatttctccaaattttggcaactgccaaacggcatgaaggataccaaacactgtggcagatttgctctgacctcaatgattcagttctcctccgtagtctaatgcatgatagtgtagggccgcatgggggattcagtttctttgtatttaaagagctagtcaacagcagacaatactctaagctgttaaggctgggtgaagaattccaggaagagctagctagttttctgaaagaccggaatgatcttctgtggcttcatgagatatgcttaaaccagttctcatctgcttctgagactcttcatacctatgctttgcgtggcagtcctgatgaagatgctagtgtcacaaccagcagaaagccactgtcctttgctgaaagaagacgtcttctttatctctctaaaattgctgcaacagcaggtaaggatattgactatgaagcgaaggttgcacggatagaagcagacatgtggattctaaaattgcaggaagaaattgttcagcatgatccagaatatgcacaagtcaaatatacaaccacattgcttgatccatcagaactgattgagatgtgcctgaagagagaccaagagctctcccttaaagcctttgaagtatttgcttcgacaagctcatcgttccgaagctccaacagaggccttcttgaggcatgctggacgaatgcaaccaaccaggatgattggctgaagctttcgcaggcatccacttcagaaggttggagcgacgaagtcatccaagaatctcttcaaggaactgtccttttcaaagcttccaggttgtgttatagccctgattcggtggtgtatgatggcacttttgaggatgtgctgcctgtgaagaaagaggatgtacatctgagaggtttggagagcaaatgcttgtcagtggaggaagtgctgatgcagcacaaggattttccagatgctggtaaattgatgatgactgcagtgattatgggcaaggaggtatcttacacagctgcagaacctgtggagatggagtcatgaaataatgtcagatttgtacgatagacttctgagtttaatcatgggaaaatttttgccttggtgacatcggacatgtggttttggtcgtatctgctctgcacagtggcagaagattatcagttcacgccattttttagcatgaactgtgacttgtaaacaggcaatcttttcgtgttagttttctggagaaaaacatatgttctgcgttaaaaannnnnnnn

SEQ ID NO: 25113 - DNA, 204 bp, Setaria italica
  Peptide Sequence Number=SeqID_91087
ccccgagctgcggcgagaggtggtggcgcgcagcgccgggatcggcggctcccgagtcgtccatcgcggttccggaaggccccgcgcgcagcaggaaccgccggaatgccggcggcgagcgcaagagccaagaggggattgggggaggcaaagccgaggcgcgccgaacccgcagctggaggaggaggagatggcggagtggat

SEQ ID NO: 25114 - DNA, 561 bp, Setaria italica
  Peptide Sequence Number=SeqID_91088
gaatggagagagtacctggggtggaagagcagaagtcagcagaacaagttgatgaagctggccaagccgatgataatacctcagtaccatggctgaagttgggtcttgatgcgccaaaaagtgaagaagctcagcctcctgctaagcctcccgaggccaaatcggtggccactcaacataggactttctcctgcaattactgcatgagaaagttcttcagctcgcaggcccttggcgggcaccagaatgcacacaagagggagaggtgtgcagcaaggaagtcgtgcactgcgagaatgatgatgggcctccctccagctgcttcctttctccaacctttaagagtgaactcccactctacagttctgaaggagcacggtgaaagagctgctgttgtcgtagcaagatttgatggaggccaaatgagtgcctggatgccttttgcaattgaagaagctggtttggtatggccagggagcttcacaacaggttcacaggaatcaaagaagcaaacagagaaaaatcttgacctgaccctgcgcttgtaaatttgtaattcac

SEQ ID NO: 25115 - DNA, 338 bp, Setaria italica
  Peptide Sequence Number=SeqID_91089
cagccgcccgacgtggtctacgagttcctgcaccttctcgcagcgcaggccctggagcgcgtccaggcggtgcggcgcgaacagctcggtggccatgatcttcctgagggcgcgccaccgcgcggagtgcggcagccagggcacggagttccttgcgtggtctccgaccgcgtcgggcacggatcggttggcgaagacggcgtcgtgcttctgcaggaactcccgcgcggcgtccggggaggagacgaccacggtggtgaccgagcccaggcggagggacatgatcgggccgtggatcttggcgaggcgggcgagggagcggtgcggctggccacccg

SEQ ID NO: 25116 - DNA, 398 bp, Setaria italica
  Peptide Sequence Number=SeqID_91090
ctgggcatgctccactagattagataggttgattaagccggcccggacctcgtctccttcatatctctctcacactcctgctggtggtgctggcaatgggagcgtgcgccacgaagccaggtgacctcaaggtcaagggagaggcgccgctggttgtggaggacgccgcggcggtgccggtggtggtggcaggcgaggagaaggcgaaggccgacggggtggtcccggcggccgccgaggccgacccggctgacgccagccgccggaggtccctcagcgacctgctcaaacaggatgcagcgactagcgatggagaggctgatcaggaggcagggaaggttgtggctgtggaaccagagggcgacgacgccggagcaacgacggtagcacaagcaacc

SEQ ID NO: 25117 - DNA, 322 bp, Setaria italica
  Peptide Sequence Number=SeqID_91091
gctatctatgcttctttgaaatgacaatggaaaaaaaaacaagctaagcagcaaaggattaacacagtaaccaatcgctgcacttgctcaatcaggatgcagcgactagcgatggagaggctgatcaggaggcagggaaggttgtggctgtggaaccagagggcgacgacgccggagcaacgacggtagcacaagcaccagtccaggcctcagccgcaaccgagcagcaggacgacgcggccggcgagctgaaggacgatccgcatggcgacgtgcaggcggaggacgaagaagagaagcgcgtcgatcctgactcggttct

SEQ ID NO: 25118 - DNA, 511 bp, Setaria italica
  Peptide Sequence Number=SeqID_91092
ctatgccttgtatgaagcataccgagatggactattatcttgtagtcttttatttctcaaaatgcatggatacttgatttcttccttattgttttctggtttggtaagtcgatttcttcttagtttggaaacttgatttcttcgtcatgttgtactcctcttgaaatatataagagcttaaatatcataccagctaatccgcaggatgataactgactctgatcctgttatatcatgtgtttgctatccagttactcaaatcagtctgtggccatgtttgcagagttgatcaattgtgtttacttgcagctattgacaagcatcactggaagccaaaagatttctatccctacgtcaattgtggtatcagggatagcaaaaatgtttgttggtgagctaattgaaacaggcaagttcgtgatgactgaaaggaaggattctggacccattaggccttgccacatcaggaagcatacagaagactgaagcttgaaggagataccacgaagat

SEQ ID NO: 25119 - DNA, 753 bp, Setaria italica
  misc_feature (726)..(753): n is a, c, g, or t
  Peptide Sequence Number=SeqID_91093
aaggccaagggccgggtccagagggagcagcaggaggatgaagacgacgaggaggaccagatggaggtcgacctcgagaagcttcccaccagcaccggcgaccccgacaagctcgccaagatgaatgctatactgtcacaatttacggaacagcagatgaaccgttacgagtcattccgaagatcaggatttcagaaatcaaacatgaaaaggctattgacaagcatcactggaagccaaaagatttctatccctacgtcaattgtggtatcagggatagcaaaaatgtttgttggtgagctaattgaaacagccaggatagtgatgactgaaaggaaggattctggacccattaggccttgccacatcagggaagcatacagaagactgaagcttgaagggaagataccacgaagatctgttcctaggctcttccgttagaattcaagcatatctgttgacatcaatcaggagtgaggtgggtctttctgaaacatgaaagtatgatgtggaacaatggccatgcatttcccttgtatctgcaagtatcatcttacatatcttgggggaaaagtgctgtgtataaagtaaaatctaggactattaaccaagtgtactgtatcttgactatcgagcaaatctgatttgcacgttccatttgggtacatttaaatgtcaaaacatgtttgtgttacaaaaaagaagtacaggtttggcttgctgaannnnnnnnnnnnnnnnnnnnnnnnnnnn

SEQ ID NO: 25120 - DNA, 1155 bp, Setaria italica
  Peptide Sequence Number=SeqID_91094
aattacttcaaccccatcccccatccgccgagctcggcggcgcctcggtcccaccgtcaccggctcaccgcgaccggccggagcgaggttgaagagccatcaacatcaagcatcagccgtagagtggaggcgtcaaggaatcacagaggctacggcggcttcgacctcccgttcggcgctccgctcctagatgaacatactcgagaggatgcgtggaggtggcgacggggcggctgccccggagcggcccccgcggccggagttctgggtggagatttcggagtccgtctcgcggctctgcagcttcgacgccgccggcagtggcggcggcggaatctctgtaaaagttatacaggattctagacctatacatgacaaagttgtcgattctttcttgaacaaatttttcccatcaggttatccatacagcgtgaatgagggttacttaacttataccaagttccgagcactccagcatttttctagtgcaatgctgcacgtgctgtcaacacagtctttgttatttgctgcaggtttgcgacctacccctgcgcaagcaactgctgtaagttggattctgaaagatggaatgcagcacgcagggaaactcatttgtagcagcatgggggcaagaatggattccgagccaaagagttggcggatacttgctgatgttctctatgatcttggtactgccttggaattcgtttcgccattgtgcccacaacttttccttgaagtagcaggcttgggaaattttgcgaagggaatggctgttgttgcagcaagagcaacaaggcttccaatttattcttcttttgccaaagaaggcaaccttagtgatttatttgctaaaggggaagccatctcaacacttttcaatgtcatggggattggagctggaattggattggcgtctactgtatgttcaactactcaagggaagttaattgcaggcccattgctttctgccgtacatatctacggagttgtacaagagatgagagcaactcctgtaaacacactcaacccacaaagaacagcaatgattgtggctgattttgttaagagtggcaaggtttctagtccagctgagctgagatacaaagaagatcttctatttcctaaccggctaatagaagaagctggaagtta

SEQ ID NO: 25121 - DNA, 394 bp, Setaria italica
  Peptide Sequence Number=SeqID_91095
gaccttggtcgcatggccatgtctgcagctgcggtcaatgacgttgctgcctggatcctgctagcacttgccattgctctctctggttctgggtcaccgatagtttccctgtgggtgctgctgactgctaccggcttcgtcattgcaatctgcttgttcctccgcccggtgctggcctggatggcacgccggtcacctgagggcgagccagtcaaggaggtctacatctgcgccaccctcgccattgtcctcgctgctggtttcgtgaccgacatcatcggcattcatgctctgtttggtgccttcatggtcggcatcgtcgtaccgaaggacgggcctttcgctggtgtgctcatcgagaaggtggaggacctcatctcagggctcttcctcc

SEQ ID NO: 25122 - DNA, 870 bp, Setaria italica
  Peptide Sequence Number=SeqID_91096
tattcaagcatccagtcaattgccacttcaatgagaaacacatagtatctagaacagggtttgatgctgtattattcgtctgtgttttattgacagtctcaatagcaatataccaacgcccaatattcggcgacttcacaactaaaggatcatggctgatatcacctgaatagtcatgcagatctctttgaggaaaggcattataccgcaggtaacaaatcaaggatggccctagaactccaaagtttgcagctgtaatttgaaactgcaatgctaggttgactacatccaagaagtagaacttcatgtcgccttgcctgacgcataatgagtcattagaaatggaacaagtgattgagttctccattctaaccagggctgtaacattagacccaacttccttttctaccaaatggttctgctgtgataggatattaatacgcctatgatgctctctagtatacctactgttcctcctctcaatgttcagatctagaaggttccttgagttattatttattgaaggttgagaacaaccaatcatttcaactgtttggttgcagtagggcccccaaaatgctgaagtggggcatcctcttacagtaatgcgagtgctcaccaagcgtgcttttcctcggctaatcatcttcgattgtgtgcgagcagggccaaggccatgaaagtacccaatgtaccatacccctggagatatctggtcgtttgttagcacaactgttgtgtttttctgaaatggtatgcactgcgccagatttgactgattaattatattgccgttgccaaaaggcccagctgggagaaagtttgatactgcaataaagaaccttcataaattgtccagataagaatcag

SEQ ID NO: 25123 - DNA, 454 bp, Setaria italica
  Peptide Sequence Number=SeqID_91097
aggaggaggagggcccggcgccggagccgaagccgaagccggaggcgggcagggacgagagcgagatgtggcggaggtccacctcgccgaaggtgaagtagagcagcgccacgcaggtggccacgccgaggacgtggtacagggccaggccgccgcccaccgccattgtcgccggtgcgagcgtcggtgggggtggtcacggggagattggggcgctagtgctatggggcgaccatgcggagtgggatgctccctagatgttctagaaggcggagtggggcggagcagagggcggagtggggcggagcagagggcggagtggggcggagagtggagtgggaggagaggaggggggctgtggactgtgaagtaggaggaggggccagtggttgcgacaagtggtagctcagctcgggcggcacggcgtcggcggtagctgtgcggtgtgcagctg

SEQ ID NO: 25124 - DNA, 326 bp, Setaria italica
  Peptide Sequence Number=SeqID_91098
ttggtagaaagtacaacagtattctcattgttggcattaatttctggtcacctgattgtgaacacaatagttatgttttggtttaaaatatttatgtcatgtgaacgttattaatttcttcagaaacagaatatccaaagaaagtcattaatagatacacattgcctgtgaaactactgctcatatgaactgttcggcgaagggatgtttggctgtaattagaaatgctgataaatgtggtcatggcattggtatcctaatttggttggcatacatgctttgggtctttcatgtggaagtggacacttttggttcgtagaattggt

SEQ ID NO: 25125 - DNA, 273 bp, Setaria italica
  Peptide Sequence Number=SeqID_91099
gcgagcgagcgaggaggagtaggcgagcgagcggaagatctgagcgcggagcgtgaagcgcgggagcggaggaggcgcagcggacggcgcgcggtggctcccggcgtgcgttccatcggagggcgccgcgggaagcgtggaggatacgggtgcgaagcggacgggtgaaacgagcggaggacggacgacgtacgaaaatttctcttcctggatgccacgcacgcgctggcaatgccgccgaggctgcgcgccggagcagcggcggggtgcccg

SEQ ID NO: 25126 - DNA, 321 bp, Setaria italica
  Peptide Sequence Number=SeqID_91100
gacccacaggaggatggcgaggaaagcgagcggctccggccggcggacgaggcggccgtcgtggaagaccagcggccgcgggtactcgctccgaggcagcggcgtcgcctgcgacttctccggcgccgacaccgcgcggcgctcctgacacacctgcaagaacgccggttgccggcggtctccggccgcgccggtgcacagcccgacgtcgacgatcggccggtcgcgcccgagaacggccagcagagctcccaggctccggtcaccgccggcggcgacgcccggcgaggccatggtgccggagaaccggcccccgacgac

SEQ ID NO: 25127 - DNA, 499 bp, Setaria italica
  Peptide Sequence Number=SeqID_91101
ggaaaagcgtcggttcccaaagatgctggcgatctgcttcgtgctgtgcacgctcaactacgggtcgatggcggtgctcggctacctcatgtacggcgacggcgtgcagtcccaggtgacgctcaacctcccggcggcgcggctcagctccaaggtcgccatcttcaccacgatcgtcaacccgctctccaagtacgcgctggtggtcacgcccatcgccatggccgttgaggagaggatcggctcgggctcgtcggccgccgcctcgatggcggtgaggacgctgctggtgctcagcacggtggccgtggccctcgctgtgccgttcttcgggtacctgatggcgctggtggggtcgctgctcagtgtgggcgcctgcgtgctactgccctgcgtctgctatgtcagggtgttcggcctgccggctcgcgccgccgaggccgcggccatcgcggcgatcctggcgctgggctcgctgctgctgatcaccgggacgtac

SEQ ID NO: 25128 - DNA, 376 bp, Setaria italica
  Peptide Sequence Number=SeqID_91102
gcaggcctctccggccaccaccgagccgatgaagcggccggcgaacgcgcggtaatccaccagcgcgcgggacaacgccttgcggatcacctccgccggcctggcagcagcgtcatcgtggcgggtggtggagtccctgtttcggaacacgtgcagagaccgcactgcgtggcgaagaccggggacccggtcgatggctgacagctcgagcgtctcggccgccgatgccggctcggacagcacgacgaaggactgggatttccttgtcacagtgatgttcaccatggtggctacgtacaggcgcagctttgctaagtgcggtgccccctcttccagagctcactatttgtgtctctgcttgtgtgcgctatggagg

SEQ ID NO: 25129 - DNA, 412 bp, Setaria italica
  Peptide Sequence Number=SeqID_91103
ttttttttttacagctgaaaagaataaattactttcagtaatgttgatacaggctaacaaagtctatgctatatcctatacagaaagtgagtcagccaatgtactaaccgacatatctgttcagccacactctaaggtcttactgtgcacctcaatatgccatttttcaacaagaacagatacaatcgaaaaaattaatcatcatggaggatacctctacaagggcttgacatacagatcaaacaagatgttagcaaataatatcttctgcataaggatttgatctttgagtgctgcatcttgcgtcacgaactgaacattgtccaatgtctggtttggtggaaactggcagcctgctagtcaaacccagtaacaaaattgcaatgctgttgcaagcagaaatgtgcttcag

SEQ ID NO: 25130 - DNA, 233 bp, Setaria italica
  Peptide Sequence Number=SeqID_91104
cggtcacggcggcagaggagagggaggccatgctggtagctagtggtaggtgggtggtgattatggaggagcaagagagaggtcgcaggcttccacaactggattcagttttacctagaagaagccaagggaaatgtggactaccaaggttatatattcccaagacgtcgtggtgaatcgcctgattcagaaacacagctgctgactgttcagtttgagtggcacggtgtgct

SEQ ID NO: 25131 - DNA, 700 bp, Setaria italica
  Peptide Sequence Number=SeqID_91105
cgggggcgggaccagaggcatcatgagaggagggatgaggagggttgggagcgggtcggcggccggaaccagcagcaccccgcaggccggcagaaccagtacgacggtgacgacaggagggatgggggctgccagcggccgcagaaacagcagcaggcaccaggatacaggaggcaggaacaggtttgattttctttttcttctgcctcattgtactttctttacaagagtttttggacaattcacctgctcatctttcattgcatactacttgttacggtagttgtaaatgctggatttgtattttggtcataggaatagtgtggtatgtttatgttctgttgaatgagttgttctccgatgaaccagctgatgaaccagctgatacggtggagaatgcactaacataatctgcaagttttttttgtttccttttaagaatctgctacagtacaaagttgcaatagaacagcagctttcttggttgtattcgagagcattgcccataccactttcacgcagagatagcctttttcaagccttttcgtttaaagaggccattggagatggaaggagagggcacaaatgatggaggttggcagactgtcggcgagaaaaagcaccatggaagaccacagcagtctgaagcatggaatggatacagaaggccgccatcaagaacaaaaatactctgaggatg

SEQ ID NO: 25132 - DNA, 1615 bp, Setaria italica
  misc_feature (1569)..(1615): n is a, c, g, or t
  Peptide Sequence Number=SeqID_91106
gaggcgccgaggaggggggcgccccaacgcgccgacccggacgccgacggggaggagggccgcgacgagcggtcgcggtccacgtgggccgaggtcgtctccgagcagaaggacggcgggccggacgacgggcgccgcgaccatcggaattcggggcgggaccagaggcatcatgagaggagggatgaggagggttgggagcgggtcggcggccggaaccagcagcaccccgcaggccggcagaaccagtacgacggtgacgacaggagggatgggggctgccagcggccgcagaaacagcagcaggcaccaggatacaggaggcaggaacaggaaggagagggcacaaatgatggaggttggcagactgtcggcgagaaaaagcaccatggaagaccacagcagtctgaagcatggaatggatacagaaggccgccatcagaacaaaaatactctgaggatgttggtcaggttcaccaaggactcaatgtggagcctaccagagaagagctgaatagcttatccaaagcatgtagcagactgtgggagctcgatatgaatcgccttgttcctggtaaggactacagaattgactgtggtgaggggaagaaagtttatcagaagggtgatatggcatctgaaagcttgttcagctggctaggtgatgacgtgttaagaaagcccacctactctcgtttctgcgcacttcttgataactataacccacaccaggggtacaaagaagttgttacccagcaggataagcatgaagaagtagcattcattgaagagattgccagaacagcaccaattaagtacttacaccggtacttagtgcaaaagggggctgtatctcaggactacgaggatttcaagagaatgctggcatccctatggtttgatttgtatggaagaggtggcacctcttgctgctcttctgcctttgagcatgtgtttgttggtgagatcaaaggacggggacaaggagagagtgaggtcgcaggcttccacaactggattcagttttacctagaagaagccaagggaaatgtggactaccaaggttatatattcccaagacgtcgtggtgaatcgcctgattcagaaacacagctgctgactgttcagtttgagtggcacggtgtgctgaaatcagtatccagcacattgattggtgtcagtccagagtttgaggttgcactctacacattgtgcttctttgctggaggggaagataaccgtgttgatatcggcccgtacactgtgaacatcaagtgctatcggttggggaacaagattgggtctgcctttcccattgcagagaattaattatttggtggcctgcttctgcagatttgtaattcttcgttttctttttgtttcatgatcacttttgggaagttaatattgtattgtacgtatctgtttacttgtgtatgaaaatgtaccatgctgtacgatttgttgttaccagctacaaccatatcggtattgctactaatggctgagactaaaattacttttcattagttttttaaaataaagtaaaaaaagaaggactttgttccnnnnnnnnnnnnnnnnnnnnnnnnnnnnnnnnnnnnnnnnnnnnnnn

SEQ ID NO: 25133 - DNA, 255 bp, Setaria italica
  Peptide Sequence Number=SeqID_91107
ctagttcagcagaaagtgcacgctggatgccccctgacaacctcaagctggtcaccatcctgagcatcgacggcggtggcatcagggggatcatcccggccaccatcctcgccttccttgaagcaaagctccaagaactggatgggccagatgctaggattgcagactacttcgatgtcgtcgctggcactagcactggcggcctcttgactgcgatgcttacagccccagacactaacggacgaccacttttcg

SEQ ID NO: 25134 - DNA, 457 bp, Setaria italica
  Peptide Sequence Number=SeqID_91108
agaacggacggtaggacaatcaagggggatcatccggccaccatcctcgccttccttgaagcaaatctccaagtaatccagataagttcatctagtgttttattcataccaggtgctgatgtctctttgagtgttcccattgtgcctatgtgtaggaactggatgggccagatgctaggattgcagactacttcgatgtcgtcgctggcactagcactggcggcctcttgactgcgatgcttacagccccagacactaacggacgaccacttttcgctgccaaggacctggcgcggttctacataaagcactctcccaaaatcttccgacagaagaaccatatccggtccaagatcgccagcaagctgaggatgctgtcagggcccaagtacgatggcaagtatctccatgcgctgctccgtcggtacctcggtgacatgaggctggacaggacgct

SEQ ID NO: 25135 - DNA, 1157 bp, Setaria italica
  Peptide Sequence Number=SeqID_91109
tagtaattgtctaattgtcattgtttagctgaaacttgactagagtttgctcatacacatggtgattcttctaaggatgcgtcggtgatcaccttgcattttgcaggaaccatatccggtccaagatcgccagcaagctgaggatgctgtcagggcccaagtacgatggcaagtatctccatgcgctgctccgtcggtacctcggtgacatgaggctggacaggacgctgaccaacattgtcatcccgaccttcgacattgcatacatgcaacctacgattttctccacctttgagttgaagcaagagcctacgaaaaatgcgctcctgtcggacatatcaatgagcacctcggctgcaccaaccttcttcccgccacactacttcgagacgaaggacaagaatggcaggaggaaggccttcaacctcgtggatggtggcctcgccgcgaacaaccccactctgtgcgcgatgaaccaggtgtcccaggacatcatcctggggaacgagcacttcttcccgatgaagccagcagactacggcaagttcatggtgatctccctcggctgcgggtcaaaccggaaccgcaggtactgcgccaaggtggcagccaagtggggcatcttcagctggctcatcaagaacggcactgcccccatcgtcgacatgctcaactccgccagcgctgacatggtcgacatcaacctctgcgtccttttccgcgccctgcgctccagcgagaactacctgcggattcagtacgatcaattgacgggcagcgcgggctctatagacgactgctccaaggagaacatggataaactggtgaggattgggaagaggctcctgaacatgaacgtctcccgggtggacctggagaccggccggatcgtggaggtgcctggcctgggcagcaatgccgagcagctcaccagatttgcgaagcagctctccgacgagcggcgccggcgccaggacgagcttatttattccgaagtaggattccaaaatttagcttggtgacaattgaaatgcatgccgatcgaatggattttcaacggtgtatctagctgtcagtgttgttcgtgccttggcattcccatgtatcttgtcgatcgtgttattatcacatactgtgatattatcaacacgctagac

SEQ ID NO: 25136 - DNA, 1042 bp, Setaria italica
  Peptide Sequence Number=SeqID_91110
agcagcaaagctttctcaatgggcggcgcccatgcccaactgctcctcctcgtcctgttcgcctgggcctggctcttcttcgccggcgcactggcgcgtggtgcttccggcctccaccccgtcgtcctgctgcccggattcggctgcagccagctcgacgcgcggctcaccgacgagttcgagcccgccaccgcggcaccgagctgcggcggtgtgccgaaggggaagaagggatggttccggctgtggaacaaccacacggcgctgcaggaggaccctacgctggtgccgtgctacgcggagctgctgcggctggtgtaccgaccccgtcgccggcgattaccgcaacgtgcccggcgtcgagacccgcgtcgtggccttcggcaccacgcgcggcttcggctacggtgatcctgccatgaagaacttctgcatggagaaactcgttcgggcactggaaggagtcggatacagagaaggcgagaacctcttcggcgcgtcgtatgacttccgatacgcggcggcggcgcccggcaaggagtccagggtgttctcctgcttcctgtcaagcctgagggtgctcgtggagcaggcaagcgagaggaacggggacgctccggtcatccttgtgacgcacagcttcggaggcatcaacgccaacgtcttcctccgccggagccccctggcgtggcgcaggaggtacgtcaagcacttcgtcatggtctccgccggcgctggaggcggtgtatcccggctgcagttctgtggcccgtcgtcgtcgtcgccaccgaccgacccgctgtcgttcgctgacaccggcaggagcttcgcgggcgtgttctcaactctgccgtcccccaaggtgttcggcgacgcgccgctggtgatcacgcgagccaagaactattccgcctacgatatcccggagtatctcaaggccaatggtttctctgacggcgaggtggcgcgctacgtgacgagggtgctgccggtgacgctggatttcagtgcgccggcggtgccgatgacctgcatcaacggt

SEQ ID NO: 25137 - DNA, 360 bp, Setaria italica
  Peptide Sequence Number=SeqID_91111
tgtgctaaaatccttccaaacttttctaaagatcctgctgttgaaatgcagagcttgctcctctcgccatgccctacgcctccagcggcctagagaagtgatgcccgtcgaggtccggcttgcagactgggcgacggcgcgagtacccgttccggctttcagcttcacgacatgctaccttgatggtcgctatgtactaccacttcgattggtatcctattattggcaacctgcgctgttgcagtgccaggtccaggtgaaaagaagaaatggctgctgagatacgtcagtgcagatttagaggcaggcaatgtcagaagatagaggagtggcagaagtagagcaaactacatccggtgg

SEQ ID NO: 25138 - DNA, 595 bp, Setaria italica
  Peptide Sequence Number=SeqID_91112
aaaatccttccaaacttttctaaagatcctgctgttgaaatgcagagcttgctcctctcgccatgccctacgcctccagcggcctagagaagtgatgcccgtcgaggtccggcttgcagactgggcgacggcgcgagtacccgttccggctttcagcttcacgacatgctaccttgatggtcgctatgtactgtgagttcttgttgttcctctctgttcattcatctccaacacaacgtgcacatacacctgcttttgccatccaattaggtttggtcatccgattctatttaagtccaaacctcccataccctctaacctgcacagaccacttcgattggtatcctattattggcaacctgcgctgttgcagtgccaggtccaggtgaaaagaagaaatggctgctgagatacgtcagtgcagatttagaggcaggcaatgtcaggtacatttagcttgggtaatcttgaagctgaatatcaacttacatccggtggcaaagatgttgatacccgacccgaacctgagtacttcaaatgcataagttgttctgagaaacatgcatatcaggtttgatacattttgattttgttt

SEQ ID NO: 25139 - DNA, 575 bp, Setaria italica
  misc_feature (557)..(557): n is a, c, g, or t
  misc_feature (565)..(565): n is a, c, g, or t
  Peptide Sequence Number=SeqID_91113
ctcttcagttgagcaatccaatcaatggcaatcgatagagggtatttgaagtttggacaaaacataaataagtgttctagctgttgatttcctggcctgtataggtgataacagatagctctctgcctctcttacatttccttcttccaggtccatgctatgctcagtcctatctacacccgggaattgggacaactacataacatgcagcggattaatggcttactctgcgcatactttgcagctcttccggcagaagccaggtgcttccttggtccctaccatgtagttagggttcttcgcgcactcacccacagccgcccactgggggcagagaacattgtcgtcctcacatccgtcagacgaacccgactgcttgaacaagggaaggtacaaacgaacctacaacaataggaataccaatttaagtaagacggaaccaacttactacgaccttacgaatagaacggggacaagactacccgtagacaaagactagtacggaaatactagttagttagacaatacaagggtaggaagaactagaaagaaacaanaaggatanaccttacgtt

SEQ ID NO: 25140 - DNA, 1450 bp, Setaria italica
  Peptide Sequence Number=SeqID_91114
cgcgaagaaccctaactacatggtagggaccaaggaagcacctggcttctgccggaagagctgcaaagtatgcgcagagtaagccattaatccgctgcatgttatgtagttgtcccaattcccgggtgtagataggactgagcatagcatggacctggctgaaggaaacaagattgctctatcgattgccattgattggattgctcaactgaagagggtatttgaagtttggacaaaacataaataagtgttctagctgttgatttcctggcctgtataggtgataacagatagctctctgcctctcttacatttccttcttccaggtccatgctatgctcagtcctatctacacccgggaattgggacaactacataacatgcagcggattaatggcttactctgcgcatactttgcagctcttccggcagaagccaggtgcttccttggtccctaccatgtagttagggttcttcgcgcactcacccacagccgcccactgggggcagagaacattgtcgtcctcacatccgtcagacgaacccgactgcttgacagggaggtcaaacgacctcacatggatccatttagtagcggaccacttctcgccttcgatgacggggcagctcccgtgcaagctgtcggaatctgttgttgcatcagggtggagactgaagaacagaagggcgtcaccctttaccggtttaactgcatatccatttcttgcacactcagaccaggtgtcgtccttgggttgtaatagcttcccctctgcattggggaatatagtctctccgcccttctcaatatttgataggtacataagcacagtagcaatgcggtggcccccaagggcttgattatttctgtcatggaagtagtcatagtggggctcatacttctcaccgttctggtagtgtaatatctgaatggattcaccattctctggtggaagaaatgtccaagcagatatcctctcttctattctctttaccacttcatcctgcttcttctcgaggaacatgccggagctggtgcgcacctcgctctggacgctcttcccggactcgttgtccgccaccatcgacttctccagcttgtccttggccagcgcgatcaggtggtcgcactcggcatccgtcaggaaccccttgtgcaggaacgccctgggacgccacgacagctggaccacgcgggaggggtcgaagccgccggcgcccaggctcgccgcggtggcggggacaaatccgtcggcgagtaggagcgcgaccgtggcggcgaggaagaggtggcggtggaaagccatggcgccgcgagattgggaggacgaacggtggagggttggggaagaagaagcagggttgtcaaagggacttagaattaatttactagtacaataggaaagtaagtacaataataggggactactaaattaaaacttaaactaaa

SEQ ID NO: 25141 - DNA, 499 bp, Setaria italica
  Peptide Sequence Number=SeqID_91115
atatacacaatgcatgcaattcagaatgttgtggcagacgctacctgtaaattgcatcattttctggttctagttcattagttcatatgtgctagtgtacacaccattttgaatgaaaatgccctaatctggttcaaaagtgtgatggtacaaagtggcaagctatatactaaagcacactgaaagcaacagttatttttgaacaggctatttgctcatgctaaataatatgtaaacaagtgtccagcgctaagctatatgctaaatgacacatttttttttacttcaaacattgatgaaagaaaaggtcaagcatgcaactggtggcacttgcactcttgtatttcgtcaaacaataacaggcactggatgacaccatttccttctgagtcgtatcaatttctatcctttttttgttttatgctttttgttctccatacaaatagatttgaaccgacatgacttattactggatgttacagatgcattttcagggtgg

SEQ ID NO: 25142 - DNA, 537 bp, Setaria italica
  Peptide Sequence Number=SeqID_91116
cctgctccaactccaatccaccactccgaggcacacgggcagccgtcacagcctcgaccgcttcggcttcccccgcgcttaagatcagagatggagctaatcacaaatgtcaccgagtatgagaagcttgcgaaggagaagctgccgaagatggtgtacgactactacgcctccggtgcagaagatcagtggactctaaaagagaacagggaggccttctccagaattctgtttcgaccacgcatactgattgacgtctcccacattgacatgaccacaaatgtcttgggtttcaacatttccatgcctatcatgattgcccccacagccatgcagaaaatggctcatcctgaaggagagcttgctacggcaagagcagcagcctctgcaggaacaataatgacattgtcctcatggtctacttctagtgttgaagaggttaactcagttgggccagggatacgtttcttccagctttatgtctacaaggacaggaattattagtttcggtctactttactttcttacacttgtagt

SEQ ID NO: 25143 - DNA, 246 bp, Setaria italica
  Peptide Sequence Number=SeqID_91117
aaaatttgagctgtacacagtttgagtattgagtatacagatcaatcgccagtgtggatgtgaaggccaaagaggctgcgacatataatatcagtgcggatcacctatgcaccacctagaagcatgatggactttggctgcaaacctgatgacgtacattttgtatcaaagaaactaattaaacgttccgacgatttaaatcataagtcataaccggccaaaattgccagcaagttggtttcaagg

SEQ ID NO: 25144 - DNA, 281 bp, Setaria italica
  misc_feature (243)..(243): n is a, c, g, or t
  Peptide Sequence Number=SeqID_91118
ctcgctgcggtggaagcgcctcccggggctctcctccctcagcctgcgcagcggctcggcgtcggcggtggtcgacgcggtcgcgttccgcgtcatgtacgttgtggaggccgtcgtgctggggcttgcgctctcgtgcttcttcctctgctgcggttgtcacctctgagctgtttcttccccctcttcaccgctactacagtactacttggccgggcgtgtaacaaatgccatcgttttccngcttcttcagttcttctgtcgatcattctgctgttaaa

SEQ ID NO: 25145 - DNA, 484 bp, Setaria italica
  Peptide Sequence Number=SeqID_91119
ctggttaggaggaattccgcaaggagttcaaggagaagaaccctagaacaagtctgttgcggaggtaagttgctaaaaataccaacctctttacgccacctttatgatagtagctgctttgacctcgtggttaattatttttgcggtcctggttcaactttttcaggtgggaaaagcagccggtaacaggtggaaatccctgacagatgcggtaagcttcctctgcattcaccgcttcctagttgcgctgtggttaggattgagtgctgatcccatgtgtttgttgttgattactgcaggacaaggctccttatgtagccaaggccaataagctcaagtcggagtacaacaaggccattgccgcctacaacaagggcgaggtacactccattgcttcgctgtcattcttgctcctgctcacagcccattgttattcaatagtactaaacaatcattcatgtgttggtttgttcagagcactgct

SEQ ID NO: 25146 - DNA, 419 bp, Setaria italica
  Peptide Sequence Number=SeqID_91120
cactacttgccctgcgtcggtagtgagacccaagtgaactttgagatctttcctttatcatcagggcaagtagtgagacccaagtgaactttgagatcttttcctttatcatcagcagcaatgcagagctcagaactgttttcaggatctgagcatgtagacctttgaagaaacctggaatgccttccttgctccagatagcatgcaaggcacctagcatcgttttgggcgctcttgagctatttccattatattgacttgcaatccttctattcagtatactgtatttgatcagctcaagcaaaggataattcagaggcagcgacgtaaaaatggaggatcaacagaggataattcccgagttgctctttctgctttctcagcttttctccttggtgccgtctctaaaagtattgcta

SEQ ID NO: 25147 - DNA, 405 bp, Setaria italica
  Peptide Sequence Number=SeqID_91121
tattgcagaagcagggatatacagggcctgatcaatagtcccaaacattattgagtagtgtcagtttgtagatgaagacatgtctggtttcagatataaaaactaagcacatttttgtagcatggagatgggaactaaataatatcctttcaacacaatcttcagtatttatgtttggactttatatataaaaaatgatatagttggacaccatagcgcaaatgggcaatatgaagttctacaatgttcattgtacaagaaccttgtcaagtttaatacctgaatagaaggattgcaagtcaatataatggaaatgcccaatccatcgaatgcttccatccaagtaccctctgtaagagtttccctcagcccttttgactttccaaaggtacttgtctgcatcct

SEQ ID NO: 25148 - DNA, 547 bp, Setaria italica
  Peptide Sequence Number=SeqID_91122
gctcttgatttgcttggcctttctgattcgtcctcatcatcctcatcagggtctgcagcctgaatcatcaccttgcacctgtttgatgatgatttgtagtaagataataaatcgtcggacagcattaacaagcaaaagcaggtggtaagacccaaatatacttctattgccaaggtaaagacctcagacctgattaatggataagtcaatactgtagcaatacttttagagacggcaccaaggagaaaagctgagaaagcagaaagagcaactcgggaattatcctctgttgatcctccatttttacgtcgctgcctctgaattatcctttgcttgagctgatcaaatacagtatactgtagaatacagataccaacaatcatcaaacagttacttgatctcttcttttctatacctgttggatatcattacagtctcccatgcacaaatttgaccactattttctataaatgtcagtaaaagacactaaaatattaaggtattaaggtctgaaaaaatactttcataatacttctactaataatta

SEQ ID NO: 25149 - DNA, 1677 bp, Setaria italica
  misc_feature (1)..(86): n is a, c, g, or t
  Peptide Sequence Number=SeqID_91123
nnnnnnnnnnnnnnnnnnnnnnnnnnnnnnnnnnnnnnnnnnnnnnnnnnnnnnnnnnnnnnnnnnnnnnnnnnnnnnnnnnnnnntttttttttttttttattactgaatacatgtccgtggtcattatatttcatatgaacattatgatgtttacatgtgacgcttttccttttcctaaagaatacatgctcctaaccctttgttcagcctcgtccccctgtcccccagatgaccattcttctattctttcatcgctctagtgggcagtggccttcagttggtaattacactatattcgagcggtaataggctgggcaatcttcattcgggagaccaatgatcccagggaactggggccaacaataaccttcctcaaacccatgaatggtattgtcgctgttcgaataaatagaaatgaattaagggtatgtatgttcactgtacagggggtgtgaaatgatcacagaagggcagaggatccaaacttggggattctatcacagggtgcacgaatccatccaatttgccctctctcattgtcatatatcaccatctgatcctgcatggtaatgtctccaagaatgttcagatccttgagaccaacttccgatccgttgaggatgcccaaacatgcattcccatatttagtgacaatgaggtagttttcaggagggatctccatgagtgctttcttgccattggcaaagctcaaaaccaatgatttgaactcctttttgacatcaagcacagatttgaatggtttcttccctttccagcagagaggcagggagggatcagatacctctttcagagtcctgcttagaccacccttaagcgcgctgacaagcgcttgatatggctgtgcagcaaagtaggtgaatgagctgccgctatcaaaaactacttccattggcctcacgcctagtgaccggccaccaaagtacagacttgctgaaccaggggagtagtaattccggaaggcacttcgagccatgggagcccatgttgcacgcgaataaggcacaagatcatccccaaagaagaggaacccccctcctcttaggcttaggcagtggccaaccacgttctttgagatcccatgcttcttgagctgtgaaagtagactaattgatccgctcccaagcccaagcactccatcagtgggcgacacctcgctgctgctgcccacctgttggtcatacccacacccaaacgcaagactagggcggacaacagaggagtttgcaaggcggagcgcaaagctgtcgttgacgagcacgccgatggatgacccctgatcagcatacctaatctcatagtcacattgctgatgaggtgagtcacatttgtgcctgccggatagtccaccgtggagggatgcacacaactgatccacgcagggcaccagcttgttctttattggtcggtagagtgggtgtggcaccttgttgcagctgacgcagggcgcgtcgcactgcagccaggtgagatcgctgccggtgtcgacgtccaggaagtatggcctcgacgggttgccgatgttcatggacacgtagtacaagccgtgcgggtagacgtcgccgtagagcgggaagatggcggaggacgactccggctccttgcccgcgccggacggcccgcccctcagcggtttgtccccgctcaccgccgacg

SEQ ID NO: 25150 - DNA, 509 bp, Setaria italica
  misc_feature (62)..(62): n is a, c, g, or t
  Peptide Sequence Number=SeqID_91124
cagcacttctttgctgtcacatacggtgtggtttcgcatcccttaccgcgacgattgttcangttttcctcttccatggaaggtgagcaagttcttctgcagttttcatcattaaagcttatgagaagatataagcaggtcccggagtggtggttcatctgcatccttgttgctaacattgccgtcaccatatttgcctgtgaatactacattgagcaactccagctgccttggtggggtgttttgcttgcatgtgccattgcctttttcttcaccctaccagttggaataatcacagcaacaacgaaccaggtactgattttaagaccctatgcatatcatatgccatgcaactcaagagcgctagctcagcacttcagcttctttggttgtatgtagactccaggcttgaacatcatcacagagtacatcatggggtacttgtaccctggacgtcctgttgcaaatatgtgcttcaaggtatatggttactattctagtctattgta

SEQ ID NO: 25151 - DNA, 2304 bp, Setaria italica
  Peptide Sequence Number=SeqID_91125
tcttcgccaactccggcgccggcaccgtctacgccatccacgtcatcaccgccgtccgcgtcttctacggtgctggggttcggttgggcgggaatattccggcggtatctggtagagccggcggcgatgtggtggccgtccaacctcgtgcaggtctcgctgttcagggcgctccatgagaaagaacagcgggtgaaagggggcttgacacggaaccagttcttcctggtggcgttcatctgcagcttcgcctactacatcttcccgggctacctgttccagatgctcacctccctctcctgggtgtgctgggtcttcccccactccgtgttcgcccagcagctcggctcaggcctgcgtggccttggcattggagcgatcggtctcgactggtccaccgtctcctcctacctcgggagcccccttgctagcccctggttcgccactgcgaatgttgctgcagggtttgtcttcgtcatgtacatagtcacacccattgcttattggttcaacttctacaaggcgcagaacttccccatcttctctgatggcctcttcaccacgaccgggcaaaagtacaacatctccagcatcgtggactcccatttccatttcgatacaaaggcgtacgagaagaatggcccactgtacctcagcactttctttgctgtcacatacggtgttggtttcgcatcccttaccgcgacgattgttcatgttttcctcttccatggaagtgaaatttggcagttaagtaaatcagcttttcaagagaaaaagatggatgtacatacaaagcttatgagaagatataagcaggtcccggagtggtggttcatctgcatccttgttgctaacattgccgtcaccatatttgcctgtgaatactacattgagcaactccagctgccttggtggggtgttttgcttgcatgtgccattgcctttttcttcaccctaccagttggaataatcacagcaacaacgaaccagactccaggcttgaacatcatcacagagtacatcatggggtacttgtaccctggacgtcctgttgcaaatatgtgcttcaaggtatatggttacatcagcatgagccaagctctgacctttttgcaagattttaagctgggtcattacatgaagattcctccaaggaccatgtttatggcacaggtggttggaactctgattgcagcatttgtatacatcggaacagcatggtggttaatggaaacagtccccaacatctgcaatactgagctcctcccacgagacagcccttggacctgcccgggtgatcatgtgttctatgatgcatcagttatatggggccttattagcccacgcagaatatttggcgacctaggcacttactcagctgttaactggttcttcttgggtggagctattgctcccctactagtatggcttgcacacaaggcattcccaggccaaagctggatcttactcatcaacatgcctgtgctgattggtgccactggcaatatgccacctgctactgcagtcaactacaccacatggatacttgttgggtttttgtcaggttatgtggtttacagatatcggcgtgactggtgggagagacacaattatctgctttccggtgcactagatgctggtttggcattcatggccgtcctgatttacttatgcctaggcttggagaacatcagtttgaactggtggggcaacgatttagatggatgtcctctggcttcctgtccaactgctaaaggtattgtcgttgagggctgcccagtgtatacatgagaactcatggtgtgacctgggaagaagagatcagggagcgatgtaaataatcaaaacttttatttccaaaaaatttcagagatgacaaataagaagttccaggcttccagccataatctgaattctttattgctacaaatttagcaccaaatcaagatgctttttccaagtttcatttgtatctaccacttcctgataaatatttcccatgattcaccatccaagaaatcccgaccactcaaagctgcagcttcaacaatagtgcaaaaggtatcatcatgacttggctcagaaaggctatcaaccaatactcggtaaataaacttgcttggagtacatcctttggtcaccatctccttaaatagtgcagcaccttcatttgacttgcccattttgcagaaacccttgatcaaggcctcataagtcattgcatttggttcatatcgccgttcgaccatgtcatcccacaccttcccagcctcctgtaactccccattctcagataatcca

SEQ ID NO: 25152 - DNA, 238 bp, Setaria italica
  Peptide Sequence Number=SeqID_91126
caataaggaaacacaccaggtacatacacttcagtgtcagtgtcaaacaaggagattgcggaggggaaaaaacactaggctactcgttaggcagacaagaaattgctctactggtacaattctcagaggcttctgcccagcattacatcattgacatcatgaaaatggtttgttgttcactatcactacaactatccgatcatgttagggctctatcgatggcattcatctctgctca

SEQ ID NO: 25153 - DNA, 426 bp, Setaria italica
  Peptide Sequence Number=SeqID_91127
cgcagcgtgtacagggtcacggtgacggagccggcgggggtcaaggtcacggtggtgccgggcgaactcgaattcttcgggaccggagaggagaaggagttcacggtgacgctggacgtcgtcgacgccgcggcggctagcgactacgtgttcggcagtatcgtgtggtcggacgcgaacgggttcgacgcgtacagcagtccggacgcgaacagggggcatcgcgtccggagcccccatcgtggttaagacgaagtgcgggtagcatgtaccagtagcagagcaagagaagcatatttgaaaggagatgcaggtcacgtagtctccccgcaaaggaaaaaaaaaggtcgtgtagtcaccaacaaatgctgaagcagttggtaagctgttaaacaggttacaattgttaatggaaaacgaagtttt

SEQ ID NO: 25154 - DNA, 259 bp, Setaria italica
  Peptide Sequence Number=SeqID_91128
ccgatgggttgtctccctcgcggacggcgcccggtggatctcgaggtggacctcccccgcgaacggcgcccgtagcagatcgaggtatgcctggggggcgcggcgcgagcgtgggccggaggaggtcgggacgcgggcagcggcggcgcctgcgcctggagggtggcggaatcacgaggcaggggattaggggaaagtacaggagaccaggattagaaaagaaggaaggcactgcctgattgtttgggaataatcgttg

SEQ ID NO: 25155 - DNA, 249 bp, Setaria italica
  Peptide Sequence Number=SeqID_91129
ggtgcagctcggcttccagtcggcgcggacgcggcggtcggtggcgagcagcaccggctccgcgttcgcgtggtccgaggacctcatgttcgtcgcgtccgagccgctggacgacaccctcgtcgtgctcgtcgaggaccggtccatgatcaaggagcccgcgctgctgggccacgccaccatcccggtggcctccatcgagcagcgccttgacgagcggcagatcgtggcttcgaggtggttcaacct

SEQ ID NO: 25156 - DNA, 680 bp, Setaria italica
  Peptide Sequence Number=SeqID_91130
agacgtaggaaagaagaatttttaacggaatagtaaacgacaatactagaaccaagggaagactggcatcaatagctcctggaggttgcttctccatcttctgtacatggtatcttcctccaggttattaagataatgcacatgagaagaccgaaagtcaacacggaaggaattagattctgctggcggaggagctgacaggatcttgtgggcagcactttgaggcaactttaaccgggcgaactgatcagccagggataattctccgtggaccatatccattaacaggtaaagatcaagatcctcaatattaatcaaagcaccattcaaagccatcagtgacttgccaggtggaaccattcgctgatttgcaataatttcatctttgatggaattgtcaagcttcattcgagatagtgaagaaactatacttgggaaattttgattttatttcctgcattgactgtaaaggatctgatgcttgaacgatacgctgtgctgtctgatgacccagatctttgagttcccagacttcaagtgtgtcagatactgttgatgacaacagataatctctgaaggccataatctcggcatttagttctggcttgcgttccagaatcttggaaaatataaaccctctgacttcttgactgaggtcttcagtcactactcacactgag

SEQ ID NO: 25157 - DNA, 455 bp, Setaria italica
  Peptide Sequence Number=SeqID_91131
cggaggcaacggcgagcgcatcggcacggcggccgtgcgcgaagcgggcgacggggcagtcggtggcgaacaggcccgatgcggcgaagtccctctcgccccccatgaccggcatcctcgccgcgacgtcgagccggttcacgtagctgctcctgtacgtctgccccagcacgccgtgcacgtcgtcggtgagcgagtagaacctgaaggccaggtccaggtgcgcgaggcagtcgccgtcgcggagcccgtagctgtggaccctcgagtcctcctccgtgatgggcaccgcgatcaccgtgatcttgaacaccccggcgagctccaccaggacgccgttggccgccttggtccgcgtcacggataggggagaggagggcgcctcccacctgacgttcgcgacgccctggacctcgacgggcgcgccgtcgtaaacgatggcgaggcggtcggtg

SEQ ID NO: 25158 - DNA, 528 bp, Setaria italica
  Peptide Sequence Number=SeqID_91132
tgcccctgcgcggcggcggcggcggcggcgccaccgaactcatccgcttcctgcggcaacggcgccagtggcagctcgggctgcggcaaaggcgccgccagcggcgcttcgggctgcgccacgccgccaactccgacgccgccggctccctgtccgaatccgaacggcaggtcgctgctgccgtgcccgatcggctcggcgaacgggggcagcgcagaggcgaggccgggggagccgggcatcccgcagtgctgcgcggcgcggggctcgtcgctggccttccacgccagctccccgcccttgtcgaggatgcgcatgtcgccctggtccacgagctgcagcgtctccaggaagttctggtcgtcggactttgtgtcgtgggtgtgccacaccgaggtgctcccgtcgaacacctccagccctttccacgagaacacgagcgcgcacgtgttcaccgtgctcactgccaggcactccgactcccacacgctccggccctcggcccccggcgccgtcgtgtcgagcacc

SEQ ID NO: 25159 - DNA, 589 bp, Setaria italica
  Peptide Sequence Number=SeqID_91133
gatgcccggctcccccggccctcgcctctgcgctgcccccgttcgccgagccgatcgggcacggcagcagcgtctccaggaagttctggtcgtcggactttgtgtcgtgggtgtgccacaccgaggtgctcccgtcgaacacctccagccctttccacgagaacacgagcgcgcacgtgttcaccgtgctcactgccaggcactccgactcccacacgctccggccctcggcccccggcgccgtcgtgtcgagcacctccacgtagcagaagtcggcgccgaggccgccggcgcccggggtggtctggctgcgcatgaagtaggccgcgtacttgcccgacggcgaagtcaggaacagcacggggttctcgtcccagtgcggcgggatgctcgccaggatctgctgcttggtcacgcgctgtatcgtgccggccggcgccgccgtcaccgcggcgtgggatgggaggagaaaggctagcgcgaggcaaatggcaacgtgggggagaaagctgagttgcatggctgctggttcggggtttggccactcgtgcgctggtctcaggtggaatatggaagtggtcgatctgtg

SEQ ID NO: 25160 - DNA, 609 bp, Setaria italica
  Peptide Sequence Number=SeqID_91134
tgctattgatggcatccatagcctccttagtgtttatagttggttcaactaggccatgatggcaggcatcttcagtttctgacttcccaaccagtgcagagcctacaaaccgtacaactacagtatcatcgctattacaacgggacaaattcttgtttgctcctgagttgcctctggatagcataccaactttagcaggtcctaatggaggatgacgacctaatgaagtattagaactgcttcctgacttctgaattgtattggatttcagttctttactgtttctgctttcaccttcaacttggttcataggtgtaatactaggcccagctttcgtaggcattatttcacttggaccagctttcctaggcattctttcctgcagtttatctttcctcctcttgtatgattccatccgaagaataaactgttcatgtgctttgtgcaactcaccgataggctctgccaggttctggattcccagacggtacatcttctccgcatcattgaacctcttatgcttctcataatatagtgcataagccatatagaatgaagctctcttaaggcctattccattcctctccatcttcttgagcaatggcttcg

SEQ ID NO: 25161 - DNA, 256 bp, Setaria italica
  Peptide Sequence Number=SeqID_91135
cgactccatctctaggggtgtaaccctgtgcaagaagaaaccatctaccgttgtatggtcaccaccaggtctgggatgtccaatgtgcaacattgaattgtcacggtggaagtatccacaaaacccacccgtgctaatgtatgcgtccacttcatattttgcaaaaatacgctgaaatggttcgtagaatttcattatttctggtgcttctgcctcattgcaaacaactaatggatcatatccaacaactacttta

SEQ ID NO: 25162 - DNA, 373 bp, Setaria italica
  misc_feature (24)..(24): n is a, c, g, or t
  Peptide Sequence Number=SeqID_91136
tgctgagctttagaacagcaacanaccctgctgagctctagaaatcatcaggatcgtattcatagccacaggcttcctccatctcgtcgccgttgttatcattgtcacttatcgcatgactatcatcaacccaatcttgtcttctcttcaatttcttctctaagatgcttcgtcccgtcttcccttcctgtctcccacgcttcctctcagctaggttctttcggatgtcttcatagaaagtgacatgtatcttctccaagctgatgccagtcgctaccaaagcatccaccgtcttctgaatttcgccatcatccttggaacattgtactattactgtttcaaggagtgggcattggaaggttattccagtgat

SEQ ID NO: 25163 - DNA, 374 bp, Setaria italica
  misc_feature (359)..(359): n is a, c, g, or t
  Peptide Sequence Number=SeqID_91137
agaacgccgacctcgccggagcgcgccgggcgctcgacgacgagaacgacggcctgcgccgcgcgctggagcgcgccgccgaggacgccagcaccgccacggaggcgctcgagctcgtcagcggcgagaacgccggcctgcgggaggccgccgacgagaaggagcgcgacctggaggacttgcggcgggagaacgggaccctcagggccggcgaggccgcggcgcgggagcgcgccaaggagctcgaagcccagctgctcgcggcggcgacagcaaccgacggcagcgccgcgatcgggaaggcggcggtggagatcccgctggtggagaagtggaggcgcgaggccgcgcaggggaanctgggcgcggcggcg

SEQ ID NO: 25164 - DNA, 285 bp, Setaria italica
  Peptide Sequence Number=SeqID_91138
aaacaaaacacgaaccaaagtgtcgagtcgagtgctgtgctggccgtcgagatttcgccggcattcgtttcaatccagagcgcgcggcatcggcgagttccgagtggagcgtgggtgcgatctggtgatcgggcggcggaatggtggtgccggaggcggtggcgctggagataccggcagcggcggaggaggggtcgccgccgcctgccgccagggtgccgccgaggatcaggcggaggctcctccgggcgcgggaaggcggaggcacggcgccgacggccgagg

SEQ ID NO: 25165 - DNA, 315 bp, Setaria italica
  Peptide Sequence Number=SeqID_91139
ttgtgctccttgtcgctctgtttcttgctacggtggtggcgctggcgtcggcagcgaacgagacgcggtcgttccggcccggcgacgagctccggcggtacaggagggtgcaggcgctgctcaggcggctcaacaagccggcgctccggaccatccagagccccgacggcgacatcatcgactgcgtggcggcgcacctgcagccggccttcgaccacccgaggctacgcggccagaagccattggacccgccggtgagaccgaaagggcaccacctccgccccattcccaatgacaccgcggacgccggcgtgc

SEQ ID NO: 25166 - DNA, 197 bp, Setaria italica
  Peptide Sequence Number=SeqID_91140
tcatacttcataatgctaccaaagatgaaatcttctgtcacttctatgaaatcatatatccattcataaacataaataaaacacagtagacctcatgttgtaacaaggctgagtctataactctatattagttcattgtgccacccattcacatcttgctcccattgcatccattttcccagatacactatagaata

SEQ ID NO: 25167 - DNA, 340 bp, Setaria italica
  Peptide Sequence Number=SeqID_91141
aaccaggtagatgttcttctattacattaccattaaactataactaaacatgtcagtttttgccccgagatgtgcattttgtttagagctattacatctctggcataaactcaaatgattagatcactgaatatcaatttagttcagtcaaacattccaacaggggtaactaattattctggcaatggacgtatatgtgccaatgggggtaactgcttacaaccttttcggcatctatttttaagataaatcttttcaatgttattctataagctgatttggtgtcaatttccagggatccaggcttaccgcctttgagttggttcatgagaaaatacct

SEQ ID NO: 25168 - DNA, 795 bp, Setaria italica
  Peptide Sequence Number=SeqID_91142
gagattgttgtgggccaaattcagcacttccaaactcgacatatttgacaactcatcaggaattggccctgagaacttattccagctcaagtccatgtgctgaagcttcacaagatgaccaaagcttgaccagatcggcccaataagcaagttgtttgagagtataagggacggtggaaagctgctgacttggttgtactgcaaacctttgccagttgagttcttcttgatgaataatggtaggtcctctgttggtgactgctcactcgagccattacttgaaatcaaactcctcatctgtgtgaagctcacaggaagctccccactgaaagaattgtttgacaggtcgatgtagaagagattgttcagcttccctagccatggtgggatgttcccgtttaacttgttccatgaaatgtccagcacattgagactttccaaggtctgaagccaaggcgggattgtgcctgtgagtaagcaatttgccaggacaagcacctccatgctcttgaacccattgatgccatccactggcattgtctcaccaccacggaagttcctggtgagcaccaaacttgtcaggttgggcaggtgttgcaagacttgcaacgctgatgacaggtttgtgaagccatttcctgtcagtgagagataggatacggatctcaaatccttaaaagtctctggtatctcccccacaagtttgttccttgcaaggttcagagtcctcaactcagggcacgacgagatgccagaaggttattagtctacctaattccttagttagtttatttt

SEQ ID NO: 25169 - DNA, 307 bp, Setaria italica
  Peptide Sequence Number=SeqID_91143
ttaaccagacaaggccaataggccatggcagacagcgcagacccaccaactccgaaacgaaacgaaacgaaacaatcacaaacgaggcggaggatgaggaagagagcagcaaaagcgactggattccgctcgcttcctcgcgcctcgcaccttttcccacccacttcccttagctcctaagcaatttgctcatggtgatcgatgaatgtgtaaccgtagtaatactgatactactaattgcaaccagtggtaatccacagaatcagcggcctcctctacggtaagagagctcaaaatttacccccca

SEQ ID NO: 25170 - DNA, 397 bp, Setaria italica
  Peptide Sequence Number=SeqID_91144
cttgctgtctctcgctggaagcacgcactagagtatgttgtttcagctcagttgtcttgtctgaagatgtaaaagggctagaaaatattgtttcttcactattgctagaaaccttagaaggatgaccttctttcgaagtgttactccgcgtaataggaacttctggctgttgcttcgtcctgctgttggttgcaaccgacttctcaagagtatggtttgaactgatccccatattatcatggcattgcataggagtcacagactcaggaccatgtccagacatctccatcttattttgcaattggtagtttttgttcttcatctgtggttcttgtgctgaatgagacataccttcttcctggctgttgtgccctcctggtttcatcttgttattgtc

SEQ ID NO: 25171 - DNA, 798 bp, Setaria italica
  Peptide Sequence Number=SeqID_91145
taagctaacaagcatgcccaactttattagcagcgagcggtgagtcctcaagaagctacggactacggtagcccacggagggcccgcctcatcttgttatactccagcagcctctgcacgccaggtatcacctcctcgacgccgtcgagcgcgccgaaccggtccgcccacgccaccaggagcggcgtcttggcggggtccaagaccctcacgccgcacatggcctcggacgcgcgcagccacccgagaaagccgcccagcacgacgtccacgagcccgacgccgtccccgccgaagaacgccttgcccccggagcactcctcgagcgcctgctcaaacttctccaggacggccacgacctgcctcgccgcctcgaccctgtcctctctcgtcctgccgttgtaaacgggtatccacgtgctgaacagcttgtcgtcgacgtaggaggcccagaaccgagcgacggcgcggtcgtacgggtcgtcggggaggaggtgcgggccgcgggatgggaacgcctcgtcgaggtactccaagatgacgagggactcgcacacggccctgccgtcgtggaggagcaccggcaccttcttgtgcacagggttggaggcgaggaggagctcgctcttgctgttgaggtcgtcctcgacatatcggtaggcgaggcccttcaggttcagcgcggcgcgcgccctgatcacgaacgggctcgcccacacgcccagaagcgtgagctcttctactccggtggcttctcgtcctgccatggtgtgctgtgagactgggaagtgagagtgg

SEQ ID NO: 25172 - DNA, 1032 bp, Setaria italica
  Peptide Sequence Number=SeqID_91146
atccagagatccaatctgtggctgcaccatccttggtggatcagaatagcatcaagaaacacgacaacaatcagtccatgtgcaatgtcaaccatctccactcaaatgtagagaagcctagaccccctccagtcagtgctgagcttcagcctgaaaatttaacaaatgtagtcaaggaaaatgaaataggtaatttccagcagtctccaattgaaccaactgttgctgttgacgaaccatgtgcatcagaaagcaggttctacaatcaaccacaagaagatgctataaacactgctagtggtggtgcaaggtctccggaaaagaatctttctaatgtggatagtgacacgtcatctgctgctgtgcctgcgtcagcaagctggaatgtgactttgcagggaaacattgtggaacccatatcaaagaaggatatgatagataaaactaccatggttcaaccacagccttgtaaaggaaaatcaccaaatccaaatgatgatggcacctgtgatcaatcattgaaggatcccaggcatgaaagccaaacagtgcaggctacaatggctccagcttttgtcagaagcaatgatgttttaccagccaatgcatctgaagcaagccacttggtaaaccaggatctggatggcaatgccagcattccacctgtcgaaaaggatcccgttcatgagggattgaccctgcgaggttctagtggtataccttctgtaacctgcaatggtgctattcaagaagatgaatctggaaccaaccacccatctacagagtgcactataatgtttgaagagcagattggtgacaagtgtcaactggaaaagaatcactctctatatgatgatggcaccatgttggaaaagaataaggtctgtggtgggctgaatgtgcagactgctccagagtctcgtagctgcaatgtaaccttccatgatagaatttcagaaggcaaccctttatccgagcaaaatattgaaacaaacacaactgacattcagaaacgtagttgcagtacacctg

SEQ ID NO: 25173 - DNA, 279 bp, Setaria italica
  Peptide Sequence Number=SeqID_91147
agcgattcagagcgcggaatgcctctactgccatattcacatgagttgcagaggtgctgatgggcagtccaacggaacaagccatttgtggcgacaccagaaaatttgccgagcaaaagatgggttcggtccgagcccgctgcagcaggatgccgatttgccatacgtggtgagtgaagtagatcctgtggaccaaattcttccagattcacttgatggaataaacttggtgacccgtagtgagaatagcaaattcaggtcaaaggtatggaaggattt

SEQ ID NO: 25174 - DNA, 355 bp, Setaria italica
  Peptide Sequence Number=SeqID_91148
agccacaccagatcagttttgatctctactccttccaaatagcgggataatgaaatttgcaaagagatagttagcctgccttggatgcaaagctgcttatcaggtggctcttgtactatggtgcagattccaaaacctatgattgccctctatttggacgaagacttaaccattttactgcatttttgacactgcagtgtggtggcagtcagacactgctcacactgcaagggaagagaagcagcaaatggtatggactactcagcctgaaatctacagagtttgacagcactatgtcacgaagctcagcgctggcgatcaaattttgacgtctgcagtttctgacatggatatg

SEQ ID NO: 25175 - DNA, 1298 bp, Setaria italica
  Peptide Sequence Number=SeqID_91149
cgcaggctcccgacctccgtcagcgacagcgacgggcgcgtctccgtccagatccaggcatcctgtcaccggacctcggcctctttcccttctcccgcaggcatcctcttcgccctcgttcccgccgggttgcgactgagtggaggtccatccggactggtgttgatttcttcttctcttgccgatggcctctccgaatggtcctgctactcctccgatggtcatgtaccccttctaccccgctggggcgtttccccagcaagccggggatgatcaggctcagggtccggggatatatgccatacagcagaatcaactagcggcggccatgggaatggggcgctatgctccaactacactcgtaccactcacctacaagatcccagcggaaagcatcggtgctccagctggtgaagggaatgtacaggatgctatgcagcaaaatggacctcaaagacaagttgttgttaggaggtttcacttcgcttttcagcttgacctggccctgatcatcaaactagcagcagtggtctttctgtttagccaagaaggctcaaaacaaaggctgtttcttctcatactgtttgcatcattgatttacttatatcaaactggagcaattacaccttttgtaagatggcttcagcgggcgggaggggcggctgctcgtccaccacaggctcctgctcgggtggagaaccgtgctcttctccctgctcagaatgatggcaatgaccaacctaatgaccctgcgaaccctgatcaagctgcagagaaccaggaaccgggggctggagctggtaacgagaacccacaagtggcagagggagaaggcaaccggcgcaattggcttggaggcatcttgaaagaggtccagctggttgttgtaggatttgttgcatcacttcttcctggttttcagcacaatgattaggcctgatctcgtcactgtggaataaattaacggcagtgatatagttattgtgacatagggagaaaagaaacaattatatgaagcggctcaaagatttctgtttatacatcaatgtgtggttgttgttattgttgttttgcttcatttgctttattttctccttgatggtacatttgtggtagaacttgaacccatcctgattcctgcaatactggcacttcaatgtaaagagtagcctgatgccctatcagagaaaaggactattatttgcgttgtagaaacatgggatgcttgcacccaagcacagtatcagtttcttttgtaaactgtcaaacatgaaggacgcaagagattttttcagtga

SEQ ID NO: 25176 - DNA, 360 bp, Setaria italica
  Peptide Sequence Number=SeqID_91150
agctcgacggctacaagggttttaattgacttcgttttgggtcaattcagtcggcctcgggtcacgatcacaacagtaaactactaccgcctaccggcaacaggagattaagctgatggaatggattggttacctcgccgtgaaggtgtcggttcgccggtcgtagcggaggtgcgcgtcgtagcacgagagcacgaagccgacatgcccgtcctgctaaaacagcaagcacattccctcctagcgttaatcaaacaattcgtgcgcttagcctagtgttaatcacaactagcggcgatcaatacctcgcggttgtacacctgcgcgggaaccagaagtcgccgcactcgagagcccggt

SEQ ID NO: 25177 - DNA, 418 bp, Setaria italica
  misc_feature (28)..(28): n is a, c, g, or t
  misc_feature (40)..(40): n is a, c, g, or t
  Peptide Sequence Number=SeqID_91151
cttgcgccactggatctcgaagtggtcnccggggcgcagngcccccaggcagcccgacccgtgcaggtcgtgcgccggcgtgctcaccggcggcgcgcggatcctgctccactgcacgccgtcctcctccttggccggcttccggccgtgcggcgggtacctcgccgtgaaggtgtcggttcgccggtcgtagcggaggtgcgcgtcgtagcacgagagcacgaagccgacatgcccgtcctcgcggttgtacacctgcgcggggaaccagaagtcgccgcactcgagagcccggtaccacgcggccaccgtgtccgtcggtggcgcggcggtcgcgggcgctggctcggcggcaacggcggccggtgccggggtggccgtcccccttgagccagcggccggcgatccaggaagaagg

SEQ ID NO: 25178 - DNA, 821 bp, Setaria italica
  misc_feature (1)..(46): n is a, c, g, or t
  Peptide Sequence Number=SeqID_91152
nnnnnnnnnnnnnnnnnnnnnnnnnnnnnnnnnnnnnnnnnnnnnnctggccggattgcgattagcattccagggaattatgttgcatatataaaccaggatacagcgacagcacaaagccaagtcgaaaactggatataaatctgtacatggttcgtagcctatccttcttctagcaatcttgagcagactgaatctcccgcatcataaatctctagcaaaaaaagatccttcagagttcagacccgaggaggggttcagtccagaattatttgggacgcagacgcgcaggccgactgcaaatgggactggcgatctccatcagttgaggacatccacgggccagaatcgccgccacgtcgcgatctcgtccttggtctgcagcttcctgatgcccccgtagaagccgtcggtctcgtcccccgtctccctgtgatccttcctgctcacggtggtctgcctccaccgcgagccgggggcgtagtgctggaactccaggacgatcatatcgtcctcatggcagcgacaccacagatgctcgttcgcgttgcacgacgcctggtgacccacgacgccgtaccaccagccgtatgggaagtccttgttcttgcgccactggatctcgaagtggtcgccggggcgcagcgcccccaggcagcccgacccgtgcaggtcgtgcgccggcgtgctcaccggcggcgcgcggatcctgctccactgcacgccgtcctcctccttggccggcttccggccgtgcggcgggtacctgtcaaacgacaccgaccgcccacggtcgtagcggaggtgcgcgtcgtagcacg

SEQ ID NO: 25179 - DNA, 552 bp, Setaria italica
  Peptide Sequence Number=SeqID_91153
gcttacctatccttatccttgtctctctccctatccctatccctatgcttgccatcatccttctccttcctcctatcatccttctccttctccctctccctctcccttctgccactgccatggtgatccttctcctcccgccttgtgccttgtccctcctgtgcctgtcccggtgccgctcaccaccgtccacctccatctcgtccaacgccgcatctctcgtgtcgtcagcagcacccatgaccaaaactcaaaatcagcaccggatatcagcccacttctctcccgaaaaacgatctaggaggaggcgcgagcgagcgagcgtgcgtgccctcgacgttgagggagccggcacggcgaaggagcgctcagacggcgacgacggcgcgggcgggcagtccaggagatgcggaccgagtgggtggcgaaggagagtagaccgggacggctggcgggaggcggaggcgaagcagggagcggggctgccggcggggttgcggaggcggaggcggatgataggaggaaggagaaggatgatggcaagcataggga

SEQ ID NO: 25180 - DNA, 432 bp, Setaria italica
  Peptide Sequence Number=SeqID_91154
actggccaatcagctttgatgttagggactttgtcgatctcctctaattccacagctcctgaaccattatccacacagacattgctcgaaccttgaccttggtgcaggccgcatttgccaaaatgtgcagcacttctcctaggccccctgagactgtaaacaggagctccaaacgatgggtacacagttgcccacatggttatatcccaattgtactcatcaaatgtgcagaactgcttagccttggcatgaatcttcctccacactgttctattgaaggcgtagccaatgttacccatcttctcggcaaccaagctctcccaaccttcacctttcgccttgacatctgacggcgccaaattgacagcatagcacccgggacactttttcggttcaaatccacaagcagctgtgcggttccggtacgcatta

SEQ ID NO: 25181 - DNA, 196 bp, Setaria italica
  Peptide Sequence Number=SeqID_91155
gtgcgcgccagccgcgcgagcgcgtggtggaggttgcctcgcaggtcgagcgcgttgccaatgatcgggagcggccgggggcccggcggcagccggccggagcctcgacggcggctgaggatggccaggtagtagaggagcgagacgacgccggcgagcgttgcccagagcaaccagacctcgtgctccatctttt

SEQ ID NO: 25182 - DNA, 1757 bp, Setaria italica
  Peptide Sequence Number=SeqID_91156
gcatctgcgataatgcgacctccggttgcggcggttggtgtgttccgatgcggcgggacccgcagcggcactggcgacctgcggaggtggatgcagctgcggctgcccccggcctgcagatccccgtctactgctgcttgtggcggcggagattgtgactggggagacctgcaggctgcagcgccggcagcatctgcgacgtgcggtggcgggggctgctgaggaaaaggaaggctgtgtagctactccagctattgctaaagcagaagacaaaaatgaggctgaagttgcgatggggcacacgatgactgaaatctgtgacaagttcattgagttcttcatgcacaagaaaccagagacaaaggactggaaaaaagtattggtgtttagggaggagtggcagaggtatagaaaacaattctacaaacgttgtcaagtgcgcatagatatggagactgattcttcattgaagcaaaagttggctgtacttgctagaaaagtcaagaagatcgatgatgaaatagagaagcacatggaactcttcactgagctcagagataaccctgctgatattaatgctattgttgcaagacgacgaaaggatttcactggagacttcttccgccatcttaatttccttgtgaatgcttataatggccttgatgagagagatggagttgtcaggcttggggctaaatgtctatctgcaatccatgcatacgattgtacactggaacagttggacattgaatctgctcagtcaaagtttgacgatatactgaattcttcttcgctagaggatgcctgtgacaagatcaaaagcttagctaaggctaaacaacttgattcatcattaattcttctcattaacagagcttgggctgctgcaaaagactctacaactatgaaggataaggtcaaggacataatgtatcatatttatacatctacaaaggaaagcctcaagagtatctcacctccagaaatgaagcttcttaagtatctgctgaatattgaagatcctgaagagagatttggtgctcttgcaactgctttctctccaggagatgagcgtgaagccaaggatgaagatgctctttacacaactcccaacgaactccacaaatggatcaaaatgatgctcgactcgtaccatctgaacaaggaggagactgattttatggatgcaaggaagatgagcgacccagtaatcatccagagattaactttgctcaaagagacgatcgaggaagaatacatgaagcagtatatacaccccgacgagccagagtccatggacgacgaagaattagaatgattgatcagagccagagtccatggacaatgaagaattagaagactgattgatctgcctatacacgtgcaagctgacctggaaacgaaaccatctggtggagattcaagaggtagctaacagtcagcattgacgatccatatataagtagatagtcgatgatgccctgctgctgttacagatgggatgttgaactatataggcattgtcagaaaggttccctgtgttataaaggcgtaaagttcagtgtgttttttttgctgtagggtgaattagaagcatgacatgatgctgcgattctacaggttttgaaacatgcgacgcttaattctgcccagtcaaatgtaggagtaaactgttaaccagggcagtaactgtacttgtgcaaagtgaagtagaagaacaagaataataggttaataataggaagaataactaataa

SEQ ID NO: 25183 - DNA, 335 bp, Setaria italica
  Peptide Sequence Number=SeqID_91157
tttttctatttttgctttttatttattgtatctgttggtgatgatggtgtgtgatgcaaggttacggattgaactaaggcaatcgtcgtcgtcggtcgctcacttgagctgcattgcctccaatggcctccccagcagggacagcacggtggcggcgatgtgccgtggcgtcagccccgcctcctccatctggtcctgcggcgcgccgtggtcgatgtaccggtccggcaggaacatggatctcagtttgaggttcccgtcgagtaggccggcgaggctgaggtagtgcgcgacgtgggagccgaacccgccgatggagccctcctcggcggtga

SEQ ID NO: 25184 - DNA, 2281 bp, Setaria italica
  Peptide Sequence Number=SeqID_91158
tttttttttttagtatcagaaacttgtgatggctttcatttcgaggaccgcgcacctgccgcgccatttatttccaatacagattactgaaactaagagggggaaaaggaaagcaggcctactctgtatacacagtttttcacctagatgcatcaaagagatgcacaccaaagtattgctaatctgtggtactcctacacaacaacactatcttccaactctatgggatccgggaaattctcccgcgaagccctcttgaacgagaatgaattctcctcatcctcgtcacttccttctgttccctgtgacttggctttattattcggagcaagtgctttccccgatgttggcatgacgtcccaactctggtacttgtttccatggaaagcaaaacgccaagagcttcgagatgaggtactcttgagctgagatgaattggagcggagctcttcccgttcccgcaccaccgttagtgggttctccagcgctttcaggacgtaccgagcaagtggccgcctagtaggctttggattcaggcatgtcttcgcgatgatggccactgcccatacttcctctaggtggtcttcatccacaacaagggaaggatccacgatacctgagacaccctccttgtcattggcatcaatataacctaatgttcttgccaaccactcatctgaatctgagtcatttgagccactcacaccaaggtttcctgtgattagctcaattagcaccttcccaaagcagtaaacgtcgtatgtgcagctagctggtgggcctgatgtgttcttgtcaagggactttgatgatctcaaaatccgagagaagaaactctggctcccctgactttgttgagtgcatatttcactcaaactcccaaggcacacttcaaatttgtcatcaagaagcacactgcttgcttggatatttctgtgaaccaacggtggactgcattcgtcatgaaggaagcacaaggcctcagacacaccaattgcaatcttgagcctcgttatccaatccaatgagcgcaacccctcttcaacttccaccgacttcttgtgcagtgcagttgtgaggtcaccttttgccatgtacttgtagaccagcaattgctcctcatccttagccaaatgccccagcaatgaaacaatcctcctatggctatgcttcgtgaggaagttcaactccccctggcacttcttactgctcttaaggtcaatctttttaacaacaacttcgaagccactctccaggacaccatggtacatgtcgccggagtgcccatggttgataaggttgtcatccccaaaacccccggtagcatggtgcagctgctcataggtgaagtcatctatgacgatagggacactctttggtgaaccactggctccaggagatgccatgggtgacattgtgacaggattcacgctgctactcctccgcccagaccgaatgccctcctcagtctgctccactcctcttgttcttggtctcctccttcctcttcttctcaacaagcaaaagaccagcgcgccaaggccaagagttacaacaattgcagcacctccaaggaccccggccaaaatatgcttccatttgtcccctctcttgccagttgatggcatcggcagcaccggtggtggctgtggctccagcaatggtgatgatagctcggggacatccgctagcctcatcccatttctcgtgtagaacgcctcgcaatcccccggggtgcgctggtttgctgcacctgagaagcagttcattctgaagaacactgtaccatcggtcccattctcaattcctattccaactgcctgatcgaagtaattgcttgaaacatcaacaacccagaacctcttcctgatggcgtcaccgatagctccgtatagggaattaccagaaacgttgaacgaaactccagctccataactgccagagaaggacacgctcggtagcggcccggtgagattattgctggagagatcgaggacgcggagaccagggattgagaacagcgacgccggaatcgggccggtgaggttgttaccggagagaacaagggtcatcaggttcccggaggcgccgagatcggtcgggagctcgccattgacgcgggcggagcggaggtcgacgacgccgagagacggcggcaagccgcggccgaaccacgccgggatccgacccgggagcgggaaccccgaggcgttgagcgcctcgagcgcggtcagcccccgcagcgggtcgacggcgaaggccgcgctgcgggcccccgcgc

SEQ ID NO: 25185 - DNA, 698 bp, Setaria italica
  Peptide Sequence Number=SeqID_91159
ttcgcaaaatgcacatggttttgtaaagttcactcaagtaatttacaatacatatctcaacattctaaagttcatctacccatatcaggtaaaaacctacaatatgctgcactcaacagtcatgaatcttccacataactcaagaagacagatatcttcaactttgagccaaaagaatatattatagataagaacatgagcagaaaaggagcaaatcaacagttggactatttttttaataaaattattaaccactggcatgagctccatatatctatgattctacagagaaaagcaaagatgaaaagagtgcagatgttatcaatgaagcatcaaatccaaaagtaacaaattacaaatttcattactattaatggctgatatttttttataaccagatgaaagttaatcttctgtgcagtttttcacacaaagcgaccagagggagaaatgctgtacagccagcaattgaccctttcccaaaatggtatcagcagttctagctttaatacaaagatgaaaaaacataggtaacttaataactccaaatgaaggtttaacatggaaaccaaaaccaatgcaaagtgcctatccataacgagcaaaactcgatcaagcacattggagaaaagaatttattgttcttattaattagttttagctaactctggtaatcgcaagattagaaatggcaattt

SEQ ID NO: 25186 - DNA, 1412 bp, Setaria italica
  Peptide Sequence Number=SeqID_91160
aaaatgttctcaaaattatccactgcaatatgccctccaaaatggagtgaagaatttgacgtaacagtaactctttcgtaaactcactgatacagtaatgaatacaatcatcgaaaaaggatacaacaatcagcaatgctggtatgatcgaaatgaagccaacccagtccatcaattgaaggcagcaacggcagggacaagaactgatggggaacctgcgctcacggtgctctctactctgagggcaagcggatcccagaactgaacgacactgcggtttccggtcttgagactcatcggtgctttgatgcagtcagcagtatcatcgccctctcctgctgattttgccgcagccaccctcttcaatctgatacgttcagctcttgacccaattgtctgacccaatattgaggcagctatagtaagggccatggcagactttggcatcagcacagatttcctgagcatccctatgaaaggcacggcggcatgtaccgcagcaaaccactgcactgaaaacttctgcgtgtgctctctccagatgccgagaggaacatttgctgccataccaagcagtgcgatcaccagtacttttgttggcaggggctgagggcgaagcccctttgcaaaggctgtgcgggatattgctgctcgggcagcaaccaccgcaggcgggcacttcagtttcataccagctgggggcgtcatcatctttgccacaagaggtacaatgccacttaatgctctatatgactttgcaagtggacactggccattttccagccactcgttgctcactgcttcatgattgttagactggcctttattctgggggaggttgttggggttctttttgttgaaatttttcttattgcgcttgtttgagaagtcaccaaagctgaagaagcctccaaatgccgataggctaatggttgctgctttggccgccaaggggttgaactcaggattaggcttgggcaatggcttctcaatctgtggaaatgatccttctgaaagtgggacaaccccatctctaccatggaaaactcgaaacgctgtgtcaaaattaggtccatcttcaaaaattggtcccttggctcctcttgcaagaataggaaagttgacagacgagaaggaaaagcttgtaggctcgttgatgttcctcaggaatgggcatctttcaatcccttgctggacagtttcttccaagcacgttggttcattgagagctctttgaaaagagtccatatggaaaccaccggcaagacaacctccaattcgaagcgaagcgaggagcaggcgacggagatcttcttgttcctgtggcgggtcggctccggctgggtggggggcggtttcgtcgcgtgtggcgagcacaggcacaaggcgagaagaggggaagggaggtagag

SEQ ID NO: 25187 - DNA, 330 bp, Setaria italica
  Peptide Sequence Number=SeqID_91161
gaaaataccaaaatcatacactgaacagagctcgagaagttgactagcatagcgaggaggcgacaggcgaggaaggtaaaacagcggcggcatggggtcgcccaaggcggccaggagcatggtgaagcagcgcatctgccgtcgccggttcggcgcgctgttcgctgccgccctcgtcgcggccgtcctcgctgtcttcgtcttctccgacctgttcgcgcaggatccaaacgcctcctcgcagtttaacgccctccggccagtgcgcgatgcgtcggaacctgcagagaccgggaaatctcccaacaaggaggatcttgcaacggcgac

SEQ ID NO: 25188 - DNA, 458 bp, Setaria italica
  Peptide Sequence Number=SeqID_91162
gcgccggcctggcgctgcctcactcgccctactggtacggcctcaccgtcggcggcatgctcgccaccggcgcgcacgggagctcgctgtggggcaagggcagcgccgtccacgagtacgtggtcgggctcaggatcgtcacgcccgcgccggccagccaggggttcgccgtcgtcagggagctcgccgccggcgaccccgacctcgacgccgccaaggtctccctcggcgtcctcggcgtcatctctcaggtgactctggagctgcagccgcagttcaagcggtcggtgacgttcgtgacgcgcgacgacaaggacatggcggcgaagcttgccgcgtggggcggcctgcacgagttcggcgacgtgtcgtggctgccgcggcagggcaaggccatctaccgcgaggacaaccgcgtcgacgtctccacggccggggaacggcctcaacaactacat

SEQ ID NO: 25189 - DNA, 1673 bp, Setaria italica
  misc_feature (1605)..(1673): n is a, c, g, or t
  Peptide Sequence Number=SeqID_91163
taatgatgtgtaatcctttgtgcgatctgaagattatcttggccacattggaacagatgttgaaattgctcttgatgaatcccgtgtggtgtatgacatggacagtgatgatgaagagtggatatcaagttggaggaaattcttagttggagatgacatcactgcacatgaattggcagaagatttgtttgagagggttatggacaaattagagaagtttgcatatagccataactgcaatgagctcagcactgatcagatgaaggaaatggatattgataatgtaccactggacattattgaagtgatacatgcatattggcaagataagaggcagaaaaaaggaatgccgcttattcgacattttcagtctgctatgtggaagatctacgagcagcagctacatgaatgggaatcgactgtatacagaatgcagggttcatcaaatgggtaccaagaaaagaaattgcctcccaaaccagcattgtttgccttctgtttgaagcctcgcggactccatgtaccatacaaggggccgaagcagcgttctcataagaagcttatgtccacaggctgccatagcttttcgagagagcacgagggcttttaccgacaagtatcaggcaggaaatacaatgaatacattggggatgggaggatatgtgaaccatacgacagtggttctctttattccccaacagggtattctcccaggttctctacaagaacagattcccctcgggcgttcgatgcctcggaaagaagctctacaccaagatttttcaggactaatagtgtgaaaaggagtgcaagctttgcattctctgatgatcaccagccatcaccttccttccgccatcagaaagtaaagcgaggtgtggctgaccactggaacactgtcattcatgaatggcagaactcgaagcacctcttcccaggctcatcccgtgttgatattgaggagctcaagctgcgtgatgccgcgggtgcagcgcagcatgcagctgccatggcgaagctcaagagggaaaaggctcattgcctgatgcgcaaggctgatcttgccctccataaggccacggtggcactcatgattgctgatgcgattaaatcctccagcagggataccttccgggatggtagaagggatttgagggatgaggaacgctgacatcttttcttctcctttttgccacgagcccctggtgcatacatgcaacttgagctcgctggatctttcgctgacgaaaggagcttgtttgctccagtcgatctagtcagtagatagcatccccctcctctcttttcctccattgcatctcctgtacataagtttttattgttccttttctcctccttatttagaccttccggttaacatgttgcccggtgaagaatgggccagaatggtaggtcagctatctgttggtacaatctggcatgttgtccgcatagtggctatgttgtctcatggttgagtcactccgtagaatgtgactgtttgggtattttggggcttctagccgctatcatacaaaaacaatggaaagatgaatgaaaggcacagtacagggtgtagtgcctctaagactaaaaaaaaaaaannnnnnnnnnnnnnnnnnnnnnnnnnnnnnnnnnnnnnnnnnnnnnnnnnnnnnnnnnnnnnnnnnnnn

SEQ ID NO: 25190 - DNA, 574 bp, Setaria italica
  Peptide Sequence Number=SeqID_91164
gggcgctttctccactctgttagttgcagagcagctagtccggtggctccttggtgcgtcaagagaccgtagctccgtccaccattcaactgtctgcgcttccaaggccggtcgtgccgactgcaggccaagtctctgttgcacattgaaccaggaaggcatctctgatcgcacgcatctcagcggcagcatcccgcatcgccgtccgctcccttggcagctgctttgagcaggacacgccaagcccgaccactgaagccaagcacctctcgcttctgcttctcaccgtggccgggtcttccccctttgcttcttcatgaagccagattgccgggtcggctaccttcaaggctctgtcggggagagcggcctcggcgaacttatgaaggtccaaggagcctttgaacatgtcgtcagtagggctcatcccggtgaacatctcaagcaacagtatgccgaggctgtaaacatctccaagagttgagacggcgcgaccctcgccgtactctggagcgacgtatccaatggaacctcttagtccagtgaagctaaccgaattcagcatagttttgct

SEQ ID NO: 25191 - DNA, 491 bp, Setaria italica
  Peptide Sequence Number=SeqID_91165
cgacaatttacctgcataggaacgggcatatcaggcagctactccgcccccaaatgctcgccggcatctcccgttccctcactcaccgccgtccgcccttcccgcttgccgctaccgccgccgccgctgcagcagctatgtcgtcgtcagccacgggagcgaacgtctcggattgtccgatctctccggacaccacccgcgtggcctgggtggggacgggcgtcatgggccagtccatggccggccacctcctctccgccggctacgcgctcaccgtcttcaaccgcacggcctccaaggctcagggcctcgtctcccacggcgccagcctcgcggacagcccacgcgcggccgccgcggctgccgatgtcatcttcctcatggttggcttcccctccgacgtccgctccaccgccctcgatccgtccgcgggcgccctcgccggcctcgccccgggcggtgtcctcgtcgacatgaccacctccgacccc

SEQ ID NO: 25192 - DNA, 302 bp, Setaria italica
  Peptide Sequence Number=SeqID_91166
gttcagcttcagtggctgccccaaccttaataactccaacaccacgtgagagtttagcaattcttgcagagaacctttctctaagataggaactcgttgtctcctctacatctttcttcaattgcatgattctggcttcaatctctggtctcattgaaggatgtgcaatgatagtcgttgattcactagttattgtgatcttctgagccatacctagctgatcagaagtaatgccatgaagaccccagccaaggtcactggcaaagatattgctattatgacaggtgcagatttctttgcca

SEQ ID NO: 25193 - DNA, 394 bp, Setaria italica
  Peptide Sequence Number=SeqID_91167
cctctactcgtcgtcgtcgtccatgtcgacccgcgcgacggcggccttcttcttcctgccgccgccggtcgacgacccagcagcagcgccgccggcgtcatcagaaccgccgccgcagcccggcgtctgttcccgttcctgttgggcacggcggtgggcgcgtacgtggcgcagaactacaaggtgccaaacctccgcggcctcgccgagcgcggcgtccacgacgccaggcgctacgaggaggcctaccgcaagaagacgccgggctgcggcggcggttctgatgacgccggcggcgctgctgctgggtcgtcgaccggcggcggcaggaagaagaaggccgccgtcgcgcgggtcgacatggacgacgacgacgagtagaggtagcttgtga

SEQ ID NO: 25194 - DNA, 269 bp, Setaria italica
  Peptide Sequence Number=SeqID_91168
ttgtatttttctgacagatgcagactatccctatggtaaaaacgtacaactttatttatgggagggagggattcaacagctagttctactcaattcagttgagcagaaaaagcttactatggtgcttttattgactcttcatgcttaagccttcttttaggagtaaatcatgaaataagggttgaacacaaatttcatagtaacatctgagtttctcaattacaaatttaattctagttgtcagtaaagttgccttttagcacctccat

SEQ ID NO: 25195 - DNA, 209 bp, Setaria italica
  Peptide Sequence Number=SeqID_91169
ttggtgtgcaatatgacagactagtcgtagttgtcgtaggaggaggagcagggctacgtaaccgaggaggttgagcgggagtccgaggtcgaggaagctcgcgacaagtccgccaacacagatacgttttgaccgtcaccaatcttttgtggcgtagcggtggccggagttgatggcggtgggtggtgtgcaatataatagactagtcg

SEQ ID NO: 25196 - DNA, 1131 bp, Setaria italica
  misc_feature (894)..(894): n is a, c, g, or t
  Peptide Sequence Number=SeqID_91170
ggctgattgcatctgaaacaccgaccagagccagcatcgccaggtgaagagacataggagctagccgtgttcgcagcaggctgctgctgcctatacatgcttgcaggacagctctgggcattgtgcccacttgacccgcaacccatgcaggtctccacattccgtgtcgcagataatggagtggacaccccaccgtatgtgtttgcttgctgcccaagctggttcccggtctccccataccttggagtgcccatactcgtggcataggcactgttggaggctggcatgccttgtccagcgcccgaggtattgagaccagcactataggccatggcaccttgcacctcagaaggtgagcccgtatcatcctgcaatagggcaccaatccccttcagaaggtaagagcactctctcgacagatcaagcttctcagctttcacaatgctgcacttgacgcgctgctcgtcattaaaggtctcctcatagactttcagcttgaatagaaactgctgccagcgaaccccctgtatgatatctgcaaatcgttccgtgtcttcttctttcatgttgtaaagctcttcggcgctgcagcccattatctccacaccagcctcttggaatgcgttagcataggtgagcccagtatgatcctggatctgacacatcagtaagtacctatactcacaatttggtaagctctggtcgcatctgtcacaatgccatgtcccgtcaccgttatttatcacctttttgttgcactgcctaccattcacctccatggtgcaggcagggtaacaaaagttatcagtgttcaaatgcgaaactgtacctttaacagtgatccagtctggcttctctgatcgccccagatttccacccttgatttgcacaacngttttccgtacatcagtcttgcccatacttgccactgacaaagaaacacaagtagcagtctttccttcagttacataccagcgctgcagcttctcagcctcaggaaagtctgggtttatttttaattgggttgagctgattgagctcacagatctaccactgaattcagttaactaacgaaactaactttttactaaaagtacttaagtactaactaaggtaatttactaaaactaa

SEQ ID NO: 25197 - DNA, 608 bp, Setaria italica
  Peptide Sequence Number=SeqID_91171
tccccgtatgagagtgggaagctgtatggggaccttttttctctctctaatacaatgaagcgcagctctcctgcgttttctaaaaaaaaagtttcctgctattttttgcttcgaaacaatgaaaattgctagagccagatgcaaacaaaagaaaagaaccttttaagctgacgcttgctctgtgtatctacgaagacatggcccagcacgcacgtaatattgctgctcgctctttggttgtgccgaggaccagggatttcagttcaggcatcagcctttcttccagatctttctttctcgtgttcggtccaatgtgcaatcttcttcccacaaggcaaagacacagtacaatacaagttcgtcgttagtggttactttgtccagccctcattagtagcagcaggttgtagtgctagaagtttcactgtagtgctgtcataatcagccaataccatgtagattgaaaatggcagcttatcggcactacatatggggatctcagaatcactacaccatgacatccccttttatcttcattctttttaaagctttcagccacctatccctgttatggatgttatgaactgtttgccggagtcgaggttgaa

SEQ ID NO: 25198 - DNA, 784 bp, Setaria italica
  Peptide Sequence Number=SeqID_91172
ggcataaaacacctagtactccctgaactgtaacactgccaaatcctctatccccatagaaaagctgcattttctcaatgaaatattgagcagtgatagctgataggtatgtgacattgacaaaattgcatcagtaatgcatgaaaaaagttttcggataaacagatcaaatgacctattaaattgtctctccaagccacagaaaaaataataaaacaaatggagtatatgaacttacaagagtatcgatctgactgatgatattggcataatgcagtgcaaggcctgctggacccaatctattacgacgtttggtaggttcctgtgattcttcattgtctgaacgcccaaaggcattatggatctccaaatgtaagaagtgcacaatgtccacaagcttccccatgacctcttccaaatttttagaccatagagactttttcctcaaacttttaacatgcttccgttggcttttcacttcctgctttaatatatgcaggttatcacctgcaaattaacagaaccacattctgcatcataccgaatgacaacaataaaacagagaaaaaaatttctactcatgaaaaaagttaacaagctgaaccattaaaaatctgttttttaacacgcaataccaaaagaaaaaggagaaaaagaggcttgacgttacaactaagatccattaaaaatgaataaaatagaataaactgcatcagtagcatagaaaaggcttaaatggctaaaatattaagcgacccagatagcagcagtaattgtacacttc

SEQ ID NO: 25199 - DNA, 2390 bp, Setaria italica
  misc_feature (68)..(68): n is a, c, g, or t
  Peptide Sequence Number=SeqID_91173
atcatctcaagttcataggtaattacgtatgatggtgctcatgtgtgtgagcatcacgtcttcaccgngtttctaagaaaatgaaaacaaacacttcaccctcaagagggatcactaggtcaaagcctatgatgagttgaatgaaacacgaatacacgatgagatcttgatactcttttcccccttcaaaacttgcattccttgtacacgagctaataaacgcaacaaagccctttttacaataaaatttcccttttcaccccaccgtatataatacaaagttgacctggccatgcgagcccacggccagcatctctacctctcttggtgccttcaaacgcaccacgacgccggttcgtttcaagcatacaccttgctgcagacgtgcagcgtcatgccaattcagttcagcagatttcttgtatccttaagcaatctggattttcaagatcacgtgttgcagaacgtttttctgattttggcattgattaatctagattcatcattgtacccttaaattgtcaactctatcgatcacatcaagggcttttgtccggtcgatctcaaagtcgatcacaggaagcagcctcctgattgatagcaactctttcatgttgccgctgcttggtgaatgactgttacttttgcttaacctgctttgcttgttaagcctcgccttagtgtcaaactcctggcttttgcttataccagggatgaattttctgtacttgacatcccttagcatatcttgatcttcttgcgtcaggagaggtgacgaattgctgctagttttgtttggtgacaatgtgattgaggcccccctttgcgtaggagaccggacaggagacttgattggagacctctcaccattagcagttttggactgactgataagatgatgaagccacagaacaagctcaaggatatatgcttcagtcttgtccttgtcagcatggtacaatgtctcaatccgggtcaggtccatctgccccgtgggcttgcagttcacatctgaccctgcatttgcccattctccaacccaaccaaaaccatggtgagccttggtggtgttagttgcaatagggacaagccaccgcaaggtcttctccatttcagccttgatttgagaaacggtaagctcttccttgactccaaacgaatgcagcttagaacggagagatgattttatggtaggtggcaaactctggtataacgcatcccttgtgtttggaggaatagaacttgatcgagaaacaagagtatcgatctgactgatgatattggcataatgcagtgcaaggcctgctggacccaatctattacgacgtttggtaggttcctgtgattcttcattgtctgaacgcccaaaggcattatggatctccaaatgtaagaagtgcacaatgtccacaagcttccccatgacctcttccaaatttttagaccatagagactttttcctcaaacttttaacatgcttccgttggcttttcacttcctgctttaatatatgcaggttatcacctctttgtacaacactcgaaccatcttcttcttgatgtttccgctgataatcttgttcaaatctatccaaggcatgcatttcgtgatataattcagctgtaaactgaacacaaatcaccaattgctgcattactgattctgcctcttctttcaagtgatgttgaggagtccgttctgatgccagcttgtcaaagtagcggtccaagttgtgccactgaggatccttgcaacgatttccaaagcgaacaacttctgtagagaacactttcaactcttcccttttgtcagcagcagcaatcttgagtaattcatccatatctttggatataagattctgaacaccttctgagtgaagcacagtttcttttaaatgctttatgctatcttttgaaagggcacgcatcaaattgcaacctttgactatggtattggcaacctcaaatgctaaaatagatattttgtttccctttgttgtagtgctcgatccaaaaccacttatattcaaatttgtcatgctactgccaagtgtgtctagcacgtccactgctttcccaaggccagcagtactagctctacctagaattgagcttacttctgacaccttagccgtaacccctatccctgacctctgtgatggtaatcgcgccagctgtggcaccccatcccatggtggtaaggaggcatcagcagaacctccaggcactgcagtttgcgacaccgatacaggcagctgctgctgctgatgttgctcttcttgcatcctcttggcagcagcctaccacagtccttcttttctaccactactaattgttgtatttgtaggtccccccttttgcgttaggtagtaccggtactaggtagtactt

SEQ ID NO: 25200 - DNA, 270 bp, Setaria italica
  Peptide Sequence Number=SeqID_91174
cctgccgcccgccgcgcgcgggggctcgggtcgccgccgtagtcccactggtccgcccacgacgtgccgaacgagttgctgcgttgcatggctccgcttcctgccgaccttaccggcgacaggaacgacgaccccctcgagaaagaatcgaagaattcgagagatcgcgtgctgctttcttgcggttgaggcaaggagaagccggccggggaggcgaagaggttgtggcctttataggagcacgcttccctctgccgacgaatcgatcaa

SEQ ID NO: 25201 - DNA, 211 bp, Setaria italica
  Peptide Sequence Number=SeqID_91175
ggtgagagaggtgctgaatttttttggttagtgcgtcagggctgcacaccaatctgcacaagagctcaatagtactgattgcctgctcccaagaccagattgccaggatcagtcatattataccagctcaaatgacagaatttcccatacagtacttggggctgcctttgtcggtcagacacctgaggaaagctcactaccagccattaat

SEQ ID NO: 25202 - DNA, 284 bp, Setaria italica
  Peptide Sequence Number=SeqID_91176
gggcggggccggcgccggggtggaactggtggggcgaggccttggggtgcgcctgggccttcttgtcgtcgggctccgggtcctcgaccaccacggcctggaacgaggagcagttccgcaccgtgggggagcgcagcagcgaagagggcgtccgcgtcagcttgcccgcgccgccgggccccgccccgccgccgtggccgtccatccctccgccccctcctcgccgccgccgctccccggccccgacgccgccctccctgtcctcaatctccggcggatctccg

SEQ ID NO: 25203 - DNA, 242 bp, Setaria italica
  Peptide Sequence Number=SeqID_91177
acctggtgcttcgcctccggggtggccagtaacttcacagggctcattgtgctgctgtcgtccatgggttcacaagtttggttgtctctccaatggagattgtctgtgtcgtgctgtgttctgtgtcctggtcttctactggtgcaagtcctatgtcgtccggttgtgtttgccaaacaaattcagggttcacttatttcatcacagttcaaccaagatgctgcacagcagcaaatgttcac

SEQ ID NO: 25204 - DNA, 160 bp, Setaria italica
  Peptide Sequence Number=SeqID_91178
ccctccacctggtgcttcgcctccggggtggccagtaacttcacagggctcattgtgctgctgtcgtccatgggttcacaagtttggttgtctctccaatggagattgtctgtgtcgtgctgtgttcacaaacacaaccggacgacataggacttgcacc

SEQ ID NO: 25205 - DNA, 562 bp, Setaria italica
  misc_feature (540)..(562): n is a, c, g, or t
  Peptide Sequence Number=SeqID_91179
acgaaggaaggtccaccaccccccacctcgtgctcaggctcaggggtggaatgcagattttcgtcaagaccctcactggcaagaccatcactcttgaggtcgagtcctcagacacgattgacaacgtgaaggccaagattcaggacaaggagggcatccccccggaccagcagcgtctgatctttgccggcaagcagctggaggatggccgcacccttgctgactacaacatccagaaggagtccaccctccacctggtgcttcgcctccggggtggccagtaacttcacagggctcattgtgctgctgtcgtccatgggttcacaagtttggttgtctctccaatggagattgtctgtgtcgtgctgtgttctgtgtcctggtcttctactggtgcaagtcctatgtcgtccggttgtgtttgtgaacatttgctgctgtgcagcatcttggttgaactgtgatgaaataagtgaaccctgaatttgtttggcaaaaaaaaaaaaaatggtttctggatatgtcgttatgtgaaaaaannnnnnnnnnnnnnnnnnnnnnn

SEQ ID NO: 25206 - DNA, 270 bp, Setaria italica
  Peptide Sequence Number=SeqID_91180
gcatcttggtacacattcattgacagggtcacaacaatgtggggaatggcacacctggatgagtggaggccggtgatggcaatgctggtcttcaacctcatctctgctgtgatgacagcgttggtgaaggaggcgctccaacaagggctcaacagcctggtcctcatcactcttcggcagttggtggcaaccgtcttcctagctcccatagcctacttcaaagaacggaacacaaggccgaagctcacggcagagatctttgtgtaccta

SEQ ID NO: 25207 - DNA, 628 bp, Setaria italica
  Peptide Sequence Number=SeqID_91181
ttgacgacgagatcaaagaacgtcaagccgtcgccggagctaaggaggcagcttgttccacgcatcgagccatcgtccgttgtatcggccgtacaggtgacgttcttcaagtgtggatgggtggcgttagggacagccctccaccacgccgccatcgacgccatgagcgcgatccacttcttccagacatggtcggccttctccagggacggcgaacgcggcgccgtggagcccccctgccatgaccgcaccctcctccgcgcacggtccccgcccaccgtccaccctgacgctctctcgacgttctaccccaagctcgccttctccgatccgtcgggacctctcgccaccaaagtcttcaccatttccaaggaccggatcgcctcgctaaagcgcctgtgcggcggcgcgagcacgttccgcgccgtgagcgccctcgtgtggcggtgcgcgtgcatcgcgcggcggctcccgccggattccgaaacccggttcacctccgcggtcaacatccgtcgccgggtgaatcccgcccctcccggaacgctacttcggcaacgcgttggtcgaggtggtcgtcgccgccgccgcgcgggatatcacctcggaggcgttggcgtccgtcgcc

SEQ ID NO: 25208 - DNA, 335 bp, Setaria italica
  Peptide Sequence Number=SeqID_91182
ccaaatctgttaacagaaacaccatctacgccttctaactctctcaacattgaacctcccaaccaacctcatcaccataaacctgcacataaaggagtgactcctccattttcaccgttggagaagcataaagactatgttaagttagtcttgattgcagttctcccgacagcagcagtctcattcgttgctgcatttctaattttctactgctgtggatgcaacaaaagcaaggtctctgtcagtgagcaacgagatgaccatcctcttcttcacatgcagttggctaatgtgcctggttcatcacctgatgctcattgtcctgccagtccaca

SEQ ID NO: 25209 - DNA, 317 bp, Setaria italica
  Peptide Sequence Number=SeqID_91183
cccatacagtctgctgacgcttaacaacacccacgtccttcccaaccacgtcgacaccgttcaccacgctgtcgtttctaagcgccacagcggcatgcccctccccaacgccgtgcccggacgccgccgcagaagctccctccggctcctccgccaaggcgagccgcaggagcaacgcaccggcagcgaggaagaggaggcccagccatggggctctcctcctcaccgacaccgccattatcttccccaccctcacccaccgcaagctcaccccacctcaccttacctaagcgctcgctgtgttgcctatatcaccg

SEQ ID NO: 25210 - DNA, 258 bp, Setaria italica
  Peptide Sequence Number=SeqID_91184
attaaagatatggcatgatgataaatgtttccatccttcatctaagcataggtacaaaatgagtgtttctacaacttcctttacagttttcaaattcaagtggtatctagtttgtagtagtggtcagacctgacaagtttcaatagtgacctacaaaggatagtaacttcatacagtgctgtataaaataagccaactcatatttatataaattgaaccaacttcaatacaaaggatagctatggtaatattttgcat

SEQ ID NO: 25211 - DNA, 754 bp, Setaria italica
  Peptide Sequence Number=SeqID_91185
ctttgcctgtacctcggagctcaggaggtatgtacgtaccagtcacggcgagcgagatcgatacgatgagaagggattcggagatgaccaagggcgctcgtcgcctggcactgttcttcttgctcgtcagcgtggccgctcgagctgtttctgccgtcgtcagcgatggcctgttaccaaatggcaacttcgagcaagggccgaacaagtccgagatgaacggcacgagagtgaaggaccgcgacgccatactgcactgggagatctatgggttcgtggagtacatcgagtccggccacacgcaggacgacatgatcctgcccgtgccggagggtgagcaggccgtgcggctgggcaacgatgcaaccatccggcagcagctggacgtgacccgacacacctactactccatcaccttcaccgcggcgcgcacctgcgcccaggccgagacgctgaacgtgtcggtcaccccggagtccggcgttctccccatccagaccgtgtacaccagcagcggctgggactcctactcctgggccttcaaggccaagcacagctccgtgtggctgtccacccacaaccccggccacgaggacaacccggcgtgtgggcccctcatcgacttcatcgccatcaagaacctccaccctccccatcacaccccggtccaactcgatcgtgcagtcaacatgttgaggaacggtgactttgaggaggggccctacatcttccccgacgtgccctgagacaggga

SEQ ID NO: 25212 - DNA, 599 bp, Setaria italica
  Peptide Sequence Number=SeqID_91186
ccaccgaccggctgaggaggatgttggaggacctgatgttgccgtgcgtcaccatggagcccgtggcgtggatgtactcgaggccgcgcgcagaggccagcgcaatgcgcctcctcgactcccagctcagcggcgaccggccggagccgcggttgccgtgaagcatggaggagaggctgcccatggccacgaactcgtacaccatgagcttctcgtccttgctgaagtaataggcctgcaggggcacgacgttggggtggtcgatgccgccgatcgccgcgaccttgtcccggaactcgcgctccggcagcgaggtctccttgaggcgcttcaccgccatgaccggcccggactcaatcgcggccttgtacgtggtgccgtacgtgcccttgccgagaacctcggcggacgcgcgcagcaggtcctcgaggtcgtagggccgagggatcctcccgaagaagaaaagcttcttcttccccacggatgcggcggcgacggcaggcggcaccgaaggcggcggcctcgcgtcggagacccgcggagtgtagccgttggggctcattgcctctttgctgtgcagcgccagctctgccgcgacg

SEQ ID NO: 25213 - DNA, 420 bp, Setaria italica
  Peptide Sequence Number=SeqID_91187
tttacgttaggtaattaacctggaaattactgtctggatcaagcaagtatgggtagcagcaactcagcaagcagttaactatagcagctctattggttcttgactgatctagcaacatacagttactcggtaggttgtcagattattgattcctctgaagcaaaggaagcagacatggatgggatcatggtgagtgccgcgacgggggtgataagctccctccttgccaagcttgctgacctgctgagggaggactaccagatgcagaagggcatgaggcgtgagatcgccttcctccaggacgagctgagcagcatgaacgtgctcctcgagaggctggccgacatggaggtgctcgatccgcagacgagggagtggaggaaccaggtgagggagatgtcatacgacatcgaggactgt

SEQ ID NO: 25214 - DNA, 286 bp, Setaria italica
  Peptide Sequence Number=SeqID_91188
cagcgccgccagctccagctgcgtcaggctgccgtcgccgtccatgtcgaaccgccggaagatctcgcggagctgcttcagctggctgccccgcagcaccgcgtgatgcggcggctgctgctgctgcttcgtcgccggaacggaggccgccgccgccgccggtgctgaccttgtcatccctggtatgtggtagctggctgctggaatctttggggttcgtgcaggtggatgaggaggaggagatggtgaccgagagcgagagggctgaccgggttatttatggagg

SEQ ID NO: 25215 - DNA, 305 bp, Setaria italica
  misc_feature (299)..(299): n is a, c, g, or t
  Peptide Sequence Number=SeqID_91189
aacagcatacattctgaagaacgaaagccattggattgtgagttacttcggtatatctcttaaactggtgctttaaaaggtcagcagaggcagttaactctgatgagtgatgctctggagtagataaataattactcagccgtctgctagagataacagcatcaatcagcccattaataacccatggaaatgagtttaatggtgatattaatgtgttaaagagtgcaacacaagtaaataccgtggcggcatccaatgtgtgtcccattattgcgaaaatggaaaaggtgaaaaggganaacaat

SEQ ID NO: 25216 - DNA, 769 bp, Setaria italica
  Peptide Sequence Number=SeqID_91190
cccggcctctttcttcccgatctgcacgtagaaatggttaagcagagacctcttggcctcgcgcacttggcagtggacagctgccttggggatcgtcttcaagagctcgtccccgaccatccgtatgtactgggacacgttggaggcaatgttcctgtagtgcccatcgccgtagcggtcaagaggcaccgacgagtccgctgaatgatttttagctccccccttagtactagcatcagcagcaggatcttgaggtcggttccggaagaaatccaccgtcgggtatgtagcctccatttccactagacgaagtgctgtgctgcgcccgtcctcccgaaaaccttccagggcttcattagcagcggtcgcaatcgaagcttgtagagtggggaatcttctcagttgctctgtctctcctatggatttcctgaccaagtctttcagaacaacatggaccgcatcaaccgtggcttcagctggtcccctgaaataggtgaggccagttccaataagacgacggtatccttgttcaggggcgataagatggggctgatagccatctgcttctgagaccaccttcttgacgttttccacagatagatagcgatcaaagggaagcttcttaaaagcagcagggagcttatgatcaaacacacggtatattctatcgccgcctgacctccctccatcaagatgttccttgaaaacacggtcaaaagcacggcagaggtccaatatggtgtaaagttgagcccctggatacaagaaa

SEQ ID NO: 25217 - DNA, 273 bp, Setaria italica
  Peptide Sequence Number=SeqID_91191
ggggagcgcgggggtgggaggggagggaaggcggtgaggggagcagggcggggagaggagttcgaattcggagggcaagagggggaatggcacgaaccgcggcagccggctcgcaagtcgcagctctgggctcccagtctctcagatgcgtcgcggtcgcggaggcgggggcgagggctgggctggcggtggcggtggcgtggccggcgaggcggccgccacggcggtggagcgtgccttgactgattcgggatcagacagcggcgaaggcga

SEQ ID NO: 25218 - DNA, 468 bp, Setaria italica
  misc_feature (468)..(468): n is a, c, g, or t
  Peptide Sequence Number=SeqID_91192
gttgattctcggttgaaagtgttgaagcggaagtattattcaatcaaggatatgttagcatcgccaggcttctcttgggatgacgcaagaaagatgatccaatgtgaaaaacaacgatatgatgaatattgcagagtacattattctgagtattttggcactcgtatatttttcatcataatatgtttctgttttgacttatttgtttgatgcaggatcatcctagagccaagggtatgtatggcatcccatttgtatattttgatacatttgatgcaatatatggcaaggacagatacatcggagaagggttggaagggtctgaagaagcaattgctaacatggagaatggtgaaaatgcaaatgaagttggagatgaacgaagtggaggaggatgcgatgtccacaggagtatctggtcgctccttggctgcaacactaagctctaagagtcagaagaaatacaan

SEQ ID NO: 25219 - DNA, 825 bp, Setaria italica
  Peptide Sequence Number=SeqID_91193
ttcgacggcagaggtagaataaaaggaagtggacagcagaagaagatgaagagcttgtcaaagccttgtgcgaggtatctgctgatcctagatataaggttgaagaggggcttcaagaactgttactctcaaggcatacagagcatcttgcacaaaagctacctggccgtggtattaaagccagccctcatgttgattctcggttgaaagtgttgaagcggaagtattattcaatcaaggatatgttagcatcgccaggcttctcttgggatgacgcaagaaagatgatccaatgtgaaaaacaacgatatgatgaatattgcagagatcatcctagagccaagggtatgtatggcatcccatttgtatattttgatacatttgatgcaatatatggcaaggacagatacatcggagaagggttggaagggtctgaagaagcaattgctaacatggagaatggtgaaaatgcaaatgaagttggagatgacgaagtggaggaggatgcgatgtccacaggagtatctggtcgctccttggctgcaacactaagctctaagagtcagaagaaatacaagcatgatggaaaagggaataggactgaatcaaattgcccgtccctggacaagttcaaggatctacatggtcagtttcaaactgccattcagcatgtaagtacgatggcagcagcaatggagctgttcaaggatgtacatgatcactttcaaagtgtcgttcagcatgctggtgcaatggccacaggaatggagcagttcaaggatgcccatgatcgctttcagagtgttgttcagcatgtcagcacca

SEQ ID NO: 25220 - DNA, 598 bp, Setaria italica
  Peptide Sequence Number=SeqID_91194
aagtcaaggtacaccaatgcagagccggcatacccactgctaaaattcaacccggagaagcggttgttgcagaggtctatgaccctgagctgctcctggaacgccccaacgactgagccgccgagccggttgccggacaggttgagataggcaagggaccggagcggcgacaggtccggcaagtccccgtcgagcgcattgccggagagatccatagccacgaggttcccgcagccgaagacgacggcgctggggacctgtccctggaactggttgtggctggcgttgagcacctgcagaccggcgatggagccgagagcttgcggcagcgcgccggtgaaggcgttgtgggagacgtcgagcacctggagcaacgcgaagttgccgacgttgttggggagcgcgccgcggatggcgttgccagagaggttgagcgctcgcagcgacgcgccgagctcccacaagtcgttgggcagcgcggtgaggcggttgccgctgaggtccagcgcctggaggcgcgcgagcttgccgacggtgtcctccgggatagcgcccgccaggcccatccccgcggccgagaacgccaccacgcggccct

SEQ ID NO: 25221 - DNA, 587 bp, Setaria italica
  Peptide Sequence Number=SeqID_91195
ctatgctgaaaaaggtagttgtaaatgcattcagaaagccattgcagcgccaatcgggcacataagcattattcagcacactgctgtgctagagacgccaagcttgctctctaggcttgcagctcgagccgtcgcaggcgctccacctccctgccgatgacgccgcagcgcaccatgctggccaccgtccgccacagcagccggaggtccccccacggctcgccgggcaccatccgcttgtacaggtagctctcgaaggtccgccgctgcacgtactcgtcggcgcacatctccaccagcgcctcccgcccggcgttgccgccgtagaacacttgctgcagcaggtccaggaaccggaacatgagcaggtactcgtcgtcccacggccgcaggtacccgcgcttcagcccggcctccgtgacggcgcccgtgcgcgcccattcctccgccatggctcgcccgcacagccgccccgacttggccgcgaagtagatgccctcgccggagcaccgcgtgacgtaccccgccgcgtccccgaccagcgccacccgccccacgacgcggcgcgggcgcgggtgctccgggat

SEQ ID NO: 25222 - DNA, 471 bp, Setaria italica
  Peptide Sequence Number=SeqID_91196
ttgaatcctcatctccgatctccatagctctattaagatctttggtagcatcattcctctttaaggacctttttgcaagctcctttttcttcatttcaggtggctctccatcaaaaacaaaaacaggctttatccctgcttctagcattcttactgtccggttcaacataccctgcagatgactcgtgacttcaccagcctcattggtcagaagctctgatcctttccttccaaccacaataaggaactggtagatgctgaggcttgcgtcgacagagattacgcggccgcggtagtcctccacccgccgctgcaccgcggccctcggcgcgtgctccgccagcagcttcgtcaagcccttgattcccatggtggcggttgcggtggcggcagtgaccggcggcgacggatcgacggtggagcaccaaagcgcagccaggcggcggcgaatccccactcgtagtttccccg

SEQ ID NO: 25223 - DNA, 415 bp, Setaria italica
  Peptide Sequence Number=SeqID_91197
gacttcggcctggccaggttcgccgacgagggcgccaactcgtcgccgccgccgttcgccggatcctacggctacatcgcgtgtctcagcgggtgcatgaccaagatcacgacgaagagcgacgtgtacagcttcggcgtggtgctgctggagatgatcaccgggcggcggccgctggacccgtcgttcggcgaggggcagagcgtggtgcagtgggtgcgggaccacctctgccggaagcgggagcccatggaggtcatcgacgcgaggctgcagggccgaccggacgcgcaggtgcaggagatgctgcaggccctaggcatcgcgctgctctgcgccagcccgcggcccgaggaccggccgatgatgaaggacgtggcggcgctgctgcgcggcatccagcacgacgacggca

SEQ ID NO: 25224 - DNA, 178 bp, Setaria italica
  Peptide Sequence Number=SeqID_91198
ctatggaggcatatcaatcagctcctatggaattacgttcacactgcaacctcagatatggatggcatgcaactccaattagtccaacagcttcttttgaaagagtacgttcccttatatctgtgtatggacaacaagcacatccacggagacagacatatcaatcagctgaaatggg

SEQ ID NO: 25225 - DNA, 581 bp, Setaria italica
  Peptide Sequence Number=SeqID_91199
cactgttctttatggaatcttttgagctgtgtcttaacggtgtgtgcttctctatgaatgtaatgtttctttccatcatttttctcacatttcataaattgaatcttttgttacttgtagcttaggaagatttttggatgcttatcgggaggcagtgaatgtctttgacagctctgcttatagcgtcaaacatgctcatgagtgttttttaagaaataacaccttacatgattcaatcataggcatatgtgtatgtcacgtatttattcacaatacgctataatctatgcttcagtcagggacagctctgtgtttgctattataaaagttcatggcagtaatgttgttttctgttccactttcaatgtttgtaattgttcttagatgaaaaaattgaccttaagatgaaactttttctttgcaccagttctcattgagaaaatgacacaaaaaaggtaaacagcttgaggcggtcaaattcattcaagctcttaatgtagtgcacaagtatcctttgttgcctgttctgaggtcgtacattagtgctgctgcattagctgggaagatgatccagatcaggg

SEQ ID NO: 25226 - DNA, 1054 bp, Setaria italica
  Peptide Sequence Number=SeqID_91200
ccaagcagatagcattccgtcgaacacctcacccccgctccaatggcagccaccaccaccgcatcgctctccaccctctctcccgcggccggcaggcggttcgccctctcctccacgtccctctcattctcctcccaccgcctcaccaccacccccgccgtcctccgcctccgcgccgccgcagcctcgaggacgccgacaaggaggcgggcgtcgtcccgcatcgcggcgactatcgcggtgggcgacaagctccccgacgcgacgctctcctacttcgacccggccgacggggagctgaagacggtgacggtctcggacctgaccgcggggaagaaggccatcctcttcgcggtgcccggcgcattcacgccgacgtgctcgcagaagcacctcccggggttcgcggagaaggccggcgagctgagggcgaagggtgtggagacgttggcgtgcgtgtcggtgaacgacgcgttcgtgatgaaggcgtggaaggaggcgctgggggtcggggacgacgtgatgatgctgtcggatgggaacctggagctgacgcgcgcgctgggcgtggagatggacctctccgacaagccggtcgggctcggggtgaggtcgaggaggtacgcgctgctggccgaggacggcgtcgtcaaggtgctcaacctcgaggagggcggcgccttcaccagcagcagcgccgaggacatgctccaggcgctcgggtgagcaggttgatcaagtccagtcgtcgtcgctcagggcgtctcctcctcctccttccactcgtgaagtaaagtagtagagaataagaatcgggagcatgtctccgttgatgcgagcgcagtgtcgccgctgtgaagaggaattttttttccctttttgttcgtcgcgtccaatgtgttcgagaacgtgtttcttcttgttagttgttacccttcgcagaaatgcggattgcatgatgaatagtatgtgcgtgccatggcagaaaccaggagagatttactgccgaactgatatgttttcatatggatgcaccgtctgacacgggatccgt

SEQ ID NO: 25227 - DNA, 344 bp, Setaria italica
  Peptide Sequence Number=SeqID_91201
tgataccgtatgtagtcttgagttatggctacattctatagagactaaccgcaatctgaaggcatgaaaccagttttgttggtttaactataatgtctgtacgaataaaatgtgtgcaatcatggatgagccttagcactttgcccttccatgggtaatatggcgcagaatcgccgggcattgttcttgtccacatgaagaggcccaaagcatatgtcgaggtgccagcaaaaaacacccaacccacaccacaactcaacgtgccacagccggcctccttaccccttgtcccatcctggacccttagcggcaaacatgggttgtagaatgggccgcgaccccag

SEQ ID NO: 25228 - DNA, 337 bp, Setaria italica
  Peptide Sequence Number=SeqID_91202
atacagcaagctcacacccaattgttttgagccttgagaaaatagaatgttgctctgaccacggctccagaaagctctttagatactctgtggagacagcaatggaggaaagttggtatatatgtaggcgcgtggaatgtggtgcttcaattgacacaccctctcaagctgaaaggtcctgacgtccattgagaaacattcgtctgccacctctgtcgatgagctcacacgcacccctgctgagcttaggtgttcaggaaacctcagcaggagtatgtacctctccattgcacccctgatgtaatgccggaactcaggatccaatgggatcgtcttc

SEQ ID NO: 25229 - DNA, 257 bp, Setaria italica
  Peptide Sequence Number=SeqID_91203
gcgcctagagataatagatgtttgttttctatgccgtgagctaggtgtcaagtgcttcaactagtttataaccacaatggggcggcatgcggcataaacatttcattgttgtccagcatcacgtcatccaccttggcccaaccattattggcctctcccccaaccatcttggcacccacaatgatgattcatggtttgcagcattcttttttttttacgaagagtcaacagggggataaggagagtccgtgtgaacg

SEQ ID NO: 25230 - DNA, 1174 bp, Setaria italica
  Peptide Sequence Number=SeqID_91204
gatcaggtcaagatgagggatgcagctccagctgataggaagaggagccccttgagagggagaactacccctgagcaatcggagaatccacatgccaaggtgattgatcaccatcgctggcctgctatgatggggggcagggtgtctgcaagcgcaatgtctaagagcatggatctcactgataagattagtaggtctgctcttccatcagttccatctcgtggggtttcaccgaagagaacaacaatgtcctccgctgcaaatgcattgtcaagaagtattgatcttgctgatgtagttgaccgcttggtctcttcgtcagtgtcatcacgagggggttcaccaagaagatcacctgcttctagtggtgcaaatgatgtgcctaaaagcatcggtgttggtaaagatctcaaacctgcatcccttgggaatttcattaagaagggcatcagcaataacaaaagctgcatcagatggcactaggaacctatcagagagcatggatcttactgaaaatgataacagtacactctcctcatcagtttcatcacccagcatttcaccaagtgcatcggtgtcaagtgtgtctaatgctgcatcacagactaccgcaaaatcatctgagagactaaatggacccgtttccaacctgtcttcatcaagaggactttcacctagaagaacaacttctggtggcattggtactttatcgaaaagtgttgatttccctgaaaaagatagaagaccagcttcatcaagaggggtttcaccaagaaggcgactcgcctctgatggtgttaatgatattgcgagaaatatggattttgctgaaaaggacaacagagtagtcagctcgtcaattccatctcgaggggtttctccaaggagaagacttgcttctgatggtgtcgatactatatcaaggagcattgacttttctggaaaggatatcagaccatccacctcatcctctgcatcacgcgggatttctccacgaagaaggcttgcttctgatggcatcagtgctgtaaccaaaggcatggacttttctgataatgctaacagaccatctacctcttcagcagcatcacgaggcatttcaccaagacctcaattagcctctgatggaattgccactgtataccaaaaaccccagatcttgctgatagacatg

SEQ ID NO: 25231 - DNA, 428 bp, Setaria italica
  Peptide Sequence Number=SeqID_91205
cgggtctcctttgtcaataggccatcgccgccgcggcatctcgccgggatcggagagagagaggcggccggccgatccgtctcctcctcctgcgggtcggcgtcggggagaatggcggggaggatggccgatgagaaccggaggccggcggcggggaagcccgtgcccggcgtggcccgagagatggggaaccggcgggcgctcacggacatcaagaacctcgtcggggcggcaccctacccctgcgccgtcgccaagaagcccatgctgcagaagaatggaagggatcagaagaagccggcgttggcagccagccggcccatgaccaggaaattcgccgcctccttggcgagcaaagggcaacctgaacgtcaggcgaccacaattgatccaggatttggagctgatcacaacaaggaacctgtcag

SEQ ID NO: 25232 - DNA, 304 bp, Setaria italica
  Peptide Sequence Number=SeqID_91206
ggaagtagccagtggcgatggtgtcgacgacaagcgtggcgatggcggcaagcatggcgacgaaccccgcgaacgggaacttctgccagggcccgtcgacgaggcacggcgagccgagcttttcgaaggcgtccgggaggatgtgcacgaaggccgtggcgagaatgacgccggcggcgaaggcctttacggcgaagaagaggtcggtgtccgggcggagagccgggatcttccggccgagcgaagggatggcacagcccacggcgctggagactaggatggagaagatggcgatgatcttgag

SEQ ID NO: 25233 - DNA, 303 bp, Setaria italica
  Peptide Sequence Number=SeqID_91207
aagtgaggttcccaatggccgggggagagggctccggcgaacccataagagggcaggctcagtgccaccacctggccgctagtgcacgccacgccctcccagctgcagacgccagcggtgccattccaggatgcaagcatgccggagccgctgccggcgagctcagccttgaaagcaagcagcgcgctggcctcgtcgctggccaccgccgtgcgctccccaggaggccgctgcgatcatcacggcgatggtggcaggaagcaagctcatgacgcgcattgccaatgccatggtagagctggg

SEQ ID NO: 25234 - DNA, 396 bp, Setaria italica
  Peptide Sequence Number=SeqID_91208
gaaggtcttcatctaaatcgcgtgataaaagccagtgcgctgcatgcccacaatgtaggacagcagttcaatcagttggaaggaatcacttcctacataatattgaagaggctatattgcaaactttttcatcgctacagaggtctgatgaggagattgcattgctagagtcatatgcttcggttaaatctaatattgttttggggaaacagaaaaatcaatcaaggaaacggccttttccacgttcaactgataatatcgacaatgcggatctgccatgtcctcaatgtcgtggcgaatttggtggatttagatgcagtccaggagctgcacacttgcaatgcgatggatgtggagggatgatgccagccagatctaatgtcaatataccacaaa

SEQ ID NO: 25235 - DNA, 303 bp, Setaria italica
  Peptide Sequence Number=SeqID_91209
cgcctagctagcctcggcagccacagacgcggtatcacgcgcggggagctcctctccggcgaccggcggcggttgacgctcttcgtcttccgcgcatggcggggctgcagcggtcgagcgagacgttccggcggtcgggctcgtcggggctggtgtgggacgacaagaacttctcgggcgagatcaagccggcgggcgacgacgccgagccgcgggcggcggtggagcgcagccggtcggcgggacacgcgcacgggcacggcgggtacaggaccacggggcgcgtgccgcccgcgctcgacc

SEQ ID NO: 25236 - DNA, 782 bp, Setaria italica
  Peptide Sequence Number=SeqID_91210
atcatttctaaaacattacccaagcattcaggcaaatctgtatcattcccatggttaacctaactcaatatagatcatgcagtacatatacagccagaaataacatcagatctttgttcatgctaccactacactatgccactaacttgggttctactctcaacccatagtcataaaccatttctagtgacctacactaacaatgctgcctatcaatcttcttggttttttggtcaagttagcccaactggtcatcagtgtcatcgtcatcgtcctctgcaagcttgtcaatcagcatctccattgtctcaatgtacctcggcatgtaatggtctcttatcatggatctggccagccggatcttgccgtacatgctgcgaggcgtctgatagatggcaaccacctcgtcctggtcatgctgcttgccggtgccttcttgctcttctggacatggcaacacaaccatgtgcatgattcttccaggagggtacagctggtgacaaggagaggggactggccatgatcgcggtgatttcagaatctgcttcatgtgttcttgacctgctgctttctccttctggttagtctgctcagcatctgatctcggatggctgagttcttcaagagagcatgacgctgattctcttgtgttttggtcagttcctgcatagatggacataagtgctggaatgctcatggcctgagtggggttcatcaaagactccagagtttgcctatttgcagcaacagatgaccagcaggatagtgcagagtgcttctgc

SEQ ID NO: 25237 - DNA, 591 bp, Setaria italica
  Peptide Sequence Number=SeqID_91211
ttgctcataacgggcgttcctttgatgtaccgtttctcttctttgagttccgacggtgtaaagtagagatgcctggtgactggctttttgtcgatactcttcctattgcaagacaattggttgattctgaggggtcaaaactcagctctgtgtcattggagaagctgagagaacgctacaagattcccctaacagggagcgcgcaccgtgccatgcaggatgtgacaaccctgtgttatgtgcttcagaagttgacttttgagctgaagttaactgttcctcagctgctcgagaagtcattccgagcaacagatcttccagcgactcgttctgacaaataactgcatctgccttgcccggaagattgcctgaagcaccagattgttccattgttgttgttgtataacagagatgctatttggagatcccagctctgatttctttattgcgccttctaacaagagaataaaaccagcctgatcttctctgatacatatcagtagtacagtaatcagtattactgatactcagcccttgtaggcttgtatacattactgaaattaattcaacatacatttacttgattgccta

SEQ ID NO: 25238 - DNA, 767 bp, Setaria italica
  Peptide Sequence Number=SeqID_91212
cggttttccagcagccgccgcgcgctgctccctcgtttcacccctccccctcatcttggcggcgctattcggtcttcgcagggccctttgccggcgacgagcacccagcaggtaaggtcattatggttagagtcagtgttctcaatgatgctctgaagagcatgtataatgctgagaagcgtgggaagcggcaagtcatgattaggccgtcatccaaggtcattatcaagtttcttatggtcatgcagaagcatggctacattggtgagtttgagtatgtggatgatcacagggcaggaaaaattgtggttgaactgaatggcaggctgaacaagtgtggtgtcatcagtcctcgctttgatgttggagtgaaggaaattgagggatggacagccaggctactcccgtctcgtcagtttggttacattgttctgactacatctgctggcatcatggaccatgaggaagccaggcgaaagaatgttggtggcaaagttctcggtttcttctactaaaatggaaattttgcaaggagcatcagtttttttgtctgaatagctgcagagatgagcttatgaagcatgtttgctgttttgttaatgttttggcttttatgatatttgaggtgtagttgaatgttcgcttgttagacaccaaactgtgctcaacttatatagttggcatctggattttaatcgaattaagctatggtactttctcgttgtgttgactatctccaaatacgctcttaaactaagtaagaacta

SEQ ID NO: 25239 - DNA, 971 bp, Setaria italica
  Peptide Sequence Number=SeqID_91213
gatctgagaggaaatcatgatagctttggtgtaccggcacctggtgacaactatgacttctatcagaagtatagcatcaatgccaagttaagacggcaggggcgtgtccaaagcattactttggagaataatggtcggaagcatctatttgttggctttgatagcactatggaggtttggtcttagaggcccaaccaatctatttggccatccaactgataagcagcttatcgaattggatcaagcattgtcgcagtgggatactgattttgacaaggctccagtgacgaaaattgcattcgggcacttcccattgtctttctcagcattaacagagtcaggaaaaagtatcaaggatgtttttctaaagcaatcattggccgcatacttgtgtgggcatcttcatacaaggttcgggaagaacttgaaacgatactaccatcgagcagtccaggaatcatcattttcagaacattattaccaatttaacatgcaccaaggatatgcaatccagagtaataaggaaaactgttctgaagaagcagctcacattgaagagttctgggaatgggagatgggagattggagaaagagcagaagtatgaggatactagcaatcgatgatggttacgtctcctatactgatatagatttcagattgggctcaaagagcataatcatactccctacctttcccctttcgattcaagattcatgcagagagcttctgcttctcgtgatttcaaatgccatatcagggggccgtctactttcgatacagcgagggctcttgtattctctaaacatgagatagtctctgtttctgtaaagatatatgactcaagaccaggaactcttgaagtagtctttgactctgaaatgaaaagggtggattccaatgaaactagggggcatatgtatatagtaccatggaactggagggcatttgaagatccctctttccgagtcct

SEQ ID NO: 25240 - DNA, 349 bp, Setaria italica
  Peptide Sequence Number=SeqID_91214
aggaccaaggccaaattctcgaaggtagaaccaaacaacaagctaccttggcatgcttcaagctctttataagctcaatgatattgaccgtatgaagcagatttatgtggattgggaatccaattatgaaaattatgatgtgaggctgacaaatatgatgatccgtggccatctgaagcttggcatgactgacgaagcagagtcattgtgggagaaggccaaggaaaaaggtgcagagttcgactccaaaacatgcgagttatttcttgatcactacatgggtaagggggacatgaacttggcactgaactgggtggaaaatatggtcaaactccccaagaaagcaggg

SEQ ID NO: 25241 - DNA, 381 bp, Setaria italica
  Peptide Sequence Number=SeqID_91215
ttcaactgctataccaataaatgaagacgatgcacctttgtacaaccctctaattccttcctcaagcagtatcctactagtgcagtggaacgcgttcttgtacacctttccatgagctgtggtattgtgagcttgcagcttgaccttgacggtgtcgaacgggtggccgactacgacctgggcgacgccggctgcggctccggcgacgtactccttggcagcgtcgcccgcagcggccatctgaaggatagggggccggcgcaagtagtcgtatgcctgggaagaggggaatgcagaactgggagcgtaggggacgaacgccggcggcgccggcgccggcgtatcgcagcgaatgcgggagggaaaaggaagaggaaggta

SEQ ID NO: 25242 - DNA, 419 bp, Setaria italica
  Peptide Sequence Number=SeqID_91216
gcaaaaatctttgtagtagcacagcacacccagagaaccttccaggttttacaaataccaagccctctgtcggtggtactatcaactcatcttgattgggcatatcttcttggtttttgtcaagggaataaactaaacctctgtcgtacatatttgactgctttcttgcgtataaagcatcttgttcaaggtattacgtgtccaataaactactactaaaatatgttctagccaaacgatttggcaggatcttggaatctgacaggcaacactcacataaagaggcaaacaaaaaccccaacataagctaatttggctttcaggagtggggccaaattctaacaacagtaatgtggccctatgctctgccgtgagaataatagcaggatcccatcgttaaacccagagcctccatcccg

SEQ ID NO: 25243 - DNA, 374 bp, Setaria italica
  Peptide Sequence Number=SeqID_91217
agaacttgaattcactcgcaaaacaatgcagaacaatgtaaatagacacaaaaagggaggataagacaccaaagttgcagaagtagagaaatgctatcttccaatcagattcctggcccccttgcaaagaagctaacacctgttctttgtcagatccagaaccttctacatcaataggctttatcttttgtgatagtaaatccgaaaactgtgaatagttttgctccaagccttgccttgcaccattttcaatcatacttttgatcatagtactctgaagaaaattcatgcgccaagaaattaccaaatgtgacgtctgttgctgagaatcaagttcagggcctggcatgattcggaaaagaatttctgtaccg

SEQ ID NO: 25244 - DNA, 411 bp, Setaria italica
  Peptide Sequence Number=SeqID_91218
gcagaaaggaattgaacagtggcaacaggagggtgaaatggatggatagagaaccatatgcttactggaaagggaatccagatgttgcagctataagacaggaacttgttaagtgtaatgtttccagtgagcatgaatggaatgcacggatttacaaacaggattggctcaaggagatcaaggcaggatacaaacagtcagacttggctagtcaatgcacccataggtacaagatttatattgaaggatcagcatggtcagtcagcgagaagtatattctagcttgtgattcaatgacactagtggttacaccaaaatactatgattttctattcaaggtgttgatgccgatgcaacattattggccagttcaggatgacaataagtgtaactcaatcaagtatgctgttg

SEQ ID NO: 25245 - DNA, 268 bp, Setaria italica
  Peptide Sequence Number=SeqID_91219
tccggcgcccacagcgtcggcacggcgcggtgcctccactacagggaacgcgtctacggctacgacggccagggcggcgccgacgacatcgacccctcgttcgcggagatccgccggcagacgtgccaggccggcggcgacgacgccatggcgccgtttgacgagcagacgccgatgaggtttgacaacgcctactacaaggacctgatcgcacggcgcggccttctcacctccgaccaggagctctacggctgcggtcggccccgct

SEQ ID NO: 25246 - DNA, 272 bp, Setaria italica
  Peptide Sequence Number=SeqID_91220
aacttcctttcacatctacctagcttaactccttctaataaagcagcaagctactactagtagtgctaattactgtatgtgtgctaatcaaaccttaattggcctcctgagatcactcagaaaggccaacaaaaacttgggaaaaaaatttaatgcttaagcagcagcaagaacacatcatctatcagctcgtgatcgacgacgacgacgacgatgatcggtctaaccaaacaacatcagctaatggcttcttcttctctctcgagatctga

SEQ ID NO: 25247 - DNA, 118 bp, Setaria italica
  Peptide Sequence Number=SeqID_91221
aagaagatataggacacattccatggatatgttgatgacttaatcagtattgctgaggtcaacggaaaggattttacaggcttgcattcatcttcattgaatcgtcatcttattatga

SEQ ID NO: 25248 - DNA, 445 bp, Setaria italica
  Peptide Sequence Number=SeqID_91222
ggcagagagtagaaaacacttattacatcaaatcatagcctacgtgtgtaaaacaaaaagggtatgaaaaggggccgatgctcattgtttgagtacagataaagcagcagtgctggttcagtgagtgatcgccacaccgattcgatttgattggatctgattggatcagtggagctgtccgctcctttctgtgattcctgccccctcccggacaggcccgggcatcgcatcgagccaaagcccgagccaccggggcagctgcagtttcagtcacgttttcttctgaaaaacgcacagaagaacgctagcctagccccacccacgtccaacgctgagctctctgttcgttcacccacgtgcctaactgccatggattcaatccgatccattggcgtctcctccccctcctcgctgtcgccgccacgaggggcggggccctcccatc

SEQ ID NO: 25249 - DNA, 1144 bp, Setaria italica
  Peptide Sequence Number=SeqID_91223
aagcaattaagaaagctgaagcagcaaggaccaagaccaaagctaaggcgctgctgagacgggtcctgaatccgctgctgctcttaggaattctctgcggcatggcacattcgtcaccattgaagaagacctttgttgggaagccgtctccagagacaatgttgatcccaggggtcagcttctttgtgaaggagaggactgactgttgcttcccgggtacaaggtaatccgacccactcatgttggtctgcttcaccaggtaattgagcccctccagaccctgcataaagatggtgttcttgcccacggccgtgccattgaaagagtacgccttctcaaagccatcatacgccttgtccatgacaatggcagcaaaccaattggccatgtcgacatcctcccagttgaacaatgtcaccctagcactccagcccttgttgtagtctgttgagacatgccagttgatgctcacaccacagaaatcaccacaaggcattgggcggggcacaatgtagtgcttcagctcagcccacgccatcgccttctgggtgcggttgtcgaacggcacaagcagcgcttctggtggcaggagcatagattgtgcagtcgtgctgcaggtctgtcctcgcctgtttgcagggcacccacatgcacaagtgttgcaggggatcaccgagtcattgtagtatgctgagaaggtcacacaacacttgggcttggcccccttagttctggtgatgttgcacaccacctgccatgtcgccacagccaacgtcgtcgagtcgagcccgcttgggtctgggaatgccgttgggctgacaggcactggctggccacaggtgtagtctgggttcagcgatgatgcaccggcgatcttgaaattggcaggagggaacagcttggtccggttcaggtccggtggcatcttgaacacctgcatttggaatgccgatttcgactgcttctcgtccatggacttgggcaggattgtgccattcctgcagcagttgtcaatcttcccaatctgggtgtcgttgtaccgggacagcggcaggtcaaggatcaccggcttgcggtcgcaattgagcacctgagagaaatcaagactctggtagtactgcgccgccgccccatagatgcagcc

SEQ ID NO: 25250 - DNA, 217 bp, Setaria italica
  Peptide Sequence Number=SeqID_91224
ccttgtatgatcttcccatcgctaatagctcctactggcactgacctctcatcagcaggtgctagcgtctgcacaagcacaagtgatacgatcgcattgtcttctctgcagctcacggcatctcgagtgtccaagtccgaccaccgtgaagcgagcgatggcacgtatcggcacgggacacctcctcgtcatcgccctgctgctctccgccgtcgcg

SEQ ID NO: 25251 - DNA, 1067 bp, Setaria italica
  misc_feature (7)..(7): n is a, c, g, or t
  Peptide Sequence Number=SeqID_91225
ccaaganagtttgacgctcagatcgcctagcaagtggaccaagaatatccctagatgtggtaccaggtttctttccaacatgctccaaaattctatgcatatcctcacggtaattaaaagacagaagctggtcgacttcatccagtacaagaaagcggcagccatgggtgtgtagcttacctgctgctgaaatttcggaaatacggccaggtgttccaacaacaataattggcttgttcttcttcaatgcttcttcttgtctagaacgattagcaccaccaacaagttgctggacaagtctcttatcattaggacccaaaatcttctctacttctctcacaatctgcattcctaattctctggaaggagcaacaatgactgcttcaatacctgatcttttctcagaattatcttgctccataggcctcttcagtgggcctatttcggaaagaattgggagaagataagcaagtgttttccctgagccagtatatgattggatcaccacatcgtgcttttgtgctattataggaatagcagctgattggacctcagttggcgcagtcagaccttccttgttcaaccgatcaacaagcaaaggtggtaaaccaagctcttcaaatgacttggcagaaaacagagcctcatctaccttcagtgtcttctttatcccagttgactttggcaaggcactcttcgctggtttgacattaagtgaagaaactctaggtttcatattgagggaagaagaaactctaggtttcacattgagggaagaacctcttgaacttggcttaggacctccagttcgtgccattttttccttcttcccatattcaaccctgttttgcacttctaagctagcaagagttaatggtcctcccctatcttctacaatttgactaccacgccaagcagtctgatggaatccagctgcccgttgttgtgacagcatcctgaatgaaagacggtctccaagaacaaagcatgatctggaagatgccagcgcaagaacatttcgatggacttgtccaatacttagcctcattttacttcctttgtctagt

SEQ ID NO: 25252 - DNA, 727 bp, Setaria italica
  Peptide Sequence Number=SeqID_91226
cgtccatcctgctggacgggtggaacagcgagaagcacaagatccagaaccagggcttgcagcagcaggcgctggacctcatcgagcgcatccgcggcaccgtgcacgacaagtgcggggccaccgtgtcgtgcgccgacatcctggcgctcgccaccacccacgccgtgagccagtccggcggcccctggatctccatgcccatgggacgccgcgacagcctggagcccgctccgggctgggccgtcgagaccctcccgcgccctgacgccgacgtcaacaccctcatcaccagcttccgcaacaagggcctcggcggcgacgacaagggtaaccccaccgacctcgtcgcgctctccggcgcccacaccgtcggcaaggcgcgctgcggctccttccgcgaccgcatcgaccggcgcagccccaacgaccagttcgccaacaggctggccggcttctgcggcaacgacgacaaccggcagcagaacctggacgtgaggacgccggacaccttcgacaacatgtacttcgaggacctcatgaagagggagggggtgctcaccaccgaccaggggctcttgttcgacggccgcaccaggtggctcgtcgacggcttcgccaaaaacaagggctggttcttcggccagttcgccaagtccatggagaagatgagcaagctgggcatgggccaaggaggcgagatccgcagcaactgcttcaggcgcaa

SEQ ID NO: 25253 - DNA, 1220 bp, Setaria italica
  Peptide Sequence Number=SeqID_91227
aattaaaacaagatcttccatcttgttctcagttgacacaaataagtctttaccttcattcttttcaactggacttcctaaagaagaggcatcatttgagaaggatgcttcaagtactgacgttggactcggctgattgggctcgttgttcaatgatgtagcagaagaatcaacatcttgttcactctgataacgcttctgaaaatcaggagattgatcattggagaatacataacatgatggatcgatacagtcaatatttctgttgcaacttgagggtactgatgcatcagagtagttgctactttgagagattgaagtgctcatgtcatttgtaagagcagaaatgagctcttgcagaacaggtgcagtcaattttcctgaaggctcatcacttgatgtaaactcaatcctgtcaaacaagccaagctcattcatttttactttcaacagcctgttaaaatcatttttctcagaagtagccataacagaatgtgaagctcccatatatttgatatccggagctggcattcgagcgtgagttgtatcatgtgctagtctacttgggcacccactcttcaacactttgctgggtgacgaagctctggccaccggctttggggctgatctagaagtaaatgcaactgcatttctgtcatccctgttattggctactgcatcacgacccaccttccgtgatcccccttttggccccgatccagtgcttgaaatcctgcttgtagatgccaaatcacttcggttgatcacatctctgccagtggttctcccttgtccagcgattgaacgcccaactgattctcttcttggaccagaaccactttgtgctactctcctaccagcagatgctgattcacgagaacacccaactgggcgcatcgaatctgccaagcttccagagctgacactccctgaaatatccggccgagtgggtgttgctcgtttgcgcaacctctcagctccagtttgaacggcagcaccactcgatctaaccctggcacaagtgcgcattacctcatttcttactctactactctccttgtgcttggcatccagagcaaagctgctactgatgtttccatcagcaaaatccattctaggcaacactacagtactggtactgatatctgcattggcattgtcaatggagcgctgctcgtgcctgcgcgagacagcagcgctgtcacaacctgttcttccgt

SEQ ID NO: 25254 - DNA, 635 bp, Setaria italica
  Peptide Sequence Number=SeqID_91228
agtagggggaactagaaagctaaccacgattgagctcatcaactccccagtcctcttgagattgcaatgaaggagctgagagcgcgcaagatccccttcacaatcaggaggtacttacctgatggaagcttatgaggactggggagttgatgagctcatcgtggaggattcgtggaaacgccaggttggtggggactgaagctaccgagctactcggcatgaaaggcctttgtggtgcagctggactttcctgtagttataatggtctatgctactccaatattagtggatgctgtagtggatgaactgagatgtgatgatgctatgtaaccttaacgtctgtggttgccttgcacgctggaactgtaatctgctagattggttgcacttcgtatgtttcggtctcagacttgcagtttcagagctcctgtgaatgccttgtggagttgaagcctagtccactatcagtagaccgctagattggttgtttgcctagtccactatcgcaaatggtcaatcttgtttctgcacgatgttgagagatgtggccagctgatttatgtaatcatgagcctgttggtgtcgctcatggcaagagtctatgcaaaccttcctctgtaggtgtgtattctatt

SEQ ID NO: 25255 - DNA, 809 bp, Setaria italica
  Peptide Sequence Number=SeqID_91229
ctccagttttggctcctcccccatcacccgcagccgcacggcgaaaaccctagcgagctaaccaccggagcagcgggcgtttgggcggcgggagccatggcggacgacgattacaacgaaatggacatggggtacgaggatgagcccccagaacctgagattgaggaaggggctgaggaagagcttgaaaacaacaatgaggacacccctgatgatgttgtaggtgccgagggtgaagaaaaggaacaggaaaaggccaagagtgagcgcaaaacgtcaaaatatatgacaaagtatgagcgtgcacgcatcttgggtacacgggctttgcagataagcatgaatgctccagtcatggttgagctcgagggagaaactgatcctcttgagattgcaatgaaggagctgagagcgcgcaagatccccttcacaatcaggaggtacttacctgatggaagctatgaggactggggagttgatgagctcatcgtggaggattcgtggaaacgccaggttggtggggactgaagctaccgagctactcggcatgaaaggcctttgtggtgcagctggactttcctgtagttataatggtctatgctactccaatattagtggatgctgtagtggatgaactgagatgtgatgatgctatgtaaccttaacgtctgtggttgccttgcacgctggaactgtaatctgctagattggttgcacttcgtatgtttcggactcagacttgaacaaaaaaaaaaaaaaaaaaaaaaaactaaaaaaagagaactagaccaaggacacacagggagtag

SEQ ID NO: 25256 - DNA, 238 bp, Setaria italica
  Peptide Sequence Number=SeqID_91230
gccttccatgaccaagaatggggagtgccagtgcatgacgacaagaaactgtttgaaatgctcactctgtctggtgcactggccgagatggcatggcctgcgattctcagcaagagggacaccttcagagaagtgttcatggactttaaccctgtgttggtggcgaagctgaacgagaagaaattcttggcgccaggcagccctgctagctccctgctgtcggaacacaggctgcgca

SEQ ID NO: 25257 - DNA, 246 bp, Setaria italica
  Peptide Sequence Number=SeqID_91231
gttgacaccgtcagtatgccacacgatgagatcccttgtgaaagtcactttgggagcgccgcaagtgataatgagagcaatcttggtatctggtaagttcataccccgtttgattatcagccttctagcatggtaaccgaaactagccgcccccagagcgaaaaggatgctcccaataacgtagccgagcacagtcgagttgattgcgacatgagttgtgacaatcaatgccactactatccccag

SEQ ID NO: 25258 - DNA, 322 bp, Setaria italica
  Peptide Sequence Number=SeqID_91232
catctgcaccgactgaaattttgcagaaaggcaaaatccaaatttcccactctctactctgaatcccgcaaaagtttgactgatatagcttttacttcagatgataagtcatggatatttgcgtctggccttgatggggcagtgtacatgtgggacaggcggtcaagtaagacacattgtcttgagcttgtggcacctccagagtctcagttcaacactgtcaagctaagtgtagataatcggactgtgttcggtgcaactaaaaatggcacaattcatgtctgggatatcaggggagggagggcgtcggctgcttttcaga

SEQ ID NO: 25259 - DNA, 257 bp, Setaria italica
  Peptide Sequence Number=SeqID_91233
gctgcaacgatttcagacggtgacggacctgttttccatgcagggccgggactaaaagcacaccatggaaactgggcccagttccccttcagcatatatctttctaatcagaagccctcaatatgattgaacatctgtttctaagagcccagcgtcctctaaaaaataaagcccagcatgagcgctctgcgtcagcaagctcgcctccatttcgacattacccctgcggtcgtggcaggacgacggtggcggccccg

SEQ ID NO: 25260 - DNA, 376 bp, Setaria italica
  Peptide Sequence Number=SeqID_91234
taaaaagaaaaacaaaaaataaaagtaaaagtaaaagaaaacaaacaaaattttgtgataaccacattacaagagtattgtctcatccatactgtacctcaggcacactgcacactactcattccaatctagctgcagcatttcctgtacgttatgaaagttctactggagtaccacagagctcaccaatctccttctccagaagctgcacaagatttgctccggtccgcttgtatatccaaccgtctgttgatgcatcccaatcaaacctagaaggcccactcacaggtgaagataaccagatttgcctgtttggtgcttgcttgttaacaacataagtccccagatccccaagccttaatgtcaaaacctgatt

SEQ ID NO: 25261 - DNA, 411 bp, Setaria italica
  Peptide Sequence Number=SeqID_91235
ggaagctccacacggtgtccgcggcgccgaacaagcgcggcgagatcgtgctgcggatcaagaagacgaacctggtcatggccttctcccacgcgaaagaaagcgtgatccgcgacgtgcgcccgtgcgccccggagaagccgagcccggacgagggcgcgacgtacccggtggaggtgtcgacgagcaagggcaaggtggagctccgcgccgacgactacggcgtgtacaagcggtgggtcgccacgctgagccacatgctcgtcatgtccaccgccgtggtctccgccaggcacgagccgccgcgccgggactgaccgatcggccggccggctggcgccgcgcacggcacgaacggcatcctcccgtgccgacgaccgcacgcgtgtcgatgccattgtatgattgtat

SEQ ID NO: 25262 - DNA, 1162 bp, Setaria italica
  Peptide Sequence Number=SeqID_91236
tgacccactctgttgtgcccattatattttgatggcattgtgtactgtttaccggtattttctccgtagattatggttgattaaggcattgacctatcttattacagaccgccgccgcccgacgcggcgggtgaggatgagagcacttgccgcggtattttcgtggagttcatgaccaaggtggctcggttcgaggagctagctgaatctggcaatcgattgcttgtgagattccatcaggagcttgagtactttcggaggccgcagattcctaccgaatcagatgtcatgaaacagatacttaaatctaactgcactcacagaatgaagtcctatcttgaagctggttgcaggcttcacagccaaaatatctcaaacataaatcagttacgttcatgtgaagatggacttaaagatcatatcaacaaagttaaggctttgcttgaagagcttgaatgtctagtcgaggatgtctatggcatcacacttacagccagtttaagtgctctggaagtttcagactgtcatagcattgataacaagctgactaccgaatcttgcatcatagagatggagggtgtttctacaccacaggaggaggataaaaacacagatcaattggacagcgatgtatcgtttgttacagtgatggtcattgttcgcaacatgttgaagcttgactacacgatgcaggaaaagattgtcaatgcattatcccttaaaacaccgtcatcagagctccagggataccgcctcatgtgggatttgcggccattcatcgaagacaatgtgatgcatcttgcatggaaaatgtgcccatgaagctttggcatccgcagttttttcaagggcagggggatgggacatgcagcaagttatctttgcaaagacttcagcaactgtgcatttgaggcttgggagttgttccccaactgctgagatggatgcctccacaacctgttcatgtgttgccagaagattgatttcaacaggatgtatgtatgattgtagatggatagcaacttgtgtgctcttgattgtgttatttgttcgactgactgactgagtgcctgttctcattattggagtgttctgataactgaatgaatctctttgcgtttttgcagagagagacccccaaacaagtttttgtctgacagta

SEQ ID NO: 25263 - DNA, 527 bp, Setaria italica
  Peptide Sequence Number=SeqID_91237
ttttttaaatttttaaccttagaaagaatagaagtaatagtttgtgttacttttgagatcatatctacatgctttgaaacaaatcgtgtcttcctttttcttctgcatcattctttttctgtgtattcaggttgcaagtagagcatgttgaattattattgtccatttgaggataaacagcttgttcgcttgagcttatcagccagaatcagctctacttttcagccatggaacagtatttttcacacaaaacaagcagaaacagtgttttctagccggagaaaccatcagccgaacagacacaaagtaattgactagtgatcaatagggtgatgatttgcttttgtggttctgttacaaattttgtgtagcttggttgtgtaatctcagtagttgctattagtctaaattgtagtctatgtaagtgattcttttttctttctgcgggaagctgtgtaagttttaatggaccaaagtcacaaaattgcaaaatgtataatgtatttatagtataacttttcatgaaa

SEQ ID NO: 25264 - DNA, 1212 bp, Setaria italica
  misc_feature (1117)..(1117): n is a, c, g, or t
  misc_feature (1189)..(1212): n is a, c, g, or t
  Peptide Sequence Number=SeqID_91238
ctttatgtccatatatgctaaggctaaactgggtgacatattgttcatcaaaccttttactgatgagcttctttgtgcttacatctgacactgggctgcttggtactagcttccctaaaggtatgtgccgtgtttgataatacgttctttgaaccatctattttccatgtttatttctgaggttttgtttatatctatggaattcattttgttatggtttatccctaaccaataccatgtttagatatgtatttgcgaatttccagaatatgttccgattacagattaatatgtctcataccaagtatcactgaaattttgaaatgagttttgcagcattattggtcttgaagtatttatatccaagtcactaatagatgctgatcaagaatatcttcaagaatctgtttccaaatcagttcctatggatatgagtgtgagctaggtgtgtaacaaattttggtccattgaacccttgcttcacgaggtatatatcatatatgatactggttgacaatgctggtgacagttcagagatagataaaactaaacttccatactacgattacaacacttaactgcttgcataatactaatgtacactgctacacacatgtcaacgtggtttaaataaatagtttagtagcacgtgatgcaaaacattctaactagaacctaagctgggcaataaaagcattctcattcagcaagcgcactgaactggtgattgtgtcaagacattcatgatgatcagaagcaagagactgtaaatcaaggtgctcattccctgtgtcagattatatcaagttgtgtgtgaaatttccttgaagatgaagtaataatttgtgttacttttgagatcatatctacatgctttgaaacaaatcgtgtcttcctttttcttctgcatcattctttttctgtgtattcaggttgcaagtagagcatgttgaattattattgtccatttgaggataaagtaattgactagcgatctatagggtgatgatttgcttttgtggttctgttacaaattctgtgtagattggttgtgtaatctcagtagtgcatagcaaatgagctatgtgagtgatttcttttttctttctgcgggaanctgtgtaagtttaatggaccaaagtcacaaattgcaaaatgtataatgtatttatagtaattaaaacttttnnnnnnnnnnnnnnnnnnnnnnnn

SEQ ID NO: 25265 - DNA, 241 bp, Setaria italica
  misc_feature (239)..(239): n is a, c, g, or t
  Peptide Sequence Number=SeqID_91239
ttcaatggggtataaagctgtttcgacgaccacaccagcagctcctccagctgcagccccctcgaaaagaacctggagcagattgcacgatcccccatcttcacttccgcccatggctcgccgacactgcttgcgcgattcagccagcaaaaaatgcgaaatcggatggaagaactggggggagaagccaagggattgcgccctgaatcgtgaaatcggatggaagaactagggggganaa

SEQ ID NO: 25266 - DNA, 262 bp, Setaria italica
  Peptide Sequence Number=SeqID_91240
cgctgcgattcttcgtacttcacatctcggttggcattgtattccttggcgtttccatttgactgggtgtttggcatctccctgatccaaacgtggatggacttgaatcctgcttcctccaagcagtccttgatctctggtatcgaccataggcgccaatggtatgtgaaagcatgccgcagcatttgcttctttccagcttgaaagtggagactgatccttgtttggcgacttatgatatcaaactcttcttgatcccaag

SEQ ID NO: 25267 - DNA, 331 bp, Setaria italica
  Peptide Sequence Number=SeqID_91241
ggcgagtcctccacagccagactgaactcagctctcactgaactgaactgaactgacagtgaaccctcctcacttcggattcggagacatcgccctcgcccgctgagcgctgaccaacggaagggagctaccgcggcggcgccatggactgccaagacggcgcgggcgccgctgccagcgagaatcgatccaaggtggcttcagaaactaagtcgattaagcagcctacttgggtcttcgttgagaaagaatcggtacatgacttgagagagcaaattctcctactcactgggaatgtttgtcatgaagaagaggaaatattacgagcaga

SEQ ID NO: 25268 - DNA, 247 bp, Setaria italica
  Peptide Sequence Number=SeqID_91242
atctaccatatactacccggcctctcaaatcatagttagctttttcagcagctcattgtattttgtttgaaatgatggttagctgtccaaattccatatgcattatgtatacaaggagagccgggtatcttcgtccaaacgtcgttgcctgtgtaaagcataatgtagacggaacaccatcaggtcgctctctccagggtcttagctgaccggccacttcaagaaccgttgtagaacagctcgaagg

SEQ ID NO: 25269 - DNA, 503 bp, Setaria italica
  Peptide Sequence Number=SeqID_91243
caaataatacctgtgcgcgagagatcaaggcctaacatgagtgggggtgctgagatgattgctggagctgttgtgcagcgtgtggctggcatgcttggtcagtctgcctgggaaagggtggagcttctgcagaggttcagtgatgattttgaggagatgaagggcaccttgatcactgtgcaggccgtgatggcggatgctgagaaccgctcccaagttagtgaatcggtccggctttggctctagaagctcaaatctgctgcctacaacattaaagacatgattgatgagctggaggcaaatacaaagatatggaggagtagcacatgcccgacggaacaccatcgggttgctctctccagcgtcttagctgaccggccacttcaagaaccgttgtagaacagctcgaaggctcaaccgccgcccggcggcggcacgctcttcacgccggtcatgtttcccttgcatagcgcaaggagaacctcttcatggcctcgtcgaac

SEQ ID NO: 25270 - DNA, 685 bp, Setaria italica
  Peptide Sequence Number=SeqID_91244
gtctctaatttttatcttcatttattgctgttctgtgaaagtaaacttatctcaacatgtattcctattagcattagattgttacattttcaataatttaaattcgaagatatgtcaacagggtgtaaaaatgctgatggcatgtaactatgccactactgtgaaacaatggtgcacatctttgtggcttctggaaaattcggaggcccacccaaggcgctcatgttgcctagccacttctttaacagcaacaagaagacgatgttcctcatgtgtatcctgcctatcaagaacttgctcgaggtaggaaaatatgaagctcctgtagaaacactctccatctccacgcactggcctaaattcagaataggtgcgacgaaggttcagtgcatttgaatgaaattccactcctcgtccagcaaccatttcaaggagcctgtaatgcctaatgacgtcgaacatagggattgtctcgtagttcacatcgggattcgctattctggaatttaggtcggagattcctatcctgtccaaaaactttctccagatcgatcccttgtaataatttcaggccatattgttgctgacttcacctgctcctgttgcatcgccgttccctccggctcgtcttcctggtccaatactccgcgttcgccttgctctcctccaacagctcgtcgagcaa

SEQ ID NO: 25271 - DNA, 898 bp, Setaria italica
  Peptide Sequence Number=SeqID_91245
gaagctatcagaaagagagatgtaccaggacgccctgccagcctgaactctctgaacctttggtgtgaatcgtcctctgacggagttggaacaatgaaccagcccgttcattttagagtacatgaaatgaagtggacaaagaatatacacattccacgcaccagcagaaaccttataattactaaatatatttcctccattgaacctcctctgatcaccttgcgctgtgcaccaccactactacagcatcatccgggttctcacaaaatgcctagctctaaagttcatcgaactaaagcgacatgaccatgacgcggattagcgtctccgtcgccatcctctatgcgaaaggatttcctgtcgatacagtgccaaccggtatgttccgcagcggagagttcggggcctgctcgacaaggcaagggtagtccaccatgtgatgctgatggaacgaaggcacaagaactgctggagaaccatgtttcaggcaaaccatcaaggaaagctggtagattccggatttggcaaggcctcttgcaatgaacttacgtccatgaacagatcaggagtccctgaatgagtgtcaaatggaagctcaaatggatttaatggcatctgctcagtagaggctccttcctgtaaataagaggtgatctataagcccaaaaatcaattgtgagaggaactgtatacaaaaagctaaatggcataggaactactgagagccatatcacttaaggaatggcagataccagagatggctctgcggaagcagaaagcaacgtattaggtgataatccatccatgaatacttgagcagggtcatcatcttgagatccctttgaagctacagagcacataaatggattgctggttgaaagggaaatgcttacaacat

SEQ ID NO: 25272 - DNA, 684 bp, Setaria italica
  Peptide Sequence Number=SeqID_91246
aaaaccttaaataaaattaaactaaaaataaataatttacctaccaaaacctacttctctgatcaccttgcgctgtgcaccaccactactacagcatcatccgggttctcacaaaatgcctagctctaaagttcatcgaactaaagcgacatgaccatgacgcggattagcgtctccgtcgccatcctctatgcgaaaggatttcctgtcgatacagtgccaaccggtatgttccgcagcggagagttcggggcctgctcgacaaggcagggtagtccaccatgtgatgctgatggaacgaaggcacaagaactgctggagaaccatgtttcaggcaaaccatcaaggaaagctggtagatccggatttggcaaggcctcttgcaatgaacttacgtccatgaacagatcaggagtccctgaatgagtgtcaaatggaagctcaaatggatttaatggcatctgctcagtagaggctccttccagagatggctctgcggaagcagaaagcaacgtattaggtgataatccatccatgaatacttgagcagggtcatcatcttgagatccctttgaagctacagagcacataaatggattgctggttgaaagggaaatgcttacaacattactgtgctcatcaattcgccgttgagcacatagttgatcatgagaaacggcccca

SEQ ID NO: 25273 - DNA, 283 bp, Setaria italica
  Peptide Sequence Number=SeqID_91247
ttctttttgtttatttgggtaatccgtacaagcgagtagagttgcaggatgagatcataaatgtaagtcaacaacactggaagtagtatagcaggatttacagtcaaggcatccgcagcagagtgtcctgacgatggaccgaagcctcgcacttgggaggacacgtggcgtggtccttctgtggcgccccttggcagaagaagaacttgtgcggacacctaggcaggcagttgtccgccaagctcaaccactgcgccgccctccttgagctgcctcagctgca

SEQ ID NO: 25274 - DNA, 476 bp, Setaria italica
  Peptide Sequence Number=SeqID_91248
gttgttgaagttggatcccaaagtacaagtagaatagatccggtaggggaaaccgtaacggtgacgatccgactagtcttcggagagtctatgaagcctacttgccttgcagagtagtcttcatgtctgagtaggtttcaagtacgttttcttgagtgggcccgtacaggtcttctggtaggcctggggatgcctggccgacaccctgtgcccttcgtcaacaatatgggggcacaacggatgcggccctgtttttgagactccaactaggaaatcctcttgcacatcaagctagatgtgagtcacacccgattttgaggtcaaaccctcttgcacgccgcacaagacgtgactcaccgatatcgactcgtgtctcgcttccgccaagccttcgatgcctctaagtcttttgttgccgctcctactctgcctatttgatttgccttcgtcctgcttgactcgaccgacaccatctt

SEQ ID NO: 25275 - DNA, 648 bp, Setaria italica
  Peptide Sequence Number=SeqID_91249
cccaccccgttgtgtgtcatcaaatcttaaaaaaggctgggcctgatccggtctgttaaggaggggatttccgggcaacctgggtaggccccgaggcgcaggctaggacaaaaagttagtgcttcttggcttttagtatcgcttggcatatacacaggggaggttggggaggggtatttgggtcattctggatatgtcctatggttttctgggggagctcctcggcctgcctcatggaaaccttttgaatgtgaggcttggggcaggggaagctgtttgggctgccggatctgacggatgagctgaccgaggccggaagatcaccggcgctccgtattgcgggtagaggagcatcaggaccgtcggtgcgtgtatgtagttcggagaagtccgcatctcgaagcgctggagtaggatggccatggtgagcttggcttccagtcgagctaggttctggcctatgcacatccgggagccgaggccaaacggtataaacgccagggggtgcttccctgccctggccgtgccctcggcgaaccgcatggggttgaattgcgccgcgtcttgaccccagaacctcgtgtcgtggtggatggccatgatcgggatgagaagctccatgtcacgagggatcatgcacccatcaga

SEQ ID NO: 25276 - DNA, 247 bp, Setaria italica
  Peptide Sequence Number=SeqID_91250
cgctgattgggaggcagccggtggttccgaggatgaagaggaagacgccctccgaactgagaggtgagcaactgaagcggcgtacgtccgaaaagcctgcaaatgaccagttaccttcttctgctgcatttgataggtcaagcaatggacttcggaatacagaacaacagaagatatccaaatacatcagcacacgtgttacagaggtcttccctgtgagaaaagcaagaaaccatgggaaggaaaa

SEQ ID NO: 25277 - DNA, 968 bp, Setaria italica
  Peptide Sequence Number=SeqID_91251
tgcatccttcttggtgggaggtccaccgtccacgacaatatacagaagcacagctttcgtcgccttacaagttacaacagggatgatccgcgcgctaaatcttcttccagagcttgtcgcagatctcaaccggtggtgtcgtcttctcaaactcgaacttctccaacttcttcccgctcctgtcgacaatgtagccagaaatcttatcctggtcttcgaaattgggcatgatatttgtaactgacacgcacatggaaagcatacgctctgcctcctgcatttcctactttcttttctgacagcatcctttctttcttcaatagaagctctttgtcggtctaggttatcaagctcatcatgtaacactcttaactcttggcgaagctgtttctcttcctggagtttttcttccatcttgttttgcaatgcattcagttcatcatcagtaatggtttcagcttttgctttgtctatcttttccttgcaggagcgtattttttcctgacattctctgatctgtaggtcgaggtcgtcggaatcggatcggcaggcggacagcagcatccccgcggcggcgccggtctgcgcgttggcgtcgttgtcgttgctggcgcggagcacgcccgcgaggtcgttagcgtaggagaggatttcgtccaccgccggccgcttgtccgcgtccgccgccatcagactggccgcccccgcccccggcctcgcgccgactggaaccctagcccctactccccacctcctcccgcctcccccacccggcgccggtgacgagggacgctgagcggcgtcgcaggcaagggagtcggggtgcgcggtggacgggtacgtcaagagccgccctcgccgccggcgtctaggcgccgccgccgcggttactggggtgggtgggagatcagagggatttgaattggagtggctcgcgcagtgctgctgctcatcatcggctcgctcaa

SEQ ID NO: 25278 - DNA, 218 bp, Setaria italica
  Peptide Sequence Number=SeqID_91252
agcgttcgccgagaagggcaagctgcggaagatcaccggtgtcaagaccaaggagctgatgctttggctcagtgtagttgaggtctatgttcctgaggcctcgccggagaaggtcaccttcaagactggcactggcctctccgacagctttgacgccactgcctttgcactcggggagtaaataactaaatatgcagtcagttggatcaaccagaaat

SEQ ID NO: 25279 - DNA, 977 bp, Setaria italica
  misc_feature (77)..(77): n is a, c, g, or t
  Peptide Sequence Number=SeqID_91253
tactaacctaaaggaaactaggtaactgaagcgtttcttctgaagaaagacggcaagagatgcagcttcttcagacnggagacatggttcagcaaaacccaagcgctacagtaatcagcaatctacgcaagatctaatctcaggcatcacaacaagggtggtacttcaatactagaatggcaaatggcggtaattacataggtctcagttttcaccgtctcagctggcgatccagttgagagatggggatagtacggacggaagcaagaagaagcaggactggagcaggggagattcatcatctgaaggaagcaggcggggaatcaagcagcagaaatcgagggatcccacacacaaatgacaagagaaaggcaaaagcaaaaatcttccgataacacggatcacagcaagaggaatactaatagggtcccttcttctgatacgagatcaagttcttgttctccttctctcacttcctttgctcctcgcttccgcttcttgggttcttggtctgcgacgattccgggactcactgggcctcgacggtgcgagaggaggcggagggcgggacgccctgcgccggcgcggcgccggacgaggcgccgccggcgggggaggtgggaggggacgggtgcgggtggccgtggccctgggagttggtgcggtggaggcggcacttgaaggacccggcgtgggtcgggggagcacacacgcacttgcccccgccgtggctgtggccgccggaggacgcggacgagaagctgcggcgcatggtgcgcggcgacgacgccgcggcgcccgtcggggtggtgctggcgctgtggtggtgcgggccgtggaacctgccctcctcgcccgtcgtgtcaacgtagttggacgccatggatcttcaccgacctacggacgaagacggcggagacggagaggataaaacggctggaggaagaagacgacgacgcggtcacacttgaccaaag

SEQ ID NO: 25280 - DNA, 657 bp, Setaria italica
  misc_feature (578)..(657): n is a, c, g, or t
  Peptide Sequence Number=SeqID_91254
gccgtgctggatgccctcccccgccaggttcgccacgccgtccgccacgccgagacacgtcgtcgtcaccaccaggccggcctcccccatgccgcgcatctggtgggtcgccgacctgatgcggtggatgtcgcgcgcgaagcgccggtcagcaaagaggcagcacgccgacgtccacggagccgagtccgccgccgcggtatcccagctggacgccgccgtggacccggacgagctggagcggaaggcagcgttcgagcgactggacaacctgggacggtgcatcgcggacgtggagagcagcggcgagaaggtgttcagagccctcgtcaacaccagagtctccctcctcaacatcctcagcccagccttctgatccccccaacgagcccaaactaaaccatcggaacccggcaaactcgatcagattctgcgggacattggatgggatctgtacatagaaatgtggccgtatgaaatacgttttagggcgctccattttctttgtatcatagaattcagagttggagcgcgaaggcgctttttccagaaagagagaaaaaaaatgttaagtgccnnnnnnnnnnnnnnnnnnnnnnnnnnnnnnnnnnnnnnnnnnnnnnnnnnnnnnnnnnnnnnnnnnnnnnnnnnnnnnnn

SEQ ID NO: 25281 - DNA, 541 bp, Setaria italica
  Peptide Sequence Number=SeqID_91255
gatttctgctccgggcacggaagcgggactagtccagttgttaatagttgttctggcttctggttctggaatctcctcatcttcggaagaatcaatttcaggagctggaggtaccttcctggtaatagcagattgccttgtgcatcttcgtggggatgctggggcaagatcattatccgaagatttcctaatacttcttggagctgttcttggagctgtcagctcatcaactgctttcttcttagctctgagagtcggcagaacattcagcaagccgataggttgattggctcgatcgactgatgctctaatcaggctggttggaacattaggtctctttgggggctccttctgccctgtcttcttaaggtctagaaggtagcttagcctgctctcaatgtcttcctcagaaatgtctttatccgaatccctggtgggatctgttggaccagtgtagttgcacgacaaatgcgctcttcggcgcaaagggcttatccggtgcttgaggtagtcgtggacaatgtctacaccagtcaacccc

SEQ ID NO: 25282 - DNA, 286 bp, Setaria italica
  Peptide Sequence Number=SeqID_91256
tgggtgctgacgtggacgaggacggcgcgcgtccgacggccccgtcagggctgaagcccaagcaggcgcgaggattccgatacgtttccggcgcggcggtgcggctcctccaagtggcggtggcgatacatctcctcccggtgtggtgaggctacctggcggggcagcttcgtcgtctccaggcgcgtgcttgtgtggacgacgatggcggcgcgcatccgacgaatccggcagttctggagccgcgaatccgaaacctgctttccggcgcggcgccggcgcagct

SEQ ID NO: 25283 - DNA, 761 bp, Setaria italica
  Peptide Sequence Number=SeqID_91257
ctgctgctgctaacactaccaccaatgccattgacatggcagctatggcatcaagagctgtacgggagcctaggattgttgtgcagaccacaagtgaggttgacatccttgatgatggctaccgctggcgcaagtacgggcagaaagttgtcaaaggaaatccaaacccaaggagctactacaaatgcacttatgcaggctgcacagtgcgcaagcatgtggagagagcctcaaatgatctcaagtccgtgatcacgacgtatgagggcaagcacaaccatgaagttccagctgccagaaacagtagcgggcatccgaactctggttccaatgctgcgccacagggtagcaaccttcaccggaggccagaaccggcacaacccagcatcccgcagctgaacgctgctgctgcttatggctcacttggtctcccaccacaactcagcgcagcttcaggtggtttctccttcggattgctcccacctggcatggcggtaccagtaccatctctggggaccttcatgccagcacctatacctggtcatccgccaacaatgcagggctgcacagggcttgtggtgccaagaggtgaggtgaaggtgaaggtgaacttagaggagcagtccagattgcaggtggcaaacgggaatgccatggcagcttaccagcagttcatgggcaggttgcctcagggtcctcagatgtaaatagcaggcaccaagtggagagataggtttgtttttttttttttagcttgtgta

SEQ ID NO: 25284 - DNA, 364 bp, Setaria italica
  Peptide Sequence Number=SeqID_91258
tccaagaccagtggcattgttgcatttcaggcactttggtcatatgatctgttacaatcaacttttcttctttggttcctctatcttgctaattattttgcttattacggagtaattttgctaacttctgaactaagcaatggtaagaggaggtgcacatcagcaagaactcatttgatgcaaccaaatagtatcaatctttacagagatgtgctgctgaccagtttggcagagtttcctggcctgcttttggcggctctactagtggacaggattggtcgaaaaacatccatgggaggcatgctttttatgtgcggtgctttcctggcacctctttctgtacagttgggagaagggttagtaa

SEQ ID NO: 25285 - DNA, 765 bp, Setaria italica
  Peptide Sequence Number=SeqID_91259
cttgtctccggtagcagggacaagaacatattgcagcacgacatccgtgtccccagtgactatatcagcagcttctctggtcatagatcagaggtctgtggactaaaatggtcgcatgacgaccgtgagcttgcttccggtggaaacgacaaccagctactagtatggaaccaacgatcgcaacagccagtgttgcggttgacggaacatacagctgcggttaaagcaatagcgtggtcaccacatcagcaaggcctcctggcatcaggaggcggaacagctgataggtgtatcaggttttggaacacggctaatgggaatcttctcaactcaatagacacaggcagccaggtttgcaaccttgcctggtgcaaaaatgtgaatgagctcgtgagcacacatgggtattcccaaaatcaaatcatggtgtggaaatatccatctatgtcaaaggttgcaactctaactggacatacgatgcgtgtgctttaccttgcatcatcgcctgatggccagaccatagtaacaggagcgggcgacgaaactctacgattttggaacattttcccatcagtgaagacacagactcctgtccgtgatattgggctgtggtcgttctcaagaagccacatccggtgatgagcgggcctgggcctgggcctagacctagacctggaggaggcaaacaagatgcagataagcttatttgttgggaagcaagatacagtaaattgtttacaggcgtgtgcacaggtagctagtttg

SEQ ID NO: 25286 - DNA, 281 bp, Setaria italica
  Peptide Sequence Number=SeqID_91260
gcggaggaagtggaccgtgagagaggccgggtcgcctcctccggttccgacccccgccggaggcggcgtcggcgagggcggatgcggcgcgggaggtcggggccgcgccgccgcctatgaggcgttcgacgaaatgcctgaaaggtggggaggcggcggcatcggtgctgccctcgggtgagacgcggccgaggagctggcggaggatggcgcgggcctcagggaggcgccgacgaagcatctggtggcgtcggcgagggcggatgcggcgcggggccgct

SEQ ID NO: 25287 - DNA, 445 bp, Setaria italica
  Peptide Sequence Number=SeqID_91261
actggctcattcctcttccttggaccgacaggtgtaggcaagactgagcttgccaaggctcttgctgagcagctatttgatgatgagaacctgcttgttcggattgacatgtccgaatacatggagcagcattcagttgcccggctaatcggagcaccacctgggtatgttggccacgaggaaggaggtcaactgacagaacaagttaggaggcgaccctacagtgtcattctctttgatgaggttgagaaagcacatgtggcagtgttcaacactctgctccaggttctagatgatggtaggctgactgacggtcaaggcaggacaggtagacgttcaggaacactgtgatcatcatgacctcaaaccttggcgctgagcacctccttgccgggatggtgggcaacaactcgatgaaggctgctcgcgatctggttatgctgga

SEQ ID NO: 25288 - DNA, 498 bp, Setaria italica
  Peptide Sequence Number=SeqID_91262
gctctcccagatcagccccctctcggcggtgcccatgggcgccgtgctgctgctgggcctccccgacgacccgtccaagggcgtctcctacgccgttgtcctgttcgtcatgggcttgctaatgtcctggaacggtcccgccacgaacttccctatttttgcggagatcgtcccggagaagtcaagaacaagtatctatgcccttgaccgatcattcgagtcagtgctatcatcctttgcccctccaatcgttggtctcttggctcagcgtgtctatggttacaagccaaacgataagggggagagtgttcaacaagatcgggagaacgccgcctccctggccaaggcgttgtacacttccatagcgataccgttcatactctgcacggccatatactcgttcctgtactgcagctacccccgggacagggagcgtgcgcggatgcagtccctgatcgagtcggagctgcagcagatggagcacgagagcacttgcct

SEQ ID NO: 25289 - DNA, 344 bp, Setaria italica
  Peptide Sequence Number=SeqID_91263
gccgtcgttgatgtagaggtggtaggctttgccgtcgagaacgaagcggcccttggcgaccctgttggccacacggccgaccagcgcaccgaagtaagaagaaccgttcacaaacccagcaacggtgtcgtacccaaggacgacatcagccaagttccctttggagtcaggagcgatgacagacatgagggtggctccccagttggtgaccttgatggagaagtcccccttcttgttcttgagctcgtagaccccgaccgtcttcctcgcagcgccggctccacaggccaatgcaaagcaacagagcaacagggaggagcagcgcggctctcgccattgctgga

SEQ ID NO: 25290 - DNA, 255 bp, Setaria italica
  Peptide Sequence Number=SeqID_91264
aatgggaagaggctttcagtagccatgcgcttcaagcgctgtcaacgtctctctctgaccattgcccgctactactttccaaccacggtggtcctagacgaccaaaatcgttcagattcgagaattactggccgaagctgccaggctttacggacacggtcaaacgagcatggactgctccgacagcacacgttgagccttttcaccgcctatattacaagcttcaccacacggctgtcgctttacgggaatggt

SEQ ID NO: 25291 - DNA, 255 bp, Setaria italica
  Peptide Sequence Number=SeqID_91265
tcgacggccagcccggcgacggcgatggacgcgaggctgaccacgtcggtgatgatggagcccaggatggccttctggttcgtgaacccgacggtgtagaagaggagcggcgtgaagatggacaccacgatcatgcccgtcaggtcgaagaacacaggcgtcgccacggcgatggcgaggtgggggcggtactcgcgccggcagaacaggcgccggaacgcgccggactcgtgcctgcggtcctgctccacggcg

SEQ ID NO: 25292 - DNA, 251 bp, Setaria italica
  Peptide Sequence Number=SeqID_91266
ttgactggggcctgagggatcgatcgacccagatataagactgtgaagagacatatgttcctgttgcaaacgcgatgccatcgggaacgctcaccaggtcgttcagagcgaacgcgccgattaatccgttgattgcacgttgatcagcccgaagttgaaacggtgttcccaaaggatttcccgcaatgactgtaagaggcgccacaagatcgaaccagtggtatgcgagctgtcccacggtgatatcaacg

SEQ ID NO: 25293 - DNA, 228 bp, Setaria italica
  Peptide Sequence Number=SeqID_91267
gagggatcagacgcatcgcaatcgcaatcgcaaccggccaccatggacatggagcaccagctgcttctcttctcgccgcaggagcacttcatggccagcccgccgggcttcttcgccgtgggcgctggatactccgcgcatttccagacgggcgagttcgtcgagccggttggcgtcgtggcgaccggcatcgaggacggcgcgtgggtggaggacctcatgcagctc

SEQ ID NO: 25294 - DNA, 412 bp, Setaria italica
  Peptide Sequence Number=SeqID_91268
ctgccaagactgcctctagccagagagaaacagagaggagcaagttaaaagagcaattagaagacaaacttcagagggcaaagcaacagagggttgagtatttgaagcagcgaggaagtccttatggctctatacgcagcagttcggttaaaagtggagaatttctttcaagaaaactggcaagatgctggagaagattcataacttctaggaaaacaacagtggtgttggctagggcgttcgactcgctggggataaatcagcaatctgttgtgtctatgccatttgaagaattagctatatgcattgaatctcccacagtccttcagaccactaaggcgttgcttgatcggttggagagtcgttttgttctctctcagtcatttagttcatcaaaaccagaaaatattga

SEQ ID NO: 25295 - DNA, 434 bp, Setaria italica
  Peptide Sequence Number=SeqID_91269
cggcagagccaggtcggggtggtggagctggagcggatgctgctccaccggatggagatggacagcgacgaggacgacgagagcagcgacgccagctccgacctgttcgagctcgagaacttcgcggccgtcgcgccggccgctggcgggccggcgcgtacagggacgagctgccggtgtacgagacgacgagggtcgtgctgaaccgcgccattgggcacgggcacgggcacgggtacgcgcacgggaggagtaccagagtggtgtaatttttttctggatccgggtaactgcaaaatggtggagtaactgtaaaatacgagtggtttgggagggaaatggtgattggggcaacaaatgtttgctactctgatctactactagtgatctttgggaggctttctgctgggattcctttttccccttttaaattt

SEQ ID NO: 25296 - DNA, 899 bp, Setaria italica
  Peptide Sequence Number=SeqID_91270
tgtttagcacatcatttcttattaaaaaattacattattgctggcagtagagttcctcagctctcctaaaaaaagtagaggcccccatcagtcagaaaatggacaagtttctgaattccacacaaaaacacatgatcaacaggtgagatcgcggcaagagtagttcgctacagcatcagtcaccaaactattgccggaagcaactgcaaattcttttgttcatacatggaacaggacccattgcagcaaaacagcaccccacaactcacaacaaaggggacggggaaagtcaagtttgcagacgtatcaaattgtaaaattacatctgatcatatcataatgtaaacaactctcattggacagtcattgagagaatctggcgtgcaagccccgggtcctgttgaagcagttctctgatgttgttctccacttctcccaactgtttctcaagatattccttggaagtctgcattgatgctattgcactctcactgtcattaaacttttgctcttgctcgttcaaaagaactgattttggctccaaaataaacacttttccaacagtcttgtaggtgttggtatcctctggcaactggcgaagttcctccagagtgaggtaagcacgcttcttttccccctctttagaacgcatctgggtttgtaactgcttgatcttcccggtggtatcgatcatccgcgcctgcagctccatgaacgccgctcggttggcttcgtccgccatgggaggtggtggagcggggtcaagaaccctagggacaagctcgaatcgaatggaaggagggagggggaagcgacgtgctcgaggctgggacaggggatcggcggatgcagcggcggcggcggtcgcggcgctgcgcgagatcggtcgagtagacgag

SEQ ID NO: 25297 - DNA, 1696 bp, Setaria italica
  misc_feature (1)..(54): n is a, c, g, or t
  Peptide Sequence Number=SeqID_91271
nnnnnnnnnnnnnnnnnnnnnnnnnnnnnnnnnnnnnnnnnnnnnnnnnnnnnnttttttttataaatcgtaactcatgtaacttttattactcaattataattaacctcctgacatacatacacatatacatacattccttccatgtacgtaaataaagcacaacaaatgatggagagacaaggcaaaaaatagctcaacagggcaaaccaccaaaaaggaaaggacaccccatgagcgtgcagtgcaggacttggatgtgtgcccaacccgaccaaccgcaaagaatcgttgcaagttgcttgcaacacctccacagcatgtatgtaacaatggtggctaggcaacttatcggtgtgtcccgccgcctctcctcctcgacgatgcaatgcgtgctcgtggaagccccagaatagccaccagcccaccgatgaaagatgcaccggctgccaccgcaaaagcaggcgcatttccaccgccgaacagttcatcccatggtccactaccaagcgacacaataatctgtggtatgacaatagctaaatttaggatacccattgccagaccttggccaagacccagattttcaacacgactagcagccattgcatatggtatactgtatgtgatcgccaggggtgcccctaaaattgtaaaaaccaccagggaagcaatgacaatgccagttggaggtactccactgggaggataatccatgttctttgcaacatatgttattacgagcattgccacgaagcataaagccattattatattggagacaccccatactagtccagctccccacttcctacatagcttttctagtacaacagaggtgaacccaagaaggacagagttcatcattaggccaaaagaacccattctcacaccatcatggtaactttgggactgttctgggttgtctgggcttcctcggtagatctctcggcccatccaatcagtatcaaagaggataaaaggaaaccatccaatccatgtaagggcagtgacaattaagaccatccaaactggtagtgtgaagtatctgaatgacccaaaaagctcccagaggaaagcttcctgttcggtacctggatgttctgcttcatcacctccaaaagtttgaggctcttgcgctgatgatacagtgatgtaggttgtgatcaccagaataataatgtcaagaagaaaggcagacttgaggttggcacaactgatgctgcaggatggtgtaacagtgaaaggaaatatcctataccagccactgtatgctccggtggcatatccaagtatgtttcccagggccatgaagagtgaaaagtatgcattagcaatccgagtcctccttgggtcattctcggtgaggtccgcgaggaatgccctgcagggcccctgcgttgcgttgttgccgacatcgagcagccagaatccgaggaggtagacgcagatggcgccgaggcgtgtggtgcccggggtgatgtcgtcgccgaagaggcgtccgaggtcggcggagaacccgacggtgaggacggcggcggcgatggaggcggcccccgcggcgatgaagggccttcggcgccccagcggggaggccgcgggtgcgatgcggtcggagaggtggccgacgaggggctggacgaggaggccggagagcgggccgcagagccagacgaggctggcgaaggcgtgcggg

SEQ ID NO: 25298 - DNA, 599 bp, Setaria italica
  Peptide Sequence Number=SeqID_91272
cggagcttgtcgctggcgaaggcggcccggttggcggcgctcaggtgggtccggcagaagtccaccacctcctggtctatgtcgcacatgacgaccctgtggacggtgttgtggcggagcacctccctcgccgcggagccctcgccgccgcccatgatgaacaccgtcttcgggtttgggtggaagagaaggggtgggtggatgagcgactcgtggtagatgaactcgtccacctccgcgctctgcatcttgccgtcgattatcagagccttgccgaaatgctttgtgtcgatgagagctatctcctggtacttgcttgcccctcgatgaagcacactgttgagagcgtagcagagcttgaggtcgtcgtcgatctcctcctcgaaccactggctctcctcttcacgacgcggctgctgcttcgccatggccaccctgctctcgtacccattcgtctccaacccgccgttcaactcaccaactctgccgtagtcctgcacagctcccaccatcttggcgatcggaacaagccaacaatcgcaagaaatctggctaagatcagcaaaatatgctaccgagctacgagtaagctgtaggtg

SEQ ID NO: 25299 - DNA, 2989 bp, Setaria italica
  Peptide Sequence Number=SeqID_91273
ggtttaaaacatgtaatttgtaatttttccaactgaaatagcatcatcccaataaaccaagagtcaaaaaaaaaactaggtatacaagtatctacatagcacaaatgaatgcccattccaggtctctgcaatctgcgctgcttagacaaaaacttctatacctcctctcttcagaggaaaaagctctcatagcaaacaaagttacaacttcacagatcatgtgcatccacttcgccaacatggtgaatggtgatatggtcaaccaaaccgcattacgcaaagagacgccttctccgcctaattgctgccttcatcagtgggccatcagcagattcaccgtgcaccacctcgtcgactagctccttgaacactgacctctcgatctccagcaccagccccgggagctccctgcagaagctcgtccatccctgcagcctctccaggatctctgcatcaggtatcacactgccttccttctggcagatccgtgattgctccatctccaggtcttcgattcctgaagatacgaatttcacaagttgctgcccactaagagtctttgcaggtagatccttcgctctagtgaatgaactggctgaataaactgcagtttccttctcaaacttctgaaggagaatctcattcacagagtcgaacatcagcttccggtgcgctctcttaggatcacatttcactctgctctgatggataccatcaggtttactgacccatcctgcctttctttgctccaaaacgtggaacaggtcagggttgattgggtagccagaagggtggagctggagccctgcatgtcctgaacctaggtctttcatcagaaggcctgaggccagtagtatctcagacacgtaacggtggtctggactttctgtctcacacaagaaagcaatgtggtcaactggaggggcatcctcatccttgttcacgctaagctgctggagcttctcaagcaagctagcaacattagcgagcttattgtttttggattgcatagcaacctctcttagctttgtatcagaaggtttccatggttcctctgatgtatggtgctcatcatcagcagcaagtgaatctgaagtcctgctggaaggaaacaaatcctcctgatcaaacaaagggtccaacacagaaactggacttggccgttcagagatagcggcggaagggtctacagatgacacgtccttgcttgcatcatatgaggttttcactttttgtgtattccttcctgatggagttccattgccttgctcaaagttagaaacgttcacttctgtagacctgtcattgcttataacttctatatccacctctgaagcaacacacatactgccatctgaccttgtggacatatcattgccttgctgattcaggctccttgtcctgttattcaatccattgggcatgccatcatcgccttcctgtgcacgcacaggtttccttctgaatttgcttcggggtgacacagtgtccaaattattcctatctccagattgcctttggcttttgttagactcagcagaaggaacaggcggtctagccctccgctctgaatcaagttttctctgtagtaatcttgggctagtggaatttttattcttttgcaaacttatgctactgtctcttggcagctgctgtcttctggatgagctctcagtaaccagcagtgaactagatttttgcttgttgctgctatcatcattccttccatttgatttcctgtcataagaaacaaggggttgagaagtagggaccctaggactccatttcgcatgctgctctttagctgtcctattgaccgttgaagctttccttttatcagtgctattgcctgtttgcagctgtggaagatcagatgaaccccctaatggaatgacagaagaatccacttcgctgtaaaggtttgcagattttgaaggcttcatgatcacaataggcgatttaaaagagctttctgcattactctcttcaggcacccacatggagttggtgttactgttcagtctcgtgttcagattggtcgtctcttggtcatcatggcttccatcatatagctttgacatagatgcttcttcccgtttcttgttttccaacagtccttttgcttgcatagaatccaagatctgtttaagggctctaagatccttgtttgattgctgaaaatcaaggtccttgagccgtttctctatgtcgctgaagactgatgcaacaggttctcttccatgggctccttttgatccccttggtggttttcgaggcaggacaatcctttcttgttgcttccacggtgcagtttcaacaggaaacttagagttgggtaaatttcttactgttgaatcctgattcctttgttgtcgaggagcaggctcgttgtgggatgagatgctcaagggattcaacgtagcctctttgctctctttgactgctttgcatgcctgcaatgatgctgtactttcactacgctctggcaactcttccaatcccatgagctttgcaacaacactaggaagacgcttgcaggctggctgttcctgctgagtctccaaggctgcattggacccagtagcattgctgctgcttcggtctgaagaactcaagcttggcttcgatctagagttcatttcacgattccaatggtgaccctccttgatgtccagtgacaaccttggtacctccctcagttttgatgctggttccttaccatcgtatgagaaccgaggagcatcatatgaaagtcttgcatgatggcctgattcagaaggagtccaagtggcttccctgagcttggctagcactcgaagcgattcgttgatgtccatgagacccttgctttttccttgggtactgtcgcggggaggcccatccaattgcctggatggatctccaaagttgaatgggtgatcttttacttcttccccattacaaactctgactgacaagtcacggctatccttatagattgaatccttca

SEQ ID NO: 25300 - DNA, 428 bp, Setaria italica
  misc_feature (392)..(392): n is a, c, g, or t
  Peptide Sequence Number=SeqID_91274
aaaggaacttgcaattttattttcttgcttctctttcgagattgattttctccatttgtgcccacaagtcaacctatcaaaatgactcttatttcttaaattcgcagcatcatgggaagagttacaggttcaaagaacgattcccatactcctgaaccattgcagcgaaaagggatggctgttcaatcaaccttgacggtgcgtcaaattcttttaccaggccttcatccagcaccaaaactctatcacagtccatgactgttggtattctgtgtgcaatacttattatcgtacacgttgagaattctcgtcgtgtgatcttctgaatcgtggcatctgtttgagaatcaacagaagcagttgcctcatccataaataagattttggtccgnttcaatatgacacgaccaagtactaaagtaagtctt

SEQ ID NO: 25301 - DNA, 465 bp, Setaria italica
  Peptide Sequence Number=SeqID_91275
ggacaacgttaggtgatctgcatggatttttgcttgctgttttcaggtggaaagtgaaggattggtgctgaagatgcgtaatcggttacatggatgaagtcaagcttaatatggtaccgcctttttattttattggcatcagaaaagcatcagggcctctgcctaatggcactaaaactctggaagttgagatcaatcatgaacaattatttgaggcacgcgaacagttgagaaaaacggaatggtccaagaaaacaagaattgctgtggctcatcaggatcagttgatcagagatctcacctggcttcggagtcggagcggatatcttcctccgggttcagagttcctacaaccagtttagcaccgacgaaacatatatcagtttctcatgacgtgaaccgagtatcaaagattcatgccctgatgcccaattaccttctcacattacacaccgacaaacgaag

SEQ ID NO: 25302 - DNA, 2295 bp, Setaria italica
  misc_feature (1)..(15): n is a, c, g, or t
  Peptide Sequence Number=SeqID_91276
nnnnnnnnnnnnnnnacgtttttaacttatgcaagaccttttatatctttagcacatcatcacctgcaacatctggactttatccaacctctgctctggccacacactgcaggctgcagtttctcttcttgttcttatgtacagatggacacaaacttcactgaatacaaactgaaacccaaaaaacaaatacaaaaaaaaaacggtgtattatctactgaacagctctttgggggtgcatttgagcgagagattgttctgggaacttcagggattcagatccttgcaaaataaacatgcccatatgcccgtcagttgacctccgtggagatgatctccagctccgcccaccacagcggcgacaccttgggggtggcggcgtcgggcggcatggcggtgatctccctgagccgcctggcgacctccggcatcgtgagccgccgcctgggctcgcggtcggtgcatcccctgatgacgccgtcgagccggtccacggtggcggcgttgaacgaccgccgcagcgcggggtccaccacgtccctgagccgccgctcccctctcaggtaccccgctgcccagccctccagcaggccgcccgccgacgccgtgaaccggccggccatggtctccagcaacaccatcccgtagctgtacacgacgccctccctgtccgccagcgccggggaagggggcaaggactcctcctcccggggctcgtcgcagaagaagacgtcggagatcttggcggcgaagtcgtcggtcaggcagatggtggacgtgtccagcgtccgcaggatctccggcgggctcagctggtgcatgtgctccaggcagtaggcgacgcccaccgccacgcgcaggcgcgtcggccagtccaggtggccgtcttctctgacgtggagatgctcgaagagagtgccgtttggagcgtactcgaacaccatcatcctggtgaagggctgttcctcctggcagtagcccagcaggttcacgaagttcttgtggttgactctggacaagcttgttatcttcttcctgaactgtgtttcgcagtgcttggaccattctttggcagagctcttggtcgtcgacaccaccgcgatctcgacgccgctggacagcgtccccttgtacaccatgtaatccggcagggagccgatgacgttgctgaagtcctcgcaggcgagctcgagctctgatctcttcagcgacggcacacctgtcacaaacgctttctgcagctgcccgctgaggccggtcgcccacggtctgacggtgaccaccttgctggaccggtagcacaggaggaagaccgccacggacacggccgcgagcagggatgcccccgccgcggcgatgacgtagacaggcctaccgacatgattggagtgtctccctccagttgcaacgccggcgatcaccggcctactaccgttgtcggccggctgtgggggcagtgcgatgctctgtgaaggattgctatcatgcgccggcagcggcaaaggcttggcgaacaccgccggcgaaggtgccggagcaggcgacggaggaaagctgatcggcggcgtagccttcggtgtccacggccacggtggccattgcggatactgtggctgccggtttggcgtgaacgtcgacggcgggccctggaaacctcctccgccagctgaaggattgttgttggtgaaatccggccatgccgccttgttgctgtcgaaacgcccggaccagtacttgttctgctgctcctgcaggatttttcttgtacggtctccatgggttatcctggcttcggagtcggagcggatatcttcctccgggttcagagttccttgcccggcgtcgttgctgctgccgagatgagggagcacggagaccagcgccaccagcagcaggacacccaccatccaccggcggcggcgcatcttctccatggacgccgacgaaactccacgaagcaacacgggaacgctcactcactgatcgtggaaggccacatgcttcagcagctttatgcaaaggcagagagatcaagaaagggaagcgacgacttgggtagcgtggcagtcgtggaggggtgggaggagctaatcaggtagcaatggcgtgggaggagaccaggtcgtctccacctcggctaggtagtagcgtcgcggtggagactggagagtggagaccggggaggaagggcaccagatatggtggggagcagaccggggaagacggccacgcggaggtggagatgatttggggtcgatcgggtccccggtctcgggtgtgagttgtgaccactcg

SEQ ID NO: 25303 - DNA, 612 bp, Setaria italica
  Peptide Sequence Number=SeqID_91277
tgcaagcacattcgcttcacagcttcatcaccaactggctctgcagtcaccacatgaccagtcactggaatgccaagaatgtatgaaacatcacgaagtgatggtgccatttcaaatcccataaaatgtgcagtatttgtttcattgttccatctctcacaaaaggatgtaagcaaagaacgatcaatggtaaacccagtggtaagtgcaagatgtccaagaccactagcattaacaagctgttgctgctgatcagtcagaacccattcttttagctttcgagtctgctggcttggaagcaaaacaccgtaccttgtccaaatttgtgagctaccaactggtcttcgactatttgccttctgttgctgtgctaacaaaccttctgatgcagggtccattttgtccagcgaggagtccgagggcgcgccgcgcaccttcgcctccggacctccggtggctgggcgcctcctaccccctctcacttcctcggtggagaggaggtggaaccggcgaagaaacgaagcgaccgtgggagagagaagagagagaggtcatcaagtattcaagtgagagggcgtctcttccgctgccacgcggggtccagtcctcagg

SEQ ID NO: 25304 - DNA, 683 bp, Setaria italica
  Peptide Sequence Number=SeqID_91278
tcccgtttcggcttccaacccaccctccaccatgcggcgcccctgggatgcagttatcatgccttggacatgacaccatcctggatcacccagttcttggtcccttaactagaaaaataatatataacaggcaccgtgtgatgaatgtcatcccattggaagactcatcactgcaatgcccacttcagaagcttgtctcaagaaatcaatcaactcatgtgtacacgcctgtgtcacactcatatcctgattcggtactagtaggttgctcaagagtagcaacagatcaagatcgtattgttggtccaagctcttgcctgagcctcggtagcaacgcaagccagttctggtacctggttgatcctcaaacagatatgtctactcttcccatggattgtgtggtgattgcaaagggcatcccgaataccctacacttatgataaaaatggtccaaactcttgggcatacctcacggggtcactcttcaatgaaaaggcaaacagagcaatcaaatttggtgaaacggcactcaattggcaccttaacaatatcaccagcgcttgtcaaaggtgtgaacaggaaggacaacattgtggattcaattcaatcaggggacaagcattctgccagcatcgtggtattgttttcctagcccagatcccaaactgtttggtgtcccataa

SEQ ID NO: 25305 - DNA, 373 bp, Setaria italica
  Peptide Sequence Number=SeqID_91279
tccaaacaaagccgagaccagcggaaggcgttggactcgcgaggagaggcagggcaccagcgccgagcacagagagagcgcccagaaaccctagctccgccgccgccgccgcctcgcgatgtcttgcacggtggccatcccgagctcgccggtgttctcgccctctcgccgccagctctcctgcaaggccgcgtcggcctcgccggagccagccgtcgccgtctccacctcctcgccggcgcccgcgcccgccgccgccgccggctcaccgctccgtcccttcgcgctccgcgcgctgctccgggaggagatctccccgtcttcgtcgccccagccggcatccgccgcctcggtggcctctgcactggccggg

SEQ ID NO: 25306 - DNA, 440 bp, Setaria italica
  Peptide Sequence Number=SeqID_91280
gcttcattgaaaacgaggtatcatggggctaccattatagaataaaagcaaccacaatacgacctttggcctatctgatgcagttctattggatgcctgaaaattcttccggccgaatttgctccaaatttcggactcaaaatgagcaatggacagaaacttcaacgatttaatatagtccacggtcagtacagcttcatcttccatgttattctgacaaagataccatagtatcaaaaatctcctgcagaactccaaatcctccagcgcccacatctgagggcttgccgtcttcctcaattcattagtgatatgagggcttgctgccttcctgaatgcattttctgcatcaagattcggcacgggcttttgtagcattattgcacactctgggcccagatggaatccatagggtccaactccctgaagacatcttaaac

SEQ ID NO: 25307 - DNA, 735 bp, Setaria italica
  Peptide Sequence Number=SeqID_91281
gcaggtacaaagttcaattttttaaaagtgcgataggagtagcaaaaattgaattcaagtgcagttctcacacaggagcatctaatgcaattaaaacttacctccagagtgcatgaatctccaattctccataggttatagcagtacagaatacgaacatcttagcgggtttgattccatcccaaaccagcaccatgtttgttgatgataggctgtataggttctacaataccctttctgctttttccaagggcctccccctccttccagcccatgttctccattattctcttagcagactgcaaaccactggaacggaaattcatatctactgatgcagttcccatcgaattaatgtcatcaattgattcctcatattcatcaaaactgatgatgttacattgcttctgtccaggccctatccctaagccacgatgtaggttccttcgctcagcagctctgtccctgtaagtgtttgtcttctgttccttgtcattatcagctgatacaccttcccggacagaagactcatcagcaacttcagattcgcactgtgcagttgactgcttattcaaattaatatcaggatttgcatatatgtcaggaaacccccaatcttttgtcgggttagaggagtcatatgcggacaaagaggccaagtatttcctgctagggttccttagcctgtacagcttccctgttgaaacacgcacaaggtcaagatgaacttcactc

SEQ ID NO: 25308 - DNA, 929 bp, Setaria italica
  Peptide Sequence Number=SeqID_91282
gctaaccacggacccgagccccatcgcggcggatcccacgccggagtgaacccttcgccgccgccgtccgtccgtcgccggagggcgagggtgacgaggaggaggagggcaagatgaagacgaccaaggggggcaaggtgatgaaccccaccgacgccttccgcaaggagcagcggaagaaggagctcaagcggaacaaaaaagaaaggaagaaggtgcgagatgttggtattttgaaaaaggatccagaggctattagggagcagattgagaagttggagaagatgaaggctgatggtgctcttgacaaggctaggaaacataagaaaagacagcttgaggatacatataatcttattgttaagaaaagaaaggaatatgaacagaaaatgaaggagaagggtgagcagccggttatgttcggccatcttggaccaccaaagagacggcctgcagcagaggaagaagatagagcaaatcctaagcctgaggactctgtttactatcatccaaccttaaatccatctggagcaccaccacctggaaaacctcccatgtacaaatcatctataggaccaagaatcccactgccttcctcatccaacgcgggggcctcatcttccatgtcagagtctgaagcaggtccatccaccctgccaccccctccaccaccaccaccattgccagccacctcagaatccattgatccatctgcacctcctttccctttgcccccactcccacccccgcccccaccaccacctaagcctgtcagtgactcagcactgccaagcttacctccgccacctccacctccacctggtccaccgccaagagaacttgtatcaggtcatacagtacttccaccacctccgcctccaccgcagaggccgtctggtgcaaatgagagcataactgattctgctcag

SEQ ID NO: 25309 - DNA, 281 bp, Setaria italica
  Peptide Sequence Number=SeqID_91283
tcgaggtagaagttgacgccgtcgagcacggcgtcgccgaacgggcggcggacgccgccccggcgggagccgccgccgaggaaggcgttccagaggtggtcggcgacgtccctggcggtggccggggagttgtagctgccagcgacggagaggagcacggtgacgttcttggcgctctgacagtgcttgacgtcggcgccgacggtggagacgtcgtggccggagaggtcggtcaggtacttgccgtggccggcgacgcggaggaaggagaggatgacggg

SEQ ID NO: 25310 - DNA, 365 bp, Setaria italica
  Peptide Sequence Number=SeqID_91284
gggaggtggaagcggccaagagcttggtagggggaccgaagagtgggagagtggcgtacgcgtgccgcctcctaggcagaggcggcggcggaggcaaacccccatgctcctgctcccccgaagagaggatgtggcagccgacagcggcgcgcaccgggatcggcggcgcgccgtcagagtcagaggccctgcggcgtccagagcagagcagggaagcgcaggcggctgcagatgcgacgcggattggatgccgggctggctggccggcctggtgatgatgatgatgatgaatggatgggccggcaaaggactgtccggttgtttctgctgttgttacggcggagctggagctggagctctgcagg

SEQ ID NO: 25311 - DNA, 282 bp, Setaria italica
  Peptide Sequence Number=SeqID_91285
tccctccgccgccacgggcgagcgcggacggcgcgttcacctctggcccggctgtcgccgtgcccgaagcgggggacgccactgagcaagtggccgcggctgctcagccggctgcgcttccggatatgcacgataaggccggtggcgctgatgttgatgatggggcgggtgggaatggggagttcccgcccggtggcggtggtggggacggggataatggtggcggtggcggtggcggcggcggtgggggtgacggtgaggagggggaggacgagttccggg

SEQ ID NO: 25312 - DNA, 859 bp, Setaria italica
  Peptide Sequence Number=SeqID_91286
aaccaagaataactaggttgttgacggaaacacatcggctctctgcagatcacaaaagtgagatgaatggaactgaaacatgttctaatggctcagaagtgtccaattgttctgatgcacataaggaaacttcagcggcagcaacacaaattcctgcaaacttaagctgtcttcaggaaacctcagcagaattgttccaagttcaaactcatgttagacctataacaagagaaaaactagataatcctaatgttgacttcaaagctccagtgcatttgagaagcaagattgatgatgttggagatcgttctaaactaaatgctatgttccagtctccttttattggagaggagatggggattgaaaagaagatcatagcaagtgtgtcaccagacaacagtgatgttcagtatcagtttatgcttgaacaacgtgttctccggcggctttgtgttcagaagatagtggtgcctacaccaatgaaggacaagctagataaggatacacgatttaggatagtggaggatggatctcatgcccttccgaaaagtgtctaacaggggaggaaatggcaatgtaggggaggaagaaacacatttgacacctggtgaaatgcagggcaagcacctacatgagcccatgagctcatccatgtccatatgctcattttatgtgcaccactctctttaataatgtctgtctgaaaatattaatgtttccttcacccatcagtttcttagtgttggttttcaccacaagatcgactcattgtacacctgtggactctagatttgtgctctttttcagttaataactctggaggttgtcagatgttatacattgttaatctattagattt

SEQ ID NO: 25313 - DNA, 290 bp, Setaria italica
  Peptide Sequence Number=SeqID_91287
gcccccaagtccaaggccaccggcagctcacagaagacggcgacgtcgctgcttgttcttgctctgttcatcgagctgagcgcggagctgtacagagcaggggtgcccagcaacgtggaggcctacgtcctgttcgccggcgccgagttcgtgtggctgttcctcgacggctcctggctcggcttcgccctcgcctgcctcgtcggcaccgtctgcccactcgccgagatcccactgatcaaattgctccgatgctggagctatccgaacgccgacgtccacctgctcgg

SEQ ID NO: 25314 - DNA, 420 bp, Setaria italica
  Peptide Sequence Number=SeqID_91288
tttgcaattgttactgaccgtgggggagtgttgccaggccaagctaatggaacatacctgttaaatcactggtggactaacatgaagattgaccctgagttcaagtgacaaacccttaggtctttattgttcaacttttggatggcctttaaagccagttctttagttctgaaattaacaaaagcatacagcttgttatccccctttcctcgtattcgcacttccacaacttctccaaccgactcaaatagccttttgagatcttcagaagatacatagaagatgcccccaacatacacttcagatccatgaggaggaagagcaagaagctcagcatgtttctctttttcttcctcatttctgtactccttggcatctttcaaagctcaaagtttcaagaaaactttggaaagagcacag

SEQ ID NO: 25315 - DNA, 823 bp, Setaria italica
  Peptide Sequence Number=SeqID_91289
agatatgaacttgatggtcagctactggattgttcacttgcaaaagcagacaagaaggatgatactatatcagtacctactgcaaaaggaggtccattgctgccaagttataccccacttggatatggactgtcgggggcctataatccacttggaaatggactggcaggcgcttataatccacttggaaatggactggcaggtgcttataatcgacttggaaatggattggcaggtgcttataatcgacttggaaatggattggctggtgcttatggtgtgcttcctgctcctgctgcacagccaattttgtatgctccaggtgctccttcaggttcaacaatgatcccaatggttctaccagatggccgtcttgtatatgtaccacaggctgcagggcagcaaactgtgcatgtggcttcgcctccgtcacagcaaggtggtcatcgttatggtggtagcggtggtggcggatccggctccggtggaaggcggcagagaggagatgaccgcggtagtactagtagcaacaacagccgcaggggccgacaccgtccatactgatgtttgcaaaggttgctgttagcgtttagaagttagaacctaggacaaaagaatgcctctgttgcagtacctggatctggatggctaccacctaatagctggagactgtacgtagtttgcactagcgtttattttcctcggtctgtaacgaaccgctttagaaccaataatactgcaaaccgtagatgtagcttgggatgctatccatcaggcttcaagaacagttttgctgtgctcaaaaaaaaaaaactactcacac

SEQ ID NO: 25316 - DNA, 1818 bp, Setaria italica
  Peptide Sequence Number=SeqID_91290
cggaggcgaagccacatgcacagtttgctgccctgcagcctgtggtacatatacaagacggccatctggtagaaccattgggatcattgttgaacctgaaggagcacctggagcatacaaaattggctgtgcagcaggagcaggaagcacaccataagcaccagccaatccatttccaagtcgattataagcacctgccaatccatttccaagtggattataagcacctgccagtccatttccaagtggattataagcgcctgccagtccatttccaagtggattataggcccccgacagtccatatccaagtggggtataacttggcagcaatggacctgcttttgtattaggtactgatatagtatcatccttcttgtctgcttttgcaagtgaacaatccagtagctgaccatcaagttcatatctctcggtgttcttcagagccttaatagccatgtaccgttccttaaagtgaacaaaaccgtaccgattttcatgaccagcttttgcaggaggaagaacaacttttgtaatttctccaaggtgctcaaacagcgttctcagctgctcttcagtaacagtcttgggcaggtttttgacataaagagatttaacctgcttcgcagtagaggcagattcaccactattcttagtatctgcccagttgacagtaggagcatttgtatctagtttgaattctggggtagacatcttctgcctggcatactctgcacatgcctggttgtagtattcaataaagccatagcccttatggcaatctgaatgtggtgccttcgggagattgactttcaaaactccaggaccaacttcttccactgcgtttttgaaatcatcctgtgtccaatctttgggtatattcccaataaatagcctgttctttgcctgggacgaagaaacctttatcttctttccctttaggtctttattgttcaacttttggatggcctttaaagccagttctttagttctgaaattaacaaaagcatacagcttgttatccccctttcctcgtattcgcacttccacaacttctccaaccgactcaaatagttttttgagatcttcagaagatacatctgagatgcccccaacatacacttcagatccatgaggaggaagagcaagaagctcagcatgtttctctttttcttcctcatccttctgatctaccattttactgtcatgcttagcatcaacttcacacgcaacttcagatttttcctcctcttcctcctcatcctcctctacctcttcatattcaacctcctcctcgatttcttcatactcaacttcctcttcatctacctcgtcaggatcatcaaactccaaatggtcttcttgtctgagagcattttctgtactccttggcatctttcaaagatcaaagtttcaagaaaactttggaaagagcacaggaaccaacaatattgggggagcaaagtgatgatgaatggatagggaaaaaaacaacagaaacagctagaacaaaatatatgtaataatctcgaaatggattcagccatgggtatccaaatggaaaatggaaccacaaagcaagtgaatgttgaggaacaaatgcagaaatagcagtatgctcagatgggcagtatggaaggttatcaagaatataatagcaccgtcaacaagagtatgttaaagaggacaggcaaggaagatgctatctggattctggagtataattgagcgggctggtgtaattgcaaggtatacaaataattaccaattaaaataagaaaataggaaaagggaaaaggaaaaaagtaaaacaaagaa

SEQ ID NO: 25317 - DNA, 232 bp, Setaria italica
  Peptide Sequence Number=SeqID_91291
gccggctcaccgcgcaatcccttcctctctcacgagatcggcgaggacggcgccggcgacagcgacctagggttctccaagtgggccgagaagctccgtggcggcgcctcaggtctcgtgcatctttcaaatttgtttattgctcgatcgtaattggttatttatttatgcatctcttgggttcattgttgacgctttgtttagtggaagtggataccgtgaaagtattttt

SEQ ID NO: 25318 - DNA, 269 bp, Setaria italica
  Peptide Sequence Number=SeqID_91292
cgttcttgaggaggacgagggacctgcgcacggcctcccgcgccagctcgcggtgctccggcttccccagctcgccggcgaggctggggtcgccgtaggggtcctcgaagaggcccatggtgaacttgacgcggaggatccgtcggacggcgtcgtcgatccggctcatgggaatggtgccgttccgcaccagcgccgtcaggtcgtcgatgaactcggtgtaagtgtacgggatcatgaccatgtcgatgccggcgaggatccccagc

SEQ ID NO: 25319 - DNA, 276 bp, Setaria italica
  Peptide Sequence Number=SeqID_91293
acattaattttcccaactctatgcggatcaatgacctcgaagttttgatataccctcggtgcttcatgatgttgaggaaggagaccatgacgccggagatgggctggaggagcgccgtcgccttcccccggcggtccgcgttgaccatcgtgcgcagcgcgtcgttcaggatccgccgccccatcgcgatcccgtgtccacggccggtggatctgctcgcttctccgtccgccgccgctcgccctcacgttctctcggtctctcctccctaggcag

SEQ ID NO: 25320 - DNA, 532 bp, Setaria italica
  Peptide Sequence Number=SeqID_91294
tgccaatgcgtgttcaacctccctacaggctacaggaaggaatgatctccaaaaagcatacatgacaactccacaggaacgagctaccattcctagcaggatcatagaatctcaagcaggcacaacagatgtacaagatatatcagttcaaatgaaaattacagtcttcctgtttaacagctagcatttcctagtgccgtgagccggacatgttattgcatttcttgttggacatgaaggaaagcaaactgctctcaaaacccaaacagaatgggttcagtaataacaacactagtaatgtcattcacggctagagaagggtgctccttgtcaatggaaataaccaaggacctgcccacccacgttctgcctgattgcttcctcgtgatccaaaacaccatttggagtagtaatcacaacatagccccactgacgtgttgggagcatccgaactctgtactgttctatttccttagctctgaggtcttgcctgtaagtaagagctttgcaatctttgatacgtccatgaagc

SEQ ID NO: 25321 - DNA, 823 bp, Setaria italica
  Peptide Sequence Number=SeqID_91295
aaagatctcagaaaagcgtacatggcaactccacaagatcacaagaaccgagctatgcttcttacccggatcatagaatctcaaactagcaatacccatatatctccaaaaacctagatgcaggacagatctaaatgatatcatttcaaagaaaaattacagttttcctgtttaacagttagcatttcctagcgccgtgagccgtacttttgacacgttattgcatttcttgttggcagtgaacaaaagcaaaacagctctcaaagtacaaacagaatgggctcggccatagcccatttgcctcattcagaacaagagaacgaagctcctcaatggaaatagccaaggacctgaccacccacattctgcctgattgcttcctcatgatccaaaacaccattcggagtagtaatcacaacatagccccactggcgtgttgggagcatccgaaccctgtattgttctatttccttagctctgaggtcttgcctgtaagtaagagctttgcaatctttaatacgtccatgaagctccacattaattttcccaactctatgcggatcagtgacctcaaagcttttgatataccctcggtgcttcatgatgttgaggaaggagaccatgacgccggagatgggctggaggagcgccgtggccttcccccggcggtccgcgttgaccatagtgcgcagcgcgtcgttcaggatccgtcgccccatcgcgagtactctctcctcgccggcgccgctgcccgttctgcttcttcctccccgagaaatcgcgctcgcagccgccggcgctcgcggtgtgcggtgctgtgggg

SEQ ID NO: 25322 - DNA, 425 bp, Setaria italica
  Peptide Sequence Number=SeqID_91296
cctgggacctactgctttgggtggtaatagacaacatctgaatcaggaaactaaagaattacctgcaccttcaaagccacaacatatgcctgttgatggttacaactccaatatgcctggaatagatcagactacagagacagttggagctggtaatgatgttgaaaattgtagccacgcagcagacattgtgcccgagcaggctgctgatgaaggagatgaggatctttcggagcatgatgatctaccgtcatctcctccaaagcacactatgacagaaaaatggatcttggaataccagaagagaatgtacaatgagaaacaaaaaaggacattggagcagcataaattacacagcagaatgtcagcatcctatgagaagctaaaggaaagcgttaattcatctgaagatctttccgcaaaga

SEQ ID NO: 25323 - DNA, 481 bp, Setaria italica
  misc_feature (431)..(481): n is a, c, g, or t
  Peptide Sequence Number=SeqID_91297
gcgccgcgccggcgggtcctccgtggtggccccctgcgacgtgtggctgctggacgccgccggctgctacctctggcggctggacctgcaggcggcgctcaccctcggcggcctcccctgagcggctgagcagcagggcgcggccgcaccacccctatccgaagcgaaaggaatgacggagtacgcctccctcgtacggaggcgtattctatcgagcgaatcgaggcatgcgttgtttactgatgagtgatgagtgacggtgtgcggtagtatctgattcaaccggagtattgctagcctggtcgggcccaattaagcatgtcgaggccagatcaggtatactaattgtggattagtttagcatgtgatggatgcttctggatgtgcaagctccagtcaggaatcgtgctctcttattttttatctacttnnnnnnnnnnnnnnnnnnnnnnnnnnnnnnnnnnnnnnnnnnnnnnnnnnn

SEQ ID NO: 25324 - DNA, 379 bp, Setaria italica
  misc_feature (373)..(379): n is a, c, g, or t
  Peptide Sequence Number=SeqID_91298
ttgtacaataggttacaaattaatctgttcaagtgattaccaactgtcttgtcgccggctccggaaattgctagtgaatgaattgttactgacagcaatgtagcgtcatgaattcattgttgtttttccgatgtctggcggaacctgcaatgcaaagacactgcaatgtagcgtcatgagttcatttttcctctgacagaacctgtaatttaaagattgcataggattgatgtgacatagtgatcttgtatgcagttgtagggagctctgctgaacacttttctagagaggagtttctagagaagagtgaatctctgctgattatatgaagtgattctctggaatgactaatttgtgttaaaaaaaaaaaaannnnnnn

SEQ ID NO: 25325 - DNA, 744 bp, Setaria italica
  Peptide Sequence Number=SeqID_91299
ctaccatcagcaccattaggggcatcacctgatttgttttggccatcttcctgcaacggaaagctacgcagcatttcttcaaggtatccattggagaaaccttcaccgagtgcatctgatacaggtcataagaaaacaactaggggctccttttccaaaaaaggaaagaaagaaaagaaaacaaccaggagccgtgtcaaagggtgagtttggatcgaggcaattggtctctatgtagaagcttctgttaccctatataagttgaatctatagtgtcgaccttagcagaaaataaagatgcaagtagtaatgtcatgtttctgacagaatattgggtttatcaagattaagcagatggtgaaatcaattcatatgacccaacacggttgcgttttgcctgcgtttcttttgaaaaccaacataacgatgtcaatgtatcaaataaaaataataaatgttaatgtgacatttcaaaggacaccaaagctggtctaaaaaagagacaataggaacaataagagaaaacctattaactgtcatggaagaggccttgtggattttctgagcttattacttggactcgaacagatgtatgcttgataggtagataggtaaagtccaaaaggcaagtatcagacatggactggctgaataaaaattcccaaccatttttaatccccaaactttcaatagatgtgtgaaattaaatgtggcactctattgcgaacataaacatgaatataa

SEQ ID NO: 25326 - DNA, 538 bp, Setaria italica
  Peptide Sequence Number=SeqID_91300
gacattcttacatgcatctgatctatatgcttgcaaaactgaagccgtggaagatggactgccataaaacccatctaaccatcagacgactcatcattgtcactgggctgttcgaaaatttcaaactccccgtcactaccatcagcaccattaggggcatcacctgatttgatttaggccatcttcctgcaacggaaagctacgcagcatttcttcaaggtatccattggagaaaccttcaccgagtgcataggaatcatccaaggtgaaatcacgaaacccctctgccataggcggagaatcataaccatccgactcctcttcctcttcttcatcatccatatcttcactatcagagttgttaaggccaacttgatcctcagttccagtatgtgtggcaggagcttcttcatcaacatgctcttctttagatcgctcagatctccaaagggcttcctgcttcttagacctttcaataagttcatgggcattcctcaacagcttttgcctcttcactaggtaataagagaggaacctt

SEQ ID NO: 25327 - DNA, 324 bp, Setaria italica
  Peptide Sequence Number=SeqID_91301
cccctgcctgaggccgccgtcacccccgacgccgccgcggccttcgtcgtcgccgtcggcgccgccggctgcttccagatgaggaggagcacctccaccgcgcgctggtaccacggggacttgtggccgcctgatctcgcgccgccatcttttcttggctgccgtgtgttctttgccattttttgcatcaagatggagtggagaaacatctgggctggcgcgtaccagttggcgtcgagcgacaggagtcaggaggagagtggagaagtgaggtcacatcaagctgttactacattccccccgctatggggaagtgaagtgaga

SEQ ID NO: 25328 - DNA, 309 bp, Setaria italica
  Peptide Sequence Number=SeqID_91302
ataattctattgacgtctcgacttgacactgttgctgtagaaattggagtggactatacataccgagttgatttaatgtcagtggacgtaggatgtgagttactttggaagagcatgggcatcaatgaagtaaaggtagcagaaaatctgcgagacttagggatagatattgttcgcagatgtggttgtcttcctcttggaattaaggttattgctagagttttggcgagcaaagatcaaactgagattgaatggaagaagattttaagaaaaatgcttggtccatgagcaaatttcatagtcaagtaa

SEQ ID NO: 25329 - DNA, 342 bp, Setaria italica
  Peptide Sequence Number=SeqID_91303
gacgggcaggatgccctcgcgttgcgagcagttgaggatctggccgtagagctcgtcggtagagatgggcgcccagccgaacttgcgcacctggatgcccacgcgctcgtccgccttggcgaagtactcgtcgtggtaccgcgtcaccatgccccacaccgtgttgctcgggtggaacaggtagcggccgaggtggtggaacacggcgtcgcggcgcgggaacatgcgcgcgagctcccgctcgtgccctgggttcaggaacaggcccggcacgaagtagttgtccgactggaacacgagccacggcacgcgctgcagcgtgggcctgcatgtcttcgcaag

SEQ ID NO: 25330 - DNA, 194 bp, Setaria italica
  Peptide Sequence Number=SeqID_91304
gacaccgctcctgacaagcaagggcgggtcatgattccgccgatgctgaggcgctacgccgctcttaataaggagatcgtcgtggtgggagcgattactcgagttgaggtgtgggacgccaccgagtgggagaagtactccgaagctcaggaggaggccttcgccgatatgaacgaggaggtcttcgccgaaca

SEQ ID NO: 25331 - DNA, 1044 bp, Setaria italica
  misc_feature (1017)..(1044): n is a, c, g, or t
  Peptide Sequence Number=SeqID_91305
ctgaagcacaagctccttcccattctctgatcgatcgctctagctcagtctcaggctcttagctcttgctctagctagccaagtagccaccactcttcttgtagtcaccaaccttctgctcgtcaccaatggccactgctgaggtccagaccccgaccgccgtcgtgaccgaggaggcgcccgcggtggagacccccgccggcggcggccgccgcggccgaggaggctcccaaggaggagacccccgcgccggcggaggagactgcccccgccgtggccgagaccgagaacaaggaggccgagccggaagcggaggcgcccaaggaggccgagccagccgctgctgccgagccggagccggtcgccgaggcgcccaaggaggcggagccggcggccgccgaggaggtgaaggaggaggcggcgcccgccaccgagccggagccagaggccgccgctcctgctgccgaggaggcaccggccactgaggcggcacccgctgaggcggagcccgcggcggccgagccggccgccgaggaggacgcgaaggccgccgacagtgagtgatgaggccgtgcgcgacggcgcccacggtggatcacggctcggcgtggcatacggcagccgcgtgcgcgcgtacacggcacgggctcgccgttcagtacgctacggtttttaccggtgtgtgcgcgcgtgtgtggcgtagtcgtagctagcagtagtaagctgctgccgtgtgggctagctgtcgtgtgctgctgcggggctgcgaggagtggagtggagtggagtgacgtgggctaaaataaaagtgtgtcgcgggtggtggggcccggtgtcagcggcccggcgcccccatgccctgccgctgcagcttgtgtctttgtgtgctgttggttcgtattacctgtcatgtatggggtgtcgtgtcaagttaattatcaaccacgtttgcgctatcgttgttggttttaatttaaagctgcattgtgtgatatgagtatgaatgatcttagaatnnnnnnnnnnnnnnnnnnnnnnnnnnnn

SEQ ID NO: 25332 - DNA, 249 bp, Setaria italica
  misc_feature (236)..(236): n is a, c, g, or t
  Peptide Sequence Number=SeqID_91306
ctcaagaggacagaggggtggtgtccctaacgggagccacaggccgccatggacatggagcttgagcatggaggggatgaggaggagacacggagcgaatcgtccaagaggagcttgggtgcttcgtcggatgctaccgttagcagcacagcaagcaagctgcaagctctgagatttgcagaggacctctccctgccatcggtgcaggttgtggtgatgagcgccaacatggggtnctcgcactgccga

SEQ ID NO: 25333 - DNA, 254 bp, Setaria italica
  Peptide Sequence Number=SeqID_91307
cagttggtgctcaaatcagctgccttagggaagcccatggggaaaaccccacgcgcagtagtacatgtcggtgcccggcacaataggcggcacggtcgggatctcggcggccacgaacgcgcgccggcaaccagcgctctggcacctgagcgcgcgccccaccagcgcgcgctggtactggtagacgtggcagcagtaggggcacgccgtccagaacgcatcggcatcggccgctgccgcggccgaggctcccg

SEQ ID NO: 25334 - DNA, 297 bp, Setaria italica
  Peptide Sequence Number=SeqID_91308
tgatcgccagctcttctagtttctcccgcaccaatgttctaccctctttcagaatcaacagtgttctgttcaatggagagagacctccttgggaagtttatcaccttcgattgctcattcctggcattgctgaatgctgaagcacgagttgaagtaccttctccaatttcttcttctcctagggaaatgtatgcatctgaattcctctgatcttcctccaggaaaaccctcagctcctgcttgagagggctactcctcaattttcttgctgaaaggtactttacactctcaccgtgc

SEQ ID NO: 25335 - DNA, 358 bp, Setaria italica
  Peptide Sequence Number=SeqID_91309
actgccgcggaagtggcggcggccgcgcttcttctggctcgccgcgcgcccgccgtgggctggggagaatgcggatttggccgagaacacgaagtggtgatcctccacctcctcgtcaaattcgtcgtcgaagtcctcgaaggctgcctcgaagtcgtcgatgtcggcgtggtggtgccccttgtcactgccgttgccggctttcttagagttggaacccgccgaccagaggtggcccgcggtcaccggcttcgacgccgcgcgccgtggcgacgggatcagctccgtgaggatggcgcctccgcacattgttcacccctccgtaaacttttttctctgggttgttcgtgttgtttgg

SEQ ID NO: 25336 - DNA, 284 bp, Setaria italica
  Peptide Sequence Number=SeqID_91310
gtgcgaagatttcctatctcatgcaagcaatcttgattcaccgcattaccactaccttgtgtatcttccccatccttattttgaaaggagaaacttgtctttccatcttgaacagcgggtgaaggagtcctggtgcatttgttttctaccattgctttcagtgacattcttgctttcaatgaagattttacattcttatcacttgaagacgattcaggaagcttgattccattaatgagaccaccatgcttgagagaggttctttccttagtattctttctttt

SEQ ID NO: 25337 - DNA, 234 bp, Setaria italica
  Peptide Sequence Number=SeqID_91311
ggggcaccaagaaagcgagccgagagcgcatcacgcagggcttcccttttctcgctcaaaagaatagatcactctatctctctcttgtagctagccacacttggaattggatctctccactcacaaatcacaattcactctcgctcatagccaggcatcctagctatagctggctactggctagcctcctcctcctcgtcccttcccggctctcgcttctcaccgcactgccaa

SEQ ID NO: 25338 - DNA, 1542 bp, Setaria italica
  misc_feature (1)..(37): n is a, c, g, or t
  Peptide Sequence Number=SeqID_91312
nnnnnnnnnnnnnnnnnnnnnnnnnnnnnnnnnnnnnttttttaacagaaggatggggtcctagaaggtggtcaggcaatgacccacgcttacggctttatttataggatcataataataagttcataaacacaaggcataacagcacacattacgtcacgttacaacaggggcggaggcctctatcgtccgccagccctctccaggaatcaatgttccagcacgctaacgagttactacaccggtagtacaaagcttacggcggccgcgggcgaccgaggcggcataggccggcctactgccccccgcagcggcgccgccgccatcaaaagggaaggataactacatactgggcagcctagtgctgcgccagcggtgtcaggttaagtacgattacaattctcaaagcaaatgggagataatgtcctaaacacacggtgacgcatcccatcccaaccgagaccgagcaacctttatgtgcacctcacagcggaggcgcccggttggatctgacccttgttgtcgcagttcgctgccgatggttcttggggggcggcgttcgcctgccccagattctcagcctcctttgctgcctctgctggaggagcatctgccttcgtttcggccacaggcagcgcagcaggttcggtcacgccaccatcctctttcttctctccctctgaagatgctgccaggagcaccacgggttcagctgctgggggcactgcgggttcagctaccaggctgttctcagttttctcctctttcttctcttcctctactacaggtgctagtggagctacttcagattcagctggtttcacatctgatttattttctgattctggggcagcgacattattagtctgctcttggccttcggcgccttgttcagtcttctctgcagcatctgcaccaggggcctcatctttcttctcttcacctccttcggtcttctctgcaacatctgcactgggggcatcctctttcttctcttcttcagcatccttcatctccacatcagtgccttccaaagtgccacggtctacagtttcattggcatcgactgcatctgcatcttcttttttctcctttctgcccctcttagagcttgatcttccacgtttaggggtcttctcaccttctgggctctctgttgccttgaacttctcacttaagcgtgctgaccgtctgggagtatcactggttccccaatcaaactcggaagatgcagggcctccaggatgagctttcaggtactgggtcagctgtctcttgctcttgatctcctcgccagttggggacacaaaaataacctcaaactttccccctctaattggggcaagcttcttcgtccagccggagggcgcggggagctcggtcacgctggcctccttcttctccggcgtctgctcaaccgccgccgccacgtgctcctcgccggtcgccatgccgcccgccgggtttcgagttttcccttcccgctctcgctgtcggaattcgcaaaggcgctcgcgctcgtgctgctgctgctgctgaaat

SEQ ID NO: 25339 - DNA, 238 bp, Setaria italica
  Peptide Sequence Number=SeqID_91313
cagataagccatcaatgagagcaaaagagttctgataatggttggagggacctgaccaaaagtaaatggcggttggcgaaaggtgatgagcagttggattttacgtattcatcatctgagattccacatcatgtttctgatgagtgtctgtcagagctagctgtctgcagttacaaagcaaggagattacctaagaccatcttgaggtctgctgtgcgttccgtctacgagcccaatg

SEQ ID NO: 25340 - DNA, 295 bp, Setaria italica
  Peptide Sequence Number=SeqID_91314
cagctgcccgcgcgcgcgccatggcaagagccttccacgcagcgtccccggcgccggccgccgtgccggcgtcgccgctcccgtcctccaagaacaccaccaccggcctcgccaacctgcagtggctgctcaggaagcgccccaacaaggtgcagcacggccggcccgtcgagaatcatcaagaggccgacgacgatgacgagtgcgcctccatgttcgccggcgccacgccctacatcgcgcccggcgcgggcccggacgacgcgacgccgccgtgcaaggcgacgaggcgcgg

SEQ ID NO: 25341 - DNA, 522 bp, Setaria italica
  Peptide Sequence Number=SeqID_91315
cggcaaccacatcgccggcgccataccggccgagataggcaagcttgggaatctcagcttccttgatctcggttcgaaccggctgtccagcgctctgccggcggagatatccgggtgccggaatctcaccttcgtcgacctccacgacaatgctatcgccggcgagctgccgccggggctgttccaggacttgctctcgctccaatacctcgacctctcctacaacgtcatcggcggcactctcccttcggacatcggcatgctcacctcgctcacgaagctcattctcagcggcaaccggctgtctgggccggtaccaccggagattggttcgtgcacccggctccagctcctcgacgtcggcggcaattcactttccggcaagattcctggtagcatcggcaagatcccggggttggagatcgctctgaacctcagctgcaacagcttcaccggcacaatcccgtcagagttcgccgggcttgtgaggctcggggtgctcgacgtgtcacacaaccagcc

SEQ ID NO: 25342 - DNA, 587 bp, Setaria italica
  Peptide Sequence Number=SeqID_91316
gacggctgtgcatggtgttcttcaacatagaaggaaacacatgagacaatacttcatgttgaatgagattatatgtagtattgatgtggctaacaccaagaagtaacacttcaggacaatgaatcaggggataatcaagcattgttcgcactggctttgcatagccaagttcagcaagctgacataacacctcaagaaggtctaggcagtaccaagcctgattgccttggttaagatttcccaagtctggaaaagccatcttcctggtacaatgtgcgaaagtaaatgtatcatttggcaaagccactgcatgtttcaagaatgacagttgtccttctgtatttttccacaatgtcccacagattgcatgaagtgggaatgggtccttgcaagctcgagaatatatagacatcaataaacgaaaagatgcttcatcagggatattgaaaccctcatgatcgagattttccataacatgcgcccagttagttccgggtgcaatttcattgatcgaatccacaaggacatctatattccaggcagtcagctgagatgaatcaattgtttggctgttcccaaaagccgaa

SEQ ID NO: 25343 - DNA, 1017 bp, Setaria italica
  misc_feature (1)..(2): n is a, c, g, or t
  Peptide Sequence Number=SeqID_91317
nngttttttttttttttttttttgtctttttttaggggctcaatcagtgaggctttattcgcctgggccaagcccagtcatattatgctacaatggcgtttttctgttttcccccggcccgtaagttccgtcaccatttccagtgtgagatcgatgtttcaatgacaccattggaggccaattgataggaacgtaacaggcgattaggtggtgatcgttaatcctaagctaatccaccgtcttcttgtaggtgtaccaccgcgcgatgagcaggtagacgccgaagttgccgatgcagagcatggcgaggagccagaagaagttgtcgaggtgcgcccggttgatgtcgtcggggatccagccgtccctccctcccctcgccgtggcgcgcgccaccacggtgacgagcgccgagctcacgtagttccccagcgcgaacgacgtcatggagaggcccgagcagaggctccgcatcgcgtcgggcgcctggtcgtagaagaactccatctggccgatgaaggtgaacacctccgacgcgcccaccaccacgtactgcggcacctgccagaagatggacatgggcaggtacgccccgtcggcgcccgtgttggtgtcgtacatgccgtggcgcgcgatgacgcggcggcgctcgacctcgagcgtcccggcggcgagcatggcggcggtgagcacgacgaggccgacgcccatgcgcgccagctgcgtgaacccgcggtcgtggcccgtggcgcggcgggcgagcgggacgacgacgcggtcgtagaggggaacccagagcatgacgctgagggtgtcgaagacggagagcacggcggcggggacgcggaagccgccgacgtaggggtccagcgtgtcaccctggaggatgaaggtggtggtcatctgcgtgtacgccgccgcgaagatgatgccgctcgcccacacggggaggaggcggagcacgcacttgagctcctccacctgcgtcaccgtgcatagccgccacgggctcggacg

SEQ ID NO: 25344 - DNA, 246 bp, Setaria italica
  Peptide Sequence Number=SeqID_91318
cagggccatttcagattctggagtgcattggcgaggttgcctatcggctgcaccttcctgctggtgcccagattcatgatgtgttccatgtggggcctcctcaagtgattccatggtgatccaccggtacaaactcctccacttcctgcgttggagaatggccgtttccttcccccttgaccgaaggtactataggctagggttcggcacggcatttaggatattcgtgttcagtgggctggcagg

SEQ ID NO: 25345 - DNA, 268 bp, Setaria italica
  Peptide Sequence Number=SeqID_91319
ccggccacctcccacaacgcgctcccccgcgtgctcgccttctaccactactggcggaagatctacgggccgacgttcctgatctggttcgggccgacgccgcggctgacggtggcggacccggagctggtccgcgagatcctcctgacgaacgccgacgcgttcgaccgctacgaggcgcaccccgtcgtccggcagctcgagggcgacggcctcgtcagcctccacgacggcaagtgggcgctccaccgccgcgtcctcaccccgg

SEQ ID NO: 25346 - DNA, 908 bp, Setaria italica
  Peptide Sequence Number=SeqID_91320
gacagtcaaggaagcctccggcagaacattattttctcagagcagctttttaatggaggacttggaatggaagatggatctattcatctattttattcggtaagagccgatgcaggctctgcgttaggattgtccctgaacttgtcttcaaacaagcagagtacttcaattcttgttgcagaggacatagcatcattcatcacaaagaaacaaaatcacaagtatggctcgtatgttaaagctgatgaggtggagccacatgctccagataaccaaggttgggtcctctacgaagcaactcttcagtccagttccggctacaaattaactggaatcaacgttgtttgcacattgaaaatagctggcgaaatgagtccagaaacagaggaggatatgatctcggaagcaaatgcaaatggatcatcaccgtatcacgtgtcacttggtcacataagtattcaaaagactgatgcaaacacagagttccctccagcaggatcatgggtaactgaaggcgagcacatctcatggtccaacagttctgacacaacaaaacgtgtgagtctgaaactcagctggaagttgaatacccttgatcaaccatcattcaggcagtacaacatctacgttgagaagtcaacggcagatccaaacatcaaggcttccagaagctatcttggagttgctagtgttgacgccttctatgtctcgggcctagaggttcccagcgaagtcactgatcttaaattcattattcaagcgtgtgcacacgatggaagctggcaagaacttgagaaatgcccaaagttccttttagttccagttcattccgagctgtaacattcttttaatttggtgcggtgttctgtttttctttcagtacaaactgctgtggtcctatttcttca

SEQ ID NO: 25347 - DNA, 371 bp, Setaria italica
  Peptide Sequence Number=SeqID_91321
gagtggtttttcgtagcctgtttgcatctagtgcttatggactaggccgctatttcaccttcgctgaaattcagaaagccacaaaaaactttgaagaaaaggatgtccttggtgttggtggttttggaaaagtttatcttggtgttcttgaggatggcacaaagctggctatcaagcgaggcaatccatcttctgatcaaggtatgaatgagttcctgactgaaattcaaatgttgtcaaagctacgtcaccgacacctggtttcactcattggttgctgtgatgagaataatgagatgatcctggtttatgagttcatgtcaaatggtccattgagggatcatctctatggtggtacgaacctgaagcct

SEQ ID NO: 25348 - DNA, 253 bp, Setaria italica
  Peptide Sequence Number=SeqID_91322
cgtctccctcccacctcactcccctcccctcccctccattgttgttgcttcgggtgcaagcgcgcaggcctcaggcgaggccagctttacgcaccgtatggccttggaggtgtcgtaaaggtcctgaaaacgccgagcaagaagccttcttccctgcccagcgtcatcgttgcttgtactgcctccttgcttccatttccatggagcatttctcgatgcaacgtgctaccacatggccacgtcgcttcgtcct

SEQ ID NO: 25349 - DNA, 642 bp, Setaria italica
  Peptide Sequence Number=SeqID_91323
agaggaacacgatggacgccggcgcctgcgcgtcgagccaccgcacgcactcgtgcggagactgatcaccatcagcgcgcggtttattcagcgagagcaccgggccgatcgggtacaccggcggagcacggtcaccaggcgtgcaccggccggcggcgatggccgcaaggacgcctggctcgagctcggccgccgtgttaacgacgatacctctggcttccatgaagcggcgcccgtagtacacgaaccacgcgtagtcattcagctccggcgacggcatcgaggccaccggcaccgggggcatccccggcacgtcgataaccccttgcttctcatcccggaacgtggcgaccaccttctcgtggattgccggcaagcgcagcatgagcgcgagcgcggcgccgttggacgggaagtagacgtaggctggcacggcgaggtcgtgggcgacgtcgaggagcggggtcccgaagaagtcgacgacgaccgccgcaaccggggccgccaagcccgcgatggccgccttgacgtggggcgcgtagagctggatgtactcggaagggtggcgggggagtcggcgcggtgctcgacggcggggaggtggtggaaatcgataccaccgccggagaccatctcacagtg

SEQ ID NO: 25350 - DNA, 604 bp, Setaria italica
  Peptide Sequence Number=SeqID_91324
gccgacgtggcgcgcctactgcaacgggcgcaagtgcgggttcgcggtgcgccgggagtgcggcgcggacgagtggcgggtgctgggcgcggtggagcccgtctccgtgggcgccggcgtgctcccggacgacgtctccggcgccgccgccggcgccgctgagggcgacctgatgtacatgcgcgccaggttcgagcgggtggtgggttccagggactcggaggcgttctacatgatgaaccccgacggcagcggcggccccgagctcagcatctacctgctacgggtctgatcgccgtcgacgtccggtcgctgcctgagaagacaacgcttcagcttgcatttccactctgtatgtaatcatgcatgcatgcataatctggttgggctttgtgtagttgtgtcccatgtaatctggaggtcttggaaaatggtgtatgtacaatgctacaactgatcacttacatggttaattactttgagtgattagtttttggtgtgaggtggtgtggttacttctagatagctaggttggagatcatttttctctttggttattatgtgatcaaacggcttggaaaacttgggaaataaaaaaaaaaaa

SEQ ID NO: 25351 - DNA, 417 bp, Setaria italica
  Peptide Sequence Number=SeqID_91325
ccattaccagtaacttcaaacgtgtcttcctgctgaagtttggttacgttcacagattctacctcgtgttcaatatcacgtaggatgttcctgataccatccagcaccttcacaacattattctgtggtgattgagagctcaacaaagcggaaattctcaattgcagtttggaaagtgaagggctggcgatcagatgatcactactaaacggagaacctggtaactgcaaagctggcgatgaatttttttcactctcttttttcagttgacagggggagagagtcgccccaattttaccaaccttttctttgacaatgccctcacattcctgagcttcagaagacagacatgccaatctctccatctccaggaagtcatccatgaggcccatctgattggagttttcagtcaaattg

SEQ ID NO: 25352 - DNA, 320 bp, Setaria italica
  Peptide Sequence Number=SeqID_91326
ccggcatctgctccgcttcctctcggcaagccggccaccgtgtcgtagtctcgtggagcgacagagcaaggcggcggcggcggcggcggcgaggatgctggagagccaggcggtgatcggggacacggacatgctgcaggcgatgcagcaggacgcgctgcggctggccgggaaggcgctggacgacttcgaggccgtcgactccaccgagatcgcccggttcatcaagaaggagttcgaccggtcgtacgggcccggatggcagtgcatcgtgggcaccgacttcgggtcctcgtgacgcaccactccggctgcttcat

SEQ ID NO: 25353 - DNA, 308 bp, Setaria italica
  Peptide Sequence Number=SeqID_91327
ttttcctttgctgaattgccctccatatagccggtgcaggctacgagcgcccgttgctgaacagcttgaacttgtcggcgttgagcacgagcttcctcaccgaggctaccgcgccgatgaccccgaggccgacgaaggcgaccatgatggccacgttcgcgacgtacgccggagaccgccggcgcggcgcgagcgccatgttgtacatgacgacggggatgacgacgtcgagcgggatgtaccccaccgagccccacgacgccctggatctcgccgaagacggcagcatcgccgccacgaacgccagc

SEQ ID NO: 25354 - DNA, 431 bp, Setaria italica
  Peptide Sequence Number=SeqID_91328
tcccggcctcgcactcactttgacaccgctcgctctcgcttgctcgcgcgccttcgtcgtcgtcctctcccctctctcacctgtcagctctcgggagtcatcacaccggtcagctctcggacaccctagcagcagctgcgtgcgcgaccgcgaggagggcctacgaggcgacggctccaactccatcgtgctgctagctcatcatcatcatcatgctagagaaccaaaagcaagcggaggttctctggcccaggctggtggccaacaagctcttccggaagccctccggcagccacgccttcgtcgccgacttccccgccgccgacttccccgtcgccgatgacgacggcgctgagttcagcgacggcgggtgcagccccgacgcggacgccagccgctgcgtcaagcgcccgcggccgcaggagcggagc

SEQ ID NO: 25355 - DNA, 251 bp, Setaria italica
  Peptide Sequence Number=SeqID_91329
ccggatgaacagccggcccatgttgtcctccactgctggcaggtagtcatccggtgggtatgagattgagagccccattttccctgatgacaagatgtggtgccacacaagcctttcgccggctttctttttctgcgattagatttggttgttggatctcacaatctgtggtccgtaccaatcaaccttgcaaatccttgtgccaagttccaacgaccttacagaggctccttgattatgggacaggcttg

SEQ ID NO: 25356 - DNA, 376 bp, Setaria italica
  Peptide Sequence Number=SeqID_91330
tgaggacaagctgtcagtaaacatcacagattcattgaaaataacacttcggctcagaaaggtctttcctgtttccgggttccacaatttatagcctttgacacccgaaccataaccaaggaagagacatttaacagctctaggctccaattttccattatcaacatgagcatatgcagtgcatccaaaaactttcaactgtgagtaatcagcaggcgttccagaccatacctcaatgggagttcttttatttagtggaatagaaggcgacctgttgatcaagtaacaggcagtattagcagcttcagcccaaaatcgcttgctcatcctggcattagacagcatgcaacggccttggatatgatggatctgttca

SEQ ID NO: 25357 - DNA, 1085 bp, Setaria italica
  misc_feature (376)..(376): n is a, c, g, or t
  Peptide Sequence Number=SeqID_91331
gagaatggaccatgctcttcgtcatgaaatacgtgggtcgcttgctatgccaatttatgaccccagcaagggatcttgttgtgcggttcttgaacttgtcacaaacaaggagaagcctgattttgatgcagagatggacagtgtttgcaatgcattgcaggctgtgaacttgcagacagcaacagatcgcagcagtcagaaggtttactctgaaaatcagaaatctgctttcattgagattttggatgttctaagagctatttgtcatgcacacatgcttccattggcccttacatgggttcctacatcaaacggtattgataatggttattgtgtcagaaataatattggagttgattcacaatcaggaaaaacngtacttcgtatccatgaatcagcttgttatattaacgatgcaaagatgcaggggtttcttcatgcatgtgctgaacgtcatcttgagaaagggcagggtattgctggtcgagcacttaaatccaatctgccattcttctctcctgatgtaagagagtacaatatcgaagactacccgcttgcacaccatgctcgtaagtttggcctgcatgctgctgtagccatccggctgaggagcacgtatactggtaacgatgactacattctagaattttttctcccagtcaactgcaagggctgtggagagcagcagatgttattaaacaacctttccagcacaatgcaaagaatatgcaaaagcttgcgaacagtttctgaagctgaggctgatagtgttagtgcttctgctgcatcaatgaataagaagagtaatggaagtttgccaactggtaactctgaaagttcctcacatgatgaccagccaattacagaatctgcattccaggatctatctttggctgacaagcaagaacaagatatagaatctgaccaggcacaggctagctcgatgcgagttgcagagaaaaaacgcagtacatccgagaagaattttagtttggatgttcttcgcaaatacttttctgggagcctgagggaagcttcaatgaagacctacggtagttttagtaccttaacgtaactttagaaaa

SEQ ID NO: 25358 - DNA, 341 bp, Setaria italica
  Peptide Sequence Number=SeqID_91332
gccgccgtgaccgtcacggccaccaacttctgcccgcccaactgggcgcagcccagcaaccgcggcggctggtgcaacccgccgcggccccacttcgacatggcgcagcccgcctgggagcgcatcggcgtctacaaggccggcatcatccccgtcctctaccagcaggtgacgtgctggaggcagggagggatccggatcaccatcggaggatccaccttcttccagctgatgaacttcgcgaacgtgggcgggagcgggtcgatccggtcggtgtcggtgaaggggaccaagacggggtggatcgcgctgaaccgcaactggggcgccaactggcagtg

SEQ ID NO: 25359 - DNA, 327 bp, Setaria italica
  Peptide Sequence Number=SeqID_91333
ccggaacgcgcgcggcgacggcatccgggacccccggggcgggggcttccagatggggcggttgtacatggtctccggctgggctggagcggaccgggagaggttgcccgcggcggcgggggtggtggcgccggtggggagggggagcgggggcgcggagagggaggagaaggaggagagaaggaagaagagggcggagacggcgaatccgccgagcacggcgccgtagatcccgacgaagaccggcttggtggactcgccggagcaccacgccgccatttccccggcggggatcggggtcgccggaggcggaggcgggtcagcggg

SEQ ID NO: 25360 - DNA, 574 bp, Setaria italica
  Peptide Sequence Number=SeqID_91334
atctctcgccttctccaccagcggcgcaggccaccgggagctaccagaagctcacgcacagagcgagcggccatcgagtgagaaaggaagcggagaagcttgccatggagtacgggtacccctgcaacggctgcggcggcaacaaggagaagaggccgccgctcaagagggggcagctcaagctgcagatcgccaagaccctgctgggcggcctcgcggcaccggccggcgccggcgccgcagccgccaacagggagcgcagcttcgggagatgatcaagctgctgctagctgatcgaacactttagttgtacggtgtgtagtgcttgacatagggattgtgcgaagtgattagctttagttttcttctttaatctggcagttgttggtgcctagttttgctcctttggttctccccccttggtcactttcaggttttaagctgctggagtgcagcttagagctctgttgttgggtgaagcaatgtggagagagatgtccattactgtctttgttgttttatgcaagaactacgaagcaatatatggtagcagatttgatggtaaaaaaaaaaa

SEQ ID NO: 25361 - DNA, 385 bp, Setaria italica
  Peptide Sequence Number=SeqID_91335
tgaatcatcttaccaagttcccgaccgatctgacccgagccctcgagctaaaccagttatggaggagccgggcccaagccgaccggccacctccaccgccgtcggcggcgacttcccggagctcctcggtttctgcgcccgcgcggaggccctcatcgccgagttgctcctgctcgccgaccgcgcccctccccagttcgccgaccgccgcttcgactccgtcctcttcgacttccggtacctcgattccccaggcgatttcgagtcgagggtcgagggcatcatcgagctggaggcgctggaagatcagctccgtgagtcctgcgccccgtacatgcagaggttcttctccttgctggatggtgccgtcacttaccacgtacgt

SEQ ID NO: 25362 - DNA, 323 bp, Setaria italica
  Peptide Sequence Number=SeqID_91336
ttctttcttagtttgtttctcagtgtgagtagtaaatcaatcagaccagaagtggaaaatgctgatgcataaagtgcttgaactgccattgtggaactgcttgtccgtagtgttatgattgataacatcgacaaggtccttgaaagaggtgatcgtttggagctgctggttgacaagaccgcaaatatgcaaggaaataccgtacggttcaaaagacaagctcggcgcttcagaaacactgtttggtggagaaacgtcaaactcacggctgcgttgatacttctccttctggtaatcatatatgtcgttcttgtcttcgtgtg

SEQ ID NO: 25363 - DNA, 1150 bp, Setaria italica
  misc_feature (1110)..(1150): n is a, c, g, or t
  Peptide Sequence Number=SeqID_91337
cccccccgcgtgctctccccttttcctcctcctccccctcctctcccccccggagagtccacacggcagaggaggccacctgacccgggggagggagggagcgccggagatggcgatcctgtacgcgctcgtggcgcgcggcacggtggtgctggcggagcacagcgccgcggccaccaacgcgggcgccgtcgcgcgccaggtcctcgagcgcctccccgacggcggcgccgacagccacgtctcctacacgcaggaccgctacgtcttccacgccaagcgcaccgacggcatcaccgcgctatgcatggccgacgacgccgccgggagacggattccctttgcatttttggaagatattcacggaagatttgtaaaggcatatggccgtgctgcactgacagctcttgcttatgcaatgaatgatgaattctcaagggtccttagccaacaaatggactactattcaaatgaccctaatgccgatagaataaatcgcatgcgaggtgaaatcaatcaggtccgtagtgttatgattgataacatcgacaaggtccttgaaagaggtgatcgtttggagctgctggttgacaagaccgcaaatatgcaaggaaataccgtacggttcaaaagacaagctcggcgcttcagaaacactgtttggtggagaaacgtcaaactcacggctgcgttgatacttctccttctggtaatcatatatgtcgttcttgtcttcgtgtgccatggtttcaccttaccaacttgtatacggtagggtgcggtctgcacattctgtcctgcggcgtgcctgtttgtgtgattatttccccattcctggggagcagctatcgcagtgcctttgcaactggttttggcgtagaggaaagctacggattatggtgtaattgtgatgtcgttgattgtgaaaaactcaattaaagatgtaaacttcgcataagactgcatctcgcggggtcgtgctagttctgcgtgcttgggtcctgtttatttgaggctattcttgtgtctgtacatgaattcagttacggctatattatggcaatgctattatacgactatataaaaagaaaaaaaaaaaacaaaaaaaannnnnnnnnnnnnnnnnnnnnnnnnnnnnnnnnnnnnnnnn

SEQ ID NO: 25364 - DNA, 259 bp, Setaria italica
  Peptide Sequence Number=SeqID_91338
gcctcagcacccagcgccacccctctgccaacgatctcccgcgccacggcggccgatgcgcgcgccgcaatgacgccaccgcccaagaccctcccgctcctcctcctcttcctcctcatcgcgccgcacctcctcgcctccgcctcggcggcgttcgtcagccgcggcctcagcgcgtccgacgccgctcgcatccggcgccgccagctcctccagtacagctccggcggcgaccatggccacgacgacgtggccgccg

SEQ ID NO: 25365 - DNA, 280 bp, Setaria italica
  Peptide Sequence Number=SeqID_91339
ctgaccaggatgacggacgagcaccttgtgttgccgtacctgcctcatcacggccctcgatgccgccagtttctcctccctcaacccaagcttgctcgcaatcctgtcaagaataccccgaccacccgggtggactacccagaagacctcatcgttcaagtcgagcgtcggcaccatggtctcctgcagcataagcttcaccaatcgctccatggaactggacacgtgcaggggtatgtcccggtgcaggttgtacagtatcccttcctctcgcagcttg

SEQ ID NO: 25366 - DNA, 519 bp, Setaria italica
  Peptide Sequence Number=SeqID_91340
gtatggcaactctttatggttttcttatgcaatcagatccaacgtactcgaaccccaaagtattaccccaaagtatttcagaagatcaggtttcaaaaaaggcacaggtcgccgtatgtttgcagggaaggcaaccagctgagtcgtctcatatttccacacaaccagcagctcggaggtttctttttggggacaaaactttaggccggttagcatattcatgtgtgttttcctctgtgatggacttcagtttagccctctgatgatttcacgttgatgggtttatcaatcttttcgtccttggtgaaaacacatttctgcatttacattggtcatctacaattttgtcattgcatctgtcgtaaggaatgcagcccctacctttgtcatcaactcccaaatgccaagatgtcctcctcttaaggacccaatggcggcgtatcaggagtctccgaaacaatctcagaaatgaacttaatcagcgagcagagcccgcccaggaagttgttgattctaatt

SEQ ID NO: 25367 - DNA, 517 bp, Setaria italica
  Peptide Sequence Number=SeqID_91341
ctcccttccactttatatccatgaacctacatctcctattatcatccatataaagcagcaaatctaataaacaaaaaggaacaacgaacagatataggatgagctttacctttgtcatcaactcccaaatgccaagatgtcctcctcttaaggacccaatggcggcgtatcaggagtctccgaaacaatctcagaaatgaacttaatcagcgagcagagcccgcccaggaagttgtgatcaatcaccccatcaccctcggcgacatgagcaaagtccaccagcttcaccctcaccccacccccaactccggttgctgacaccgcattggcatcatagcccagaagaatcgacgctgagtagaagtggaacagagtctgctcctcgaaccacgccttgagctcgcgcagctgcgacaggacgcccccttccccgccgtacaccgccgcggcgagcgcgcagtccaccacctcgccggaatcggacgacacgtaacgccgcagcatgcggcggacgccg

SEQ ID NO: 25368 - DNA, 885 bp, Setaria italica
  Peptide Sequence Number=SeqID_91342
taaaattgcaaaattgtaattcagaagaaaacatgctatgcacgtctttgaaaaaaagcagcaggtcggagagatctaagaaacagaacgccaatcgctactcaaagctggcacggccccgtcacatgcatgcaatcttcgcctcagaaaaactggtttggatatgctcggacaggcacggcaagcagcacaagactggcagcgttttgctggatcagcacgcctgcatagcatgcgtctcaacgtccacctaccaggaggagagtggcaactctttatggttttctttatgcaatcagatccaacgtactcgaaccccaaagtattaccccaaagtatttcagaagatcaggtttcaaaaaaggcacaggtcgccgtatgtttgcagggaaggcaaccagctgagtcgtctcatatttccacacaaccagcagctcggaggtttctttttggggacaaaactttaggcctttgtcatcaactcccaaaatgccaagatgtcctcctcttaaggacccaatggcggcgtatcaggagtctccgaaacaatctcagaaatgaacttaatcagcgagcagagcccgcccaggaagttgtgatcaatcaccccatcaccctcggcgacatgagcaaagtccaccagcttcaccctcaccccacccccaactccggttgctgacaccgcattggcatcatagcccagaagaatcgacgctgagtagaagtggaacagagtctgctcctcgaaccacgccttgagctcgcgcagctgcgacaggacgcccccttccccgccgtacaccgccgcggcgagcgcgcagttccacctaccttcttccggtaattcggtacgtactacgttaacgtccgtctagtcatgcggcg

SEQ ID NO: 25369 - DNA, 331 bp, Setaria italica
  Peptide Sequence Number=SeqID_91343
ttacaatattgcgtggagggtcggcatcaaggcgagcacattctcctcctccccttctgatcagcgatcaccaatcagccagaaggacctttggtttcttttgcgcgccatggttaaacaagtccacccgtcgctgtcgagcttgcatcactagctttactttgctgcacttccattgttgcctaaagaagcacatcctatgctgaaaatctaggcacacatacggcatgccaaaagttttaccagcgatatgatagagttaaaacacaatgcaaggcagtaaggggctagactttcctatcctctcgcttgtttttacccgtgatatcca

SEQ ID NO: 25370 - DNA, 211 bp, Setaria italica
  Peptide Sequence Number=SeqID_91344
actttggagaagaatcttacagaacagaattatctgttagcaaaatagatggtacttgactttctatgcattggaggctgctttgcagtttaacaatgagctgccaaaccctcaacagatagattacaaatcttatccatctaagccatcttatgcacaactacaagcagcagagaacttttgtgatcttggaaggtcgatttaccatgca

SEQ ID NO: 25371 - DNA, 242 bp, Setaria italica
  Peptide Sequence Number=SeqID_91345
ggagccgaggtcgattacctccagcaatgggcaacccgctgccagcaccggcagcgggttcggcccagtgatgttgttgaacgaaagccggagcacacggagcgaggagatggtgctgacgacagtgtccacaaagtcaccggagagttggttgccaccgaggtcaagcacctccagtgacctgcacttggcgaagctcgccggcaagccaccgacaagccggttgttcgacaagtccagct

SEQ ID NO: 25372 - DNA, 348 bp, Setaria italica
  Peptide Sequence Number=SeqID_91346
cgaagaagacagctagctagcgtggccaccttgaactaagctgcagccgccgccgtcgccgccatgatcaccgggcgcgacatctacgacgtcctggcggcgatcgtgccgctgtacgtggccatgttcctggcctacggctccgtgcggtggtggggcatcttcaccccggaccaatgctccggcatcaaccgcttcgtcgccgtcttcgccgtcccgctgctctccttccacttcatctcctccaacgacccctacgcgatgcagtaccgcttcctggccgccgactcgctccagaagctcgtcatcctcgccgcgctcgccgtctggcacaacgtcctctcccgc

SEQ ID NO: 25373 - DNA, 1648 bp, Setaria italica
  misc_feature (1568)..(1648): n is a, c, g, or t
  Peptide Sequence Number=SeqID_91347
ctaatcccttcttcccgcgagcttctccccggcatcgcccctccggagatccaccccgacccacccgccaccgccgcctcgccaatggccggcgccgcgcccaccgtcaccaagtccccgccgtccctggtcccaccggcggggccgaccccgggcggctccctcccgctctcctctatcgacaagaccgccgccgtccgcgtctccgtcgacttcatccaggtcttcccgtcgtcgggggccgcggaccaggccgcctctgtcgcgaccatgcgcgagggcttcgccagggcgctcgtgccgtactaccccgtcgcgggccgcatcgcggagcccgtccagggggagcccgagatcgagtgcaccggggaaggcgtgtggttcgtggaggccgaggccagctgctccctcgaggaggcgcggaacctcgagcgcccgctctgcatccccaaggaggagctgctcccgcgcccgcccgccggggtgcgcgtcgaggacaccgtgctgctcgcgcaggttacaaagttcacatgcggtggattttctgtgggcatttgcttcagccacttggtgtttgacgggcaaggtgctgcccaatttctgaaagcggttggtgagatggctaggggcatccctgagccatcgatcaagccaatctgggctcgggacgccatccccaacccaccgaagccacccctaggcccgccaccatcattcactgcgttcaactttgagaagtcagttgttgagatctctctggacagcatcaagcgtgtcaaggaccaggtcgcaagcgaaaccagccagaagtgctccaccttcgacgtggtcaccgccataatcttcaaatgccgcgccttggcagtcgactttgcaccggatgccgaggttcgcctgggctttgctgccagcacgcgccacctgctgagcaatgtgctgccttcggtcgaaggctactatgggaactgcgtgtaccctgggggtctcaccaagaccagccaggaggtgaaggaagcttcacttgtggagatcgtgaccgcaatcagggaagccaaggaagctctgtcatcgaggttcctcgactggttgagcggtggtgccaaggaaaaccactacaacgtgtcgctggactatggcacgcttgttgtcaccgactggagccacgttgggttcaacgaggtggactacgggtttggtgagccgagctatgtgttcaccctgaacgatgatgtgaacattgtgccctccgtggtctacctgaagccacccaagccaacgcagggcatcaggctggtcctgcagtgcgtggaggggcagcactccgccgtgttcaaaaaggagctgcagaagcatgcatagagtgagcgtgttcaattccatttccatagttgggaattgttgtattttattgtgacaaattgctgcttccagactttgctcgcaataagacagggttgatcgtgtttatactttgtactattatcggcaagttatattatacatgtattgacattgatgaaataataatagtgttccatttgaaaacaaaaaaaaaaaaaaggacacannnnnnnnnnnnnnnnnnnnnnnnnnnnnnnnnnnnnnnnnnnnnnnnnnnnnnnnnnnnnnnnnnnnnnnnnnnnnnnnn

SEQ ID NO: 25374 - DNA, 274 bp, Setaria italica
  Peptide Sequence Number=SeqID_91348
ctcctctcttctcctccacacttcgaggaagcgtccacgcaattcctcgttaggaggctaaacgcgattaggaggtagcggatcatttactaatagtctagttagagtcggatctgagcaatgggggaggagcaggtgtcgccgaggccggaggccgctgccgcagcggtggagctgacggggttcgtcatgagcgcggaggaggccaagcgcgccgcggcggcggccggcgtggccaccgtgcaggacctgctgccgctgctggtgccgtccg

SEQ ID NO: 25375 - DNA, 342 bp, Setaria italica
  Peptide Sequence Number=SeqID_91349
ggggcacctatccatgttgaaccagaaattgttgaaatagagtacattccagaatgcaatgttgatggcaaagatgcatctttagctgagctcattttgtgacaatgcctaaagctgatactcggacccctcctgcttttgtcatcagatcctcttaaacgtttatccagttctggtgatagagaatctaatggtgctgatctggggcacctatccatgttgaaccagaaattgttgaaatagagggtcctagtccagtgataacacaattcccagaacaggagtccaacttcatcagaagtccaagcccacatgggcctggtgctatgacaagaaaaggtg

SEQ ID NO: 25376 - DNA, 1536 bp, Setaria italica
  misc_feature (1520)..(1536): n is a, c, g, or t
  Peptide Sequence Number=SeqID_91350
ccgttccatcccccacgagatctgctcctcgcgctccccctctcctccccggcgcgccccgccccgtgccgatccacccctcgagcggcggcctccgaagtccaccggcgatggtcgtgtgcaaatgccgcaaggcgacgaggctttactgcttcgtccaccaggtccctgtctgtggcgagtgcatatgcttccaggaacatgagctgtgcgtggtgaaaaattatgctgaatgggttgttaattctgattatgactggccacaacactgctcatcttgcaattcagttctggaagccggaagcgaagaaactacaagattgggttgcttacatgtgatgcacacaaaatgcttgatatcacatatccaaaattttccaacccaaacagcacctgctggatatgtctgcccctcatgttctgagcctatatggccaccatcaagcattaaagatacaggttctcgtcttcacgcaaaactgaaagaagcaatagtccagactggattggagaagaacgtatttggaaatcattttgtgacaatgcctaaagctgatactcggacccctcctgcttttgcatcagatcctcttaaacgtttatccagttctggtgatagagaatctaatggtgcaaacataattagctcagctaaagatgcatctttgccatcaacattgcattctggaatgtactcttctgctagtgtaggatctggggcacctatccatgttgaaccagaaattgttgaaatagagggtcctagtccagtgataacacaattcccagaacaggagtccaacttcatcagaagtccaagcccacatgggcctggtgctatgacaagaaaaggtgctaccagtgttgatagacaaaattcagagatttcttattatgctgatgatgaagatggaaatcgcaaaaagtataccaaaaggggtacatttcgtcacagatttctaaggatgctgctgcctttctggtctagtgcactgccaacactaccagtcacggcaccttcaaaaaaggagagtgatgctccagagggtcgcatcaggcaaagatcatcaagaatggatcccacgaagatcttacttgcaatggctatcatggcatgtatagcgacgatgggaattctctattaccggctgtcccaacgcagtctttctgaaaactttgttgaggatgagattcagtagcactattgaattttcgaccttgcaatcttgtactgctatgctgctgatttgaagggttttaccctccctgtatttttttctttcccctttctgtgggcctttttggtggtttgaggatggatagttgttagttacatataagagttatagttgactgcttccatctcctgattgatgctcatgtttatgtaactataatgccatacaatattgtattacctgcctgaggagaaatcatagaaaatataccgtctaccctttgttatttgatgggaacgggaaatatttattcattctgggggccaaagctactcagtttgnnnnnnnnnnnnnnnnn

SEQ ID NO: 25377 - DNA, 560 bp, Setaria italica
  misc_feature (558)..(558): n is a, c, g, or t
  Peptide Sequence Number=SeqID_91351
actagtcagccaccagtcaagagcaaggccatttaccgagattctttcccatgagtttcttcgcgatcctggaaggattcggtacacctgaaatcttttggttcggcagaaccaagatcagacgtgaatgtggagaagtaaaatgaggcgagcaggatcgtgtgccacgatgatcatttagcagcaatcctgacctctgatgaacattgctagattgctaagcatggggatttagttagcctggctaaaactttgacaagggttatgtcgatgtctgaatacaatattgagttgattcaattccgtatgggttgctagtttgctacgtttctgttttcttggaccataccatgacgagtgaaaaccccattaaggacatcaacacaaccgatatggctggaggcacacccacaagtggatctgggaagaacttgtttgctaaagcaagagcaagaaggctactttgcattcctgtctcaaaaactgttgttccctgtaatggaattagaaagaacatatcctcatgtaacaggagagcacatcacctgtctcaaaagnta

SEQ ID NO: 25378 - DNA, 534 bp, Setaria italica
  Peptide Sequence Number=SeqID_91352
cacaatcccgttcaacccctttcaatacttttcgaaccgaacaagcccttaatgtcaatggtaatacaaagagccacgaagatgtgaaggatgtcgagtctggtatgacacgcgaaagcaccgcatgtcataatagtggagatgacggtgtaaacaccaacggtgataccggatgtcaagatcatgtcattgatatagcacctcaagatgatgccgaccccaagaactattgtgttgtatgcactcacccttcagagtgggtggctatcgggcggtgtggccaccgtgttgtctgtcgcaagtgcatggtgcgcatccgtttcttccatcgtaacaaacgttgctgcatctgtagaacccgctgcccaaaagtcattgtcgctaagagagacgccagcaccgatatcctatcgaccttacctctgtttgcactccgagagggacgtgttgggaaactctggtaccacaggctcacggcggcctactacgaggacgaaaaagagtacaatgcagcgagagttgcatgtgatggaa

SEQ ID NO: 25379 - DNA, 460 bp, Setaria italica
  Peptide Sequence Number=SeqID_91353
ggaggagccaggagggaagagcgcgcggccgccggtgatggacgccggaggaggggtgcaggcgcagggggtcaacccggactgccccaacgccgccaaccccttccaccgctgcgccgagtactgccccgtcccggccccgagggccgcgcccaagccgtccccgcctcgtccccggccggcgcagaacgggaccaggaacggggacggcgggaagcgggttgtccccgctgccgccgccgacggctcggaggaggagcgggcggtgaacccggactgccccaacgcatccaaccgcttccacacctgctcggagtactgccccgtcccgcccccacgagcggcggccaagtcgccgccgccaccggggccgcgccacgcggtgcataacgggaccgcgcaccgcgacgaggaggaatgcgagattacgaccgccgatgattcggatgaggcaggcaag

SEQ ID NO: 25380 - DNA, 349 bp, Setaria italica
  Peptide Sequence Number=SeqID_91354
gtagaaaccctagagaccgctgagcactccgccgccgccgcgcttgcaccgcactcctcgtcttcgcgggctcctccccctcccggatccaggtaatgcaccacgagcccgagccgatccaccctctcttgttaggcagttcttctagggctgctgttgttgctaggccaggctcaagatgcgtgcttgctgatgctgttgcgtcgtagtagatgttactgtggtgaaatggaaaactctagtcatcggtgtttgtgctatggttgcggttcgggtgagatgttgtttctttgcgctggattctgatactgtgaattgagcattatggtttgctagaaacgttttgaaa

SEQ ID NO: 25381 - DNA, 144 bp, Setaria italica
  Peptide Sequence Number=SeqID_91355
tttatgattaatcgcttgctaaaacgaagaagatttaccaacagttggatatccaaatgttggtaaatcttccttgattaatcgcttgctaaaacgaagaatgtgcccagcagcaccgagaccagctctcttgtgacacctggt

SEQ ID NO: 25382 - DNA, 1092 bp, Setaria italica
  Peptide Sequence Number=SeqID_91356
ggcagcctcggccgcacccaccacctccttcccgccggcgccggcgccggcgcgggggcgtggcgaggatcaagacggcgcctttacccttcggcacgtttcctcgccgagtgcttctcagggcggccggcgaatccgccatggttgctggcgacacattgcttggtttatatgagaaagagagattaggtctctcacactatgcagacgaggagtttgaagaagagagatactgggaaaccttggatgctgatttgcgctactggaccagatccctgcgtccagtgcagtggtatcctggtcatattgcaaaaacagagaaagaattgaaggaacagttgaggcttatggatgttgtcatagaaatccgtgatgctaggattcccttgtccaccagccaccctaagatggactcctggctaggcaaccggagaaggatcatagtcttgaatcgcgaggatatgatctcaactgaggacaggaatgcatgggctacttactttgctaatcacggcaacaaagttgtgttcgccaatgggcagctgggcatgggtacaatgaaattaggtaggatggcaaaatcggtagcatctggtgtgaacacaaagcgaaaggaaaagggactacttcctcgtccggttcgagctggaatagttggatatccaaatgttggtaaatcttccttgattaatcgcttgctaaaacgaagaatgtgcccagcagcaccgagaccaggtgtcacaagagagctgaagtgggttcgtttcggaacagacctagagttgctagattcacctggaattttgcctatgcgaattagtgaccagacagctgcaattaagcttgctatatgtgatgatattggagaaagatcgtatgatttccctgatgtggcggcgattcttgtacaaatgttgataagacacccggcagtaggttctgaagcatttcgaaggcgatataggattgatgtagacgacgactgcggtaaaacgtttgttacaaagctctccgttcacttgttcaatggagatgcaaatcaagcagctttccgcatattgtcagactacaggaaaggcaaatttggttggg

SEQ ID NO: 25383 - DNA, 308 bp, Setaria italica
  Peptide Sequence Number=SeqID_91357
gttggtagtgtcatggtggtgccgctgcccccttttgaccaaccatgttgtctgcgcgtgagtttgagttgaggcccggatcgatgtaccaatccgatcgagcagagtcttttgttgaggctcgtgtcgatatcctaattcgaccaggcagagttgagagaggtccggttgatgccccaatccaaccggccgatgttgtgttttgagtagtacgttggcgtggtacaacgcggattgatgtcccaatccaactggccggtattcgttgtttttttgtgttttttcgtattgcctggtctgagtttatt

SEQ ID NO: 25384 - DNA, 399 bp, Setaria italica
  Peptide Sequence Number=SeqID_91358
ggagggaagagaaggaaagggggaggggaaacggaggccctgccaacgtgagccgataaagcggacgcgcccggccctgaatccgatttgatgcgcgcccctcacgtccgcccgcggccccccggagagagggaaggaaaaaagaaatcaatttccgggatttcgccattaaataacaaccgattttttatatattcggggggacaaaaaaaaaggaaggtggaaggataagtgagattggcaaccagcagcgcaagcaacaaacaccaaacaaagcttcctacctggcccgcccgggtttgccatctctgcccccgggcagccgcgggattcacgggaataccagccccccgatcaacggccaggatccggagccgatggcaggcaccgtgattcacg

SEQ ID NO: 25385 - DNA, 727 bp, Setaria italica
  Peptide Sequence Number=SeqID_91359
ctggaaacgaggcaactttcccaagggcctcctacattagagtgtaactttaggaatagtaaggaaggaaaatccccaaggatttggagtgcttcctgtgtcgctttaacctcaatgtctaggtaagtgagattggtgagggaggccatccatgcaggaatcttgctgaggtaccatcctatgatatctaattcctgaaggagatgaggaactggggaccaagagtccagtaagaaatccagagaccagggactgatgagctttaaatattgaagattggacctgcctaattttcctagcaataaaacaaaattatcaatatatatatttttatccctgtgctgggtaccaatgcgccaatccaatccaagagttctcaatttggtcaagctgcccagctcttgtaacatggttattgaggtagtgtagtccacaactataagtgacagaaactctagggcttgcaagttcccaatttcctctggcagtctgacacgatgagcaattaaccatttcaaacaccgaagttttaacaatacttgcaggcaattcacttatattaggacagtttagaagatccaatacaaccataaactgcagcgctcctatttgttctggaagtgtaatgatattgcttgctttaattcggaggtatcttagctgaaacaacttccccacatcttcaagataagagctatcaaaattttcgttaccatctagatcaagc

SEQ ID NO: 25386 - DNA, 347 bp, Setaria italica
  Peptide Sequence Number=SeqID_91360
ttgaacgctggcggcatgctttacacatgcaagtcgaacggcagcgcggggcaacctggcggcgagtggcgaacgggtgagtaatatatcggaacgtacccaagagtgggggataacgtagcgaaagttacgctaataccgcatacgatctacggatgaaagtgggggatcgcaagacctcatgctcctggagcggccgatatctgattagctagttggtagggtaagggcctaccaaggcgacgatcagtagctggtctgagaggacgaccagccacactgggactgagacacggcccagactcctacgggaggcagcagtggggaattttggacaatgggggcaa

SEQ ID NO: 25387 - DNA, 965 bp, Setaria italica
  misc_feature (15)..(15): n is a, c, g, or t
  Peptide Sequence Number=SeqID_91361
taattggcacacttntattgtctataaccgcttttctcatgatcagtttgcctagcaatttcatcaagaagaatttgtcggcatgtccctttcctatggcctttctcttaactccttagtatactacacaatttccataagctgtatgatcgaaaatgatatggtagctgtagagagggtgcatcagtatagtaccctcccttctgaggcagcatgggaggttgcagattgtcttccctcatcaaattggcccagccgaggagatattgatgtgaaagatctgaaggttcggtatcgtcaaaatacacctttaatcttgaaaggtattactgtaagtattaagaatggggaaaagattggagttgtgggaaggactggcagcggcaagtcgactttagtccaggctttattcaggattgtggagcctgcagaaggccgaatcatcatcgatggtgttgatatctgcactttggggcttcatgatctaaggtctcgctttggtgtgattccccaagaacctgtgctctttgaaggaactgtaagaagcaacatagacccaactgggcagtattctgaggctgaaatatggcaggccctcgagcgttgccagctaaaggatatagtagcttcaaaaccagagaagcttgatgcactagttgccgacatgggggagaactggagtgtagggcagaagcagctcctctgctttggccgtgttatactgaaacgcagccggatcctcttcatggatgaggcaacagcttcggttgattctcaaacagatgcagctatccagaggatcatccgagaggaattcgccgaatgcaccgtcatcagcattgcccaccgtataccgactgtaatggacagcgaccgagttctggtgttggatgcagggctagtggctgagtttgacgcaccctccaagctgagtggggagccgtcacttctttggtcgccctaag

SEQ ID NO: 25388 - DNA, 585 bp, Setaria italica
  misc_feature (486)..(486): n is a, c, g, or t
  Peptide Sequence Number=SeqID_91362
ttggagatacagatgctcaggggctttttgattacttcaagagaatgcagtcagagaactctggttttttctgttctatacaagtggacagtaagaattgtgtaagcaatgcagtttgggttgatgcaagagctagaatggcctacacatactttggggatgctgtttacttcgacactacttatagtcaaaatgagaatatgctgccctttgcagctttcacaggcctgaatcaccatggtgacactgttgtttttggttgtgccttaattttggacaggacagaatcttcatatgcttggattttttgagacatggttgacagcgatggataaacggttgccattttcctttactaccgatgaaggaaagggaatggcggctgcagttgcgaaagtatttcctcaatgttttcatcgtctttgcagatggcgaatcttgtctagatgcaagaagaaattgactgatgtatacacaagatttccngggttccatgacgaactaaagagatgtattaatgagtgtgatactgtgcctgtttttgatatgttctggggctccattcttgacaagtatggcctgaga

SEQ ID NO: 25389 - DNA, 225 bp, Setaria italica
  Peptide Sequence Number=SeqID_91363
ttaaaaaactaataaaactaaaagaaaaacacaaaacataaatcaacatatttaagaaagaaattaattaccgactttaatttaactttcttcccattactttgcaagcgtatcaatgcaactagctaagctaaggaatagtcactgtatatggttcatgttttaacccttgagccacctcaaattgcaaccacgattattctgtgttatgatgccctttctgat

SEQ ID NO: 25390 - DNA, 1038 bp, Setaria italica
  Peptide Sequence Number=SeqID_91364
ttaacaaaagcaataaaagaaggaaatgctggtgataatacctgagcatcactgcagtattcttatgccaaagatacagtttgcagttttcagccaagagccaagtggtatcttgattatgtctgaagttcatgttccagtttcatgcagatatagaggattactgatccagaggagggatttgaatatgactcatagcagcttcctttcatagatgtgtcagccaggaattgcagcttgcaactgcattttatgttgcagaattcggctggaaggtacaaaaaaggactggtatcgaaatggtatggaaattggaatggacaaatatttgtcagtacctcagaagcccaagttttctctctgatcttgcatctgatagttctccagcatattctgatttttttcaaaatcaacttgggagtgatgttggcaagacggcagttttggaaaaggaagctaggcttttagaatggatgagtttagaatgctataatcatggcttgtgactaatgctatgaagtatggccaaagaagatgctcttagttttccctcaagaagatagatgctctgagttaatgcatccttgtaactactgctatcggaacacttagctgaagacgatgttcaagttcactaatattttttctgagcgtggagcacacatcaaatgtggagaagctgacagccgatgtaaactgcaacctgcaaatttggattatcgctcaagtttatgtgggatgcactgctcaagctgcagtagctgccattgaggtctcaataccaccagagacttcaatattttggactggcatggatagaagatgctggggtatgatgaacaacgaaattctgcaacatcatttgaagaattattccgctttatttactttcttcccattacttttgcaagcgtatcaatgcaactagctaagctaaggaatagtcactgtatatggttcatgttttaacccttgagccacctcaaattgcaaccacgattattctgtgttatgttgtattgtctgatttcttgtatt

SEQ ID NO: 25391 - DNA, 336 bp, Setaria italica
  Peptide Sequence Number=SeqID_91365
tggtgggccccgcaccttctcgccggcgacttcatcgccgtcggcgacggcgacggggacagggacggggacgtcgtcccagcccgagggctcagggaacacttccccgcccgcggcggcgatgcccagcccggcgagctgcttcacgatcgagtccgcgtcagcgtccgtggcatccccggcgccgacggtggagggggagatcgaggcgatcggggaggccgcggcgtcggggggcgggggttggcgtcggcgtccgccattggagccgaggtgaaaggagagagagaggaggggaaggggggtgagtggcgacggtgagtggggacgagagag

SEQ ID NO: 25392 - DNA, 517 bp, Setaria italica
  Peptide Sequence Number=SeqID_91366
ctagatgcaaacatgagaccaaagatagcagactttggcatggcaaggatattcaatgataaccagaaagatgcaaacacgcatcgtgttgttgggacatatggctatatggctccagagtatgcaatggaaggcgtcttctccatcaagtccgatgtctatagctttggtgttctactcttagagattgttactggtataaagagaagttctgttagtagcattataggttctccgaacctaatagtctatgcttggaacatgtggaaggaggggaagacgagagatttagcagaccaatccattacggatgcttgtttgctagatgaagtttcgctttgcagtcatgtggcactcttgtgcgttcaagaaaacccagatgatagaccacttatgtcatctgttgtgttcactctagagaatggaagcaccacactgccagcacccaacaaccctgggcactatggacagaggagcagtgatcgtggagacaaattagggacagaactagaaaatt

SEQ ID NO: 25393 - DNA, 284 bp, Setaria italica
  Peptide Sequence Number=SeqID_91367
ggggtagtcaagtatagttagatgttatggttggcatacagtgccactagtgtggccaccgccaatcatgctggcttcaacgccatgttgatcgctcggagatttcatccttaagctagcaaagtatttctaagttatgttataatctctaaataagggtctcatctcttgttatccaattagttggtctattacaatttagttgctatcatgtgtagcagctccacattattgccaatccagcaaagaaagaagtccccatctctatctcgtctacgctcact

SEQ ID NO: 25394 - DNA, 309 bp, Setaria italica
  Peptide Sequence Number=SeqID_91368
ttcgcaaacaggaggtccctgtcccgatcacagatgatgccagcacacttcaagaaatcatcgccgttgtctccattgctggcaactgcatgtagtgcggtgtccccatctggagtgacgcccttgagaagtgctcctgctgcaggcgaagcaggctcgtggtcaacgccctcttctacgtcaccagcagctgacaccgcaattcttcccttggtgccgctgcctcctgctagcaactcaaggaattcttgagtaggagccaccattggtgccttctttgcgtcttccctctcgagaaggaagttcagt

SEQ ID NO: 25395 - DNA, 1017 bp, Setaria italica
  Peptide Sequence Number=SeqID_91369
tttttttttttttttttttttcttaacaatgaactcaacaccatgttgcttatgtggctgaacataaatatgaaatccctcgctagaagtgactttactccctccgtctcattttctaggtgtatagatgtttgtatgcacctaaatatagtgtatgtctagatgcatacaaacatctataaatttagagaaaccaaaacaacttataatttgaaacggagaaagtacatagtatccagtccagagctagctcgttcaactgaacaacaagatggatcggagagcgtacatcggtttattacagtttcagatgatgatttgacgaaacatacacagtctgaatacataaaccaaccagcgtagggaagaaaaaagaggatcctcttagggaagaaagaggatcgtcgtcggagccacagacacctgcttgccgccgtacggatcggagcaccatgtcggagggcacggcgaactgcatcgacatcctcatcgccatcatccttcccccactcggcgtcttcctcaagttcggctgcaagttcgagttctggatctgcctcttgctcaccttcctcggctacctccctgggatcatctacgcgatctacgccatcaccaaatagtagtatgagcacagcaacaacagctcggcccggaggtgagatgctgatcaggttcttttttcagcaggtggacgtagccatgtagggtgactagctgccagcatagtcgatctcttaacaatacctggatgcaggaacctgtgccggatgatgtgtgtgctgtgtcgtttggagatttgtcatttgtcgaactacgtacaaaccgatcgagcttttcttgcttgtgtttatgtattcagactgtgtatgtttcgtcaaatcatcatctgaaactgtaataaaccgatgtacgctctccgatccatcttgttgttcagttgaacgagctagctctggactggatactatgtactttctccgtttacaaaaatttaaaaaaaaaaaaaaaacaaaa

SEQ ID NO: 25396 - DNA, 582 bp, Setaria italica
  misc_feature (558)..(582): n is a, c, g, or t
  Peptide Sequence Number=SeqID_91370
gcccatagctgtttactgtggacacatcaaacagatagctgtaagagaaagagaagcaacctctacggatcggagcaagatgaaggagggcacggcgaactgcgtcgacatcctcatcgccatcatcctgccccctctcggcgtcttcctcaagttcggctgcaaggtcgagttctggctctgcctcttgctcaccttcctcggctatcttccggggatcatctacgcgatctacgccatcaccaaggaatagcatggaaacagagcaaccattcaggagaaggaaccgcgcaggatgtaaaattcttgattaccggaagccttttgatttggagattgattgtcagctgtcaataagctactactaattgagctttagtttcttgcttcgtgtccatggatcggtctgattatttgtggatcttatgacgatatagattgtcgcgtgaaaaattcctgccaattggtgcttttttgtatgtaagcagtggactgtgcaaatttgtctgaaaaggtaataaataatttacattgcctggtgaaaaaaaaaaaaaaaannnnnnnnnnnnnnnnnnnnnnnnn

SEQ ID NO: 25397 - DNA, 410 bp, Setaria italica
  misc_feature (13)..(13): n is a, c, g, or t
  misc_feature (23)..(23): n is a, c, g, or t
  Peptide Sequence Number=SeqID_91371
gtttttttttttntttttttttntttttttttttttttaattttttgtaaacggagaaagtacatagtatccagtccagagctagctcgttcaactgaacaacaagatggatcggagagcgtacatcggtttattacagtttcagatgatgatttgacgaaacatacacagtctgaatacataaacacaagcaagaaaagctcgatcggtttgtacgtagttcgacaaatgacaaatctccaaacgacacagcacacacatcatccggcacaggttcctgcatccaggtattgttaagagatcgactatgctggcagctagtcaccctacatggctacgtccacctgctgaaaaaagaacctgatcagcatctcacctccgggccgagctgttgttgctgtgctcatact

SEQ ID NO: 25398 - DNA, 423 bp, Setaria italica
  Peptide Sequence Number=SeqID_91372
ctgtttttttttttttttttttttttttgtgtatgtctagatgcatacaaacatctataaatttagagaaaccaaaacaacttataatttgaaacggagaaagtacatagtatccagtccagagctagctcgttcaactgaacaacaagatggatcggagagcgtacatcggtttattacagtttcagatgatgatttgacgaaacatacacagtctgaatacataaacacaagcaagaaaagctcgatcggtttgtacgtagttcgacaaatgacaaatctccaaacgacacagcacacacatcatccggcacaggttcctccgggccgagctgttgttgctgtgctcatactactatttggtgatggcgtagatcgcgtagatgatcccagggaggtagccgaggaaggtgagcaagaggc

SEQ ID NO: 25399 - DNA, 677 bp, Setaria italica
  Peptide Sequence Number=SeqID_91373
tccactccgtgtctccatcgaaccggttaaccagcagtccaccacacacagaccaatgcacttatgcaccttgtggcttgggtcgcgcccggctgctgtgcttatatagcggtttcagtgctctgcttacacataaaccaaccagcgtagggaagaaaaaagaggatcctcttagggaagaaagaggatcgtcgtcggagccacagacacctgcttgccgccgtacggatcggagcaccatgtcggagggcacggcgaactgcatcgacatcctcatcgccatcatccttcccccactcggcgtcttcctcaagttcggctgcaagttcgagttctggatctgcctcttgctcaccttcctcggctacctccctgggatcatctacgcgatctacgccatcaccaaatagtagtatgagcacagcaacaacagctcggcccggaggaacctgtgccggatgatgtgtgtgctgtgtcgtttggagatttgtcatttgtcgaactacgtacaaaccgatcgagcttttcttgcttgtgtttatgtattcagactgtgtatgtttcgtcaaatcatcatctgaaactgtaataaaccgatgtacgctctccgatccatcttgttgttcagttgaacgagctagctctggactggatactatgtactttctccgtttcaa

SEQ ID NO: 25400 - DNA, 394 bp, Setaria italica
  Peptide Sequence Number=SeqID_91374
ccagtggcgaccaccacacaggggcgccgaggagctgagctgagctgagcgaccgcgctgccggccatgtccgcgccccgccgccgcctggccaccaccaccccgtcgctccgcttcctcggcctgctcaagcagcccgacgacgcctgcgtcgacgtccaggagctcgagctagacgagcgcgacgtcgtctggtcctccagcgcgacctcctcgtcttcgacctccgcggcctcctcgccgtccccgaccacgtccccgtccgcgagcctccggaggcccatatcggcgtcgtcccgctacttcccgtccggcagcgtcggcctgtccgcgctcctcgccgaggaccaccgccacgcgcccaccgcgccgcggcggcggcgtcggtgatgga

SEQ ID NO: 25401 - DNA, 322 bp, Setaria italica
  Peptide Sequence Number=SeqID_91375
ccaaccaaccaaaaattaccaaaactaattgatacgaagcccaacactggcagcatctcaagcaggggatgaaaagagcagtaatgtggacaccaccacttccaatgttgtcaacagagatgtgaggcgcagcatcagaagtgttgttaattcttatatcaagaattttgatgcgaagttcaacactggaagcactgctaacagtgatgccaggaactcagatacgaaacccagcactagaagtgttgcgaatgctgatgatgctaagtgtatggacgtaaaaccaatcagcggaagtgttaagagcaacgatgccatcaaa

SEQ ID NO: 25402 - DNA, 673 bp, Setaria italica
  Peptide Sequence Number=SeqID_91376
tttttttttcgacagaactttaacatgccatttgcagtctggtaacacaacatgggattgaaattgttcaacaggacttgacatgccacaacagtccggcaacactacgcaaattcaatttctcgaagcacaagttcagtatgacatcacagctttgctgactcccacggagggagtagaagcattggcccttgctttggatcaggccttgtgatctttgttgcactagcggaaacatgagcaccggctttcccagtagctgagccaccctgaatagttgacaccctagcatttgcgcttgtcttggtcacattcttaactggtgctccatggctgctgccggccggtgccttccttttccttgaggatgtacaactttgttgagtgttggacaccacagccattgcatttggactagcagcggattgaacaccaacagtaccagaagaagcagctgcattccttttctcacatgtggatctgttgtgaccggtctgtttgcactttgtgcatctgatgacagtaccaacccttgacagctttgtgcccttgggtgcctctgttggatcccttctctctgtcttaggccttccaggcatccagacatagtctggagctttgagcttgactctatcagaaaccggccagttggtcatactcatagttggtagga

SEQ ID NO: 25403 - DNA, 214 bp, Setaria italica
  Peptide Sequence Number=SeqID_91377
gggcgacgttggtgcaattattcatgtttatgtcccgaaggcagactccaacgccatcctttgtcagctggacgtcacaccacagagttgtaccgggtgcgctggcgatcaacgcaaaggagtaggcatctgagctggagtcgggaaacactcctgagaacccgcctttggccacaactcgtggagcatcacctcttagggttttgtacgcgga

SEQ ID NO: 25404 - DNA, 198 bp, Setaria italica
  Peptide Sequence Number=SeqID_91378
ttccccgtgtacccgcccgtcgagaacaccaccgcgggcacgccgcgcgggtggcgcacgtcgcaccggcgccgcagggtgccgccgtcgcccgcgctggcgctcgcgttgtaggcgccggccacgggcaggatggtcacctcgtcgatggtgctcatgatgctgtcctcgaacttgcgcgtgtacggccggaccttc

SEQ ID NO: 25405 - DNA, 158 bp, Setaria italica
  Peptide Sequence Number=SeqID_91379
ttagctagtctttggtcggatcaccaattctagctaaggctttatcggaattttcaaatggcacgatcggttgcgcctagtagggatatggtagtagcaataatactgatgaaccaaaaatgatacaatgagacaaatgcatgatatatttgaaaatt

SEQ ID NO: 25406 - DNA, 335 bp, Setaria italica
  Peptide Sequence Number=SeqID_91380
atgagaatgccttctcttcttcgtcattcgttggtggcttgcagaaagccatatgatcaagaataacagtagtttcaggataatccctacacagctcctctatttcctgaatatatagaccaattcccttcatcaccaatattcccactggcgctcccagttctccagccttagcaaacaatgaccttccgacctcattagtcatcttttgacctgatggccataagtttgggttgaaccggacagcacgatatttttcttgtacaatcagatgttcgagctgtttaatcccactaccatcatctgcaggattcgcaaggcacacaggggatagg

SEQ ID NO: 25407 - DNA, 487 bp, Setaria italica
  Peptide Sequence Number=SeqID_91381
ttctttccttttcttttatttttcctttgttaatttatttatttagttaccttaatttccctttctattcttcctaattattccctacttggcgctcccagttctccagccttagcaaacaatgaccttccgacctcattagtcatcttttgacctgatggccataagtttgggttgaaccggacagcacgatatttttcttgtacaatcagatgttcgagctgtttaatcccactaccatcatctgcaggattcgcaaggcagcaaccaatgaatttggatgggtatttcttcaacacactagttaccaacgaatgatcaaacatatgattaacaggttggacaatgagagccccatccactccagcttcatccatgcactcgagcaagaagtcagcgtcgccccggagtgtgggctcctggccggggaagtacgagtacccctcattggcctgctggggcgaggcccagacgtgggtttaggtct

SEQ ID NO: 25408 - DNA, 204 bp, Setaria italica
  Peptide Sequence Number=SeqID_91382
ctcccggttccacctctttcatatcataaaaaatagtgaaaattacagctgcaaacgagcagtgaagcatcccggtctcttctaggaaatttcgaatctcatgctatttcatctcttcttccagagtgattctgaagcagtattcattctaccgggtgctgagctggtgaaggagctctgataagcctagtacacagaccagtc

SEQ ID NO: 25409 - DNA, 1013 bp, Setaria italica
  Peptide Sequence Number=SeqID_91383
acttagggatctgattttgtccccatactgggagggagggggttgggtttctttctcctctcttcttctctcctctgctcacctcacctcaccgcccctcctcccaaggccgagcgtcggctcgggtccggtgacagcaatcgctgccgtcttgccctgccccccaacgaggagcacaccatcagagtgattctgaagcagtattcattctaccgggtgctgagctggtgaaggagctctgataagcctagtacacagaccagtcatcagccaagtgattgaaaaaggaaagtcagcagaaatattggttgagggctctgtagttgcttctccacacttgcctatgcctttgcagtaatcttgataagtgagtagtcaaagctggaatatggctacttactacccgagccctggcagtgaaagagattcacaaaccctgtactcaacagagtcaggcaatgcatcatatcccatgccaccaaccctaggaaacttgctttatccgaacaatgcatcttctggaccatatacagaatttagcggcattattcagcctcagcagaatttcatggaccttcctggccatccttcagcaatgtcacatgattcatcatccaacgaagctactaacatgggcacttcactcacagagcagcgttcttttggtcctttgaaagatatgagaaatgagatgttaatgcatttgatggatggagcacacagcagtggtagtgatctcatccacaatgatgcccataacactgcacaagtcgagtttggcatgttaaacaaccacaactcaacaagtgttccatcagcaccgggccaagggctatctctgagcctcaacacgcacatcttggcaccttcctatccatactggtctgcaaagccagacttactgtcaccaaattcttaccagggtgatgacaacagaatgaagaatatgcaatctgaggcctcacgggcaatccggaattctaagtatctgaaggcagcacaagattgcttga

SEQ ID NO: 25410 - DNA, 529 bp, Setaria italica
  Peptide Sequence Number=SeqID_91384
cgcgaaccatagcgatccaagtgcgaaggcacagggtaaacgcaggggaaaccaatcactatggccatgcggttgcggcggaggagtgccttccacggcagcggccagcctcaacccaacatggacgaccacgacacgcactccgagcgcgtcaccaaagtcgccgggaacccctgccacgccggcggcggcggcggcgccgccgccgccgtgcagcaacacacggctgtgcacacggagtcgttcaaggaggtggacggggacggctacgacccccgccgcggccacaacaaccacgccctccagcagcaggcgcacctccagtagatgccaacgttgatgcatggggtacacactgcactgcagctaaaatgatccggcaaaaaacgggctactcgtacgtacgtaaataaattgtgctcccccagttgatccatcggtgctctgcatccaccgatatgaaaatttgtgccctgtaccggctggtatatcaggcctgctcgtttgaaatttaaaaaaaaaaaaaaaa

SEQ ID NO: 25411 - DNA, 476 bp, Setaria italica
  Peptide Sequence Number=SeqID_91385
ccgtcagccgcccgccccaactcccgactcgcctcgcccccgccgctgccgcggcgcgcgcgcagtgtccaccgacccggccggcctctctgtgggggcgcatctggtggctacctcgccaggctagggttgggtggccctcttctaccttcgtctcgagcgagcaggctccgggcgcgcgtcatcgtccctcgctctctccggttgcgaccgcgtgccgtcctcgggagctttctcgtgccacgggagggccgccgccgcctctccgtccaccggctaattacctagagaacaactatcttgggtctatcttgggggtctaaacctaaagagtcatttgaagtctggaagtttctgttgaagagtacatagaaatatctcctgacttttgaggaagactgcggagcttctaaatgtgaaacttctttttattggtcactcctggatgctgttgaactcatcctctcacgttactt

SEQ ID NO: 25412 - DNA, 444 bp, Setaria italica
  Peptide Sequence Number=SeqID_91386
tgaggatgaacggcatggcatacccaatgcaactaaaagtgaggaacacaatacataacctgtacaatgatatgctgctgccttccatgcattatatctgttatgggttttagagaagatacaaacaacacaagaggggctacatcggaatctatcaatgctttgcctacatataaattcaaaaccaagaaacgccgccatggttcaggaagtgaagctgaaggccaagaaggtgggatagtggctgcagggactgagaaggagcgatcactttctgctgaagatgctgtatgctgcatctgtcttgccaagtatgcacacaatgatgagcttcgtgaacttccatgctcacattgtttcacaaggattgtgttgataaatggctcaagataaacgcactttgccctttgtgcaaatctgagatagcaagctcatctagcactt

SEQ ID NO: 25413 - DNA, 607 bp, Setaria italica
  Peptide Sequence Number=SeqID_91387
agatgctgtatgcttatccatttatttctaactggactcattttttttcaaagaattaagtttttttatcatcatcacttatgtcttttcttgtaccctttggtattgcaggtatgctgcatctgtcttgccaagtatgcacacaatgatgagcttcgtgaacttccatgctcacattgtttccacaaggattgtgttgataaatggctcaagataaacgcactttgccctttgtgcaaatctgagatagcaagctcatctagcacttctgatacacgtcaatcggagcagaatgctattccagtgcaggagattgaaatgcattaggttggtccgctctccctccttatcacataagcataccgccgcgtgggttccctgccttcatgtataaagttggagattgatgtatggattgtagtgacgcctagggttccttttatcattgttatcttggagatgttacagctcttctcgctgtcacccaacaatgccaagccaatgctacccaggtttccatcagtgtggatttcacctttgttgtttacttagtttttaggtaaaggtactaacttaggtaattagttacttaacttttagttaaaaa

SEQ ID NO: 25414 - DNA, 2134 bp, Setaria italica
  Peptide Sequence Number=SeqID_91388
tgttactattagtaaattattcttccttgtactttttgtaggtaagtactgtcggtagtctttcttaaatgttgcatcgtccctcgctctctccggttgcgaccgcgtgccgtcctcgggagctttctcgtgccacgggagggccgccgccgcctctccgtccaccggctaattacctagagaacaactatcttgggtctatcttgggggtctaaacctaaagagtcatttgaagtctggaagtttctgttgaagagtacatagaaatatctcctgacttttgaggaagactgcggagcttctaaatgtgaaacttctttttattggtcactcctggatgctgttgaactcatcctctcacgttacttgaagctcaaggtcgagctgatatgaacacttcaagaatggaacaagcaacaggtgtaagtggtcctgaacacataattgatattccaagggacactggttcttctgcttcagtttctcgcagtgcggatagagagaaccatgaagaattaaatcctgtggacaggccttcaactagagctctagtacctgccttgcaggcaccatcagcaataggtgctgtacctagtgcagggcagacttcaggcactaggagaagtgataactatgttcgtcgccacagaagccctttgaattctggactgtggatttcaattgaagttattgtcaatgtgagccagattgtagctgccattgttgttctttgtctgtcaagaaaggagcatccacaagctccattacttgagtgggtcataggttatacggttggttgttttgcaacattaccccatctctattggcgctatatacaccgtaatattgtaaatggtgagcatgagccagcacacgcgcctcaagggtcttctcataacaactcaactgaagccactcatgcagcaagtgcatcggagcgtcgtaggaatgctgcacgaaatgcggtgcttgctaatcccaggattaatgcactgtttgaccacttcaagatggccctggattgtttctttgctgtatggtttgttgttggaaatgtgtggatatttggtgggcgttcttctgctgctgatgctccaaacttgtacaggttatgtattgtgttcctcacttttagttgcattgggtatgccatgccgttcatcctctgcgcaatgatatgctgctgccttccatgcattatatctgttatgggttttagagaagatacaaacaacacaagaggggctacatcggaatctatcaatgctttgcctacatataaattcaaaaccaagaaacgccgccatggttcaggaagtgaagctgaaggccaagaaggtgggatagtggctgcagggactgagaaggagcgatcactttctgctgaagatgctgtatgctgcatctgtcttgccaagtatgcacacaatgatgagcttcgtgaacttccatgctcacattgtttccacaaggattgtgttgataaatggctcaagataaacgcactttgccctttgtgcaaatctgagatagcaagctcatctagcacttctgatacacgtcaatcggagcagaatgctattccagtgcaggagattgaaatgcattaggttggtccgctctccctccttatcacataagcataccgccgcgtggggttccctgccttcatgtataaagttggagattgatgtatggattgtagtgacgcctagggttccttttatcattgttatcttggagatgttacagctcttctcgctgtcacccaacaatgccaagccaatgctacccaggtttccatcagtgtggatttcaccttgtgttctgttttggaaggcactggatgtctactttgtagtttctagtgcaaaagaggtgggccaggtccaggtacatacatgatccgttaacttgcgtgatcctagtcaacttcgctgtatttttcattcatggaagatattcagttggtgactacaaaaatctggtaaaaacctgttccacttgataggaggcgtgaactttctgactaatggataaagtcttgtttcggatatgtccatctctgttttatgcgtcactcatgcgaatttatgaatgaataccaagacttccttggttttgtagtcctgca

SEQ ID NO: 25415 - DNA, 294 bp, Setaria italica
  Peptide Sequence Number=SeqID_91389
gtcaggaagtccaggcacaccagcccagtcctcggatccacgttggggtggtaaacctttgtggcgaagaacaccttgggagccttgaaggggtagtcgcgcgggaactcgaggcggacggcgaacaccccgccgtcgtaggggcttccctcggggccgacgacgacgacctgccaacggaggcggtccgtcgcgtcggcgccggggaggcaccactccggcgggtccgcccagagcccttcgagctccctctcgagccgcgtctcccagcgacgggacttgtctgcaggccgg

SEQ ID NO: 25416 - DNA, 397 bp, Setaria italica
  misc_feature (349)..(397): n is a, c, g, or t
  Peptide Sequence Number=SeqID_91390
cagccggtgctgcacggttgggctctccgcttcctttgagcttgcctatgcctgattgtatggttcagtcacctatgttatgggggagttcctgtgaatttgcaagagttggttgacgaaatagatcaatttctactaggccctgaacttgaatcccttgaggattggcaaattttgtggtgagatagttccttgcctaactggaattggtttcgtatctgattgaaatataaaacagtgcaatgtgtgtactggtagatgtttggcaaaaatttctggattgcctggtcatccaaggagtttcgagtgaaaatagcatctgagacttgtccttttgttgttaaaaacnnnnnnnnnnnnnnnnnnnnnnnnnnnnnnnnnnnnnnnnnnnnnnnnn

SEQ ID NO: 25417 - DNA, 948 bp, Setaria italica
  Peptide Sequence Number=SeqID_91391
tgccgctcccgttcctatctcccccgtttctccgcaaaccccacttcctgaccaagatggcgccgccggccaactccaccaccttctccggcgacgtgtgggcggagctccgcttggccgacgcccgcgatgtgccgcacatctacagcctcatccaccagatggccgagttcgagctcctcaccgacctcttcgctgccaccgaggagctcctcacctccacgctcttcccctcgccggcgccgcctcccttcacctccttcacggctctcgtcctcgacctctccccgtcccccgtggtcccggactcgtcttccaccatcggatccctccgcctcgacctctccgcgtccccgctcgcggacccggaggctgcagccttcgcctccccgcgcggcggcgggcgcgtcacggcggggttcgtgatctgcttccccaactactcctccttcctctccaagcccgggctgtacgtggaggacatcttcgtgcgcgccccctggcgccgccgcggcctcggccggatgatgctgtcttccgtcgccggcagggcggcggagctcgggatggggcgggtggagtggtgcgtgctcgactggaacaagaacgccatcgacttctacgaggggatgggcgccgatgtcctcccgcagtggcgcatctgcaggctcaccggcgcggcgctggacaagtacaagggcaaccaagaggcggccgccgatgggaaggctgtcgagtaggaggatcagaaaaattggttcttgagtgccaataataaaggtggtggatttgcttcccctgcttagctccctcctggcatcgtatggttagtggttcggtgcatttgatctgctcattagtgtgatgaatccatgttgtatgctgagcaattctgacttgttgtggtaaaccttggtacattatgcaaaattatcttcagattaaaaa

SEQ ID NO: 25418 - DNA, 821 bp, Setaria italica
  misc_feature (719)..(719): n is a, c, g, or t
  Peptide Sequence Number=SeqID_91392
acgaagaaaggttagcaatctagcccttaaatccagagaaggactggtctatacgtattgctgctatgcaaaggattgaagccttggtatatggaggtgctatggattatccatcatttcttatgctcttaaagcagctggttcctccattgtcttctcagctatccgaccgacgatccagcatagttaaacaggcatgccatctacttaatgtactatcaaaggaacttcttggtgattttgagccatgtgctgaaatatttattccggtactttttaagcttgttgtcataactgtgcttgtgattgccgaatccgcagacaactgcataaaatctatcctgcgtaactgcaaggtttcacgtgttcttccacttatagctgatacggcaaagaatgaccacagtgcaatcctccgtgctaggtgctgtgaatatgcactcttaatattggagtattgggcggacactccagaaatacgccgctcagctgatttatatgaagacctaataaagtcatgtgttgcagatgcaatgagtgaggtccgtgcaatggcaaggacttgctatatgatgttcactaagacatggcccgagcgttcacgccgactgtttatgtcatttgatcctgccatacagaggataataaatgatgaagatggtggcaagcacaagcggcatccttctccatcattgcatgagagaggagtccaactttcncgtgcttcatcacatgcaggtggtaaccattttggatatggtacttcagctattgtggcaatggacaaggtgcagctatttcttctgaatcgtctctctcgt

SEQ ID NO: 25419 - DNA, 514 bp, Setaria italica
  Peptide Sequence Number=SeqID_91393
aaaccttgacagaaatggacgtccctactaggtccttggtaacatcttggatgggccttttggggtctttacaccagtgcgcggggctgaggagagggttgggcacgaacccctgcagggagttgtacttgacgatgagcccgccgctgtttgacctgagcaccggcagcgtgaggatgttcccctgctccttgtccgcgcgcgcagcttcccagtccgcagcgaactgggccaggcgcgcctcatcgatcgggggagcggcggcggcggtgtaagagtaggagaaggcgtctccctggctcgcgggagtaccggttccctcggcggttgcggcggcggagaggagcggacgctggttgaggcgggcagggaaggggaaggaggctgatgccgcggggctcctccgggcggaaggggagaaggccgcgagggagggcgcgggcttgagggatgccgccagcattgcgtgggcctggctgccggtcgctgccgccggcggtggtggacctggtgg

SEQ ID NO: 25420 - DNA, 489 bp, Setaria italica
  Peptide Sequence Number=SeqID_91394
agaatagaataattttagcggttttgttggtctaagggtgagaaattacacttcatggaaatttctggttaagataagtctaatatttatatgcctcttcatgtttccaattgcatgtaccttataacactcaaactatgacaggatcctccccgagaagaaagtccacaaagcaattgaagattgtagagctgctgggatacgtgttatggttataacaggtgataacaaagaaacagcagaggccatttgccgtgagatcggggtgtttggtcctgatgaagatatcagttcaacaagcttcacagggaaggaattcatggcgctttctgataaaaagaagctcctaagacaacaaggtggccttctcttctccagggcggagccaaaacacaagcaggagatagttagactgctcaaagaagacggtgaagtggttgcaatgactggtgatggagtgaatgatgcacctgctcttaagttggctga

SEQ ID NO: 25421 - DNA, 1121 bp, Setaria italica
  Peptide Sequence Number=SeqID_91395
ggccttcccggcgtgggcgcggaccccgagcgagtgcctcgcggagctgggcgtcttggtcgaccgcgggctcagctccgacgaggcggcggcgcggctgcagcggtacgggcccaacgagctcgagcggcacgccccgccgtcggtctggaagctcgtcctcgagcagttcgaagacacgctcgtgcgcatcctgctcctggcggccgtcgtctccttcgtgctcgcgctctacgacggcgccgagggcggcgaggtcggggtcaccgccttcgtcgagccgctcgtcatcttcctcatcctcatcgtcaacgccgtcgtcggcgtctggcaggagagcaacgccgagaaggcgctcgaggcgctcaaggagatccagtccgagcacgcaaccgtcaagcgtgacggtcggtggtcgcatggcctaccggcgcgcgacctcgtccccggggacatcgttgagctccgcgtcggcgacaaggtccccgcggacatgcgcgtgctccagcttatcagctctaccctccgcatcgagcagggatccctcactggcgagactgcttcggttaacaagaccagccacaagattgagatggaggacacagacatccagggaaaggagtgcatggtttttgccggtaccactgttgttaacggcagtgctgtctgtgttgtgacgggcacaggcatggctaccgaaattggtaagatccatgcgcagatccaggaagcatctcaggaggaggacgacacgccactgaagaagaagctcaatgagttcggtgaggcactaactgccataattggtgtgatctgtgccttggtttggctcatcaacgtgaagtatttcctctcctgggattatgtggacggctggcctaggaatttcaaattctcatttgagaagtgcacatattactttgagattgcagtggcactggctgttgcagcaattccagagggtttgcctgctgtgatcacaacatgcttggcacttggcacaaggaagatggctcagaagaatgcccttgtgaggaagctgcccagtgtggagacattgggttgcacaactgtgatctgctctgataagacaggaactttgaccaccaaccagatgtccg

SEQ ID NO: 25422 - DNA, 1485 bp, Setaria italica
  misc_feature (1445)..(1485): n is a, c, g, or t
  Peptide Sequence Number=SeqID_91396
taggatggaggcgtgtggtttttgcttgtagaggcttcatttagtcctgattttgggaagaaaataaatcatgcacgttcccttgaatctttctgctcccataatggtattaggttagctcttatgaatagtgcttctgggtttgggaagccagctactgcacttcctactccaataacttctcccctatttactggaagtttcccatctagtccactcctatatagtcctgagggcactcaacggatcggtcgaatcgacctagttcctccacttagcttggatgggcacccaacttcaaagtcctcaccgccaacatcaccattgaagtcaaggcagccatctgcacatgttcgatcactgtatgataaattgcagaatatgcctcaagttggtgtgatacacctggctcttcaaaatgattcaactggttcagtattgagttggcagaatgatgtatttgtggttgctgaacctggagaacttgcagacaggtttctgcagtctgtcaaaactagcttgtcaaacttgttgcgtggccgtaatagaaaaggcgcatattccttgtccaagatttcatgtttgtctgagttggttgctgaatggccatcttttgaaattggtgggatacaccaccgctatataggtcgtcaaacacaagtaatggaagataaccaagaaattggtgcatatatgtttaggaggacagtgcctgctgttcacatggcacctgaagatgttcgatggatggttggagcatggagggagaggatcattgtatgcagtggtaagtatggccttacacatggcctggtcaaggcattcatggactctggcgccaaagcagtcatctcttcatccatcgagcctccagattcccagacaatagcctactacgggatggatgtaaatggaagcctggagaacgggaagtttgtcatcggggatgaggaagccgatgagtcagagcctgaacctgtcagccctataagcgactgggaggacagcgacgccgagaagagtggcaaccatgacatggatgatgaggagtacctggctcagtttatgtgcttgttgtacgacaagttgttccgcgagggcgtgacggtggacaccgctctgcagcaggcgctccggtcgcatcccaagttgaagtacagctgccacttacccaatgttttgtagttagcgacactgacaaaccgtacaaaaatacaccagaatggacatgaaaaatactagaaaacaataaggatagggcgggttcatagtggggttatagaggtcatatcttgttcgttgtgcaggcggaggtaacagaatgtatcccctactgaaccttttgcctagaaaggctttgtagaagtatatgtgctcgtggacatagcagtgaagctgattaataaaagcatgagggttttgaaattaaaaaaaaaaaaaaaaannnnnnnnnnnnnnnnnnnnnnnnnnnnnnnnnnnnnnnnn

SEQ ID NO: 25423 - DNA, 968 bp, Setaria italica
  Peptide Sequence Number=SeqID_91397
attccgaaggtttttgctgtatccactttagtcagtgtcatgcctgcccaaccatatatattccgtaactatcagtatcctcctggcactctggaggtatcaccaggaatggcagaaagtccatcaattggcgcgattggtacagctgtttctggtgcaccagttggtattaaacgcggtgccttcatggggagctgcaagcatcgtgtgtgggaagcgataagagcatcgtctgcagctccatattatctggatgatttcgctgttgatgcaaatcgttggcaagatggagctattgtggccaataatcccacaatctttgccataagagaagcacaacttttgtggccagacacacgaatagattgtctagtctcgataggatgcggctcagttccaactaagagtcggagaggtggatggcgctacttggacacagggcaagtgttaatagaaagtgcatgctcagtggagagagttgaagagactttggatacgctgataccaatgcttcctgaaatgcaatatttccgctttaatccagttgatgaacggtgtggtatggagttagatgagactgatcctgctatctggcttaagctggaagctgcaactgaggagtacattcagaagaattttctggctttcaagaatctttgtgagcttctggtcccaagatacccagaggaagaaaagtcatctgatatttacaaatccctgtcattttcaagactgacgtcattaaatcaaggtttcagtgaaagtaatcctaccttaggatggaggcgtgtggttttgcttgtagaggcttcatttagtcctgattttgggaagaaaataaatcatgcacgttcccttgaatctttctgctcccataacacagacatccagggaaaggagtgcatggtttttgccggtaccactgttgttaacggcagtgctgtctgtgttgtgacgggcacaggcat

SEQ ID NO: 25424 - DNA, 2532 bp, Setaria italica
  Peptide Sequence Number=SeqID_91398
actttagaagaattagacaagtggcaactaggactagttagacaagacaaattccaagacctgtctcctgctgtgatcacaacatgcttggcacttggcacaaggaagatggctcagaagaatgcccttgtgaggaagctgcccagtgtggagacattgggttgcacaactgtgatctgctctgataagacaggaactttgaccaccaaccagatgtccgctgtgaaacttgtagcgattgggaggtggccagatacacttaggacctttaaggttgatgggaccacttatgatccaaccgatgggcaaatacatgattggccaagcttaagcatggatgaaaatctgaagatgattgcaaagattgctgcagtttgcaatgacgcaagcattgcccactctgagcatcagtacgttgccacagggatgcccacagaagctgctttgaaggttttggttgagaaaatgggtcttcctggtggttataccccatcaatggattcgtctgatttgctaaggtgctgccagtggtggaacaatgctgctaagagagtggcaactctggaatttgatcgcaccagaaaatcaatgggtgttattgtgaaagcagattctgggaagaatttgttgcttgtcaagggagcagtagaaaatctgttagagagatgcagctttattcagttgcttgatggatctgttgtgctcttggatgatggtgcgaaggcaatcatattatctacacttcgcgatatgtctgctagtgctttgcgctgtttgggttttgcatacaaggaggatttggatgcttttgcaacatatgatggagaagaacatgcagctcacaagtacctgcttgatccttcatgctactctaacatagagagtaagatgatattttgcggttttgttggtctaagggatcctccccgagaagaagtccacaaagcaattgaagattgtagagctgctgggatacgtgttatggtgataacaggtgataacaaagaaacagcagaggccatttgccgtgagatcggggtgtttggtcctgatgaagatatcagttcaacaagcttcacagggaaggaattcatggcgctttctgataaaaagaagctcctaagacaacaaggtggccttctcttctccagggcggagccaaaacacaagcaggagatagttagactgctcaaagaagacggtgaagtggttgcaatgactggtgatggagtgaatgatgcacctgctcttaagttggctgatattggaattgcaatgggcattacagggactgaggttgccaaagaagcttcagatatggtgcttgcagatgataactttagtactatagtcgcagcagttggtgaagggaggtctatttacaacaacatgaaggcttttattagatatatgatctcctcaaacattggagaagttgcgtccatattcctgacatcagctctaggtatcccagaaggcctcatcccagtgcaacttctttgggtcaatcttgttacagatggccctcctgcaacagctttggggttcaatccacctgataaagatatcatgaagaaacctccccgaagaagtgatgactcgttgatcaccccgtggatcctgtttcggtatatggttattggcctttatgttggggttgcaacagtgggaatcttcatcatctggtacacgcatggctctttcctgggaatcgacctggccagtgatggtcatactcttgtgtcatactcccagctatcaaactggggccagtgctcttcttgggagggcttcaaggtgtcaccattcacagccggaacacagacattcaactttgatgcgaacccgtgcgactacttccagggtggcaagattaaagccacgaccctctctctgtctgtcttggtggccattgagatgttcaactcactcaatgccctgtcggaggatggcagccttctgagcatgcctccatgggttaacccgtggcttcttttggccatgtccgtgtcttttgggctgcatttcttgatcctctacgtgcctttccttgctcaagtgttcgggattgtgcccctcagtttcaacgaatggctcttggtgatagcagtggccttcccagtggtgctgatcgacgaggttcttaagttcgtgggacggtgcctgacagcgcgtgccagaaaacaatcagggaagaggaaggcagagtagacttgtgatcatcagtattagatttctagtagtgccacggggaatcgacattcgatgtgacaccccattgtttttgagttggaagggctctctatcttttctgagagtgttttagattgagcatatgaccgtgcagggcaagttaggctactatatagaactcataatcagatcgcaagttgaacacactgcatttattcgttgtaacggaagttggtactttgaacgtgctggagatacagcatgtttgcctgacgctttttcgctctaatgttgcactttctatgctgctgttaatgttgcgaatcttctaaaggagta

SEQ ID NO: 25425 - DNA, 201 bp, Setaria italica
  Peptide Sequence Number=SeqID_91399
agagccccctggtagtgaccgaccaatgtcaggcatagcatacacacgccaagcaccatgtttcgaccgcccatgaccagaacatatcttaatcttctcccacgttggtgggaaacctatgcaaagagcaagatatgctttcttgactttatgatcagtgaatgccttcactagcttccctgcaactttgttgcatttggt

SEQ ID NO: 25426 - DNA, 575 bp, Setaria italica
  Peptide Sequence Number=SeqID_91400
agtgtaggaaagggatcagcatccaaatcagcagcaagtggttccaagtttagtgctcctgtttcaaacagtcggcatgaaagccaaaatgttgttggttttcaatccacagatgctgatcatcagcacttctgggctttcagaattggtgaacatctggtttacttggatgggcgtgcttatgtacacgaaggtgcttttagcattgaatctctcaaagttgaagtggcatgtgtatattatcttcagatttctgatgagaaaagggtcaaaggtctattgcctgtcattggggaactcaagtattgtggaaaggtattggatgatgcagcaccaatatattatgatggtcagcttacttctgagcagaagtgtgttgatgttgttattgatgattgggtgccaaagcgattgatgaaattgtatgttgattgctgcacaaagttatcagaagcacccaataagaagctgctgacaaaactatataatcttgaggtctctgaagatgaagtcattgtttctgattgcggactgcaggatctgtcaattacaccctttcttgatgccctaagatc

SEQ ID NO: 25427 - DNA, 479 bp, Setaria italica
  Peptide Sequence Number=SeqID_91401
agcgtctcgagcgccagccacacgccgctgaaccgcgggatctcccgctgccggatgtacatctctacggggaagaagacggtgagcggccagaaggcgacgcttcccaggattcccaggatgctgttgaagaatggcaggagcacggcgccgagggtgatgagggccacgaatagcgtgcgccacaccaggcggaacacgttagaacgaccgccgtgctcccgcctggagcacggccatcggtccgccacggcggcctccaccgcggcgaacagcggctgcaggaacacctggaacccgccgacgaggtggagcacgatgcagacgttggcgaagtccaccagccagtagggctcgtagaagccggagaggatgttccccggcgcgccgtgccgaacgccgagtagcccaggcacccgcacatcatgtagaacgccgtcgtcgtcgccacgcccaggatcgacgcctgccgcatcgtc

SEQ ID NO: 25428 - DNA, 337 bp, Setaria italica
  Peptide Sequence Number=SeqID_91402
tcgccagcgaagggcggcagcggggcagcctccccgtccggtgggaagccgtcggcggcgacggccgccgcgtctgctccggtgctcatgcttctggcgttggcggcgggtttcatggcgatcgtatgaccgatctcgtggagttaacatagtatcgtgttagagcgagcagtgcgttgaggtttcgatcatccttagctagccgcgcgagagttcaaattaattgttgctaggcgatgccttttcttttttttcctgttatcttttttaacacgctggcgttcatgttcactgtattggattgttatcgttgaatgactccaactctctccaagag

SEQ ID NO: 25429 - DNA, 388 bp, Setaria italica
  Peptide Sequence Number=SeqID_91403
ccctttcttatttctttcaattcatccaagttcagttcacaaaatcactggttaaaatccccttcagcttgatgatctgttctatacctccctggaagtaaacctcgcatttttgaagattcaaaacctcaagtgatgccaacagattgcatggaagatgaattctgcccaaacaattgtgtatccttaagcgcaacagggattttaatccaccgaaacagcttggattgcatttaaatatctcattgcattcagaaagatcgagttcctcaagtgatgcttgtaaacaacatgatggcatatgactcaaaactttgcagttcttgatttgaacctttttaagatggggaaacggatgggctcgtgagtcttgtaattcttcttattg

SEQ ID NO: 25430 - DNA, 222 bp, Setaria italica
  Peptide Sequence Number=SeqID_91404
tttttctttccgtccccggtttatttttcttcgtcctggatggcgctggtcgcgggtttgatctgactgagccgtagaggcggtggtaagaggtccgtgcggtgggcggtggcttccgagggcgaccagagttaggtccttggcgccttcagttgggtgaggaaggcttgcagctgagacattaaatacacagtaatagaacacaaagaatgggtaaggaaa

SEQ ID NO: 25431 - DNA, 621 bp, Setaria italica
  Peptide Sequence Number=SeqID_91405
cgagttgatgagccttgcggtatgcctaaaatgtacgttctcatcgaccatgccgtgaacgaggagcagcttccccttgagattgttcacatgatgcatgatcgatgcaaattcatacacgtccttattctctgatggcaggcccatgtacttctcagtgtagaacgtatcatacccatcccaggctgtaactggagcaccagctactgcacagcagaatatgtcagggaaccttgcaaggcacattgctgacagatatccaccgtagctccagccgtacagacctatagtccccttatggacaggccttgttttattagccactctgcacctgtccgttgatcttcagcatccacacgaccgatgttatacttcagctgtccctcaaacttgccaatccgcgccttgccgtacctcggttatccagcttccaaactaatatacccttatttctcaggtactgagctctcatgtccactgtgttactccatgagtcatatactagttgtacactaggaccaccatatacactaattagtgttctgtaaggggtggcccaaattgtttctcatcagggaggtacatatttgcatataaggtggtcccatcctttgtgccaat

SEQ ID NO: 25432 - DNA, 370 bp, Setaria italica
  Peptide Sequence Number=SeqID_91406
gcggatgacgaggttgaggtcggcgatgacctggacgacggcgagcagcgtgccgtggctgttgacgctgtccaccctgatcaccgtggcgtcgtcggaggcatcgttgtcgatcacaaccctgggcgggttcatccccctgacgagcttggcgtactcgtcgtggtcgtccatcctcgccgccgccgccgccatgagagccatggagatgacgccctcactcgcatcaacagcttccgatacgccggcggcaagagctcgcgccgcgctagagcttaagctacagcctactgctcccttgccaagttcgttgtgccggcctggcccggacaatcctactctactctgggagtggtgacgctgatgcgtt

SEQ ID NO: 25433 - DNA, 450 bp, Setaria italica
  Peptide Sequence Number=SeqID_91407
tttagcaatcaaaaacttgctaaagggctaaagtttagcaatcatagtttagcaaactttagcaagagtgtttggcaaattttttgctaaaagttgctaaattttatcagtttagcaaggggtatccaaacacccccgtaacacgaaggtgcttgctgaggtagggagttccaccatctctagcgcctttgagtttcttttagcgtgaacaagttgcagcatcaccgatgaaaaaaaggagaacgaccagccgcaggggagattcatccgccgctgcgaacactgcatctcggatttggggcggttccgagctaaagcagcgcgcggggcgagttgagtgagacggggtcttcgcaccgccggcgagagggaactgggcaaccaggcaggtgctccgatccgcacaggaggagcttgcacgcagggtgggcatggcagcggagccgcggg

SEQ ID NO: 25434 - DNA, 370 bp, Setaria italica
  Peptide Sequence Number=SeqID_91408
tagagagggagaaaaaaaaacaacccaaaagaaaggctcacaccacccacctccatttagcttacttctctctcctctcgccctcttccccacccaacaaatcgagctagcttagcagaggacctgaggtccatagagaagcagcgcaagcccccaaggggaatccagcaactcagcggcgggcggcggcggcagcaagagcaatctacaggggggagcagagcagaggccggtcgcgcgcagcgatgggcgcgccggtgcgcggcgcccttttcttcttcctcctgctcctggcgggggcggcggccgaggacgtagcgccgcaggaacccacattgcccgccgcgggcgccggcggaggtgctgtcgg

SEQ ID NO: 25435 - DNA, 1744 bp, Setaria italica
  Peptide Sequence Number=SeqID_91409
tggatattattgacaacatggtggctcaactgctgcgggaggatccttcctttaaaccttctggtggcagattaggcgaaaatgatatggactatgatactgatgataaatcaatggccacacttcggcggcaactcaggagggctcatgaggagtattataggtgcaaaagtgagtatatgacttgtgtcatggaagccctcaaactagaagacaccataaagaattatgaacgccgtgatgcaaatggatggaaatacgtatcaagttttagagaaagtcgttcgggcacacttggatcacttttggacactattgagttcatttggcgctgtatactgagaaagcagcttcaaaaagcatttgctgttatccttggctgcatgtcagctgctatactgttagctgaagctactttgcttccaagtggtgttgatttgtctcttttttccatccttataaaagctgtcggaaagcaagaggttttagttcaggttgctgcatttgtccccttgatgtatatgtgcatatgcacatattattcattattcaagattggtatgttgatgttttattctctgactccaagacaaaccagctctgtcagcttgcttatgatctgctcaatggttgcgagatatgcacctcctatttcgtataactttctgaatctcatccgacttggtggtaatgctaaaactacttttgagaagagaatggggaacattgatgatgcagttcccttctttgggagaggcttcaacaggatctacccactgattatggttgtttatacgctattggttgctagtaatttctttggccgcgtgattgacttttttggaagctggaaaaggttcaagttccagcgtgaggaagagaatatagatggtttagatccgtctggaatgattattctacaaaaagagagatcttggattgaacaaggatgcaaagtgggtgatcaggttattccattggcaaggaatttcaacggtgtgagcacagatattgaatcgcaaaatgtgccattggttgaaaatacagttgagatgaaagcaggggcaacttcttccagcgggagagctggtcattcgaaatatgctaacaacagggagaatattgccagcaaatacactgctgttagagaacagaaccggcaggtagggaagtcagtgaaaaaggaaatttcgtcaaactctgtgtctttgcttgaagagagaaattctgagcaggggtccaacactggtgtaccaccaactggagtgtccgcaacatgggcctcaatgaagattggttttcagaacttcaaagcaaatatgggttccaagaagttcattcctttgcgccaagatccaggatttgttccaaattccaatgtctcttcacctgaatctcttgatgacatattccaaaggttgaaacggcggcctgcaaacatgcctgtcgattaccttgacgacgacgatgatgacaacacaggagacatggttctgcatttccaggatcattgagataggtggtgacattcttttaggatttagagtatgcatacaccaaattttaaaaagaatttgtagcagtagatgcagaaaggaagatacgttaacgttaacgggtaacgttacggttaacgttaacggtaacgttaccgttacggtaacgttacggtaacgttaccggttttacggggtacggttacggtaccgttttacgggtaaacggtaccgttaccgtaaacggt

SEQ ID NO: 25436 - DNA, 247 bp, Setaria italica
  Peptide Sequence Number=SeqID_91410
ctacatacaacagggcaacaagtacaaagataaccggcaacaagacaactaggatgatcggcctctttgcccaccgtcccatgattgctagtgcaaatgggtagaggagaaacatgatccatatgttgaacagcagacccagtgctgcatgcatcttcttcgctgctgtccatgtgccaatgtataccacggttttgcccagggctacaccaatggcactaacattgcaaaacagaactagcattgg

SEQ ID NO: 25437 - DNA, 278 bp, Setaria italica
  Peptide Sequence Number=SeqID_91411
ttggccaccaccccgaacgcggcgtagttcttcaccacgctgccctcggcgtcccagcccgcgctgccttcggcggcggcggcggcggcgagcgcctcggggagttcgaaggccggcttgaactctctcggcttcttgcgcgggagccccacctggaccttggcgcgggagcgcttcaacttgcgccgcgagccccccatgcgcagcagcggcggcagctagggtttggagaggggctagggttttggtcttttgggggaagagacggcggggagggg

SEQ ID NO: 25438 - DNA, 398 bp, Setaria italica
  Peptide Sequence Number=SeqID_91412
cgacgacagcaactgccactgcgacctgggcagcccaagcgccgccacctgcacacttgcaccggcttcctccgtctccttccctcccgttccccttcctcttccaacctcccccaagtcctcaccagtcggctccgccgccgccgccatggctggtacgcggggaggagaaggtccgtccggatccgaggaagggtgcggcaacgctgaggatacgtatcagcatggacagcctgtctactttcctgaagaactagtggacaattgggtgtctttttctcgccgcggcttgtattattgctacaacatctctatgcgagggtgtttgaacacagacgctgctccaactgacataatcttagctgtcaaatgtgacctggggcccgaattcctgcgca

SEQ ID NO: 25439 - DNA, 370 bp, Setaria italica
  Peptide Sequence Number=SeqID_91413
ctcaccttgtcttgcgggtcagagaatccatagtccccctaagcatctgcattgctgatcggtacaaaaaggcatcatgaattaagcccgcactgcatctgggtttcagtgagatcatcaagaaacaattagccacacaccatgtccgcccttgctgtggattcctggcttcaccatatatcattagtgtaaccattagagtgaaatatcttattctcttttttttcccccaggaaattggggcagagccatgaacaaaatatatcctaaagatacgcagctctcctgcgtattcacgaaaaaaatatatcctaaagagaaggtaattttacaatgatttttttctgaaaaagaggcaggaccttaactt

SEQ ID NO: 25440 - DNA, 609 bp, Setaria italica
  misc_feature (1)..(9): n is a, c, g, or t
  Peptide Sequence Number=SeqID_91414
nnnnnnnnnaaaagaaacaaggggactgagtcaccgcaccggtactattttcttttccttattcatcacatcgccgcatgaatcaaagaatggcggcacagattacacgcgcgcaagattttaccgtcatctcaagagaaaatgagcagctgcagcatgcatttctaattccagcaagctaggcgcagtacaagtgtacagcaacaacacgcagtgcacctcgcacctgcccccaatgcttttttcccttttcctctggttccttccctaatcaataagcaatttgtttttgaaataataatctcaccaaccaatccggcgcggcgcctaaccactcccccacaatactaatcacccctccttattcattagcccctcgcactggcaggtgggccccaacggggaatcggcatctccagctggtcgccccgcggcatattcacatcggcctctcgcacccaccggtccctccccgtgaccccgtcccgtcctgtttcagttggcgtggacgcggcggggcagcggggcacgccgccggcgccgggacgcggcgtcgtcgcgccgccacccgacgacgaaccaacctaggtaccgaacggacgaccggga

SEQ ID NO: 25441 - DNA, 440 bp, Setaria italica
  Peptide Sequence Number=SeqID_91415
ccggcgtcagccgcgtcgaggaggtcgaggagccgctcgaccccgccatcgccctcgcctgcgccgccgaccccgcgcgcctcggcggggtcgactcaccgatcgtgcgcctcgtcgccgccgactacggcgtcggaggggacgccgcgccattcgtctgcctcggcggcttccggaacacccgcgccgtctacgagctcgaggacgaagggctcgtgctggagcttgatgagaccagctacgagctcgagtgcgagacggcggagcctgaccaggtcaaggaggtgctggagcgcctgctcacggtctccggcgtgccgtacgagtactcacgcagcaataagttcgcctgcttcatggcagggaagctgcttccttgactaggcagccaagtgttcttggtatctccgagcggtggcgtcttctatgtaattcgattt

SEQ ID NO: 25442 - DNA, 1564 bp, Setaria italica
  Peptide Sequence Number=SeqID_91416
cagtagttgaattgttgcttttgatacaacttgataagttcgtctttttttgcatcctgaaacagtagacagttaaagtgaacttctagcaaagatccagtagaacagtttattctctaacatacatggcataagccgagttcagaagcgatatggtgtctataatataaatatcatacagcataaacccttcataatgccacagactaattgttcctatcatgtaccatcattcagactatgatgataaacagtatgactggccgtgcaataaactatagcggaaatgaacagaaatagcctcaagtgatgtatttcattaactagaattaacaaggccaatcctctgctaaataccaaaattgccctaaatccacttgaaaggatcacatgtcgtctcatattccttccctggtcaaattggtagtaagtcctactcccttttgttttcctcatcatcctcatcgaaagatgctacggaattcacgttctttgttgctttgtcttctggtgtagaagataaactccatccatttttggaagcactgggcgctggcctaattaatgatagattgtccttccggtcaaagaattcgcttccatcataagcaaatctcattgagttctgcgaaggtgcccacaggtagcaaatgacacaaagaagtgagaaagacaagacatgccagaaggcaggaataatccatgcgtattgccatcgttcattgaatacatctgttgatttgaagtaaatctcatagccaatccagccaacagacaccagaacagatacaatcaatgcaattgcgaatttcctataaatctcaagtttggccatcagccttcttgcctgaagtttaccaatggtcttagctagagaaatgaatatccaaataacaaaagcggcatctaaaatggccactggataaaccaagaaaagccgagcttttccagatagatcattcacagcaccaagattttctaccaattcaagagtttctgttgctagaaagaatgttcctccaagcatgaccacttttgatgtcaggccacccaaagtaggcgtgacaactccatatcccattgagacaatgagaacaataatttcagcagctgttctcttaacagtcccaaatgtgacagcccaaaatgtgatgccctttggccgaactccagtctcattgaattcggcatactcaaaataccataatgccatctccaacatacccagtgtaatcacgagagtaatgcagttttggagtggaagaacctctctccaggacttcatatactgatagaaccaatagatcccaagtacaacaaaagcaaaagacatgagtccaaagaagttcttcagaggtgccatccgacctggaaggtacccagtaggatttttccatatggttttcccctcgatctccaagtcagcaagtgatgggtcacagtgtataaagtacatattgtacatcccagttttggttattggaatggtccttgatggcagtgttgcaatcagatcacttccatcaaaagatgcaacaaacagctttggccaaccaggatttaa

SEQ ID NO: 25443 - DNA, 1131 bp, Setaria italica
  Peptide Sequence Number=SeqID_91417
ccccaccatgatgttcttcctcaaggtcagcccggccctcgccgccggctgcaccgtcgtcgtcaagcccgccgagcagacgccgctctccgcgcctctactacgcgcacctcgccaagctcgccggggttcccgacgggggtcatcaacgtcgtacccgggttcgggcacaccgccggcgccgccatcacctcccgacatggacgtcgacagcgtggctttcaccggatccacggagatcggtcgcctcatcatggagtcggccgcgaggagtaacctcaagacggtgtcgctggagcttggcggcaagtcgcccctcatcgtcttcgacgacgccgacgtcgacatggccgtcaacctgtcgcggctcgccatcttcttcaacaagggggaggtttgcgtggccggatcgcgcgtttatgtgcaggaagggatctacgacgagttcgtcaagaaggccgtggaggccgcgcagagctggaaggttggagacccgttcgatgtcaccaccaacatgggtcctcaggttgacaaggaacaatttgagaaggtgttgaagtacattgagcacggaaagagcgagggcgcgactctgctcaccggcggcaagcccgccgctgagaaagggtactacattgagcccaccatcttcgtcgatgtcacggatgacatgaaaatcgcgcaggaagagatcttcggccccgtcatgtccctcatgaagttcaagacggtcgacgaggtgatcgagaaggccaactgcaccaagtacgggctcgccgccgggatcgtgaccaagagcctggacatcgccaaccgggtgtcgcggtcggtgcgcgcgggcaccgtgtgggtcaactgctacttcgccttcgacccggacgcgccattcggcggctacaagatgagcggcttcggccgggaccaggggctcgccgccatggacaagtacctccaggtcaagagcgtcatcaccgcgctcccggactcgccgtggtactgatcggctgccactaccggccggcaccgatcgaccagtccatgtcttctttgtgcagtgtacaagcgtgctcacagctcagctgctgcttgcgttctcatctcggttgtgactgatgtattggataattattt

SEQ ID NO: 25444 - DNA, 640 bp, Setaria italica
  Peptide Sequence Number=SeqID_91418
ggtaccatgggctgccattttaggcaatcatgaccaagagtcaacaatgacccgagaggagttgatgatgttcatgtctctgatggattactcagtatctccaagtaaaccccccaggctttttggtacatgggtttggcaattatcatatcggcatccatgggccatttggatctgagttggtcaacactagcctgcttaacctttatttcctggatagtggggatcgtgaagtggtcaatggagttaaaacatatggatggatcaaagaatctcaacttgtctggcttcgtgctacttcactggagcttcagaaaactgtacttgcccctgcattagcgttcttccacatcccaattccagaggtccgagggctgtggcattcaggcttcaagggtcagtatcaggagggagtggcttgctcatctgtaaattccggcgtccttaacacccttgtctcgatgggagatgtaaaagccgtcttgcttggtcatgaccatcttaatgatttttgtggtaacctcgatgggatatggttctgttatggcggtggctttggttatcatgcctatggaagaccccattggccaaggagagctcgggtaatttacagtgaactcaagaaaggacagagatcgtg

SEQ ID NO: 25445 - DNA, 1533 bp, Setaria italica
  Peptide Sequence Number=SeqID_91419
tttttttttttttttcttaccgcaaatgcaaaccatcttaccaagaatcattaagctcaaagcatgaacgcaggtgcatccatatgaaaatttggtcatgctctactagaaaacattctatgagaaccttggaatacagccattgctggcaatatatgaatggaacatggtcaaaacatgagcactttgattttttgttgtcagtaacctatctatataattctgcagatgaacagcaacgaagagtactaaaaaaggactacatgataaagttgaagtcgttttaagctttgcttgatcttgttctcgtatcatcagcatactcgctatcttggatttcatctgagtcagcctgggtatctgggtttgcttctgtagccttgccttctgcagatgaaggggcatgactagtcccagccgtgctggtgtagttgctggcttccgtcatatttgccccagtatgcttttcaatcattccagaaatcgccaactttggagaccactccagaacatcatcaattatgttagaaaccttcttttggtacctggctctagctgcttcatctggagcatggtgcctaaggagcagtatcaccaatacagcaacaagagcatagaaaagtcttgatgtccactttggccgctccccttcatccttttcaggccaaaaacgaactagttctctaaacgtcgtctcctctgcatttatattggggaagaaccacacacgcttcccaagaagaacccataggatgccgaagatagcagctcttagcaaaagaatggagacgatgaaaagtagcgctccagcacatgagtaaagtacaacaatcttgcattggtatgggtaaactggaaataagcagactgccagtgcaaaaagaggccaaacaaatgaaagaattgtctgccacaaggtccgccttttgagaaacatccaagcaaagaaaccatcattttcagtaaacacttgttcattatgtatctccaaatgagcaggccatgatgacagctttttcttgccaggcctaacagttttcataactcggtcacatcttatcacaaggtccttggtcagcaaagtgttaacaatgtcctccacttctaaatctttgtccggccctaaaatttccctgacttctggatgattcttgatgaaggtagtgaaatcttttccacgaaaatactccactcgagtttcttgcatgattgcccatcttgattccagttgtttgttatccctaaccttctcggcaaacaattgataaacgtctttctttggagcagatttctcctgaggcgcggcgcgggaggagcgggagacggggccgccggccttcttccccttgtccttgtccgccgacttggccgccgtggccttggctcccttcccagccatctcgtcggagggaggcggaaccttaccccgacggagagcgccggatcggagcgcgaaccgggcggatctcacagccgattcgacgaaaattctgggggattggggacttgggctcccggctcccaaccctgctc

SEQ ID NO: 25446 - DNA, 463 bp, Setaria italica
  Peptide Sequence Number=SeqID_91420
gcgggccgggccatggcgacacggcggccggcgtccctgcacctgtgcgcctccgccgcgctgctcgtcgtcgccttctccttcctgacgcattcggcagacgcatacgatccactcgatccgaatggaaacataacaatcaagtgggatgtaatgcagtggactccagatggctacgtggctgttgtttcactttacaattaccagcagtatcgtcacatccaagcaccgggatggaaacttgggtgggtttgggcaaagaaggagataatctgggccatgaccggtggccaagcgactgagcaaggcgattgctccaaattcaaaagcaacatcccccattgctgcaggaaggatcctgagattgtggacctgcttcctggcacgccttataacatgcagatcgccaactgctgcaagggaggagtcctcaccgcatgggcgcaggaccctgaaaatgccg

SEQ ID NO: 25447 - DNA, 237 bp, Setaria italica
  Peptide Sequence Number=SeqID_91421
ggtgcttagcggggccgatgacgagctccatcaggatggagatcacggtgccgatgattatgaggatgagctcgaggtgccgcacgccgcgcaccgggaaccagaccggcgccgagtacgagctcggccgcagcaagaagaggcgggtgtggctgaacagctgccataggccgatgaggaggaagccggcgcccggcgcgacgtgcccgacgagggtgcccatggcgtgccgccgcg

SEQ ID NO: 25448 - DNA, 345 bp, Setaria italica
  Peptide Sequence Number=SeqID_91422
gcaatctgaaggcacgagacgaatcgaagcggggcgaggcaacctccccgcggtctcccggaggcggcggcggcaacgcctcggctgcctcgcctcgcggctgcgaccaccgggtgccgtccgccccgaattccatgggctcggggcctaaaccctagctcaggggcgcagagcctcgcgggcacgcagcgggatagctagggcgcgggtctgcgccagggggggagtacgcagcggcggcggcggcggcggcggctattgggtttgggtaggatttctgttttagcggtggccgcaggcgacgcggcggcgggaggagcgaggggggccgacgcggccgctcag

SEQ ID NO: 25449 - DNA, 539 bp, Setaria italica
  Peptide Sequence Number=SeqID_91423
attactaaccaaacaaacttacagaatcaggaaccttctgagctgaccaccagacaatctggcaatctggagtcagaacacgagcaaaagaaaacatacagatagccatcaaccagataactaagcaagcctacatacaatgatggcatcatggcaggggcaggccggcctaaccacgacctgtcgctggttaccacccttctaaattcgtcattactttgtccacatcatagtggccgtcgtctgcggtctcaccatagccagcattattcatgacggtcaggagggtggcaaagtcaggagcctggaggcgcgccacattctggaattgctccgagactttgttggtgctgtacttgttccccatcatgatcctgagtagtgtggtgggatcaggcgattcaaggttcaggatgctattgtaagcaaccttgccgatgttctcctcatcatcgttggtcgctacaacgggccaacagaagtctcctgcggggttgcttggcacctcactgccataggcgacctcacctacattggtt

SEQ ID NO: 25450 - DNA, 762 bp, Setaria italica
  Peptide Sequence Number=SeqID_91424
ggggaggtcttgggcgtcttgggcgggcgggcggcctcggctccggcgacgccctgctcgatgtcgccggcggcggcggcggcgcgcgggctgtaggacgtgccgaccacggcctgcttgccgaggctcaggagtcggcggatggagcggagccgggcggagaccggggaccgcatgtcgtcggcggttccgggcatccggctcgccggcagcggggagttcatgggcggggtgtttatggccacgccccgcgtcgggatgtcgatgaccaggttctccttccggcggcccgaggcggaggagctcgtggaggaggtgccggcgaagggggaggcagtgtcggcggcggcggcgcggcgaggccggcgttggtgacgtcgtcgtgggtgccccagaagaggacgttggtggggaagacggggaactcgacgggctcctcccttggcagggcgccgaggtcggcggcgacgggggcgcggcagagcgggcaggtgtcgtgggagtggaaccacatgtcgatgcactcgacgtggaagccgtgcgcgcacttgggaagcgtccgcaccttctcgccgtcggccacctcggacaggcacaccgcgcactcgagccgctccctctccttcccgggggaggcggccgcggcggtggcggatccgtagacggtgacggggagggagcggagggcggcggcgggcaggccgcgctgcgggagcggggaggcggcgacgaagacgaagcgcgaggacggcgtgccgggcg

SEQ ID NO: 25451 - DNA, 385 bp, Setaria italica
  Peptide Sequence Number=SeqID_91425
atgtgcttcatgtaagggcattctggatattttccggatgcctatatatatatgagagatggctggttggggtagccatccctttgcttgttttggtgggggttttctcatttgctttgtgagagcctttggcagagggagagaggtgtgagttgatctttttgtcatcctagtttggattgtgcttaggagtggctagtaaccgaacatggtggagtaatccaaagatcaattttatgccatattgttccatcctctttgaatctaaaatttatctttctcggtattttggaggtatttttggggattttgcgttcttcgcgtttgagcccaaatcccgtgagatttgttaggagaaattgttgctatgacccgtgtgagcatc

SEQ ID NO: 25452 - DNA, 333 bp, Setaria italica
  Peptide Sequence Number=SeqID_91426
aggtgttattgtcgtgacgagttgattgccggttacacagtcacacactatgggaaaggtaatgcttgtagttgtttctagcttaatctttgaatttaagacttattaggttatttagtgcatgtggtttaccgaattagaatatggttttaccaaattgtaaatggttttatcgaattgcataagatttttttcagcataccctgtggtaaaattctagctccgccactgcataccgcggcggtgtatgtgcagtcattgcataaatgtgtcggcggcgtctctggttccacgttgtatagcttgtaaatcggattgtttggccaacccctt

SEQ ID NO: 25453 - DNA, 567 bp, Setaria italica
  misc_feature (541)..(567): n is a, c, g, or t
  Peptide Sequence Number=SeqID_91427
gctgcttccgagtttcgacagaagactcgggagccacgacgcgccgccgccgccgccgccggagatccagtgactacctccgcataaaagaagatgccttcacttcagaaagctttgcctcctgaacttgctgataatgtgctcaggttatatcgtgaatgtttaaggagggcgaagtttattgggcatcagaaacacaacacagagcttttagttaccatggtaagggaacagttcaagaaaaacatgcatgaaactgatccagaaaagatacagaaaatgaaggacgatgctgcaaggggccttatcaatcatattctgtatgagtccgaaaagataactgggcgcaaattttcaggataagaaagaaagttgagacaagacttgcaccatgctttatgaataataataagctagttgtcgtgtctgttgaattatttcacctctccggtacaaggacctgcaaatgtttccctttgattgttgggcacatgagttattacagcaatgaatttttattagccatagtcaaactaatggnnnnnnnnnnnnnnnnnnnnnnnnnnn

SEQ ID NO: 25454 - DNA, 694 bp, Setaria italica
  Peptide Sequence Number=SeqID_91428
gccgcgcaatgcctgcagcggctacccgccggctcctcgtccgccagccccggcggtagcggcgcgccagctcggttcagctactcctgcgaccggcacacgtacagcttcctcctccaccgcggctacgcctattgtgtagttgcgaaggaatccgttccaaagaatgtttcggtggcctttcttgagaggttaaaagatgacttcatgaagagatatggaggtggtaaagctgatacagctcttgcaaaaagtctaaataaagaatatgggccagttataaagcaacacattcagtatgttcttgaacattcagaggaactagacaaaactttgaaagtgcaagcccaagtttcagaagttaaaaatatcatgttagacaatatagaaaagacattgggccgtggagaaacattgagtgaactccaagacaagacttctgatctacgtagtcaggcacaggagttcaagaaacaaggggtgaaaattcgtaggaagacttggttgcagaacatgaagattaagttggtgattctgggaatccttttgcttctcgtagtgatcgtctgggtgtccgtgtgtcaaggctttgactgcacgaagcatgaaacataataagaacagtacagcactactatgtcggtacacttgatttcaccagcacgaattcacgttcagttgactcctagctacc

SEQ ID NO: 25455 - DNA, 252 bp, Setaria italica
  Peptide Sequence Number=SeqID_91429
gaacctctcatcaatcaccatgcctagtcgctttgcatcactcatgatgcacagcatgattttcagactcctctttggacttgtccttgccctattcctacaatccttatcagtgctagccaatccattagaattaggactacaatcctcatcatcagggctacccaatccatcggggctgagggttggattttaccagtacacatgtccgaatgcggaggccattgttcgtgatgagatgaccaagatcat

SEQ ID NO: 25456 - DNA, 825 bp, Setaria italica
  Peptide Sequence Number=SeqID_91430
aaggggatccggagcttcgaccccgacaacaagaacgtcatcaccttcttcaagcccctcaccctcatcgtcggccccaacggcgccggcaagacaacaatcatcgagtgcctgaagctgtcctgcaccggcgagctgccacccaactcccgctccggccacaccttcgtccacgaccccaaggtagctggagagacggaaacaaaagggcagattaagctgcggtttaagacagcggcaggaaaggatgtggtgtgcatccgatccttccagcttacccaaaaggcatcaaagatggagtttaaggcaattgaaagtgttctccagactataaatccacacacgggcgagaaggtctgtctcagctacagatgtgctgacatggatagagagattccagccttaatgggtgtttcaaaggctgtactggagaatgttatatttgtgcaccaagatgagtcgaattggccattgcaggacccttcaacgcttaagaagaagtttgatgacattttctctgcgacccgctataccaaagctctagaagtcataaagaaacttcacaaggatcaagctcaagagatcaagacttttaggttgaagctggagaatcttcagactgtaaaagatcaagcatttaagcttcgtgaaaatattgctcaagatctagagaagtcagatgcctcaaaatctcaaatggagcaactgaaggaaaaaatccaaggtatcgagaatgaaatgaagcatatgaaaacaagtctggatgaattgagaagacttcaggggcaaattagcaccaaagcagcggagagaagtacattattt

SEQ ID NO: 25457 - DNA, 271 bp, Setaria italica
  Peptide Sequence Number=SeqID_91431
ctacgtatcattaccacatgatacgataagcgtaccaaggtcaaagagactccccatagaaccttctcacgattaaccacagccacgaacagagacaagaaacctacaaggaaggcgaaagaattcctcaaacgagctacaccttgacgaaacagcgcaataaaccgccgaataacaggcgcgtacagaacagatccggctccttcaacaaaccaagaccgagccggctacacaacaaagaaatgcatccgattcggaaggctaaggagag

SEQ ID NO: 25458 - DNA, 379 bp, Setaria italica
  Peptide Sequence Number=SeqID_91432
acccctgcgcctggaacggcgtcgcgtgctcctcctcctccaccgacgccaccccagccccgccgcgtcgtcgcgctctccctccccaagaagcgcctcgtcgcggcgctcccggcggcgccgctcccgtcctcgctgcgccacctcaacctccgcagcaaccgcctcttcggcccagtcccgcccgagctcgtctccggcgcgcccgcgctccagagcctcgttctctacgggaacgcgctcaacggcccgctccccgaggagctcggccgcctggccttcctccagatcctcgacctctcctccaacgccctcaacggctccctcccggcctcgatcctcaaatgccgccggctccgcgcgctcggcgtcttcgtcg

SEQ ID NO: 25459 - DNA, 476 bp, Setaria italica
  Peptide Sequence Number=SeqID_91433
tggcagtcttgccatctgcccagtacaatgttgcaccacaagcaagaataacgccagcttggttcttgacaggatgaccctgagcaataacagtctcgggaagctcataatcaacagcccacaagatcgagcgtatgcagtaccatccaacatcaccgagcacacccagggcatcaaggtctggttttaccctgatgtcattctggagaaaatattcggatgcccgaaatccacgcatactgtgtatcactctgacgtcgccgaaggcgtccttgtcggcgacgatctcccgcatcttggcggtgcgcgggtttgttggattccactatttgtggtgtccatgaactggacccccgaggcgtcgcaggcgtcgaggatggcgtcgaggtcggcggcgcacagcgcggtgggcttctcgaggagcaggtgcttgccccgcgcggcggcggccgtggcccagggtctacgttggtagt

SEQ ID NO: 25460 - DNA, 305 bp, Setaria italica
  Peptide Sequence Number=SeqID_91434
ttcctgtccttacgtagctccacgtactacacctcgaccgatctcgtcggccgcaatggcggtccgcggcggcgccgtcgccgtcctgctggtggtggcgctagcgctgtcgtgtgacgcagcctcggcgcagttcctgaagaaaaagcccaagcagcaaccccagacgtcgaagccggggaaccccaagcagttgcctcccaaaggcaagtacaccaccgtcaaagccaacaagtaccacaagcgcgactacgagatcacctgcaccaccgactttggcgccgcctgctacgtcaagtgccccg

SEQ ID NO: 25461 - DNA, 295 bp, Setaria italica
  Peptide Sequence Number=SeqID_91435
caacagtacagttcgattcatcaggcaactcgatcaagcaagcatctctgattctctgatcccttttctcgaatccatccttctctgttcttcggggagcccgcgctcagctcgtcggcgagatggcgtacatgcgcgtgacgcaccgcgatgaggagggcaagaaggtgacggagaagatgcccatcccggagacgcgccgcccggacaccgccaagcacttcgagcgcaagctggaggaacagggcttccaccgcctcgagcgccaccccgccaacgcgccccgcggcgtcgg

SEQ ID NO: 25462 - DNA, 477 bp, Setaria italica
  Peptide Sequence Number=SeqID_91436
agactacgaaaatacgaataccaaatcgaacttcttcttcttggccaaaatccgccattgcttcgacctctgatccgtttgtttgcttcctccatggccacgaggagggcggggtgggggtaaagctcacacgtgcgacggggattgaaacgccgccgccgtgcagcccctgggtcgcgcctgctgcaagcggacgaccggcgggtcaagcagggccggcaaagggctaaccgacgagcggaggggctgcgggcaggggtccatctccttccatggtagcgccggcggctggcggagagggcgcgggcggcgagcgtggaagactccgagcagaagcggagcagttggccttcccgcgggagtattgcaagttttaccaatcgagcgtttttttttaagatagtaatccatataacaaagctgctggagcagttttttaaggtgtttttaagtatatcctgacagttttcagggata

SEQ ID NO: 25463 - DNA, 500 bp, Setaria italica
  Peptide Sequence Number=SeqID_91437
accagaaggtggttacaggcaattcttaaacatagatggactaagagcgagaaggttgggaattactcaggaaggatttctttcggtttccttctggctctgtccaacaaaaggtcttcagtgagcacttcaacattatgagtaaaattggtgccgtcctggtggacaatcttgagataccaagcatggatgtcattaacgatgctgtgcaaagtggcgaacgtgcacttatgcttgccgaattcaagctgtccctcaactactacttatctgagctggccacttcacctgttagatcattatctgacataatcgacttcaacaacaagcaccgtatcgaggaaaggatggctgaatttggtcaagattacttgatacaatctgaagcgacaaatggcattggtccaaccgagaagcacgccattgccagattgaacaaactgtgtaaaagaggcatcgagaaagtaatgcaagataataaactggatgctattgtagct

SEQ ID NO: 25464 - DNA, 493 bp, Setaria italica
  Peptide Sequence Number=SeqID_91438
aggacctcccgttgttcaactccctcctcgacgctctagtaaagtcgcggcatgtgggcaaggctgcttccctcgtccgtgccctcgagcggcggttcccgcctgacgctgtcacgttcaacatcctggccgacggatggtgcagcgtcaaggacacctcccgtgcgctcgacatcctgctgcagatggtcgaatcagggattgctccaacgaaagccacatataacattatcctcaaaggcttcttccgttctggacaattgcggcacgcatgggacttcttccttcagatgaagaagagaggcatcaacgacgagaacggtaagcctgacgtcgtgtcgtacactaccgtactgcacgggcttggtgttgccgggcagctagaaaaagctcgcaaagtgttcgatgaaatgtctaaagaaggatgcccaccatcaacggcaacttataatgcattaattcaggctatctgtaagaagggcaatgtggagga

SEQ ID NO: 25465 - DNA, 290 bp, Setaria italica
  Peptide Sequence Number=SeqID_91439
ccaaggcgcggttccacgaccagggcgacgtgcacgacatcgccatcgagtgcggcggcggcggtggcggcgagggcggggacgccgccgacatggagatgagcatcgccatcgacggcgaggaggcggtgcaggtgaagcacctgcagtggaagttccggggcaaccagtcggtcaccttcagccgggccaaggtggaggtctactgggacgtgcacgactggctcttcagcgccggcacgcggccggcgctcttcatcttccggccgatcgtgctgtccagcgcgtcg

SEQ ID NO: 25466 - DNA, 159 bp, Setaria italica
  Peptide Sequence Number=SeqID_91440
cgcgcgtgcgtgttttagagcggatatgaataacgtgcttcccttggtgacgattggcgacctgatacaatggttgaatgtcatgacgacatcttaagcagctagcatggcatgcaatagaagcaaaatcgatctttccgtgtacttttaaaaaaaaaa

SEQ ID NO: 25467 - DNA, 221 bp, Setaria italica
  Peptide Sequence Number=SeqID_91441
agcggaatccggcggcggcgggccctcgttcgtcctcgacacctccaacgccccgacgacccgtcatccaatatcccctacggcctcaccctccgcaacggtgccaccgaggccgccgctgtcaaggaaccggagaaggcgctgccaccgccaccgcctccagctcctccggccgccgctgatgctgcgccggccggggacctcatgttgcggcggtacaa

SEQ ID NO: 25468 - DNA, 746 bp, Setaria italica
  Peptide Sequence Number=SeqID_91442
gtcacttacatacataaacatcaaggtagtacacatgcatgtcaacttttctaacactctaccaaccactagaagtactatacacaactttactacataacactctgtacatatataagggcccatgggtacagcaaaatctgggctctgctacttgatgcgcacaatccggcctcctcgccatcgttgaacgaagcatcatccctgacactcttaagtttgtttctggcaccactggatcgtcctctgtttcttggtctatggttccccggaacttctctgctccaagatggtcctgtatgtctgaacttgtgcctggacaattcttggccaaattgtgtcgagctttgttggacatgcaccaattcgatgacaagatatgtgacgttagcaggtccatcagcggttaacgatggccatcggtaagttctttgattgtccatccatcaatccatcataatgtggaagtttgctggtcccattccatagcgatgtcctgcgcaaccttgacggcgtcggaggagacgccggagaggcctctcctggtgaagccaacagagtagagccctgactcccctttccagccgtctgggaacggcaccctggggtacccttcctgggtgaagaagtcacttcccttgagccactgagggacgttgctgtggtagccggtggcgaggataaccgcgtcggcggcgacgcggcggccgtcgacgagctcggcgccgccgcggaagaacctcttg

SEQ ID NO: 25469 - DNA, 497 bp, Setaria italica
  Peptide Sequence Number=SeqID_91443
taccccaaaaaaaaggaaagcaatggacaatcgggtcacttattggcctctgcgtcgaccattccaggagctgcactgcacatcccaattgatttgtccttgcacgagtgcaaaagctgatgctttcctgatctctgaacgtgtgtccagccggcaggcgggtgcagattcagctctcgagcggtcaagccgtcaccgagagaaagccgtccggctgaagcacgccgagtcgccgatcccctggggatgcatgcgcgcggaagggctgctctgctccgcgccgctcggttcggcgaacaactgcgacgcgccgccggtgaagaaggcggtgggctcgggttgatgaggggcggcgaaatcctggatcatcccgtccagcatggattggagctcacccaggctgtacacgggctcctccctccccacggtggccatgagcgagatcatctcctgaaggaagtcatggaatcctccacgtcctcctggtcgttcgtcga

SEQ ID NO: 25470 - DNA, 489 bp, Setaria italica
  Peptide Sequence Number=SeqID_91444
atgcagcaacagcagcacaccaatttaactctgtgctcctctccagtaaggaaatggcttgtgaaaacctcgagttacagcaaaggcaatttaaaataatactcaaagtaaaagctgtaggatacaacccttcaccttgcatgtcctcgaactgctgaagtgcttccttagccatacctttcttgctaagagcatccatatatatattataggtaactgtattgggcttctggcccttcattttaatctctgctaacacctgcttgacttcatcaaatctggcatcatcacacagtgccctgatcagaacattgtaagtgacagcattgggaggacaaccagaatcctccataaagtcaatcagcttcctagcctcctcgatacggccctcacgacaataaccctgaacaatgggcgtatacgtgtgcaccatcgggcagcacccctcctgtaacatccaatcaagcacgccccacgcctcgtcaagct

SEQ ID NO: 25471 - DNA, 570 bp, Setaria italica
  Peptide Sequence Number=SeqID_91445
catcccctgccaaggctttgattcatctgcaaagtcacagatatggagcattcacaagtagactttgtggcgatcaattcaagttctttgtagtatatccaaagcgacaagtttagagttgtcgggtgttgggacaaatagttgctcgctaaggaacccacattcctggaattcaagaacctgaggaacttattgcttgacaactgtgatctcagtgacgactgccatacattggcattctttcttcagagttcacctattctggagaagctcactttgcggcactgccaggacacaccatggagcttgaggaggccgcaacggagcgtgccctcgcaagcagcggcggcggaagctctggtggcgagccggaccggctgagctccttgccggacagtctcctccacgccatcatgtcctttctgaaggcccggcaggcggtgcagacgtgcgtgctgtccacgcgctggaggcacctctggcgctccgtgccgtgcctggacgtcgaccacgatgagttcaggactgcggcaggaagtgctcccaacaaccaccccgcccccgtcccct

SEQ ID NO: 25472 - DNA, 278 bp, Setaria italica
  Peptide Sequence Number=SeqID_91446
aacaggatgccgctcagcatccccagttgcgagaaggagtagggcagggtcaggagcacctgagctacctggttggaggcgcagctgaaccaggcatcgtaggccgagccgccgtgccagaggaggccggagaggcgcgacttgacggtgttggagtcgccgtcctgctccatctccacgtaccggccgacgccgaccgtctccggcgccttctcgttggcgaggctcccattggcctccgagtccatgacctctctcagctagattcctaacactcg

SEQ ID NO: 25473 - DNA, 410 bp, Setaria italica
  Peptide Sequence Number=SeqID_91447
tcgggtggtggggtggaaaaggcaacgcggcagcggcggctcgaggatatcttgttacggcagggacggaacctgggccgccgtttcgtgatactatgtggcgtcctagggaaggagaggagaggaggcttgtatattacaaggcgaccaaaacctaagcaattaacacgggctgcgaagcgacgtgccggccgggagagaggggggggggcggctccttgcgacgcctccggccggcgctgccgccacgtacgcacgcggcgcacgggggcgctctagtggtgcggcaacggcgccggtgactgcgccgcagccgggacgggcggcttggggcactggtagcacttggcgaagagcccgaacgtgtcgatctgccggatgaagttgaccatgctggcccagccgccgag

SEQ ID NO: 25474 - DNA, 554 bp, Setaria italica
  Peptide Sequence Number=SeqID_91448
gtgccagaggaagcgcttcatgtttgaacccgccgccgccgtggtgctcgtcgccgtcgcctgcggtgccgatgcccatgaccccgacctcctcctccttgccgttgccgtcggccacgatggactcctccagctgctcgcgcgccatcctgaagcgcccggccttcccgtctccggccgctgcttttggcagggaaagattttgaagatcgcggcgaggccggcggagggcgagtggtgtgcagtaaatgcagggtggctttcggaagggaagggaatggaatgctcggaatttactgtgctatcgacggggaggctctgttcgcctacaaggggggcgggctagcgtggtggccgcgccgcgcggttagcaggcgtcgtcgtgccggagttgcagagcagagagctgggattacggggcctcttctctcctttcccggcacggcttcttcctcgcagctcctgctctgttctacctttatgagggagtaatggcgaggggctagagaaggggggcgcgcgcgcaacaggtgtgggctatcactcggaggtga

SEQ ID NO: 25475 - DNA, 602 bp, Setaria italica
  Peptide Sequence Number=SeqID_91449
atgaagacggtggtggcgcagcaggcgccgaagatgtaggtccaggtccgcttgtcgagccggtcgttgacgtagtagatgttgctggcgcagccgatgagctggatcaccgacccgaagagcaggaaggtgcagttgaaggcgagcccggcgttgcgccagtgccggccaaggaggccgtccagcacctcgaaccactggatcacgtggttccggaagtccaccttgtcgcgctcccgacgggtgcggtactccaggtacaggatgctgatcaggtacgccgtccagctgcccagcaggccgtagaagacctgcagcagcacgccgctcaccatacccagctgcgcgaacgagtagggcagcgtcagcagcacctgtgccacctggttggaggcgcagctgaaccaggcgtcgtagacggagccaccgtgccacaggaggctcttgaggccgaacccgccgtcgcgctgctgctgctgctcggcgtcgtcgccgatgcccatcgcgcgcacctcccgtccttgctgttcccggcgtccgccacgatggcgtcctccgccagctcgcccggcaccatcctccctgctcccgccgccgccgca

SEQ ID NO: 25476 - DNA, 568 bp, Setaria italica
  Peptide Sequence Number=SeqID_91450
gcatgtgggcgagggcggggatgacgtagacggtgaagctgacgaggagcgcgccgacggcggagttgatgggcccgaagaaggggaagatgatggcgaggaaccagatggggacgacgatggggaggcggaccagcgcgcggaggcacacgctgcgggtctcgtgcatgcccaccaccttctcccacacgaagtagagcggggtgcacgcgaacccgaacgtgatgaactggtggatcagcatcaggatcaccgccgcgtcgcgccaccccgtcctcggcagcagcgagaaggcgttcgagtgcgtcagcagctggtcgccgaacgcccagtacatggccgccgcggacggcagcgtcagcgtgaacacgtacagcgtcgcaagcaggtagatgtacttgaacttccgaggcttccacatcgcgtgcatgatctcgacagtgaccgcatggccgccgaaagtgtagaggatgttggtggcgccggtgaagtagagcacgagcttgttcgggcccgaagtagtagtagaacgaccgtacgaattacttagtaccgttaggtaacggta

SEQ ID NO: 25477 - DNA, 820 bp, Setaria italica
  Peptide Sequence Number=SeqID_91451
gaaaaaaagccacaccaaccgatgcatcaaatcaaatccacgcgacagaacgcaaagtccagcacggtatccctattccctagtcaatgaactcaagctgctccactatttgtttgtagtcactctaggacggtttgtgtacagcaaggcgcccgggaaccagcagatccaaaggctcctctcgcaccgaggaggtctctctgttttttgggacccgtcggcacgacaaagcccttggcagttggcactcgcctcgccccgctccttagtggtgcggcggcgccggcagcggcgacccggcgtgcggcttcggcgggcactggtagcacctggcgaagagcccgaacgtgtcgatctgcttgacgaagttggtgacgctagcccagccgccgagcccgaatccgacgacgagcacccacgccaccacgaagcagttgaccacgtacatgcccgcccaccctccgacccagcgcggcggccgctcgacggcgttctccctcgacgccgccggcgcgaagacggccatgtgcgccagcgccgggatgatgtagacggtgaagctgaccagcagcgaccccaccgtggagttgatgggcccgaagaaggggaagatgatggcgaggaaccagatggggagcacgatgggcagcctcgccgccgcccggagcgccaggctacgggactcgtgcacgccgacgagcttctcccagacgaagtagagcggcgtgcaggcgaagccgaaggtgatgaactggtggacgagcatgaggacgacggcggccgttcgtcggtaagtccggtagtcgtcgggtaggtaggt

SEQ ID NO: 25478 - DNA, 588 bp, Setaria italica
  Peptide Sequence Number=SeqID_91452
aacgcggtgtaggtggtcatgaggaggccgaggaaagaccagatccggtagttgtggaaggaggggatgaagacggtggtggcgcagcaggcgccgaagatgtacgtccacgtccgcttgtcgtacttgtcgttgatgtagtagatgttgctcgcacatgcgatgagctggatgacggagccgaagaggaggaaagtgcagttgaagaagaggcccatgttcctccaatgcttccccagcagcccgtcaagcacctcaaaccactggatgacatggttcctgaagtcgaccttctcccgttccttccttgttcggtactcgacgtagaggacgctgatgaggtatgccgtccagctgcccatgaggccgtagaagagctggaagacgatcccggacgccatgcccagctgcgagaaggagtagggcagcgtcagcagcacctgcgccacctggttcgacgcgcagctgaaccacgcgtcgtacaccgacccgccgtgccagaacaggctcgacagcgccttgttgccgccccttctcgacgtcgccgccgacgccgcttctctccgccgcctccggcgtcgccgccga

SEQ ID NO: 25479 - DNA, 2288 bp, Setaria italica
  Peptide Sequence Number=SeqID_91453
ttttttttgggcaataaacaaaggccactgtgttttgcctttagctagcatgaggaatcgtccagtccattacaattacccacacgctacacaacatggaccaagctccatgaatcaagggaggagtagaatagaaagaagaaaaaataactaaaaaaatcctataggataagtatgtcatatcatatggattgtggaatcgtcactctcgctctcggctcgtgagatcgagaatgagagcctttaagccatgaccatcactcacacttacacgggtggcaagccaaacaaaaaacacaaggacaccaatggcgacggaccgatcgggtggtggggtggaaaaggcaacgcggcagcggcggctcgaggatatcttgttacggcagggacggaacctgggccgccgtttcgtgatactatgtggcgtcctagggaaggagaggagaggaggcttgtatattacaaggcgaccaaaacctaagcaattaacacgggctgcgaagcgacgtgccggccgggagagaggggggggggcctccttgcgacgcctccggccggcgctgccgccacgtacgcacgcggcgcacgggggtttcgggaagtattggtcgtttggtagttggttcctaggagcgttgtccgaggaggtctctctgcgacgcctccggccggcgctgccgccacgtacgcacgcggcgcacgggggcgctctagtggtgcggcaacggcgccggtgactgcgccgcagccgggacgggcggcttggggcactggtagcacttggcgaagagcccgaacgtgtcgatctgccggatgaagttgaccatgctggcccagccgccgagcccgaagccgaccaccagcacccacaccacgatgaacatgttcaacacgaacatccccgtccagctcggcaggaagaacggtggcttctccgcagcattcatgcgcgcggaggccgtgcggtaggtgaggatgtgcgcgagcgacgggatgatgtagacggtgaagctgacgagcagggcgccgacggcggagttgatgggcccgaagaaggggaagatgatggcgaggaaccagatgggcaccacgatggggagccgcgccagcgcgcgcttgaagatgctcttggtgtcgtgcatcccgatcaccttctcccacacgaagtagagcggcgtgcacgcgaacccgaacgtgatgaactggtggatcagcatcaggatcaccgccgcgtcgcgccacgccgtcttgggcagcagcgagaaggcgttcgagtggttcaggagctcgtcgccgaacgcccagtacatggccgccgcagacggcagcgtcagcgtgaacacgtacagcgtcgccagcaggtagatgtacttgaacttcggaggcttccacatcgcgtgcatgatctcgactgtgacggcgtggccgccgaaggtgtagaggatgttggtggcgccggtgaagtagagcacgagcttggttgggccggtgtgcgcgacgccttcgacctggccgttcaggagcgcggcgatggcgaggtaccacgcggtgtaggtggtcatgccgaggcccaggaaggaccagatccggtagttgtggaaggaggggatgaacaccgtggtggcgcagcaggcgccgaagatgtacgtccatgtccgcttgtccagccggtcgttgatgtagtagatgttgctcgcgcaggcgatcagctggatgacggagccgaagagcaggaacgtgcagttgaaggccagaccggccgccttccagtacgggcccagcagcccgtccagcacctcgaaccactggatgacgtggttcttgaagctgacgccctccttctccttgcgggagcggtactcgacgtagaggacactgatgaggtaggccgtccagctgcccaagaagccgtagaagatctgcagcagcacgccggacagcatccccagctgcgagaaggagtacggcagagtcaggagcacctgcgccacctggttggaggcgcagctgaaccatgcgtcccagacggagccgccgtgccagaggaagcgcttcatgttgaacccgccgccgccgtggtgctcgtcgccgtcgccggcggtgccgatgcccatgaccccgacctcctcctccttgccgttgccgtcggccacgatggactcctccagctgctcgcgcgccatcctgaagcgcccggccttcgaccacccgattgtacgttagtacggttgtaagtcttgttaacgttaaggttaagtttacgtttacgtttaccgtttaacggttta

SEQ ID NO: 25480 - DNA, 346 bp, Setaria italica
  Peptide Sequence Number=SeqID_91454
aaggccccaaggttccccaattggccaaccttaaggggcccccgacctaccgtacgacgtcgtacgtagtgggcctagtgcatggactggctatcgtttacctcgttgctcttacctttcttcttttccaggtttatctacatatgcggttcagttggataactattctgttggcatcctttcttattgtccaaatgaattgattaatttgagtacttcagcgtgaagggcatcttggctaactaatctccggctcttgtttgccgctgaattttccagaatcgtgacgatgctcgccagttcatgaaacaacttcaccctgatcttggagtcgaattgccggaga

SEQ ID NO: 25481 - DNA, 418 bp, Setaria italica
  misc_feature (19)..(19): n is a, c, g, or t
  Peptide Sequence Number=SeqID_91455
gctgcacgacagacaggcntaaagcctaaaacagccgtgctaaccttgcatatgtagagcttccacatgaggaagtgaaatccagcacagatcaacacagttggaggaaaaagcgctgtctggccgattggcatatgttgggaaatacattggatatccccttaccagggaactttactaaagaaaaagggtgtacgatagcactaaatactataccaagttgccctccatcggtgaaatttgttcagccttcgtattccaaacgaacaaaacagaattatagaaattaaggtgataaataccaagtgagtgatgtataccccttgcacatagaatcgacgaatcatcaactctatggaggaaatgacaacacaatacaatgctaagtgcatctctcgactcctagagttgattgatt

SEQ ID NO: 25482 - DNA, 476 bp, Setaria italica
  Peptide Sequence Number=SeqID_91456
atcatactgctctccgctcaatccaattacacaacatgtatccggagaaactgacagccacgtccataattcttgcgcaacagcgcaaggcatgctcttgctctttctgaggtttgggccgcatcattagcataaagctgaaactaaattgtacaaataaccaacagagaaaccatcattagcattttaaataaagaatgtcagactataaagctgcatgtttgcaaatctcaccactgcaatcaagcatcattcatgtgttcacctgctcggtgatattggtagtcgccttcctcatatgcctctccttcctcaggcccttcaggttcagcattgttaggctgcacctgataattggtttccattttactgtacgaatcaacacgataatactcctgatcatgccgcttcgagtgctcagtttcatgcccccgtcgtctcgccgcctccttcccaatcctcatcctcgctgcccc

SEQ ID NO: 25483 - DNA, 424 bp, Setaria italica
  Peptide Sequence Number=SeqID_91457
acagtaaaatggaaaccaattatcaggtgcagcctaacaatgctgaacctgataattggtttccatttactgtacgaatcaacacgataatactcctgatcatgccgcttcgagtgctcagtttcatgcccacgtccatcttgaccataaccatatgcctcatgacctttgtgttgctcatactgaccatagccataatcctgcccgtaaatggacagatttttgtcatgctttggcccaccattgccatagtccgcatccctctcatgcctgtggccacggtcacgttcgtgactggtgcgctcataatctctttcaccacgatccctgcccctctcacgatggcgatcatgagagcgagcccggtccgtttctctttcattagttctattggttcgttgtattcgttgtattcgttcgttgt

SEQ ID NO: 25484 - DNA, 356 bp, Setaria italica
  Peptide Sequence Number=SeqID_91458
tagtcacggccgcgatccctgtccctgtctctgtcacgacgatcacgatcacgaccatgctctctttcccggtcctttcctctctccctgtccctagtcctctcacggtctctatggtgatgcttctcttctcgtgaatcacgatcacgagtccggtcatgtgaacgctcacgggctctttcatcacggtctctttcccgtaccctttcacgggacttctcccgatccctatcagcacgtcgatcatccctcctaggctcttctgatctgggacgcccaccctgctgcttcgctgtctgtcggcaaagcccttcaccacatctgaatctcactgttcttaccttacccttattctt

SEQ ID NO: 25485 - DNA, 1194 bp, Setaria italica
  Peptide Sequence Number=SeqID_91459
tttcccgtaccctttccacggactctcccgatccctatcagcacgtcgatccatccctcctaggctcttctgatctgggacgccaccctgctgctgctccctagcagaacctttttatcagtctctgcaccacccatcctgcttgatcccagtccaccacccaatctcctgggacgccaattcggaacagttctgccacgctcaacatcaactaatacccttttattgtccacttttctcccatctgcctgcttgtaggcatttttcatgtcccgtgtgtgcatgtactctatgaaagcatatcctctaggtttacttgtatccttctcagttacaagccgaacctgcaaagatcaaataaatcaagttaagttcaataagttgcactgaactagagaagatgatgtgttagttgtcattgtgtttgttgtttgtctatttttagcatattctacgctgcacgacagacaggcataaagcctaaaacagccgtgctaaccttgcatatgtagagcttccacatgaggagtgaaatccagcacagatcaacacagttggaggaaaaagcgctgtctggccgattggcatatgttgggaaatacattggatatccccttaccagggaactttactaaagaaaaagggtgtacgatagcactaaatactataccaagttgccctccatcggtgaaatttgttcagccttcgtattccaaacgaacaaaacagaattatagaaattaaggtgataaataccaagtgagtgatgtataccccttgcacatagaatcgacgaatcatcaactctaggagtcgagagatgcacttagcattgtattgtgttgtcatttcctccatagaagcagaatttggcagtagcactagctttaacagctcaatgaaagtaactacaatactatactcaccaacgaacctacctattaagcccagaatgtcgaaacccctgcctgcagacaagctgctttttaaaaaatacaaagtgatctatgcttgtgccagtcagcatttttcaagcttgtttaccccagttaattattatgggaaatgcaagtttgtggaatgaaaaataactcaacctcttacaacctttgttaggagcaaatttcttgaggtggagatcaaaccatttgctcctaacaaaggttgtaagaggtggaatgaaaataactcaac

SEQ ID NO: 25486 - DNA, 2471 bp, Setaria italica
  Peptide Sequence Number=SeqID_91460
ctgatctgggacgccaccctgctgctgctccctagcagaatccctttttatcagtctctgcaccacccatcctgcttgatcccagtccaccacccaatctcctgggacgccaattcggaacagttctgccacgctcaacatcaactaatacccttttattgtccacttttctcccatctgcctgcttgtaggcatttttcatgtcccgtgtgtgcatgtactctatgaaagcatatcctctaggtttacttgtatccttctcagttacaagccgaaccttgcatatgtagagcttccacatgaggagtgaaatccagcacagatcaacacagttggaggaaaaagcgctgtctggccgattggcatatgttgggaaatacattggatatccccttaccagggaactttactaaagaaaaagggtgtacgatagcactaaatactataccaagttgccctccatcggtgaaatttgttcagccttcgtattccaaacgaacaaaacagaattatagaaattaaggtgataaataccaagtgagtgatgtataccccttgcacatagaatcgacgaatcatcaactctaggagtcgagagatgcacttagcattgtattgtgttgtcatttcctccatagaagcagaatttggcagtagcactagctttaacagctcaatgaaagtaactacaaatactatactcaccaacgaacctacctattaagcccagaatgtcgaaacccctgcctgcagacaagctgctttttaaaaaatacaaagtgatctatgcttgtgccagtcagcatttttcaagcttgtttaccccagttaattattatgggaaatgcaagtttgtggaatgaaaaataactcaacctcttacaacctttgttaggagcaaatggtttgatctccacctcaagaaatttctcaacaaaagaaaaataattatactaggaaaaagagcacctgggccacacacaggttcagccaatgttacctgtttatgcatatttgtgttccaagagatgccttgtcaataattggttgtaccaaccatgcacgcattaaactggcttaccaaatattcagagcaaaagactactaaagtaccagaaagcatacatgtatgcctgaaccccatataacttatccattcaaatgtatcccccatctaacccccagaaggtatacaggtggcatacaaagagattgttgggaccttcttatctcgcatagatgattgatatttccttaacaaaacaactggcaagagttactacacacagacaccccttacaaccaacttgtcagatgttttatatacctcgataatcttaaaatttggcattaatctgattaattgtttaaaactattgaaaatattggatgctaaaactatattcatatattaaaatattagtgaaatgaagtacagaaagtatccaaaaaaagttaccagggaagaatttgagaccaaacgggatgtgctcccatgcgtgaacagagcaaataagtcgaaagtcgttgactacgaaaactagagttcaaccaaaatataaatgctatgtttaccaaacaatttgaccaaaaatacagaaaaaggtgcttcccaattttcataaaaaacatttgcatggaaagttttagaaccctcagagaaaacaaagaagtgcagcttttagaagattctagatcagaaatgggagcaacagagtgatataatgaccccagatgtcgcaaacacttgtcagaggaacttaaaggaagccacataccagtgaggcaacgttttccccacagttttggccaatcatggtttgcattttaataattgaaataccttaccaaagtgcaataacttctcctgcacaggaatttaccatatgtacttacccttttaataggcccataagcttcaaactcccgtttgatcttgttctcagacgtctcataattaagtcttgcaacaaagagcgttttgtatgggtcaccagtggcattggggtcactttgtgggtcatacttctgaagctcttcagcaaccttagctgcaccttgctcgagcttattatcacgaatcctagccttcttttcagcccttgtctcacacttgggcacgggcggagcatattccggatccccgggctcagcaaagtgcgacacaaagtgtgccatccctgtgtaggccggcaatttgcgcttctcgagcgggggcttgtactcgagcggcggccgcggctcaaagagcttaagcaggttgggcgtgagccccgtcgggtggatctgccccatgagcttgagctgctggacgttggggcgctgcccctggcccctgggccgggagtccgggttgccccgcacctggcccccgccgtggccgtagtcgcccatcgtcgacgccggcgaagaaggcggcgcggcggcggctcgagagaaagagagaggtgcgaggcgagctcgggagaggg

SEQ ID NO: 25487 - DNA, 1750 bp, Setaria italica
  misc_feature (27)..(27): n is a, c, g, or t
  misc_feature (43)..(43): n is a, c, g, or t
  Peptide Sequence Number=SeqID_91461
cctatccctgtgtgccttggtcagtcnctttttagtttttttntttttattatttcttgaatttatctgtcccatgtgctatttcattcatcaactcataaccaatgtgccatattactttagtaatataaaaacgaaacagctttaacgtcttggaaaataaaaccgtattaacaaaattaaagcatttcatacaaaacttgaaacagaaacgtacatagcaagagctatcatactgctctccgctcaatccaattacacaaacatgttattccggaagaaactgacagccacgtccataattcttgcgcaacagcgcaaggcatgctcttgctctttctgaggtttgggccgcatcattagcataaagctgaaacactgcaatcaagcatcattcatgtgttcacctgctcggtgatattggtagtcgccttcctcatatgcctctccttcctcaggcccttcaggttcagcattgttaggctgcacctgataattggtttccattttactgtacgaatcaacacgataatactcctgatcatgccgcttcgagtgctcagtttcatgcccacgtccatcttgaccataaccatatgcctcatgacctttgtgttgctcatactgaccatagccataatcctgcccgtaactggacagatttttgtcatgctttggcccaccattgccatagtccgcatccctctcatgcctgtggccacggtcacgttcgtgactggtgcgctcataatctctttcaccacgatccctgcccctctcacgatggcgatcatgagagcgagcccggtccgtttctctttcatagtcacggccgcgatccctgtccctgtctctgtcacgacgatcacgatcacgaccatgctctctttcccggtcctttcctctctccctgtccctagtcctctcacggtctctatggtgatgcttctcttctcgtgaatcacgatcacgagtccggtcatgtgaacgctcacgggctctttcatcacggtctctttcccgtaccctttcacgggacttctcccgatccctatcagcacgtcgatcatccctcctaggctcttctgatctgggacgcccaccctgctgctgctccctagcagaatcctttttatcagtctctgcaccacccatcctgcttgatcccagtccaccacccaatctcctgggacgccaattcggaacagttctgccacgctcaacatcaactaatacccttttattgtccacttttctcccatctgcctgcttgtaggcatttttcatgtcccgtgtgtgcatgtactctatgaaagcatatcctctaggtttacttgtatccttctcagttacaagccgaacccttttaataggcccataagcttcaaactcccgtttgatcttgttctcagacgtctcataattaagtcttgcaacaaagagcgttttgtatgggtcaccagtggcattggggtcactttgtgggtcatacttctgaagctcttcagcaaccttagctgcaccttgctcgagcttattatcacgaatcctagccttcttttcagcccttgtctcacacttgggcacgggcggagcatattccggatccccgggctcagcaaagtgcgacacaaagtgtgccatccctgtgtaggccggcaatttgcgcttctcgagcgggggcttgtactcgagcggcggccgcggtcttctacgtattggtcgtattcttatttgttagttagttctt

SEQ ID NO: 25488 - DNA, 227 bp, Setaria italica
  Peptide Sequence Number=SeqID_91462
caaccactcttgctcctcggtgtccgtgccgccgatgacccagacgaagttcttcccggacaggttgaggccgcgagcgagctcgcgcagctcgggcggcgagaaatgggacagcgtgccgaaggacacgtacacaaccgagccggacggcttaccttcgagccaccgcaggcagccgtccgcgtcgggcgagagctcgttggcggcggcgcccctcgtcgccacgt

SEQ ID NO: 25489 - DNA, 240 bp, Setaria italica
  Peptide Sequence Number=SeqID_91463
cctatcccctgtgtgccttggttgcgtgtctcagagaagttgctgctccctggcacggtggcagctggcaggctggctcgcacgcgtccaccgaccaggccgggccagctcaggggcggagccgctcgcctcctcctctgccgccgcggcggctgctggcgatgaacggcgggatccctggattccacaatgcgccggcgtcgagggccgtggtcgtcgccgccgcgctcttctccgtcc

SEQ ID NO: 25490 - DNA, 139 bp, Setaria italica
  Peptide Sequence Number=SeqID_91464
tttttttcccttttgtttaactttacggttcccgttacttaaggttacttagtaggtaggtgagatgatgatatctacagaccctgcacggcccgtcgatcgcccactggctctccgctagtagcaggctacaaactcg

SEQ ID NO: 25491 - DNA, 494 bp, Setaria italica
  Peptide Sequence Number=SeqID_91465
ttacgttacctttaagttacccttactatactattgtatttatttcgtacttcgtagtaaccgaacagcgactgaggaattacaataggagaacttgcttgagttgctggcgaccgatcggaccgggcgggcgggcggaggccgaggcctactcgtcgtcgccgtcgtccttcttggcggcgttggcggtggcgccccccttgccggcgcggccgccgttgttcttgttggagatgaggtcgaggtcctcgtcggcgtagccgtcggcgccctcccaggtgaacttgccgccgcggccgcccttcttggggtcgccgctcatgccggtggccgacttgcggtcgctgcggtggtcggcggaggccttgtgcgcgttccggcccttcttgccgccgtccatggctgctgcttcgatcgctggctgctccaactgcaagagagggagaggaagaagaggatgggattggaaactgctccggggagagggatcctgg

SEQ ID NO: 25492 - DNA, 698 bp, Setaria italica
  Peptide Sequence Number=SeqID_91466
tttttgggtgctgaagtgattcagagcaaagaacagcagcagacaacacgatctagccaacgactctggaaattaatataagtccttccaagaactgcgaattcagaccccaaacatcagcaagtcaaggacagaggaggtgagatgatgatatctacagaccctgcacggcccgtcgatcgcccactggctctccgctagtagcaggctacaaactcgcgaacacgacgcctagacccacatgattattcgactcgagaaccgaacagcgactgaggaattacaataggagaacttgcttgagttgctggcgaccgatcggaccgggcgggcgggcggaggccgaggcctactcgtcgtcgccgtcgtccttcttggcggcgttggcggtggcgccccccttgccggcgcggccgccgttgttcttgttggagatgaggtcgaggtcctcgtcggcgtagccgtcggcgccctcccaggtgaacttgccgccgcggccgcccttcttggggtcgccgctcatgccggtggccgacttgcggtcgctgcggtggtcggcggaggccttgtgcgcgttccggcccttcttgccgccgtccatggctgctgcttcgatcgctggctgctccaactgcaagagagggagaggaagaagaggatgggattggaaactgctccggggagaggatcctggtgcg

SEQ ID NO: 25493 - DNA, 936 bp, Setaria italica
  misc_feature (927)..(936): n is a, c, g, or t
  Peptide Sequence Number=SeqID_91467
cctcgctgctacagttgagagagggcggcaaggaggcgatccgtttccggagccgatttcctccgttccccttcccctatggctgccgtatcggcgccgccggagaggaaggggaacggggattgaggctgacggtgtatatatcttctcctaatctaggtaattcaggtagggtagattttgtttccccgtcggtgtcatcgccggcttgggattggtggtttccttggcttcttgaacatcgatctcatcttatctggtgacatcggtggctcaaagaagttgaggatagtctttcctggtggtgttcgcttggtggaggtggcgccactgctatggaataagttcctctggcctgatttccacctcgtcggtgcgtcctccggtaccgtcgacgggcgcgggaggaaggagcctgatggcttctggataggagccttctactcggcgctccaaccagctttgatttgggtgtcggtggctctctacagagagacagctggtaggttggtgcttgtgcggtgggtggatttgtgctctgttctcgccgcttgccggcgtagtgtgcaggtccacggccggcgaagtatggggtgcgtccccggccgatattcctcctctgtttggttcttttgggctcagttcaaagcctttgtgcgatggtacttcgtctggcctcggtgctcttgccgttcttcttctgctccggcagtggcctcggcaacgacggcggtggacgacgagcggtctgtatggtaagcacaaaagatcccaagggcctggttgtaatttttatctttctagggtctttagtgtaagttttgctggacagctgtcctcctagaaggtgcctgtatggctgtatcttggcttgtacgtgtacgcttctctatcatattaatacaggtatgattacaaaaaaaaaannnnnnnnnn

SEQ ID NO: 25494 - DNA, 147 bp, Setaria italica
  Peptide Sequence Number=SeqID_91468
gcataattttcctgagcaaataatgaagttcctgattgaagaattcagtggcaataaatcaagtgttgtttctgtgttggatgatgagcctattctaattgatttcttgtcaatgaccatggtcaacctaaaatccagaaagcagcg

SEQ ID NO: 25495 - DNA, 394 bp, Setaria italica
  Peptide Sequence Number=SeqID_91469
ttggccagcggcgtgtccaccaccagctggcaggcgcccaccagcgcccccagcgcgccggccacggcgtccgcctccatctggaacgacccgtcgcggcccgtcgtcgcccgcgccaccgcgccgccgccgcaccgcagctccaccttcgcgtctggaaatgccggggaagaggctacgtcgatcagcgtgccagtgttgcacggcacaacgccggagacgacgatcctgccaagcctgctctgggcggaggctgccacgcacgccgcggcggccacggcgacggcgagaagaagagcgggcgctctaggtgccattgcacaggatcggagctgtggaaagcggcgcgatgctattagcttgatgagagctagctttacttgctcgactgctt

SEQ ID NO: 25496 - DNA, 289 bp, Setaria italica
  Peptide Sequence Number=SeqID_91470
ggaaaacggaaagaaaccaatccggaaaggacagactaccgcttgcttccctggccgtctgtctctcttccctcaaaaatctctccgcaatcaaaccgcggtctctcggacccatcgcgaaaccggcgggcgaagcgcgaacgctctatccgctgctgccggggagatccatccgaccctggtttctccttctttttgtcgcgctcaagatcggcgacgctgcttgacaccacggccgatcaaatttcgtgcgctgagaagaattaaggtccaggcatgagcttccggg

SEQ ID NO: 25497 - DNA, 266 bp, Setaria italica
  Peptide Sequence Number=SeqID_91471
cggtcgacctcggcgtaggtgcggacggtgcccgtcgcgccgtcgatgaggcaggggcggtcggccacctcggggagccgttcgaagcagtagcggtgcagcgggagggtgttggtgatggcgatgtccgggagcttggaccggaagatgatctccggcgacgcctcctccacggccgcggccgcggccaccggctccggctgctgctcggtggaccccatggatcagtgtcacgccaagggacgacgggcctggcttgcttctgc

SEQ ID NO: 25498 - DNA, 822 bp, Setaria italica
  Peptide Sequence Number=SeqID_91472
caagcttaggccctaatcaacacttcttccacgccccagaggtcgaagggaggagaaagaagctgccatggggagagctccgtgctgtgacaaagctagcgtgaagaagggtccatggtcgccggaggaggacgccaagctcaagtcctacatcgagcagaatggcaccggcggcaactggatagcgctgccgcagaagatagggctgaagaggtgcggcaagagctgccgcctccggtggctgaactacctccggccaaacatcaagcacggaggattctcggaggaggaggacaagataatccttagcctctacatcagcataggcagcaggtggtcgataatagcggcgcagctgccgggaaggacggataatgacataaagaactactggaacacgaggctcaagaagaagctcttcggcaagcagtcccgcaaggatcagaggcagcagcagcaattcatgcgccaggcgacggcaagcgatgggatgaagcaagaagcggcgaccggggatgcgaacggaagcagcggcgtgccggcagttgcttacaactggcaccaacaagccattacaggggcggtgccaccagtgccaggtattatgatggaaggccatcgcataggagatgaggtagatgagtcaatccggaagcttctttacaaactaggtggagcaggcccttttgcaactctgccagttcctcagtgcgttcctccaatgtacgagggaagtccaagcctcatgccgccatcatgcacggtagacaccacttccctcagcgaaggcggtgtgcaaggttccagcacactgccggcgct

SEQ ID NO: 25499 - DNA, 438 bp, Setaria italica
  Peptide Sequence Number=SeqID_91473
cgggggggcaaggaagcagccctagcagctctctctgaggattcaatagcaggacgaggagttgatgatgtaacctgacgagtatcagctttcgggctctgttccaattttttagtgaattcgcacaagtcatatattcctcgtgttgtacgatcttgagtataagctaggcgtccaagttttgtctcctgcaacacaacaggtaatcagtctgtacatagcactgagagtgaatcagttcatctcgaacaaaaacatttaatgtacctaccagattacgaactacaagatgaactgactccatgtccttctggaaggcacttagatctccatggatgattgtaacgtcattccttgttgcttctgtaatttcttggcattcatctaaagtacaatctacacgatcaatccttccaagacaaagaatagtactactta

SEQ ID NO: 25500 - DNA, 1526 bp, Setaria italica
  Peptide Sequence Number=SeqID_91474
ttttttttttttttttttttagtttgcaagtgctccttgcccaaaatgtattctggtagtactgtcacggtaattacaacatcataagccactgcaatatacagcccctcccatccacagggaaccatgtttctcttccagcatctagatcaacagcataatttaaactgtgatgtagttctgttcttggcatcgaggagttgctttgcaaggtaattagttcctacaaaaattctcaattcccaataggaaaagggagccgtccttttggcaaccgccatgttttctacctacatatacagctcaaggtgatgtcctctggataaaaaagctacctatctgagcacatacgtctcagcttgcgtagctccttagaaagccaaacccaccaaacagggttgaactagtagatcttctggggctcggttctgctgagcttggcgcaccacttggtaactcagaggatccttccttcatagaacttgctctgctaaaagcaccctggtgatctcttttaggtggcattgtagttccaactagcatactaagtcctgatgctgacatggttgtagagcgcacaaccttaggtgcctcagctctaggtgattgggctgatggagactctggttccaaagcggggggcaaggaagcagccctagcagctctctctgaggattcaatagcaggacgaggagttgatgatgtaacctgacgagtatcagctttcgggctctgttccaattttttagtgaattcgcacaagtcatatattcctcgtgttgtacgatcttgagtataagctaggcgtccaagttttgtctccagattacgaactacaagatgaactgactccatgtccttctggaaggcacttagatctccatggatgattgtaacctcattccttgttgcttctgtaatttcttggcattcatctaaagtacaatctacacgatcaatccttccagcaagatgtctctttgcagcatgaacactttccgaaacctgatccacttgtttccccactgcattgcaagcatcagtaaagccacgcttcgtcacaaacatcatatcagaaagtttccaccccttccatctaatgaataaatagccaatagctccaataacaacagctgtaataccatacgcgccagggccaggtctaccgtcaacagtgacaatagcaacatggttttgatttagacagcatgttcagctcctctctgagataattgacctgagtcaacaactgagcagtgtgcggactgctggtagacggcccatccttgctttgcttggcgcccttggtcatgaacttgaaagcaccggagattacatccttgaagtccggaaggctggactcaccgccggtcagtactgttccaacgattccggagccgatgacgatggcgaccttgccgaacaccatggccgccgctcactggtggagcgctcgcccagcgctgcctctgtgcctgccgcctttgccgtgccttccgccgggacccgcgagggaggcggagaga

SEQ ID NO: 25501 - DNA, 411 bp, Setaria italica
  misc_feature (276)..(276): n is a, c, g, or t
  Peptide Sequence Number=SeqID_91475
aacttctcgtagaagtagaaggcacagcttagttgtcgggtgctcccccgcccccaaaacgaccaaacctggattgatgattatatttgtggcctgcggatcatggggagttctccatttaggaacaacccaaagaccatcagccacttcagtggactcgtatgcttcctgcacagttgccacccaatcgcattgcttcccaacagtggtttcataccctgggctgtagttcaaaccagctgagctagcggcacttgaaacactggagtccacgtnttccccatcagcatacatggaggttatggagattcacttcatcgagatttccagcatcttcaatgtcatccacggtcacagagctagcaccgaagcacaagagcgcctcggagagcacttcctggttcgcaatgt

SEQ ID NO: 25502 - DNA, 251 bp, Setaria italica
  Peptide Sequence Number=SeqID_91476
ggaattataggcaatgagtaaatgaatgagatagtatgtattgtgaaaaacaaaacgaagtagtaggagctgtaatggaagataacttgaagtaatattaatcttgagttttgacatcttatcaggttcatccaccagactctgcaacacgtctaagatcaaaatatcatctgcagaaataaacatactagacatctgttgcttgagtaatccagaaggtttgttctcttctttaacctccatcatagttt

SEQ ID NO: 25503 - DNA, 526 bp, Setaria italica
  Peptide Sequence Number=SeqID_91477
tggcatcatgagcagtagccgcgccgtcaatcctgatttctacaactggaaccgggtgaagattcgctactgtgacggtggatcttttgccggcgacgcgtacaacaaggagtctgggatttacttccggggccagcgcatctggaacgctgtcatcaggcacctcctctccatggggatgtcctctgcagatcaggtgctgctcaccggctgctcctcgggtggcctggcagtggtactgcactgtgaccagctccgcgccttcttcccgcccggcaccaccaccaccgtcaagtgcctctccgacggcggcctctacctcgacgccgtggacatctcaggcggccgcagcttgagatcctacttcggcgaaattgtggccatgcagggaatagctcagagcctgccgccggcttgcaccgcccgtctggacgccacctcgtgcttcttcccgcaaaatataatcgatagcgtaaagacccctatgttcatcctaaatgcagcatacgacgtcattcagatttcg

SEQ ID NO: 25504 - DNA, 494 bp, Setaria italica
  Peptide Sequence Number=SeqID_91478
ttggatccctctccacctgggattcggggttcatcagctgcttttccgtaggtttcattgagcaaatcttcttgcatcagatccacatcattcctctccattggtggatccattaaatctccgtgcgctgggtcgatggcatggttatcttcagtccctaaaaatgcgtcctcagctgcagttccatcaggttcacctgctggcgtgacttcttcaattggtgcttcgtgcagcactgtaggatctccccctctagcaaccctgtccctcagttcagaaatgcatttcctaacacggttgccagcccccactttctcaacttttcgcacaaactgttcaaatgagtagtaagggatcaagcgagagtgccagtccgtgtacagcttgatgagattaccaaggtcctccacctcgtggcctggtcgggcgcgtggcttgaatgccttggggaagtatcggaggacgaagccgatgccgtcgtcggagaggagcga

SEQ ID NO: 25505 - DNA, 1021 bp, Setaria italica
  Peptide Sequence Number=SeqID_91479
ggcccctcctgcatggtaaacaatcagacgatggtatggtgcaccagcagccagcaactgaagacagctttacttgaagtccttgtctggttgctcgaacatcattgcttccacatggcaatgaacgcgcacgaatcagctcacggatgcgcttccgcatccacactggactctgtgtcaccaccggaagctgtagggactggatctttggtggctttgcgagctcgctgagaaggccggctccttgccatgttctttgggtcacccttccgcttcccgcttccaagtagtccaaaagcaacagcttctaaagctctcgcggtgggaggcctgtttctggttccgtgcctccggggatttgcctccaaagcaggctcaggttgctgggcaacaggtcctccagttgcctcagaaagatcacgagtcatgttgctgtttgaaatggagggagcttcatcagccttcatgccactctgatcttctgatgatgtggtgccaatacttacgctttccttatcaacatgtggtgtctccagcttattcaagttaattggaccactaacatgagctctttctttggcatactttgtctcatcagcggtgatctttgagtgaatttcagcgactgggtcagccttatgctcaaatgacctgtcctcaattaagttctccgtaaccattctctcattttgcccatcactggtaacagaattcgatacatctgttttctgcttagatggcttctcctttgtagaacagcgtgcgattgttttggtctggaaagcgtcaccagcatcaacagcagctggttttgaagttgatagtggcttgcttttctctttctccaaaccaccacctttcgagaatgaaaagctgcgccggctgctctgttcattactacaggtacttaatcttctccgctttgacactggagacaaatacttgcgcttttcaggttttgatttgatgccatagatgcctgtcaaatcaatttatcgccactgccattagaagaatgtcc

SEQ ID NO: 25506 - DNA, 697 bp, Setaria italica
  Peptide Sequence Number=SeqID_91480
gcacgtgcgagtacagcgacgtgcacgtcatgtggaggatgctcagcagcagcagcagcagcaagagcgccggaggtgggggaggagccatggacagcgccaccgccgccgccgggaagggctcgaggcggccaagggtcgggaggaaggccgccgtcgcttggaggagcctcgcctcctactgctgcgcgctctgatcatccgagttgctcgtcggattcagagtttcagacagagaaggggtcctcttcttcttcttcttcttctgctgctgctgctgccgccgccgccgccttgttgattagaagaacagttgatgaatcgatcgagcgccgccattggaggcaaccacacaattttggggacgcggggatttcgtttcagatgagatgaggcagttggatccccaagttccaaaccaagcctattcggtggagaggtgaatcagagatgcgtgcgtatatggtatatagtcatgtcagagctgtacatacagaggcttctgtgatgtaattttggtccatgtctggtgctagctatacgtgagtgtaaaggccaattttgtctctgtctctgatggttgttctcgatcatccgacagaccagttccttgctgcggctctatgtttccatgtgttgttatgtacaaagttacagtcttgcgtaaataaaagatgatcgatcacatattcacaaa

SEQ ID NO: 25507 - DNA, 328 bp, Setaria italica
  Peptide Sequence Number=SeqID_91481
ccctacgaggagtccggcggccgccccgagtccaaccccttcgccgcccgcgccgtgcgcatctacctccgcgaggtgcgggaggcgcaggccaaggcgcgcggcatcccctacgagaagaagaagcgcaagcgcgggagcgcggccgccgcacctcccgtcgcgccgccccccgttgtgaccgcagagggcgcggggacgtcgggaggcgccgccgaggaggaggacgacgagccgtcgccgtccggtgagccacaacaggccacgccggcatcctcggctcctcctcctcctcctcctcctacgaggtgtccttacactccagtgc

SEQ ID NO: 25508 - DNA, 422 bp, Setaria italica
  Peptide Sequence Number=SeqID_91482
aaaagacaaaagaataccaaatagaataccaaaatagactgtaaatttaataatgggattctacctggtagatttcctgatgacaatttagttagtttctttagagatactgttatgtacttctattgacaattgcttgatctctcatctacagatgacttccgtttgttttgtggtgatcttggaaatgaagtgaacgatgatattcttacaaaggcattctcaaagtatccgtccttcaacatggccagggttatacgggacaagtggactggtaaaactaaaggatatggttttgttagttttgctaatgcatcagatcttgctgctgccttgaaagaatgaacggtaatatgttggaaaccggccaatcaaattacggaagagcacatggaagagcaggatagactttgaagctttgg

SEQ ID NO: 25509 - DNA, 681 bp, Setaria italica
  Peptide Sequence Number=SeqID_91483
tcgtaaggtaattgttgtaattagttagttaaacccctaaactaattgtaacccaacatgttgccacacgggatttagatgacttccgtttgttttgtggtgatcttggaaatgaagtgaacgatgatattcttacaaaggcattctcaaagtatccgtccttcaacatggccagggttatacgggacaagtggactggtaaaactaaaggatatggttttgttagttttgctaatgcatcagatcttgctgctgccttgaaagaaatgaacggtaaatatgttggaaaccggccaatcaaattacggaagagcacatggaagagcaggatagactttgaagctttggagaaggggaagactcgaccacagaagaaaatcaaactgcagaaaagaagtgttcttcacaagtaaaactgaaattctgcatgttcatctcagtatcaacatctgagaaggttgcctgaaactttgaacagttccttaacatccggtgtccattctgcttccatatgccgtggtggtggatgggaagtctagcgaaatattagcatgcaataacttgtacctggagcgtaatgcgatcagcgcatcatttcaattgtttatgcctttatggagctgtagttgtaaatactctaatgactagtgctcttaacgttcgaaagatttgtagacgtta

SEQ ID NO: 25510 - DNA, 460 bp, Setaria italica
  Peptide Sequence Number=SeqID_91484
cccacgaccccgtcctacttccccgtgcccttccacctccagaacccgcagtacgccgcgtggcatgcggccaccgctgcggcgcctgcgtacaacgccgtctactccatgccccaggtccagcaggcacaacacttgttccagaaggactcaaagataatcagtcctgaggctctagccacagttaaggctgctattgcaaatagtgagaaagacaagaaggttgaagcagcaaagaaggctgtgcctcgaaaggcagctgggcaaagttgggaggacccaaccttggctgattggcctgaaagcaacaaaccatgggataattgtcattctcacaggcaagatctgatgctctatttatcatgatttgatctgaagcaagctgctctttttcctttctataaaggtgctcgaggatgtgatgtgtaacccaacatgttgccacacgggatttagatga

SEQ ID NO: 25511 - DNA, 591 bp, Setaria italica
  Peptide Sequence Number=SeqID_91485
atctggatgtactcaccactcgacaaccatctgaatcgatctccatcgaatttccgcacattggtaaacacaacagtctttgcaggcatgttcaaaccaatactgaatgtttctgtagcaaacaaacacttaatgaggccctcctggaagagaatctcgatcacttccttcaagatgggcaacagaccagaatgatgcacgccaatgccacgtttcagcaaggggagcatgtttgaaacctgcggaagctttttgtcatcatcagaaagcaaatccatagcactccaaaaaattgtttcgatgtttgccttctcatcatcctcgttcaagtccatcttagccatctgcatagcaagaaattcacattcccttttgctaaagctgaaaagtatcacaggatcatattgacgctgaattatcattttaaccatcttgaatatgtcactttcctcgctagatttgcctgctataatagctttttgccacttcccattctccttcttcttgtcactgtcactagcagggacaagggcattcaatgctttctgaaaactgtcctctctgaacttccccttctcatccactaccaga

SEQ ID NO: 25512 - DNA, 1019 bp, Setaria italica
  misc_feature (1010)..(1019): n is a, c, g, or t
  Peptide Sequence Number=SeqID_91486
catttttattgttaatctctcaacttcagcatgtgtcttcgcaactactattgttttgtactacataacacaggaggagagctacctctacacacctctttctggattttatggagttctttcaggactactggtgggcatcaaacaaattttacctgatcaggagcttaatcttttcgtgctcaagattagtgcaaagtggattccatctattgttgcatttatctctgttgttgtaagcttcttcctgaaggaatcaatggcatatgttccgatcatattatttggtatctatgtgagttggatttacttgcgatacttccaaaagagactagaagtaggcctaaagggggacccaagtgatgaattctcattttcaagcttcttccctggatttttgaggcctattttggacccgatagcttctatcttccacaaaattttctgtgggcgatctgcaagatatgaaagcacaggccaggcattggatggctcacagttccctggttcaggctccattgaggcgaacaggaggagagaaaggggtcagagggcgctggagcagaggctggcagagaagctggccgcagtcaggagcgcagagggcacggacccgccaccgccgcctcagcagcagccggaggaggatgcttctgataaagtctgagtcctctgttcggttggtggaattcacagcctgcattgtgcatttgctgagtgtttttgcgcatgccgtcgtgtgagcgagactctggaaagtggagtagctcacaggcatgactatgactagactcatgagtagtgtagcaaagggggagaggtgcaagaaggcaaatgcgacgcgcatgcgcgaaccaattgttgcaagacagcgagcagttttttgcacgggtgtttcgtgtccagtggtcgagcctttttttttttaaggagaaatatatatattctcacgataacccagctaaatcgctagacatccacttgttaagtcttgccaaacactttattannnnnnnnnn

SEQ ID NO: 25513 - DNA, 265 bp, Setaria italica
  Peptide Sequence Number=SeqID_91487
agctccaagtctatacagagcaacaacagagttccccagaccaagaacaagtccagcaatagcccaaggatcatcattgaagctatcattattttcttccatcccttctatggattctattccatatataccaagttttttgagagaataacatgaggatggacatagctgaatcaatgaagaaaccaaagcatgaagaatatcttcaactgatgcacgctcattgagttctgtagcagccgctacttctgcatcagtagcatta

SEQ ID NO: 25514 - DNA, 844 bp, Setaria italica
  misc_feature (803)..(844): n is a, c, g, or t
  Peptide Sequence Number=SeqID_91488
tgttgttactagtttgtgctgaacactttgccgattcacaacaagtgcattggcgatggcgatggctttagcgcctatgttgacacagcagacccgagagagtctgcgaatgtgccactggaagtgcacgagatggtgattgctaggaccgaagcacgcacccatagggattaccagaaggctgatgctcttcaaaggagccttcacgaagcaggatttagggtaataaccatttcaggcgaagagatacttgcaaagaaatatcgaatcagaatgaggggcgttgatgcaccggagcttaaaatggcaaatggtaaggaatcgaagaacgcactggtgaagctcattggtgggaaaagggtcacaatttatgtgtatggacaggaccagtttgggcgttacgtgggtgacatatattgcgatgatgtgttcatccaggagcaaatgctgaagagtggccatgtatggcatttcaagatttacgacaagcgcccagaatttgcacagtgggagagagaggcaagagctgcacgtcgagggctttgggcgtcagagaaccctgagaagccgtgggattggagaagagagcagcgcagtgcaaacgttcaggtctactaacggagctgaaccaaaacatctgatggccacgtagtgaggttcttgtacaacttgctgtgaatgatcgagtgcgcgagataccaaagccagagtgtacgttttatgtatcaacgtatgtgcatcagaagtgcttcgtttagtgtgaacctgggaatgtacagatgaactgttgtcaagtatgaacnnnnnnnnnnnnnnnnnnnnnnnnnnnnnnnnnnnnnnnnnn

SEQ ID NO: 25515 - DNA, 399 bp, Setaria italica
  Peptide Sequence Number=SeqID_91489
agtaacagcgaggagtttggcatgagagaactgttgtgtgctattgcagctgcctatgataaaatcaatgttgtccatgactactcaagtgacctctgttcttatctcaaatactgcaatgatgttatttttactgggattacatgttcaacagaagaggagcatctagtagagatcttttgggatatgtacaaggccggagaggatgacaatccaaaagagcatgtaaaatcccagtctcaaggtattgaagaaagggcatttacaaatggagtgaacaagcgctcccgggatggaacatttattgaagcaagttgcatttctttatcatcaggccatgatgcagtgcaaatgctcaagtcagagattgtctaagtatcatggaatttcaattaataa

SEQ ID NO: 25516 - DNA, 671 bp, Setaria italica
  Peptide Sequence Number=SeqID_91490
ccttcatgttaatcttttatggctgataggttatttcgatagcatcattctaggtttcttgcacaaactttgttcccaactatgaaatattgcaacatttatgatgttgcattgcaggatgacaatccaaaagagcatgtaaaatcccagtctcaaggtattgaagaaagggcatttacaaatggagtgaacaagcgctcccgggatggaacatttattgaagcaagttgcatttctttatcatcaggccatgatgcagtgcaaatgctcaagtcagagatgcaagatcatggatttcattatatgccacctaggaaaccaaggaaatcagatggttatcttcgttataggaggaggagactaagtggtggctttgtttatgttgcgcatgctgattattacatgttgctacgagctttttcaaagctcgcagaagttaacgttcgtatcatgcatatcagtgtgttaaaacttgagagcagactcgcgtgtattgaggatcgaattgaaaaagcttgaacaccttacagaacctctctgtcagagcgaaagatgagctaaggcctgtatcagattagaaagtaacttagaataggaagtagaccaataactactagaccaaaccaaacaaactaataacaagggtaaccgggaaaaccaaggtaccaaga

SEQ ID NO: 25517 - DNA, 429 bp, Setaria italica
  Peptide Sequence Number=SeqID_91491
aatagacaattgcacatctgggtgttaaaacttgagagcagactcgcgtgtattgaggatcgaattgaaaaagcttgaacaccttacagaacctctctgtcagagcgaaagatgagctaaggcctgtatcagattgaagtacttgatggagtgccatactctgccaacgaatacaatgtgatttatggtcagttagagtttactatctgaatgtgttttgagtactgatggcatacaaatgaagaaaccctccattcctttttctggcaaagcatgtagtcacattgtttaagtgtggtttgaaaggatgattagctgcacacctcagcaaacaaagcttgttgttgtggcctgttggctttggtaagcaagctgagcacgccaagaacatgtcagattgtggtctttgttgctgaagcagtctgtagg

SEQ ID NO: 25518 - DNA, 386 bp, Setaria italica
  Peptide Sequence Number=SeqID_91492
tgctggaccaatgctctacgataggagtaattgctaaagccaaaagtcccaaattgatggtaaccaccagaatccctaagttaacagcctatctcaatgcgcatcttgaccaaaaccgagcctgatgatccaagtctcggggaaatgaacagttttcagcagcgcaaccatgcagtgctcattttcccaatgaagaattgctgatcgtcccaagatctgtcttgtagttctctctcaattcttttaacttcacaaatgatgaatgaagctgtgttgactcgcgaacaagggcattctctgtataaagaaagagtgatctctgttgttgagatagttcgaactccaaccccacagcttgttttgggtcatatccggctacattggca

SEQ ID NO: 25519 - DNA, 249 bp, Setaria italica
  Peptide Sequence Number=SeqID_91493
ttaacagcgcattggtgaacatgtataacaagtgtggatgcatcgaagatgcaactaaagcgtttgttgagatgtcaatacggactcttgtcacatggacttctatgatatcagggtactctcagcatggccggccccaggaagcgatacaactcttcgaggacatgagattggctggggtgaaaccaaatgaaatcacatttgtaagtgtgctttcagcctgcagctatgctggtttagttgaggagg

SEQ ID NO: 25520 - DNA, 256 bp, Setaria italica
  Peptide Sequence Number=SeqID_91494
gtcgggcgggaatcggtcaacggaagtgaaacagcgggcgggcggggcgattacgcgcggcggagactctcagactggagggacgcggaatcgaggcggaaaatggccgtgcgtggatctggggagatccgcggggtgttgggtgcaaatgcgtgagaggaggtgggtgggggattagcggctgtgcacggcgagatccgagaggcggacgggaacccggatgatgaacttgacggaggggggagggagggaggag

SEQ ID NO: 25521 - DNA, 389 bp, Setaria italica
  misc_feature (80)..(80): n is a, c, g, or t
  Peptide Sequence Number=SeqID_91495
ctcatccagctaagcattacgacaaagcaaggaccaacagtcctgaaaacttaatttcttaatccagtggatgtgagcanccttcactttcgcaacaacactctcatcacgagtggtgatcaaaattctgcttccatgaccacaaatatgccagtgagcctccagtgaattctcattaatctgatgactatgcacatcgtcaagtaccagtaagaatctctttcctttaagtatggcagccaacattgcctcaagttgcaccctgttttcttgtgctttgggatttccgccagcagcccttacaattgcagacagtaatccagtatcgtcaaaacctttgaaaacactcacccatacaacaatactgaaagcatttcttgtgtgatgat

SEQ ID NO: 25522 - DNA, 264 bp, Setaria italica
  Peptide Sequence Number=SeqID_91496
taagaaggtgagcctgaagacttggagcccctcattgctgatcttggtgaggtagacccattcatggcagcggattagagacaatggacaaacttggaggactccctttgcagtttgtgcacttcttgagctcatctattctacaaaattgttaaattctgtatggatatgtgatcagttcctgaatcacaagcttcatctggttactggccagcctgatcaagcttgtgattcaggaactgatcacatatccatacagaattt

SEQ ID NO: 25523 - DNA, 349 bp, Setaria italica
  Peptide Sequence Number=SeqID_91497
ggtgaggtagacccattctaggcagcggattagagacaatggacaaacttggaggactccctttgcagtttgtgcacttcttgagctcatctattctacaaaattgttaaattctgtatggatatgtgatcagttcctgaatcacaagcttcatctggttactggccagcctgatcaatgttgttccatgtacattacctggcaagtacaccagggccctaactcaattagggtttttagctgattgtttgattgactgaatgggatcatcttttgtttaataagttgtgtaagcgaagcctcagatagatatataaaatcggaatatttcacttaccaaaaaaaaaaa

SEQ ID NO: 25524 - DNA, 982 bp, Setaria italica
  misc_feature (938)..(938): n is a, c, g, or t
  Peptide Sequence Number=SeqID_91498
cggcgatgtgggacaagtggggcgctaaggtgcccatcaccgtcctatgggtcgacgacaacatcgtcacccaggtcaagactaccgagaaggagggattcttcgccctacagcttggggcaggtcaaaagaaggaaaaacacctaacaaagccagaagttggccactttagagcacagggagtgcctttgaagagaaagttaagggaatttccagttaccgaggatgcactacttcctgttgggacaaccatcacagttcgccattttgtacctggacaatttgttgatgtcactggaatcacgaagggcaaaggttttgcaggtggaatgaaaagacatggttttaaaggaatgcctgcatcgcatggtgcatctttgtcacatcgcagtatcggttctactggtcaaagagatgctcctggaagggttttcaaaaataggaagatgcctggacgcatgggtggtgtgcaacgaacagtgaaaaatgtatgggtttaccaaatagacccagccaggaacttgctatatctgaagggccaggttcctggccctcaaggtagctttgttttcgttaaggattctatattcaagaaacctgacacggctttgctaccgttccctacatatttcacgcaagaaggtgagcctgaagacttggagcccctcattgctgatcttggtgaggtagacccattcatggcagcggattagagacaatggacaaacttggaggactccctttgcagtttgtgcacttcttgagctcatctattctacaaaattgttaaattctgtatggatatgtgatcagttcctgaatcacaagcttcatctggttactggccagcctgatcaatgttgttccatgtacattacctggcaagtacaccagggccctaactcaattagggtttttagaacctaaaaaaaaaaaanaaaaaaaaaactaaaaaaagaagaactagaccaaaggacaacac

SEQ ID NO: 25525 - DNA, 539 bp, Setaria italica
  misc_feature (93)..(93): n is a, c, g, or t
  Peptide Sequence Number=SeqID_91499
tgattaagaatttgagtcctaagaggtttagaccctttttttagatattagtacttttgaccattaagatcctgtttgttgagtaataaacgnggaatgattgatgctgtgtgagggattgaatgtctgctgttgcacagatgtattgacataggctcataatttagttttaaatggtaatttcccttctttgcttatgtgtaacatgctatttatcacatctaatttgccaacataactgtggtgtttggaagagtagtttcattgtgaaactgaagtttgttccaacttaacaagttgattaaaacccctgctaactttatcttaagtgccgtagctttcgttgtaggcactggaagttattcacgctgtagctctagaatcttaacaatatagaacctagttttgatcagtttcttgtgaagagtgcttgttctcattcacttcaattcaagaaagaaacatgatcagtaaatcgttcaatgttcttagttatcctgaatttaggtttgttttgctttcaggtctagttggactaa

SEQ ID NO: 25526 - DNA, 468 bp, Setaria italica
  Peptide Sequence Number=SeqID_91500
cagggatgcagatgccgtcgccgcacggcggcgggatcaagcgcaggaaaaaccaggcaaggaaggttgtctgcatcccagcacctgcagcatcagcaggagggaggaccactggagaggttgttccttctgatctctgggcttggaggaagtatggacagaagcccatcaaaggatcaccttacccgagagggtactacagatgcagcagctcgaaaggatgccccgcgcggaagcaggtggagcgcagccggacagatccaaccttgctcgtcatcacctacaactcggagcacaaccacccgtggccgacgcagcgcaacgcgctcgccggctcaacgcggtctcaccacgccaagaacagcaagagcaattcctcgcacaacctgcagaagcccatcgttaaggcggagccggatcaaaccgcgacggccgccagcgcaaccacggcgaccgcagccaccagca

SEQ ID NO: 25527 - DNA, 388 bp, Setaria italica
  Peptide Sequence Number=SeqID_91501
ctcggatccatcctgctcgactccctcggatccatcctgctcgactccacgcccacccagaggagcgagcactagtagagaattgggctttagtcccggttggtagggtgcaaatatcccgaaaatccatccgggataaaccaaccgggacaaaaggggggtcttttatcccgggtcactcaaccgggacaaaagactcccttttatctcggttggtaataccaatcgggataaaacgggtcaccatggccagcgctgcaaaaaaaaaatcccgagctcccaggaggcccacacacgcacgtcgcaagtcacaagtcacgtaatttttcacgcgaaatatgcgcgtgcgcggttcgtgggattcgatcccacaacctcttgaggatga

SEQ ID NO: 25528 - DNA, 773 bp, Setaria italica
  Peptide Sequence Number=SeqID_91502
cgtagtaagttgattctgatatggcaccaaggcagtttcttgtggacacaaaatgaattcatgacaagatctgataggtttagctcagagcaacttgaacattgacaactgaagtagtaattctcctgaagtgacttctgcctgtctgaaagatgcatctcaccagcctgtggaccatatgacagttcgactgggctcccagatttttataaattctgtggatcttagaatgagagcgcgtgaaagaaaatatgcatgcacattgggccgacacgagtgattgaacatgctaccagatacataaatagcttgagcaaccctgacctgctccacactacacatgtttgcaccttcagctgcagaaacccctctatttactgtgagctctaggcctccatccatcgatttcattcggacaatagcaattgaattgactttaatttgaaatatcaaaagaactagctgtgataaagattcttctgtccataaaaggtctgatctataatggttttggaggcataataataggacaatcgcatatatttgagactccaacttgttaacaggagaatgccgatcataatggtgaaccagatccaaatttgggccagaaatagcagcactctttccatacagcatccttttttctatgtctcgtgccattattcgtccagctaaaactttatcagctggtaaaacagctgcccagtgggcacctccacattcgtgcctatgttcagcaaacagtgtagagcttggagacttgcagctta

SEQ ID NO: 25529 - DNA, 460 bp, Setaria italica
  Peptide Sequence Number=SeqID_91503
tttgagcagctacatattgacaatagattttctcttctagtgggacacaacacctaaatagtaacacaagttaatgactcccggtttaatgctcagacataacttcatcattgtcgatatgatttgtagcttccatataaaaagatgtagtgagtcaacagttaatttgatgttctatgttggaacttttgaactgaaaagtattacaaggttaagcttatatttcctaactatatggaacctgacttgtattgcttaaaatgctcacttctagcaattatgcagcgtccataattactgcacaaacctgcgatagctttatttttttagtgaaaacagtactgtcatatataaccgttttttttgggggggggggaccattatttttctatatcctcattgctggtggttcttattgagtctgatcagaatctaccgcaacttgctcgggactaaaaat

SEQ ID NO: 25530 - DNA, 368 bp, Setaria italica
  Peptide Sequence Number=SeqID_91504
tacacagcatgaagccaatactgaagcggaggatgtgaaaatggttgacacacaacatgaagccaatattgaagctaaggatgtgaaaatggatggcacacaagatgtaaaaatggttcacacacagcatgaagccaatattgaagctgaggaagatgcgtgtcaagataaggaaggaaagaatggggataatcagcatgataaggcaacagaaggtgagggtatgaagatgattgaagcaaaggctactgctagaaattccaaggcacaagataggatggaagatgcgtgtcagaaggaaaatcacaccaatattgaagacaaagacatgaaaatggtggagaaggaaaacacgtgtccaaaggaag

SEQ ID NO: 25531 - DNA, 410 bp, Setaria italica
  Peptide Sequence Number=SeqID_91505
ccggagcacctgctggacctcgagtgcgtgcagctcgtcttcctcgccgacgtcgccgtccacttcttcctcgcctacagggacgcccacacctaccggatggtctacgacaggcgcaagatcgcactgcgctacatcaagggaagcttcgctcttgacatcctaggctgcctcccttgggatttcatctacaaggccacgggaaggacggagacggtgaggtgcctgttgtggctgcggctgtacagggcccggaagatcacggccttcttcaagaagatggagaaggacatccgcatcagctacctcttcacgcggatcgtgaagctcatcaccgtcgagctctacttcacccacaccgccgcctgcgtcttctactacctcgccaccacgctgccgccggcgcgcgg

SEQ ID NO: 25532 - DNA, 419 bp, Setaria italica
  misc_feature (247)..(247): n is a, c, g, or t
  Peptide Sequence Number=SeqID_91506
tccttgtttgcaacatcaaattcaccagatctgcaggctgcaagcagtgacttcacaacatcttcagggataaccccagaaacactgatcaggtcactggaagagatagaagatccagatgagcaaaaggcaaggatatgtaaaaagcttggggaaactgataagtgcttggtcgatggggcagatgagtatctacagcttttggatgttgccagcgagacaattcgtgctttttttcgacatgccncaaacgctggtcttctaagagatgttcgcaaagaggcatggtgttggtgatgaccgatgatcatcattttgcaagccctggaaggcgtcttttagtattgtctgcacagcacaaggctaatctccatcacaaatctaaggaaaacgcaagcaacaagaataagacgaataga

SEQ ID NO: 25533 - DNA, 1057 bp, Setaria italica
  Peptide Sequence Number=SeqID_91507
cttagaagaccagcgtttgtggcatgtcgaaaagagcacgaattgtctcgctggcaacatccaaaagctgtagatactcatctgccccatcgaccaagcacttatcagtttccccaagctttttacatatccttgccttttgctcatctggaatatcatccgcactaacaattacatctagaaactgtgccatcagctgggagactggatatccatctgcgatgatgttgctaacttccttgtttgcaacatcaaattcaccagatctgcaggctgcaagcagtgacttcacaacatcttcagggataaccccagaaacactgatcaggtcactggaagagatagaagatccgaataagcgggctgcactctgaagataggttatagcacgacgaagatcaccttgagaaatggcactcagtgtggacagcgcctgagcatcaagattgagactttcttcattgcatatatgcataatacgactgctcatcacttcttctgaaagaggcttgaacctaaactttgcacatctagatgcaagtggttctattatcctgctgatatagttgcatataaaaaagaatctggtcacttttgagtaagtctccatagtacgcctcaaagcattctgggcatcttctgtcatcgaatcagcttcatcaagtataatcatcttgtaaggtgggcagggataaccagctttccgtgcagtaccaacagcaacagcagcaaaatccttgattttcgtcctcaccacattaattccacgatcatcactagcattgagctccaaaactcttgacttgtacagctctggaccgtagagctggtaggcaatggcgagtgcagtggtggtcttcccggtgcccggcgggccgtagaacagcatgtgtggcagatcagcggtctggagggtgttggtgagcacccggacgacctcctcctggtgcgccacatccttgacctgccttggccggtatttctccacccacggctgcgacatcggcacgagcggcgccatctcctagtcctccgccgcagcggccgccgccggtgg

SEQ ID NO: 25534 - DNA, 553 bp, Setaria italica
  Peptide Sequence Number=SeqID_91508
gttgtgaagtcactgcttgcagcctgcagatctggtgaatttgatgttgcaaacaaggaagttagcaacatcatcgcagatggatatccagtctcccagctgatggcacagtttctagatgtaattgttagtgcggatgatattccagatgagcaaaaggcaaggatatgtaaaaagcttggggaaactgataagtgcttggtcgatggggcagatgagtatctacagcttttggatgttgccagcgagacaattcgtgctcttttcgacatgccacaaacgctggtcttctaagagatgttcgcaaagaggcatggtgttggtgatgaccgatgatcatcatttgcaagccctggaaggcgtctttagatgctgcacagcacaaggctaatctccatcgctattctgttgctgcgttttccttagatttgtgatgggttaaagtgtgactaacgtgcccaaagtttagctgaactctgcctgtggatgtccagtatggcatggaacattttccgtcttacatcttgtgcattatatttccctcttgcccccc

SEQ ID NO: 25535 - DNA, 317 bp, Setaria italica
  Peptide Sequence Number=SeqID_91509
gtcgagcgcccagcagcggcgcagcacgttgggaggaggcgacgccgctggaggccggggcggcgtcgacgcggcggtgctccgggcgctgccggtgatggtgtacagggcgaaggaccgtccacccggcgaggcgctggagtgcgccgtgtgcctcgccgagctcgccgacggcgaggcggccaggttcctgcccaggtgcgggcacggcttccacgccgagtgcgtcgacctgtggctgcacggccactccacctgcccgctctgccgcgtcgacgtcgacaaggcgggctccctgccggcgccgccgccctcgt

SEQ ID NO: 25536 - DNA, 330 bp, Setaria italica
  Peptide Sequence Number=SeqID_91510
gagatattagcaattctacagtgtgacagcatgtatgttgcacaacctacaatgcttcattgtagaattgctaatatctctaacttcgattattcagaactaacagacgtagaggtactaacaggatagccaaatactacatagtggctcataagcacaattgcatagtggctcatatgaaattgcttccaatttcatataaaattcttggcatgtatacgctaaattgcttagtaaattgcttagattctaaactggaccaccccatatgcataccggttatgagtaaaaccaaaacaaccccttgtgacagcattgtacagattatac

SEQ ID NO: 25537 - DNA, 274 bp, Setaria italica
  Peptide Sequence Number=SeqID_91511
ttgtactccatccattattaaatatataatgcttagaacaaacaaattagttcatgtttgaactaattaacttattctaaatattatatatttaaaaacggaggtagcattatttcactcaaattccatgctccatatatttcataatatgtctaataaatcaggttgatgctgggggtatttgtatatttttcataaacttagtcaaaactataaaaatctcatttttgggacaagactaaaacgacgatggatggaccaagtatccatatga

SEQ ID NO: 25538 - DNA, 309 bp, Setaria italica
  Peptide Sequence Number=SeqID_91512
gtcggagggcacttgaattgctccggaggatggctgagaaagggaatactaggctgctcgcccgacgtggtctcatacaacacggtcatcgatggcttctttaaggagggtgaagttgataaaggatgcgatctattaaatgaaatgatgcagcaggggatttcacctaatctagtgacttataactccagtattgatgcactgtgtaaggcaagggcaatggacaaggcagaggtggtcctccgacaaatgattcgtaaaggtgttcatccagataactggtcatatactaacttgatgtttgcatat

SEQ ID NO: 25539 - DNA, 374 bp, Setaria italica
  Peptide Sequence Number=SeqID_91513
cttcaacatgagctgcttcctcctcttaaagaggataggagtgactgggagaggaaacccctttcaatcaatgaacaaatacaatccgtgaatttgaatgtagaatcgctacaagcattggcacaagagttgagggatggcaatgttgaggtttattcttttcctccaaatgttgacagacctcttcctccagtcttcgttgcatgttcttcatagaaattatctcatcctgcaaacgaattatcactgctgaagaagagtggctttgatcattcaacttttgtttctcttccagaatcttctccaattctttctgaagcacagctttgctttcttcaatgtcctttttcttgcttacctcactctgcttctca

SEQ ID NO: 25540 - DNA, 1073 bp, Setaria italica
  Peptide Sequence Number=SeqID_91514
cttcaacatgtagctttctcatcttaaagaggataggagtgactgggagaggaaacactcttcaatcaatgaacaaatacaatccgtgaatttgaatgtagaatcgctacaagcattggcacaagagttgagggatggcaatgtcttccctcaacccctcaagctcggtggctgcagatgacaaagacttctctaactatgtattcgtctctgacatcctctccaactgtttcaggttgtcaatatgcagaagttcaatgctctcatggttcttgacaatctctttcagctcaacattgccatccctcaactcttgtgccaatgcttgtagcgattctacattcaaattcacggattgtatttgttcattgattgaagagtgtttcctctcccagtcactcctatcctctttaagatgagaaagctcatgttgaagtttattcttttcctccaaatgttgacagacctcttcctccagtcttcgttgcatgttcttcatagaaattatctcatcctgcaaacgaattatcactgctgaagaagagtggctttgatcattcaacttttgtttctcttccagaatcttctccaattctttctgaagcacagctttgctttcttcaatgtcctttttcttgcttacctcactctgcttctcaagagccaaatgtctcagtttgtcttgtgccagtagtaattgcttctccaaagagagttgtgccatttctgcttgcatacgcttgagatgctcttcttctgtagagatatgaagcttttccatctcggcttgcttgtcatttagctcgtcatgcttctgcttcaacaaaagtttcagattatctagctccaagtgcaagtcctgattagctctttcaagcagaaagaaatgttcgtctccgttgcccaaaagctgcggtacagtttgcatctcctctttaagcctgttgaacttctcctgggtatgcacaatttcagatttgaggttttgtaatctagcagttgattgttggcatagtgaaactgcagcttccttctcctcttcttgttgagcgaagggactccttgaaggcgaa

SEQ ID NO: 25541 - DNA, 294 bp, Setaria italica
  Peptide Sequence Number=SeqID_91515
gccgaacctcgctatcccagctccgccgccgctcaaccccgtcgccgaagacgccgtcgcctctggtccacgcgtccaccatcccggtccacgccacagtagaccccggcgcgtcccactgaccacgttgacccgtccccacttgtcagcctcccatccgtcccaaaattgctaggtaccccccacttagtgcacaccaaatgttattctacccattccttttatccaaaaattccaccaaaattccccaaaatattagatgatcccacaagccatttagaacaatccaaactt

SEQ ID NO: 25542 - DNA, 795 bp, Setaria italica
  Peptide Sequence Number=SeqID_91516
aagaaagaggcgcattccctttattccactctctgctgctcttcttcccctcccacaagccgcaaggccaaccggaagcaccaaggcgcaagatggaccccagcggcgcgatggaggagcgggtcgtgacggagcggatccgccggaagctggaggaggtcaacgccgccgcgcagcagcatctcgccggcgtccaggaccatgtcaacttcaccatgcagcaagcatacttcaagtgcgcatatgagtgcttcgatcggcaaaggaaccaagaagggatcaacaactgcgtggagaactgtagtgtgcctgtcctgactgccaacaatcttgttgagaatgaaatggccaggtttcaggagcgattgaatcggtcgttgatggtctgccaagacaagtttgaagcggccaagctccagaagatgaaaacggacgccactcaggaactggaatcctgtgttaacagatctatcgatgacagcatcagggtgcttccccatgtggtggagcagatcaagtcctccctcaaaatgaattagaggcgtcaggcgtggctatttttttttcatcggaaccagatagtagagaatcgttcaaattcacagttgcagatcaactccacttttttcagtggaaaatggttagctagaactatgcagagctcatactcgatggcggtataacataaccactgtatcgtgctactcctagcgtgaggatattgtcgacactcgataccgtcgttcttttgaattgtactgagctcacagcttatgcatctaaaatgtacaagga

SEQ ID NO: 25543 - DNA, 445 bp, Setaria italica
  Peptide Sequence Number=SeqID_91517
ggtgttcatgcacctgcgccgccatccgcctgactgttgatctgcagcagctctgcatctgatagaacactggccgccgggaagatgtcccgaagagcagcgaaatgccgtggttgcattgtcgttttgaggaacttgtcaaagtctgcctctgtcacacgattagcttcttcctctctagcaattatacccaacttcttcattgctagtatctcccccttcttggatggcctcactgttgtgttcaacagctgagtggcgaggcgtgtgctgcggcgtggcgtgtgcgtaggttctgcgttcaccggttgcggcgtaggccggcgcgcaagtggtgtttgcagcgcaagccgcactgaggagaggaaagcttgtgtcttctctctcaccgcggctgagtcagaggcagggtctagtctcgaggccggctcgtaggtccggtcta

SEQ ID NO: 25544 - DNA, 235 bp, Setaria italica
  Peptide Sequence Number=SeqID_91518
atttgtttataatcttgccacttgttcaactcttgatccgtgacttgttatccatttttttgttgcatgggcaattgttttgattttatcatgctatggattaggatcaatttatgcatctatcactgtggcaccagtgagctaattgccacttatgtcttagctgtaaacatttacacttgatcttgcgtgttttgctcttgcaggtgctaagcgattcacaaaagcgcgctgt

SEQ ID NO: 25545 - DNA, 450 bp, Setaria italica
  Peptide Sequence Number=SeqID_91519
gtggcaacttctgacttacgagtggttattattattctgcttcctttattattctcagtactcaaaatagcatctacgattctcttcttagattttgcctcccatacgtcgtcaatgacaattaggtacctcttgtctcgtaggaagtctaggaggtcgcagatgagcaattctgcacctttttgcgtagagtgaatcttccgaaagttgtcttcgtcaagcttgtggagaatgtccttaaaaactttcaccaagtccggattccgaccaacggaaacaaaagccccacgctcatagttttgtttaagctggtcatatgttgccttggcaagagtggtcttgccgagtcctccaaatccaagaacagagacaacccttgtcttcatgtcatcgtgggacaacatctttatgactgcttccttggactcatcgatgccaatgagcttggac

SEQ ID NO: 25546 - DNA, 366 bp, Setaria italica
  Peptide Sequence Number=SeqID_91520
agcgtactccagtccatcctcaagggataaaccaattgcactgtcaccattttgtgcaaaaagcagtgccatctcatcaagaaggccattgtattcagcttctaaatcatcatccagagcatcaggaaccttgttgccagttactacatcatacagagggcaagcactattcaacacagtaagttcaagaccaagctgagaacaaatcaaagaggatggatcagcccgtctttcagtagctatatcagcctccacccctgtaataatgctagcacccaaatctacaggaactgaaagtgacgtgcgatctgtataaacacgaccaccaatcctatctcgtgcctcaagaaacaagtagaattaaga

SEQ ID NO: 25547 - DNA, 315 bp, Setaria italica
  Peptide Sequence Number=SeqID_91521
ccgtggcgggggttcgatccccagccgctagtggacaatagtccctatgacagtggggcctggaaagagggccgtggggcccatatcgccgccattggcgtcgctgtctgcgtctcagccgtgcttggcaccatgggcgtgggtctctaaatttggcatggctgacgatggtgctgcaattgcttggctgcgacgaactgattaaacaagagggtggggtgggtgatgccttggtgttgcatttggtgatggaaagtgtgtgtgtttctttttcttcttcttttaattatgcgcgtgtatcaaatacagtgtaag

SEQ ID NO: 25548 - DNA, 563 bp, Setaria italica
  Peptide Sequence Number=SeqID_91522
ctccaaatcaaacgcctcctagatagtaattcagcatcggcttaaactctcaaagttgtgacgcttattttgaattcaaatcacattatccaccaaattgtgtcacactacaacattgcaactgcaaagatgttgtcagtcatcactgaaggcttaccggcagtccggcacacgccattggcaggcttcagctactcctggtcgcaccggactaggcggccacctttgctgcagagcccttgctcgccgatggtggcctccatcaccttcccgtagctgtaccgcagcggcattctccccagaagccggtggaactcggtgatgcactcccctctcttctcccagtgccccaacccgcctgtggcgctcagcccaacatccttcatcgcgcctccgtcctcgcctgcgccggcattcacgtcgttcctcgggtcgccccagtccctaatgctaccggcctcgacgagcacaggccccgtgctggactcctcggcggcgacgaagttcatgaggatgtcctcgcagttgcgctcccggtccaccacggcgcgcgcggccgcaag

SEQ ID NO: 25549 - DNA, 529 bp, Setaria italica
  Peptide Sequence Number=SeqID_91523
gttcgtcaggactatgctgttatttgctgaaaatagaggataaactgaagcaggtcctcgatgtttatgatgaaatactctcaaagaatgaatacctggctggcgatgaattcaccttggctgacctttctcaccttccaaactcacattatatcgtgaatactgagagaggaaggaagctcttcactaacaagaagaacgtggcaaagtggtacgaaaaaatttcaaagcgcgaggcatgggcgcaggtcgccaagatgcagaaggagcatcccggtgcattcgagtaatggcttaattttgtgagcaaggatcgacgaatttatcttcaatggcttcattgtttgtgtcagtctgccttctatggtgcagtattctttagtaatcccattgtttcacccatcagtgttgtcgtgtcaaccaaaataatatggagccgtacagtgatgtatgatcattttgttctgaaacgcatttacatccatgtgtccactgatccctgattaataaaattgtccgtttgtcctaa

SEQ ID NO: 25550 - DNA, 269 bp, Setaria italica
  Peptide Sequence Number=SeqID_91524
tttgttacattcgttatatctaaataaagtcttttttgttcatttcgtgtatttgaaagttgaagaaacattacacattgtcaatccaaacgggaaagtcacatgctggctttaaatataaaatctccacgggcggtagaatcgaaatttctactacgctgcctagaggtaaagaaacgaattacatcttcttgcaccgttctcatcactaatcaattccatcaaagctagaatagccgcagtagccagatacatgtccaagtcactag

SEQ ID NO: 25551 - DNA, 467 bp, Setaria italica
  Peptide Sequence Number=SeqID_91525
gcacacttcagtagcaccagggtggtggtttttcttgtgtagctctaattcatttcacatctgttgctgattttgtaagagccttgtagaatattatgttttctgggtggtccatgagctgctagatttcaactgatactgctagacttgcatctgttttgcaggaattgatgaaagatcaatttggtaactatgttgtacagagggtccttcagacttgtgatgataagtacctagggatgattctttcaagcatcaagttacacttgaatgagctgaagaattacacatacgggaagcatattgttgcacgtgttgagaaactaattgttacaggagagaaacgggcaaggatggtgtccctgagttcccaacaacagcagtcaccgatctgtacagctgtagacgcacggtagatgcatgctagtcccttttaagcattggagtcaatataaccagcagttggt

SEQ ID NO: 25552 - DNA, 1183 bp, Setaria italica
  Peptide Sequence Number=SeqID_91526
aaaaggggtgtaacttacaccccttccaacaggccctaaagatggcattctggcatacattgcacacttcagtagcaccagggtggtggttttttcttgtgtagctctaattcatttcacatctgttgctgattttgtaagagccttgtagaatattatgttttctgggtggtccatgagctgctagatttcaactgatactgctagacttacaactgatgtttttggcaattatgttatccagaagtttttcgagttcgctacagaaagtcagttaatccaattggcagatcaactcaaaggtcatattctgcaactcagcctccagatgtatggttgcagagtagtacagaaggttttggaggtagttgatatggaccggaagatcaatattgttcatgagctcaagaattctgttctgaaatgtattggtgatcagaatggtaaccatgtcatccagaaatgcattgagtgtgttcctgaagatcgtattccatttgttatagagcctattctttcacaaattcttgttctttgtacccatcaatatggttgcagagttattcagagagttctggagcattgccatgatccagcaactcaaagtgctatcatgaatgagattgtgcagcagactttccatttgacagatgataaatttgggaactatgttgttcaacacgttttggaacacgggaagccagaagagcgttcatccattattcaaaagctctctgggcaagtggtgatcttgagcaagcaaaagtttgcttccaatgtcattgagaaatgtttggctcatggaactcctgaggaacgtgatagccttattggagaaatcatttcttctggtcaaacatttcaggaattgatgaaagatcaatttggtaactatgttgtacagagggtccttcagacttgtgatgataagtacctagggatgattctttcaagcatcaagttacacttgaatgagctgaagaattacacatacgggaagcatattgttgcacgtgttgagaaactaattgttacaggagagaaacgggcaaggatggtgtccctgagttcccaacaacagcagtcaccgatctgtacagctgtagacgcacggtagatgcatgctagtccctttttaagcattggagtcaatataaccagcagttggtacgagtaatgtgga

SEQ ID NO: 25553 - DNA, 374 bp, Setaria italica
  Peptide Sequence Number=SeqID_91527
tctggatgcctgatgcgaactgatcggtccattcgggaggaagtgcgtcgaaagagctctgccagtagttggagatgttgggctcgcattcagaaggttccttgaagacccatttgtgacatttatcagaggccacctttcccatcagcccttctccgtagttgtagagctggatggacatcttgatgaaggccttccgcaccgggtcctcgccgtcgatgtcctccaggcactccgccacccgcggccggcagaacccgtcctcccacatcagcatcaggctgccgttgtcgtcgccgaccttgcacccgttgccgccgcggcaccgcgggcggggacggatggtccagaagacggagtacgtccagtccgag

SEQ ID NO: 25554 - DNA, 338 bp, Setaria italica
  Peptide Sequence Number=SeqID_91528
gcagggggcagagccgcagaaagagaaaggaaggatgcaggggcaccggtgatttcggtacgaagtgcgtcgaaagagctctgccagtagttggagatgttgggctcgcattcagaaggttccttgaagacccatttgtgacatttatcagaggccacctttcccatcagcctgcagaggacaggagaggagagggtgagggtccaaagcaagatcaaaacccatcgtcttagcacatcactcatgatcatgcatgcatgcatgcccccaaaagctcggtacatcaacaaagcgatcaaaacagaccgaaacacacaggcacgcagagacaaggtaac

SEQ ID NO: 25555 - DNA, 542 bp, Setaria italica
  Peptide Sequence Number=SeqID_91529
cttatcttgagttggcgcccaatgcctgtgaatgtgaatatcatgatcctttacaaaggccaagcagttctgatactcagggactgtcccaagataataagaataagggcgccgccaacctccacaggatacttgagccatctttgtttcattctcaaggtcccaaatgataaaatctgcagaagtgaaacctattgcataggtactcaattggctctcaggtgcaagattagtgtagatggattgaatggtgcccaattcttttacttgcctcattccaaaaaattcaatcttgcacacatttcttccatacttgaagaagcaaatgcagccatctcccccagtagtgtgaatttcaatttgatcggaactggagtcttttatatgaacacttgtgacactagaaatgccatgagctcctttaaaacggtcacatggaggcatcttctgttgcatcacaccactgtcatacagtaccaatatttttgggaaaggaaaggctgtgatgttaccctttttatcaccagctataaggatctccg

SEQ ID NO: 25556 - DNA, 313 bp, Setaria italica
  Peptide Sequence Number=SeqID_91530
ctgctgtaccttgactcagctgtaccttgactcaggtcatgtgtaggaattacaaagaataggccaagaagcaactaattaagctagaagacttcatcggccagcccgattgcgcgctgcaagaatttgtcagggggaggaggaagacgaagaagcaagaggccaagagaagcagaagcctcaagctggccaaccagtggtggaacgaagggaggctgggcctcccagtacccacggaggcgctgccgctttcctcttcagcccacgacagcaacaagaaccagccgggcagccaagacatggcggcgcccgg

SEQ ID NO: 25557 - DNA, 760 bp, Setaria italica
  misc_feature (5)..(5): n is a, c, g, or t
  Peptide Sequence Number=SeqID_91531
actcntaaaaatgagtgatctcagcacccaagcatgctttccaagtgctttccattccctctgctagaagttcagctgcagttgaactgtaccgatcattcattgacataactaacttgattagttgactaacaactaaacttgcaagcttagctttcacaatacttggataccaaacaaccaaagcagctgcaactatgatatttgatgccacagcgtcctggcttgtgcctcctatccacgaaagccattcctgattttcaaatgattccagccatgagatcatattagcagcgtcactaccatctttatcaacatttccactatctgccttcaactccccataactggatatagaagaactctgcacagcagagataagatcatccatattatctgatgaagacaagaggatatcagatgctttgtttttatgtatccgtagtggttgtggaatagaacgtggagctgcacagtggaacaaggaacgtgcagccattcgcacatgttccgaaggatgttgccaaaagctcaccagaagctgaagggatggaggttttatatctggaaccttttcagcaaaatgccttgtataaaatgctgccaaggcactgctagcatttgtacaagaacgagataaagtaatcatgcgttgagcaagagaaactatagacagtgacctcatggcacaaaattcagctgaagatttccaaagctcaagagtggcttctttgcctgggaacatcaatgtaaatgagcc

SEQ ID NO: 25558 - DNA, 460 bp, Setaria italica
  Peptide Sequence Number=SeqID_91532
tttttgttcatcaggtcggaaaaacaggtagatcttaggaattccagactaaaatagaacgcagcactggttactggaagaaacataaacttgttacagacatggcacattttagcatgtgtccaaagcgtataaggtcgtcatttcaagttttttctgcaatgctccagcacaccaagtaaatacggcaatctagaattcggaaacatgagcttaatggaagagaaaaaaaaagaaatgacccaatacctgctagcatttgtacaagaacgagataaagtaatcatgcgttgagcaagagaaactatagacagtgacctcatggcacaaaattcagctgaagatttccaaaagctcaagagtggcttctttgcctgggaacatcaatgtaaatgagcctctatcccctaccacccctgttgctatatggcagccttctggcttgcaaacttgcatctca

SEQ ID NO: 25559 - DNA, 526 bp, Setaria italica
  misc_feature (490)..(490): n is a, c, g, or t
  misc_feature (495)..(495): n is a, c, g, or t
  misc_feature (499)..(499): n is a, c, g, or t
  misc_feature (501)..(501): n is a, c, g, or t
  Peptide Sequence Number=SeqID_91533
gaccacgagcaggagcaggaacaggggaggaggaggaggaggaggatcaggaatttcaggatcccgttcctctacatcgatgaggacggcaggccgcgctatggctccagcgacgacgaggaggaggaggaggaggaggtggacccggagcagttcgaggtggccttgagagaattttacgctggactggatcagacgatcagaccacaaagctagcttgcactgggactggaagatgatcgattcggcatgccagagcctcctcctccatctcaatccactgccttcaacttcagctggagcttgctgttgagtttctatgtaatcttacttaagagatgccagatcaactggatcttgtgttttatttgaattcatcctatgagattcatatatctcattctcagactcatcatgcatgtttccaaattcagtctctagaatttacaactgacctaaaaccaaaaaaaaaaaaaaaaaaaaaaaaaanaaaanagananacgaacgaacgacaacaacggaggt

SEQ ID NO: 25560 - DNA, 1733 bp, Setaria italica
  Peptide Sequence Number=SeqID_91534
tgttgctccttctctctccccgcgccccgggggaagccgcgaccgccgcgccgatccactccggccgccatggcgatgccggcgtgggccgtcgccctcgccgcgctctgcctcgtcgcgctcgcgccgcccgccgcggggttctacctccccggcgtcgcgcccaacgacttcgagaagaaagatccgcttcctgtgaaagtcaacaagctgacttcaatcaagacacaactgccctactcctactattctctcccattctgcaagcctgacacaattgttgacagtgctgaaaaccttggtgaagttcttcgcggtgaccgcattgagaactctccatatacgtttgagatgagggagcctcagatgtgccaaatagtctgcaagatttctgttggagagaaagaagcaaagcttctcaaggaaaagattgaagacgagtaccgcgtcaatatgattcttgacaacctacccctagttgttcctattcaaagagtggatcaagaaggtgcttatttctatcaacatggattccatgttggagccaagggaaaatactcagggagcaaggatgaaaagtacttcatccacaaccatttgtcctttacggtgaaatatcacagggacgaacaaagggatgtttctaggattgtggcctttgaagtgaaaccgtacagtgttaagcatgaatatgaagggcagtggaatgataagaagacccgcctgacaacatgtgatcctcatgctcaacgtgtaattacatcatccgattctcctcaggaggttgaagttggcaaggaaatcatatttacttacgatgtggatttcaaggagagtgatatcaagtgggcatctcggtgggacagctatctgctgatgacagatgatcagatccactggttctccattgtgaattctctcatgatcgttctcttcctttcgggaatggttgcaatgatcatgctccgtactctttatcgggatatctccaagtataaccagcttgagactcaggaagaggcccaagaagagactggatggaagcttgtccatggtgatgttttcaggcctccatcgaactccgactggctctgtgtctatgttggcactggtgtccagttctttggcatgctgcttgtcaccatggtatttgcggttcttggcttcctttccccatcaaacaggggtggattgatgacagctatgctcctgctctgggtattcatggggctgcttgctggctactcttcctcacgcctctacaagttgttcaagggctcagaatggaagaacattgccttgaggacagcattcactttccctggcagtgtgtttgctattttcttcttcttgaatgctcttatctgggggcagaagtcctcaggtgctgttccattcaccaccatgtttgcccttgtcctcctttggttcggtatctctgtgcctttggtttttgttggaagcttccttggcttcaagaaacctaccattgaagatcctgtaaagacaaataagataccaaggcagatccctgagcaggcctggtacatgaacccaatcttttctattctgatcggagggatacttccatttggagctgtgttcattgagctcttcttcatccttacttccatctggctgcaccagttctactacatctttgggttcctcttccttgtcttcctgatccttatcgtcacatgttgtcttgtagtattcttcgtattttgttt

SEQ ID NO: 25561 - DNA, 1035 bp, Setaria italica
  Peptide Sequence Number=SeqID_91535
aaaaaataagctattccaacattttaactgtaatatatcttcgggaagtcaacaagtacataaattctgacatgaacaagaaatagattactcagcatccgtatacacttcgctctgcaaggagcgcttgataagcatatcctcgtggtccaaaggcacagcccaaaaatataaaacaaagagaaaacagaaaaatcactgggctaactataatacctgaattatatgataacaaattgccacttcatcataactaccagctttgagaactcaaaaccgagggccactcagctaatttctggggttctgtagatttcattatctgcagaatccatcttccttcgtggcaacaaagaattaggcaagaaagcacttcaccttactcaatcttgacggaagagtagatcaaccttgtgaacaggaagcaagcatagaatccgattgtgccagtcaaggcaaagaaggcatatgaagcaatgagcatgtagccaaagtaaagaacggcagagacgaacttggtgatctctagctttgtgaagaagtagaaggtcgcatacaagaagaggtagagagcagaggaaccagatgtcaagtatgacctccaccaccacaagtaatcctcactgcagagctggaagtagcagagcacaatcgagatctcagcacatgtgacgataaggatcaggaagacaaggaagaggaacccaaagatgtagtagaactggtgcagccagatggaagtaaggatgaagaagagctcaatgaacacagctccaaatggaagtatccctccgatcagaatagaaaagattgggttcatgtaccaggcctgctcagggatctgccttggtatcttatttgtctttacaggatcttcaatggtaggtttcttgaagccaaggaagcttccaacaaaaaccaaaggcacagagataccgaaccaaaggaggacaagggcaaacatggtggtgaatggaacagcacctgaggacttctgcccccagataagagcattcaagaagaagaaaatagcaa

SEQ ID NO: 25562 - DNA, 467 bp, Setaria italica
  Peptide Sequence Number=SeqID_91536
tttaattttacttttagtttttttacgttttagttaaaatgttgtcgttgcccatctgaccaatctccatctccttgggcggcggatgggcctataaaagcggcgtggttacgtcgtggccgccaagctcgcacacgctcggcactaggcagagcagatggacttccaccgccacggcttgctgaccacgctcggcttcgccgcgctgacgggcaactcggcgctcgccatctacagatcgcgggacgacccgggctccgtcgcgttcgtcgccggcgcctacgcctccatcgcgctgctcttccacttcctccgtaggttcgagcgcggggagggggacaggggcaggaccaaggctgccgtctggctcctgacgacgctgctcacggccatgttcgcctccagggtcgcgccgctgatgccgccgcccgtcggttccttggtgtacttgatggccgccggaaccg

SEQ ID NO: 25563 - DNA, 428 bp, Setaria italica
  Peptide Sequence Number=SeqID_91537
ccccagccccactcatcccgtatctctactactagtactatcatatacccggctaaaatctgcattttcaaagtttcattcgaagtacttcaaaaaaaagttttttatcccaacaagagttttgcttcatgtttatcatgactacagaaatagtaatcatggatgtataatcgcacaacctgcaggaagctgctagtttgacttactaaactacagttcagtcatggatgaacggttactaaattactcatgcaaaaaaaggtatggcaaactgttttgaccctgcaatgagaaagtcaatatgttgttttgcttatatatttcaaggagaaacggaggaaataaggttgctaccataacattattgattccttcattcaatatctagttaaggatgttacatcgataagacagaaaactaaatgtat

SEQ ID NO: 25564 - DNA, 1242 bp, Setaria italica
  Peptide Sequence Number=SeqID_91538
gtacatgcaagccaagtgattagtattaagctatagatgaataagacgggtacacccaggtgtgttttacactctcaatacctccagtagctactgaacgacgaagccatagaaggttggaagctaaatttgagaaacaatatggggcaagggaaaaaaaaaagcaaggaaggtgctagcttcagatgcctagcatgtttcacgaatatggtcggcacctgtagtgccgagctactgagctactagactgactgaatgatcaccgagttggccacgccagcttcctcaatggtcttggtcacgtcctcgagcggcttaggggggaacccggcctgaagcatgtattcgctggcttctggccttgttgcgtcgatgaacgcccgcacatcgctaattgtgtggcttgtgttgaaacgcgcgaccaagcggctgccatctgcaaacctgatttggagggaggttgatggcaaagaatcgtccactgtgattgtccttggggcagcggttgtactggaagcagcagcactagatgtgttattatcagaaggggcagcgagagttcttcgttccccttgaaatggagcagcaggcttgactggctcagtaaattcttcttccttccggataagattcacattaaccttagatttcccatcagctggctcaagttcagttgggcagtcagaattcttgatgctctctaaaaaggatgcatttgctggatcgtcaaaacttctaagtggaccgtcatttactgtaaagccattgctccagaagtagatgttgtgaacaatttcttctggcggctgtggtgcatcacgctgtacagtttcacctgtcagaagtctgccagtcccagtaaagttccttgaactagatctccggcgagactcaaatgggccttgcttagcccccttcgttttagcttgcttgaatacctcatctgcattgtttttacgttttgatcgatctctaacgaccattccgctcttctcgccgccggtgtagtactcgggtggtggtgcccactcatcatcctctccggagtcctcgtcggaccccgcacctcgcttgcccccaccgagatcggagagcgtcctcacattccccgcgccattcgcacgcccacccgccctgctgccgctaccgctcgcgccccgcgcgtcgtggctcctcttcagcctcttcgacggcctcctcctctcctccgccgccgccgcggcagaggcgagcgcggcgtcc

SEQ ID NO: 25565 - DNA, 363 bp, Setaria italica
  Peptide Sequence Number=SeqID_91539
taatgatttcatgcaaaccattacattcaacaaaggctttgttgatgcaaacaagcaacagaatgttaggagcatcttacccaatgaacatctttcatagtaactaacatcaagagaagtgtgcatgtcccttgaatgcatatcgtaggttaagcagagtaagcagtgcttgatatttctgaaaacttaaaatgcaaatccaaatgcttggattaaccactatgttttggctgacgatttgacaggtgttctttattaattattacccagtattcaattttatctcaatcaaaatacaggtcacaaatgtgttagtgtgtgggtgtgtttggccattcgactttatatcctctagatctgggg

SEQ ID NO: 25566 - DNA, 315 bp, Setaria italica
  Peptide Sequence Number=SeqID_91540
cgttacgctagctcgctgctgctgctactgctcatcagtgcagatcactggcgaccctgctgcgcaactgttcagctgcgcggaataattggcaacctgctcgtgatcactgatcaagcagtggcccacggtgtcgccgatccctggtgaccgacccatccatcgatcgatcgtccctgaccttattgtccgtgcaggttcttcgtggacaaggtgccgatccgcgtgtacccgaacgacgcgagcaagccggccagcaacggcttcttcccggtgtccaagcccatgtacatcttctccagcatctggaacgcc

SEQ ID NO: 25567 - DNA, 605 bp, Setaria italica
  misc_feature (581)..(581): n is a, c, g, or t
  Peptide Sequence Number=SeqID_91541
cggtggtgatcttctcgccgtcgcggtgctgctgctctcttgcctctcccgcggcgcgtccgccgcggacccggcggcgtctttcggcgacaacttcgagatcacgggcgccgaggaccacgtcaagacctccgccgacggccagacctggtacctctacctcgacaacaagacaggcgtcgggttccagacgaagcagcggtacctcttcgggtggttcagcatgaagctcaagctcgtcggcaacgactccgccggcgtcgtcaccgcctactacatgtgctcggacgtggacgcggccccgcagcgcgacgagcttgacttcgagttcctgggcaaccggacggggcagccctacatcatccagaccaacgtgtaccacaacggcgtcggcggccgggagatgcgccactcgctctggttcgaccccaccgccgacttccacacctacgccatcctctggaaccccaagcacatcgtgttcttcgtggacaaggtgccgatccgcgtgtacccgaacgacgcgagcaagccggccagcaacggcttcttcccggtgtccaagcccatgtacatcttcnccagcatctggaaccgccgacgac

SEQ ID NO: 25568 - DNA, 428 bp, Setaria italica
  Peptide Sequence Number=SeqID_91542
aaaaccaaacgtatcatactgctgagatgtctccaaagcactaccacccatatcctttatatcttcctcatcaagaaaactgtgtatgctttgctttttcacctcagctctattctttcgtgacgatgtaaatgtttgtggagtccacccctcttttgagccaacagtattgtaaaagccagcagagaagcctccagtaaatgcaccatgaaatcttcttcttccttcctcatccctcacctcctgcttccaggcggggagagcgcggagctggccggcctcggcgacggcccggcgcttgcgggcggaggtgtcctcctcccgctcgatgggcgtcccgtagatcacgagatcctcgtcgtcgctgtcggcccccatggtggccggaaccgagggaggccgaggagccccaagccctagctcgccgg

SEQ ID NO: 25569 - DNA, 404 bp, Setaria italica
  Peptide Sequence Number=SeqID_91543
tcgagtagtatcgacgtggtggtgcggggaggaggaggaggaggtcggcgacgaggaggcggggaagttgaggacggcgtcggagcccttgaggcagagcagcgcggcgtcgtaggcgcgggcggcggcctcgggcgtggcgtaggagccgagccagatccggcgcttctggttgggcgccctgatctccgacacccacgatccccagctccgcatccgcacccccttgtacggcctcgccgccgacttgccacctacaccgccgctctccggcctggccttgtcgtccgagaaggcggtcgcggtggcgacgccattgcttgtgttcttcaccatcactgttcgccgcggcgcggcgcggcgcttagatcttcctctgtgctgtgctgtgctgtgcgtgcctt

SEQ ID NO: 25570 - DNA, 255 bp, Setaria italica
  Peptide Sequence Number=SeqID_91544
gtgccggcaaccttttcttgctcatcttcgtcgtatctataccagaatcttggtgcttcatggccgactttcttgcagatttgacagatactttcttgggctgactgctactgttgctgttgttctggccaccacggttctggccacggccaccgctggtgcgccctcagttgtgccctccattgccacgactgctattgccgtgtccccgaaatcctccacgagaagatgagtttgcccaagatgtatattgtc

SEQ ID NO: 25571 - DNA, 274 bp, Setaria italica
  Peptide Sequence Number=SeqID_91545
atgatgatgcaaaccatgagcagagcaaaccagatcagatctaaaattctaccctgagcagaggcagagcaaaccagagctaaaggacgcaaatcagcagaggggtagctgaaaactggagagccatcacttcctggctaaaaccttcatcttcgttgtgtcacttttccacaggggatctattcactcttcaatcatctctcaaactaaaaggatatgatgcagagatagaagaggaggatgaaaaacgcacggagcagttcctactgaagca

SEQ ID NO: 25572 - DNA, 284 bp, Setaria italica
  Peptide Sequence Number=SeqID_91546
gccgcctccgcgtgttccacctctacggcggttgccggaaaggtcggaatccccgcggcgctcgcctgcgtcggcctccagacgctggacctcgcctacaaccagctcaacggctccgtgcccgcggccctcggcgcgctccctggactgcggcgtctgtcacttgcctccaaccgctttggcggcgccatccctgacgaacttggtggcgccgggtgccgcagcctgcagttcctcgacctctccgggaacctgctcgtcggtggcatcccccggagcctggg

SEQ ID NO: 25573 - DNA, 575 bp, Setaria italica
  Peptide Sequence Number=SeqID_91547
cgaattactgaaaaaaactaacaaaaaaaaaacactactgcacccaacaaagtgccctgtccaccacaccaacattgcagtggtggcgaggtaactatagagaagttaggaacacacgatatgcccgagttagaaacgttgcagctgtacagaagaatgtaactgctgctgactgagtccacacaaattcagctgagcggtgtagaacgctaatgccatgccctggtggatccgagacataacaagatcacccccttcgagctgacaacaatagtgactaggtaactgaatacaagttagacgttctctccttttggtgtcttgtttggaagaggtttccttgaatgtggtgcacctgtttcatttggctttaagatctgaaaagaacacattaagctttcatctatgctcaatagagcacctgcattatcaaattcaccacagtagtttggagctgaaaagatcgtgactaatcttctttctgcaaagaactcatagccatcttctaccacctgatgagctcggcatacaaggtcaagatcattcttctccaagaattctacaagcttatctgc

SEQ ID NO: 25574 - DNA, 272 bp, Setaria italica
  Peptide Sequence Number=SeqID_91548
cgtccccgcccgaatcgggccgaatcacgcgggcccgggcggcggccgcgcgatcccgccgcatcgggagcgcctctcgcacgaggagcaccgtaacacaacctgccgctcctcctcccaccgagacgaccaccccgcaccaggaggcacgccgggagaacgcctttgcctcgcagcagccgagccgatgcccctccacggccgaggacgcggcagcgggagcggcggcggctgcgggtggtggtggtggtgtgaacgggagcgaggtgagg

SEQ ID NO: 25575 - DNA, 252 bp, Setaria italica
  Peptide Sequence Number=SeqID_91549
gcttccgctccgctccgctctgctctgcttcgggtcgtcgccggcgggagcagagcacacccaccccgcgcggagcgatgtcatcggccgcggccgcggctgccatggccttcgtcggctgcgacgagctcagcgtcgagctcgccgcctccttccttcgctccggcgcctgcgtccgctgcttcgtcccgacccgaggcggcggaccagtcggcgtcggcggcgctcgcggagttgagcggcttgctccgg

SEQ ID NO: 25576 - DNA, 239 bp, Setaria italica
  Peptide Sequence Number=SeqID_91550
cccgaagaacaccagcttgctgcgcgcaccgtcgctgtcgccgccgtcgctgcacctgccggcgctgcccggacgagccggttgctcccccttgaggtggccgaacagcgcgccgtctccgtcctcgaggccgacgcgaccgcgtctcttcctcttcttggctgcaggctcgccgccgctgcctcgaccgcagcagcaacacgctacaagcagcgacgccagagcaaagaagaacaggg

SEQ ID NO: 25577 - DNA, 560 bp, Setaria italica
  Peptide Sequence Number=SeqID_91551
agggctacagatccttgcaaatgcatacgttacgtgtgttgtttgaaactttcatgcctacaacctaaacatcaaatctctcgattttggtggaactctttgatttactggaaaaaggggaactcatggaaggtccaaagctatcctcagttgttactgacatgcataaatacagacaaggggctccaaggaaaagatatggctccttgccaggaagcaagggcagagcacgacttaggactgaggaatctttttatgaaacccattcatgtacagttgcttggttatgggggccagtccatctgggccaacaaggtcactggatgctgatcactggaaggaaggcatccttcactgcctcatgtcatagagtatccgtttagtttgaaagtcagtagagctccaatggccaaaaagagcactagttcacttccaatgcgagtgaacggtgccattatacaactctatacatcagcagaacatcaatgcttcccagtcagacagatgcactcaggaaatgggtttcataaaaagattcctcagtcctaagtcgtgctctg

SEQ ID NO: 25578 - DNA, 478 bp, Setaria italica
  Peptide Sequence Number=SeqID_91552
tactacaactaatgcttggagcttccaagacatgattgtgttctttgatcaacttgatcacaacccaccacccatagtacttctgtgttacttcaatcattgcatgacaaccctcccttattgttgcatgacttctctctctcttaccagtgtcatagttttgcttcttattatggaaatcctccttcgaacaaacgaaacgcctcatgataatagactcatcattccttgagcgcctggacttgctaatgcacacagagaaacctacctgactagcgtaagctatgtagaacacctttgcagcttcctcttattcaaactccatgccaacaaaaggttcaccattttccaggttttcttgcttggattactattcatgtcaaccagatcactgatgatatcaaatgccatctggttttcaatgtgatcatcatcaagaatcaagatcgacattttggtcccttactgaatcatcttt

SEQ ID NO: 25579 - DNA, 1537 bp, Setaria italica
  Peptide Sequence Number=SeqID_91553
ctcagcttcatggaggaggccgcggccgtggagcggccgccgcgggggcgctgcaactgcttcaacggcagcaaccacgaggagagcgacgacgaggagttcgacttcctcccctccgagcacacctcctctgcggccaccgccggcgcaggcgacgcctgggaggctctcaagggcctggtgcagagcgcgagcgttgcggaacggaatcttctcgccgacacgtctaggatcgcggacaagtgcggcaagagctgcaagggcaaggcggagtgccgccgcgccgtggccgacggcctcagggccctcggctacgacgccgccgtgtgcaaatcgcggtgggagaagactccctcctaccccgcaggggagcacgagtacatcgacgccgtggccgtggtggggaaggaggaggtgaggctgatcgtggaggtggacttccggtcccagttcgagctggcgcggtcgaccaaggcgtaccgggcggcgctccaggcgctgccgccgctgttcgtggggaccccggaccggctggggcagatcgtggccgtcgtggcggaggcggcgcggcagagcctcaagaagaaggggctgcacttcccgccgtggcgcaagccggagtacatgcgcgccaagtggctgtccccgcacgtccgctgcggcggcgacaaggccgtcgccccgggcccaggcgcggccgcggccgcggcgcccttgtcggctgctacaccggtcaaggcagcgagcttttccggggagttcgagctggtgttcgacaggaagccgaataaggacgccgccgccgcgggtggcggcggcgtcggcgagaagatcacggtggtggtgtcgccgtggcgcccgacggaggaggcgagcaagaagcagcaggtgcccaaggcgaaggtcctcacggggctcgccgccgtcctctgagcgtggcgtggtgaaacagagaaggaataactagttaccgctagctagctagtagccgctcaactactactactccgtcccccctcccaatttttttcctcctctttttcgtttctttttcgccgcgcctctcgatccgtttgggggtctagtttttggtgttttggtgttttccggggttttttcggaaaagagaaaaaacacttcgtctattttgccgccgtcgtctttactagaatctcccccgttttttgaccccttgtaatttttggtcttggcatcttgaggaggggcctgtgatcgatcccttctgccgagtggtagtatgtagcagcagtagtttcagttgcaaggaaagtggttattggtcagatgaggttgcttgcttgtggcacatgcctcatgatcatcagcttgcctacttgtaggggcaatcacgcctctcctattactagtgctacctgttattggtatggaagagatgaacaatgagtacctcctgttattgtccatctcttccataccaatcacgccgtctcctattactagtgctacctgttattggtatggaagagatgaacaataacaggaggtactcattgtt

SEQ ID NO: 25580 - DNA, 363 bp, Setaria italica
  Peptide Sequence Number=SeqID_91554
ggaactccgggtgcgcgctcaggagctcctcggtgtggtgcaggtagcgcctctgcacgcccagtttctggcaaactctcttgaacttttctttgaggccagtgaggtgctcgctcttggtggcgcggaagtagaagtcggggaagtcttcctggagcacgcagttgcccgggttggcggtgccgatggcgagcacggccgcggggccgtcggcacgccgtgcgcggcagatctcgtggacgttggccggagcgggagcccttcccatggttgctggctttctgctatgctactacttgctattgctaccagcagtaacacggagacacggagagagagcttgttgagtagatgttgctgtcg

SEQ ID NO: 25581 - DNA, 482 bp, Setaria italica
  Peptide Sequence Number=SeqID_91555
aacctagccccctccgccttccggtcggacatcccccctccctcaccaagatcttcgccgccaacgggctcgacctcaaggacctcgtcgtcctctccggcgcgcacactctcgggacggcgcactgcccgtcctacgccgcccggctctacaacttcagcagcgcctacaacgccgacccaaccctcgacagcgaatacgctgacaggctgaggacgcgctgcaagagcgtcgacgacacggccatgctctccgagatggaccccggcagctacaagaccttcgacaccagctactaccgccatgtcgccaagcgccggggcctcttccagtccgacgccgcactcctcaccgacgccgccaccagggagtacgtccagcgcatcgccaccggcaagttcgacgacatgtacttcgaggacttcggcgagtccatggtcaagatgggaaacgccggcgtgctcaccggtgctcagggcgag

SEQ ID NO: 25582 - DNA, 330 bp, Setaria italica
  Peptide Sequence Number=SeqID_91556
aggaggggaggactatcgccggcttctgctccgcccactgccagccgtcgcagtccttgccgccgagcgccaggagcgggggcgggagcgtggagatggcttgggaggagagctgcatgcggcggcgcttcttctcggcggcctgctcgacgaggtggcgcgtgacgccgtcggggtcctcggcgagcctggcgaggaaggacatgagctggtcgggccgccgctccgtggcctgcaggcggcggctcatctgcgccagctcctccccgatggccgtctgctcccgccgcagccgctgcacctcctcgagcagcgcctcccgctcctcct

SEQ ID NO: 25583 - DNA, 258 bp, Setaria italica
  Peptide Sequence Number=SeqID_91557
gcagctgctgccgccgccgaccgagccgcgactcctcccgtcccggtcccgctgcagcgccttccggggtccgtccctcgaggcagggggcgggggcggcttgatcgccgcagatgagacatggcttcgatgctaaacattgttataggctctcatgtatgggtggaagataaagatttagcctgggttgatggtgaggtattccgaattgatggtcaaaatgcccatgttcgcacaaccaaggggaagacggtcatt

SEQ ID NO: 25584 - DNA, 893 bp, Setaria italica
  Peptide Sequence Number=SeqID_91558
aggactggctaccattcacggaggtgacggggaacgagaagctgctgcagtcgatgcccagcggtagtgagatgccaggaggtgcgccgccgggtggagcgcacgacagggaggagcgccaccgacggcagggaggtgcaggcggtggagccgctagaggaggagatgcggaggaggtgctggaggaggactcggggagaggcgctgtggcttgcggtggcgtggagtgcggaggtggaggtacggcggcgggaagtgtggaggcgtggcggcggcaccgccctggcttagtggctgtggctgtggtctgtgactgccaagctgagagcgtgcagcgacggttgagatgcttaaggtgaaagcccttgctggcttttgggccggtgcacatgacgacggcgtcctagggcgtcgttttccctgttgagggcgtcatgttggagctacaacctcctgcacaggggtcctccgagtgaaaatccagtccagctcctggacgagcgacggcggcaccactggcgtcgtggcctccttggaggcgtcgtctctggagacccgactcagctcggcatcgcgggtccactggtcataggcggcagcagctggtggcggcaacctcgctatgtggcaagcttcaagggggctgctgagctcacgtggtggcaatcacagtcatggtggcgaccagggattgttgtacagttgtcggttggctgcttgcagtggattacggcggttggcgttgcttggcaacggccagtgccgcgtgggactgcgtcttgggacggcgcttgcggcagcggcatcgtgggacgacttggcttgcagcggaccgcggcgggtttctcagctcggctgggtcatccggtgcggtacatcatcagaagacggcg

SEQ ID NO: 25585 - DNA, 855 bp, Setaria italica
  Peptide Sequence Number=SeqID_91559
tttctgtacatctccatcaaatttgaatacttggaatggcagataaccagccataagaacaaataggataaccccacatgaccatgtgtcaacctttgcaccatcatatccttttcggctgataacctcaggtgccacatatgctggagtgccacaagttgtgtgtagaaggccatcttggcgccttgactcagcaagagcactcaatccaaaatctgaaattttcaggttcccgttatcatcgacgagtaggttttctggcttcagatcacgatggtacacacccctactatggcagaaatcaaccgcactaaccagctgttggaagtatttccttgcagcatcttctcttaacttacctttagcaattttgttaaacaattcaccacccttgacatattcaagcacaaagtatatctttgatttagtagccatgacctcataaagctgtatgatgtttgggtgccttactaatttcatcactgatatctctcgtttgatctgctccattaggccaaccttgaaaattttgtccttgtcaatcactttaatagcaacactttgtgaagttactatgttcctagcatgatataccttggcaaaagttccctgccccaataattttccaacctcataccgttgcatcaaaatgtttccattcttctctgcttccatcataaacaaatcctagcagatgattcttattatcttattgtatgaagccaaactgataaaacaaaaaatttcaaccgtcttcagaaattatacaatctagcatagcaatatttctgacattagtggcatcattactttctgatatgcacctaatgtgcacttgaaatccttgctcatcaa

SEQ ID NO: 25586 - DNA, 228 bp, Setaria italica
  Peptide Sequence Number=SeqID_91560
gctccttctccattgctgccatctcgtcttctcaccggtgccgtgaagcgaaaggcaagcatggaggagccgctcctcgccggagcgacggggacgaagcacggaggagatgaggaggagagcctggcggtgcgcgaggtcaagaagcagctgtacctcgccgtgccgctcgttgtcgggctcctcttgcagaaccctggtccagatggtctccgtcatgttcgtcgg

SEQ ID NO: 25587 - DNA, 649 bp, Setaria italica
  Peptide Sequence Number=SeqID_91561
atagaagcagttaccatagaagcccctatccttgggtagcacctgagtgaggaggtgtcgggtgttggcgaagaagcaaacatgaacctcagattccaaattgtacttgattgccttagctcgtgcttgccaaaccttggcaacggcaacatcaaaggtggaacagtactggcctgtggcctggaagtactcagccttgatatggacgatgaggtcagaggtcacatctatagtgaagtgttggaactcaaaggactggaaggatggtggtggaccaggaggaagtttaggtgggttcggtattaaggcccgagcccatataggtgctattgtgggctttcccattccacgggcaaactcagaaattgtgttgatgaattgggctgcaccgagcccatcagcaagggtgtggactgcgaccagcccgaccacaaatcctccacacgcaaattctgttacctgcatcatgatcggaatacttgtagggtcaacgccttcctctggaacgggcagtagctcttcttctgagacaatgagcgggtagtcgaggccgttaacatcctcgaggctgcagtccgcgacggcctccacaaaccaggcaccgtcgtcactgcactcgacgcaggcctctccggccaccaccgagccg

SEQ ID NO: 25588 - DNA, 671 bp, Setaria italica
  misc_feature (59)..(59): n is a, c, g, or t
  Peptide Sequence Number=SeqID_91562
cctaaaaacaagaggagacgtatggtatctgcaaatcctttatatgcagcccagtgaanagggcttctcccatcgttatcagggacatcgtgatcagcattccgttttgcaattatatgacaaagaaatgctgtctgaccatactgtgctgcaacatgtgtggtctggtatccatataaatcagcggcatccatcttagctccttctttcaaaagtaattctgcaacttgaatatgaccacgcacagcgctccagtgaagagctgtttgccctgtgtggtctatagcatttacatccgctccatgctcgagaatgtactgggcggcggcgacgcggttgttgagcgccgcccactgcagcgcgtggtaccctagcgcgtcgggctccgtgacggagcggccctcgcgctcgacgaggcggtgcagcttctcgaggtccccgtacgccgcgcccgtgtacacgtcgtccttgagcgccgcctcctcctccccctcctgccctgcccccgccgcgacgaccggtcccgccccgtccccggtggcggcggcggtggagacggtctcggtgtcgtcgaccacctcgatctccgacgaggccatgggggatccggcggcctcgcggcgtgggattgggtcgggaggacgcaaggcgaggaccctgctcgacgacga

SEQ ID NO: 25589 - DNA, 364 bp, Setaria italica
  Peptide Sequence Number=SeqID_91563
cgctcattagtgtcttctgaagtggctgggcttgaaaattccagaatttctggtggagtttgtgatattgtgccacaagatttgagataatttgcctctctcctgagctcctcgtcgactcctccaccattagctgcctccacatccagccttccacccgcttcaattctcttgtcgtcattcaggaaggcgtccccgatgcggctctcccgtacgagcggatcgcggagatcgccggatggttcggagccgccgcggaagcaggagaggaagcagcccattgcgacgcgggagctgaggaggaaacccaacacaccgcgcgtacagtcggcgcaaccgccgccgccgagggtttgggctagcg

SEQ ID NO: 25590 - DNA, 433 bp, Setaria italica
  misc_feature (3)..(3): n is a, c, g, or t
  Peptide Sequence Number=SeqID_91564
ggngggggaggaggccgccgtagctccgggccaccgccgctgcaatggccgacggcggcggccggctctgcatcggcgagggtcgatgaggaagttggaggaggacgagtccaccatccacaagcccgtcgtcatcatcgcgtggtggtggccgccgtcctgatgatgatggtccaggccggcgaggtccgggcagctggtggcgccgctgatgtcgatgccggcgaccttgctgctaggctccgtcggcgacgcgcagtcggtggccgccggcgacgaggccgaggagctgttcttgagccgcttcttgatggtggagttccagaagttcttgatctcgttgtcggtgcgccccggcagccgggcagcgatctgagaccacctgttgccgaggatggcgtggaggctgacgatgaggtcctcctcctgcggc

SEQ ID NO: 25591 - DNA, 1200 bp, Setaria italica
  Peptide Sequence Number=SeqID_91565
tcggagatgatgatgcccatgatgtaggtgaggaggtcaaacacggactgcagtgagttctgcaccccgcccaccacgcaccgctcgtgctcgggcacaccgtcctgcatcagctgcatgacggcgaggtcgaacatccagagccccaggcgcgatgccgcgacgccggccatcagcatccacgccgacgccacgctgctgctcgcccagatggagcccacgcacaccagcaggcagcaccactgcatccagatggaccatagacctgtccggagagtggacacccacgagtgcaccatcgggtacagcagcgtcgcaccgatgccgacgatggcgctgaagccccgcgccagactgatcacgtacgcagggatgcccttccagtccagcgtcgctgtcattagcgtgccaaagctcaggacggtgaagtagaggatagagagagcgaccccgggaagcgccacatcctgccttacgtacaccacccacgactcccagcagggtatgatcgagagctgctccgtcagccttgtcctccagtctgccgccctctcggcaggtgcggcaatctcctctgacgacgataacacatcagctgctctctgccggccgttctcggcgttgagggcgggcacgccgttgtacaccgagacgaagagccagtactccagccccaccgaggcgacgttccacagggccagcgccacggctgaggcctgcgcggacacgaagctgaagaccatgccggagaagactggggccagcagcttgcagctcaggtcgatccgccggatcaccgagttgatccccgtcagcactgatggagggtgcccacacgagatcaccaccacccattctctctcgatcagaatggtgccggcaagagttgagagcgctgcaagcgcacctgacacattagtaacaatgacaagcgacatgaatactgggaaatttgcgtctttcaggtcctcgtagatgagcagagcggtcaccgagactccagcgatgatgaaggataagctttggactagcaaccatatcccaagaacctgaaggtatgtgagcttgtcgacgagtatcccaaccattgggccaaatacggcgacagaagcagactcaacaacgccgtaaatcgctgtgaagaggagggagcctgggcagatgcggatcatgtacagcccaaccgagaactcccacatc

SEQ ID NO: 25592 - DNA, 442 bp, Setaria italica
  Peptide Sequence Number=SeqID_91566
tttttttttattttgattgtttctcatgaaaaaaaatttctctaaaaaatgtatctatgaacgaactgtaggtacggagtagaaaataacactcttccacttcacataaacacgaacgaacatactgttcagtgttcaccgacaagtagtgatgttagtgctaataaagaaacacacgtaggcgtaggtgcagctacagtggaagttcgttcgccggagctttcgcaaaagcaaactaggcacaggcaagcagaggacggggtcgcgtcgccagcatccgtggcccccggccggacgccacgggcagacaacgccgcgcaggcgcatctcaccccgctcgtcgtcttccatcggttggcgagcggcggacgccacccccagccccaccaccaccacgggctggaccgcccggatcgcggcctccgtgtccttatcctcctcg

SEQ ID NO: 25593 - DNA, 293 bp, Setaria italica
  Peptide Sequence Number=SeqID_91567
cgtgctgccgatgttagccgggagcgcgccaccgaagtagttcagggacaggttgaggtactgaagtgaagcgcagcggtagagcgtggtcgggaacacgccggtgatgttgttgctggagacgtcgaggtaggtgaggccggtgaggtcgccgacggcgtccgggaaggggcccgcgacgttggcgttggcgagggtgaggttcacgacgcggccggccgcgtcgcaaccgacgtgcggccagctgcagagcgtggccgcgtccgtggcgtttcaccccgcgagcgcgggcg

SEQ ID NO: 25594 - DNA, 392 bp, Setaria italica
  Peptide Sequence Number=SeqID_91568
acggcttttcactctcatttcttctattctcagagaggctgattgcaaataggtctgttgtaagagggggagggaatagttagagcattgtcaaagatcagaaaaaaaacattaattgtgaaccaagactctgaatagggatctttcatttaaattccttcttgcaagatccaagaaattaacctattccgattggtgttttggaaatgtgaactgtttttctgtaaatagtattgatggtttgagccttagaaaggtttgtcggccaaagccagtagcgaaccagtttccaacctggattttgctggtatttagcttcacaatggtgagccgggacaactggcatgaggcatcacaaggtcccatgacttcaaacatgtacagaggggttt

SEQ ID NO: 25595 - DNA, 1122 bp, Setaria italica
  Peptide Sequence Number=SeqID_91569
gagagagagcacacgcgaacgcccagctccgccgtttagcgtggaggcgtttcgaaaagttgtatcgcagctcgcgaccgaggggagaaaggtggggtaggaggcgatggcggcggcggtgccgagcatcggaatcatggacggcgcctacttcgtgggtaggggcgagatcctgcactggatcaatgcgaccctccagctctcgctcgccaaggtcgaggaggctgcgtcgggggcgtgcagtgccaactgatggatatggttcatcctggagtggtgccgatgcataaggttaattttgacgcgaagacagaatatgatatgattcagaactacaaggttcttcaggatgtgttcaacaagctgcgcatagtcaagaatattgaggtcaacaagcttgttaaaggacgaccattggacaacttggaatttcttcagtggttgaaaagatactgtgattctgtaaacggtggaattatgaatgaaaactacaatcctgtagaaaggaggtccaagggatgcaaagaacgtggctcaaagggttccaataagtcatctaaatcattgcaggcgaacagactttctggtggtgattcagctgacggaggccctggagttggaaaagtatgtaacacttttgctgaagagcattacgtagaacagattcagcagctgtctgaaaagattgcagacctgaaagtttctgtggacagcatggagaaagaaagagatttctacttctcgaagctgcgtgatattgagatactgtttcagcgacctgagttggagcatctaccgatgactaaagctgttcggaagatactttatgcggctgatgcaaaggattcaccactacctgatgcgaatgatataatcaccaagtcaccaggcttgttctcagacgaagccgagtgagatgtgcacgctccatgagctaatttgtggctatctattgtccaccatcgtagttctgaatctgtagctgagcaaatcacatttgacatgagccttcattgcatgtcaaaaacagttttcctgtaagaacttgctacttgcgagtaattaactagttatgttgaattcatgctcaacgtgccagtccctgtgtgtcttccggggaga

SEQ ID NO: 25596 - DNA, 433 bp, Setaria italica
  Peptide Sequence Number=SeqID_91570
caaaaacaaatcttcatggcctaagggaagcatgggatcaagtgatgaactggggaacctacaacaaactgaccaagctattgttcagtcactagagggcaatggcaaccaagctgaacaaactaaagcacatgacactgaaactggtgggccagaagacatgaaagccccagaaaataccaatcagaagaacaacagaatgtctcaagtggaaacttcaaatcattcaggaaaagaagcctcaggagttcagcggttaggcgagagcacaagagatactcccaactcaaccgagggtgcaccaggtgatgtccaagcaattggtaaatccaaggaaagctcaaggtcttctgaagaatccaaggtgcagctacagtctgatgacaagaccggtgaaactgaggaaccaagctcagaaaaccgggcaacctag

SEQ ID NO: 25597 - DNA, 351 bp, Setaria italica
  misc_feature (36)..(36): n is a, c, g, or t
  Peptide Sequence Number=SeqID_91571
gtgaacatcgaagaagaaaagcccatcatggtaggngttcccttaggtccaataatcgcagccctaagaaggtcaattctatcctcggcaacccggacataaatagatgctggtagatccttctccagaagtttccagtcatgttgaactctcttggaccaagctctggctggctgaaataatgatcacatgcaagaataggtaagtgcccaagagaagcataaatcaagagcaactattagttgagcatgccacctctccctgagaacatttagcaaagtgatggtcagagaaattttgaacagtgtcgaactgcttgaactgcttattattttattttgcatttcttct

SEQ ID NO: 25598 - DNA, 463 bp, Setaria italica
  Peptide Sequence Number=SeqID_91572
cgattgactgctggtccttgctttggtgcattgctgctgctactgctggctgctcccgcctcactgcttttgcagtcagactcttcctccggcactactgagccaacatcatgaccctccatgtagtgcttgcatgctgcgagaatggtgtgcccatgcacccggaagtggccggcaacaaggtctgcaaagtgctctggaggcctccgaagtgagtacaacatcgtcctgcatgagtgcagaaaggtagtgtcgttatactccaaagatttcctctgtccatgtggagtgttggctgaggcctcatatcctggctcgttgtaatatgggttctcattcaaaatgagagcttgaatggagacaagaacctgtagcaaggttgattgagcaggattccacttctcacaaccattaccagtccaggtacccagcaggctaaggcatacttttccacagttattta

SEQ ID NO: 25599 - DNA, 1549 bp, Setaria italica
  Peptide Sequence Number=SeqID_91573
ctgcaggtttgttcttcaacttctcaacaatgaacttcctcgtgtcggcacccttcacattgaattccatcagaagatcttcatacagcgtcttcaagcttgtgttgaatgtgattgcgcgtctggacagagggtttgctgcattgactgctggtccttgctttggtgcattgctgctgctactgctggctgctcccgcctcactgcttttgcagtcagactcttcctccggcactactgagccaacatcatgaccctccatgtagtgcttgcatgctgcgagaatggtgtgcccactgcacccggaagtggccggcaacaaggtctgcaaagtgctgcaaggagccacaagccaaacatggatcagttccgttacaatacaaatcagcaaaaatcagatttcactcctttgtcacaccagtattattattaacacattacctctggaggcctccgaagtgagtacaacatcgtcctgcatgagtgcagaaaggtagtgtcgttatactccaaagatttcctctgtccatgtggagtgttggctgaggcctcatatcctggctcgttgtaatatgggttctcattcaaaatgagagcttgaatggagacaagaacctgtagcaaggttgattgagcaggattccacttctcacaaccattaccagtccaggtacccagcaggctaaggcatacttttccacagttatataagtttggattaatccgaagtcctccagagtggtaatgtaccaacggagggccagaaggataagaagagggaatgtgaacatcgaagaagaaaagcccatcatggtagggcgttcccttaggtccaataatcgcagccctaagaaggtcaattctatcctcggcaacccggacataaatagatgctggtagatccttctccagaagtttccagtcatgttgaactctcttggaccaagctctggctggctctccctgagaacatttagcaaagtgatggtcagagaaattttgaacagtgtcgaactgcttgaactgcttatatttatttgcattctcatcttcagtatttgatttagatggctccttggcttcttccttggctgcaattttctgcagccacggtacagtagcctccacacctggaggcagatctaaatcatcaaatttatcagcgagatgctgattaaagtcagcttcatcaaagtcatagtcatcttcatcatagccatcgacatcatcatcacagtcgtcctccatatagtaatcttcttcttcttcgatttctccagagtcaagatcctgaggttctggttcggaaatttgtaaagtacttgtgctggatgaaccctggcatcgctggcgcttctgctgctgcgcggcgccccatgcggcggcgtcggccgtgcggcacgacgaggagctcccctgctgcaggccgaggtactctgcgtccatggcggcggcgggcgacgagccgctgcgcgatcgccggcgaccgatcgaaagatggagcggaacggaagggaagggggaggggattgggaggccgaatcgatcg

SEQ ID NO: 25600 - DNA, 475 bp, Setaria italica
  misc_feature (443)..(475): n is a, c, g, or t
  Peptide Sequence Number=SeqID_91574
cgtaagatgggtcttattaacgttcctgggctccggtccgcgtaaccgttgtgatccaaattcagcagaatttgagcaaccatactgctcacagcttggttgtggaggtcagcagattgtttttgctgaagttcagaagtttctgaccatccaccggatgcagatgccatgacttcaacctgcttcattttatctgaagccaaaacttgaccggtccgctatccacagcagacaggttcagataggctcaatgacactatttattcatatagcaagttttctgaatgctagggattcaatcccggtccattttgagaaaaggatgtgtatctgcacgccgcgcctcaggcgagacatgcgtgccataggcacttgtaccgctacgtttcattatcagatatagtatcaccacatttctagaacaatttactagtacaaaaaannnnnnnnnnnnnnnnnnnnnnnnnnnnnnnnn

SEQ ID NO: 25601 - DNA, 187 bp, Setaria italica
  Peptide Sequence Number=SeqID_91575
cgacgaggaggctcgcggcgctactactgctgcctctcttctccatggctggctctggctggatgcactactgcttgattgcttccacagactctacttggtttggttctcctccaagaaccagctgctcggcacacacatttatatatatatgcagagatgaggtgcagaggtagtggtgcattca

SEQ ID NO: 25602 - DNA, 1168 bp, Setaria italica
  Peptide Sequence Number=SeqID_91576
taggacgcttcccaaggctttacccctctgctctgctgcttcgctccggctactagcgtgcctaacatcgatcggaaaagataagacatgggtcaggttttgggtttagtgcaagttgatcagtcaactgtcgccatcaaagaaacttttggcaagttcagtgaggtcctggagcctggttgccacttcctaccctggtgcatagggcagcaggttgctggttacctctccctgcgtgtgcggcagctggatgtccgctgtgaaacaaaacaaggcaatgtcttcgtcactgttgttgcatctgtccaataccgtgcgcttgctgataaagcatctgatgccttctacaagctgagcaacaccagggaacaaattcaatcatatgtatttgatgtcattagagccactgttccaaagctggaattggatgacgcatttgagcagaagaatgacattgcaaaagctgttgaagaggagcttgaaaaggcaatgtctacatatggctatgagatcgtgcaaactctgattgttgatattgagcctgatgaccgtgtcaagagagcaatgaacgagatcaatgcagctgctaggatgaggttggcagccagcgagaaagctgaggccgagaagataatccagatcaagaaagctgaaggagaggccgagtccaagtacctggctggtgtgggtattgcaaggcagcgtcaggccattgtggacgggctgagggacagcgttcttgccttctcagagaacgtccctggcaccactgccaaggatatcatggacatggtcctggtcacccagtacttcgacaccatgaaggagattggggcctcatcgaagtcctcttcagtgttcatcccccatggtcctggagctgtcaaggatgtcgcggcacagataagagatggcctcctgcaagccagtcagtgagagggccctgagaaaagaaagtattggttttgattgcaaaagcaatgttgagggcactggttatgtggtgctttaacttgtgttatatgatatagctagacttgcatggtttgtgaatggtcagtaggcttttatattgattggaccacttgcgagtggatatcctatatgttagcgtggaaagtccatttggatcgaactcggagcttaatattgaaagtgcagcttctga

SEQ ID NO: 25603 - DNA, 321 bp, Setaria italica
  Peptide Sequence Number=SeqID_91577
gtttccacgccgccgtcaacatgtacctctccgccgtcgcctcgaccgccgcccccgccgccgcgtcgacctccctctcctccgtcaatcgccgccgatcgtcgcctgcgtacaggatcccggcgccactccctcgaccccttccctgcaggctcctgtcgtcgtcagcaccgtcccactctcccctcaggccggtctccgccatggcctcctaccccgccgccgccggcgaggcggcctccaggaagaaactcatcatcttcgacgccgaggaggacctcgcggcgtcgctggccaagcgcacggcggagctgtcggacg

SEQ ID NO: 25604 - DNA, 489 bp, Setaria italica
  Peptide Sequence Number=SeqID_91578
catcccatgactcaagttccgctctcctccaaaggccagagtgacgcccggaagctgccagtatgctggagcctaccaaggactgctgccatctagttggagtgaatttcttcaatgctgaagtaggaattacaataccatgggacatgcggcagttactaccaaatcgacatcgctgctgtagaaagaacttgcacatcgccatgttttcagatgtgggtgtcagaaatgagatcctcgcatcgcttgaaccttcaaatcctataatgcatccattataccagcggccattgttgtgccggaatctgcacttcgatccaactgaaaaatcatgcgacaccagtggttctggttcaacatcatctggatctaatggctcaggagcaacttctggtgcctgggatgctggttcttcatttgaaaaatatcatctacttgcttcactaccctagaacgcttcaggtcgagaagtccctcctttgcatcctt

SEQ ID NO: 25605 - DNA, 768 bp, Setaria italica
  Peptide Sequence Number=SeqID_91579
gaaagtgaatcacttgtaagccttgcagaactcccatcatctagaaagacaacctggccaagcttcagattatcatcccatgactcaagttccgctctcctccaaaggccagagtgacgcccggaagctgccagtatgctggagcctaccaaggactgctgccatctagttggagtgaatttcttcaatgctgaagtaggaattacaataccatgggacatgcggcagttactaccagccatgttttcagatgtgggtgtcagaaatgagatcctcgcatcgcttgaaccttcaaatcctataatgcatccattataccagcggccattgttgtgccggaatctgcacttcgatccaactgaaaaatcatgcgacaccagtggttctggttcaacatcatctggatctaatggctcaggagcaacttctggtgcctgggatgctggttcttcatttgaaaaaatatcatctacttgcttcactaccctagaacgcttcaggtcgagaagtccctcctttgcatccttaatcgcagcaagaagttcctcatgaacctcgagtaagtcggcgttggaggggtcggcggcgagggcctcgtcgacggccgcaagggaggattgctgctcctgcagctgctcctccagctgccgctcgatcgccgccgcctcgtcctctccatcgccagccataggccaccaactggatcgggcggcgaggcgaggggtgaagggtcgagcggtttcttctcctctcccagtctcccaccgt

SEQ ID NO: 25606 - DNA, 297 bp, Setaria italica
  Peptide Sequence Number=SeqID_91580
gtggggtagtacttcttgtcctcggcgagcaccacggcctgctgcgacgggtcgccgtcctcgtcgtcgtcgacgtccatgagcgcggccgggcgggagggggagtcccgaaggggagcgcgcggcgggggacggcgagcgggacgcggagggggatggggatgcgccgccggcgtcggagtcatcgtcggcgtcggagtcggcgagctccgggccgatgtagttgccgaactcgtcgtagaggctgtcgtccatcgcggcggcggctagggttttgctcgacggcggagcggggcg

SEQ ID NO: 25607 - DNA, 342 bp, Setaria italica
  Peptide Sequence Number=SeqID_91581
cgggggcagccgccggcgtcggaggcggaggcgggggcggcgtcgcggcggcctcctccgccggagcaggcgccgcctgctgcgactgcccgttggagagctccttggccttggcgagggcgagcggcacctcctcctcggactccgcgagcagcgcgatgggcgcccccaccggcgcggactccccggccgggacgaggaccgccgccacgatgccgtcgtggaaggtctcgacgtccatgtcggccttgtcggactcgacgacgacgacggcgtcgcccttggtgacgcggtcgccctcggcggcggaccaggagacgatcttgccctccgtcatggtgg

SEQ ID NO: 25608 - DNA, 955 bp, Setaria italica
  misc_feature (948)..(955): n is a, c, g, or t
  Peptide Sequence Number=SeqID_91582
caaaaattaactagctcaaagatctaagtagcaagtaacatcactatcccttgctacagtgctgagcgagtgaaaaggggcgaacgagaggcggacttccttccggcggcgattccgcctggccctttcctctctagcggccgggttggcgccggagagggaggagggctggggaatcgttgtgcggatgtatatagggtatgtagggtagtatctacgcctagggtttgctcgccgtcgtcggcgatggcggagctagggttgcggggaacagtggctgcggaggagctttttccgtcgccgaataagtttcttcgccggctctgaagtcgatcctttcgtcttctccggcgaagttcgtcctgccggaggttcgtcgttcgtcttttctttcgattttggtcgcttgaaggaggcaacggcgaatcctttgcggcttgctttccctctgctagctgctgtttgtggtggcatggtggagtggaattttgtagcattcgagttgtgctcgaatgtgttctttcttctttggattcggttcttggactgctggatcccttcctgacgttgccggagctggttactggagcatctgggctgtggtttgtggaggaagtgcgcggtggtgccagatcgtgagatcgaggagactgacggctgacgtcctattaccgagaacctcttgcagctatccaaagcttggaatccgttcttcgatttggcttggcgagtttgggggtttgatgctcgggtatcagccttgtcgaatagagaagcagaatcggaagtttgttcggatgaagaagaagaacagtaggtgtagctaggatcttgttgtaattctcttttactcagggtcctttctgcaagaaagggatgtattgtgcaatcagttatcttctaatataagctacatcctttttcagcggaaaaaaaaaacaaaaaaannnnnnnn

SEQ ID NO: 25609 - DNA, 398 bp, Setaria italica
  Peptide Sequence Number=SeqID_91583
gatgttcttattttcaacactgggcattggtatgtcaacatcattatttacgaacaagttgagcatcaaatcaacattttattattgatgccaaattaacggggtttaaatgttataaattctcaacgtaattagttgacagatcaacttgaagttccattcttttcccccttcaaacttgaccatagtgcactcaactagttattgctcacaatttatcttgatggcaagttaatacatcaggaaccagtgactgttgatagttgcttacatgatttggcaggtgccacactgccagtaaatatcttttttgctgagcctgttagtgatggaagagattgtggtgttctcaactctttggcttactgtatgtctttcactttcagagagcatcgtgg

SEQ ID NO: 25610 - DNA, 865 bp, Setaria italica
  Peptide Sequence Number=SeqID_91584
ctgtgatgcatctgttcttttggtatgacactgaggaagttgtaagcgagaaaaatgctattcccaataagaattctattaggggatttgaggttatagatgagatcaaagccgcacttgaagaagcatgcccacatacagtctcctgtgctgacactattgccctagcagccagaggttcaacagtactgagtggtggaccatactgggaacttccattaggaaggagggattcaaagacagcaaacatgaagctagcaaataagtaccttcctccaccaaatgcaacactacaccgtcttatcaagtttttccaaaggcaaggactggataaggtggaccttgtggcactatcaggaagccacaccatcggaaaggcaagatgtgtgagtttcaaacaacggctctacaatcaacatagagataacagaccagacatcacgctggagaaaagtttctatcacacattggcattggcgtgcccacacactggtggtgataacaacatacggtcactagattttgtcagcccttcaaaatttgacaacagctattataagctgataatggagggaagagggcttctcaattcagatgaagttttgtggacaggaaaagacccagaaatagcagggctggttaaaagttatgcagaaaacgagccactattctttgaacattatgtgaattcaataaccaaaatggggaacataaatcccctcatgggtcacaatggagaaatccgcaagaactgtcgtagggttaatcaggagatctagtcatcaaaatgcttcagtttgaatcaggttcctttgcttgtgatgaaccatttattttgcatgatatgtcagtttaaatgtcagca

SEQ ID NO: 25611 - DNA, 287 bp, Setaria italica
  Peptide Sequence Number=SeqID_91585
cggtgccgatggtgctgacgagcatggccttctacggcatcccgctggtgtcggtgatgttctccggtcacctcggcgacgtccagctcgccggtgccacgctcggcaactcctgggccaccgtcaccggctacgccttcgtgacggggctgagcggcgccctggagacgctgtgcgggcaggcgtacggcgcgcgcctgtaccggatgctgggcctgtacctgcagtcgtcgctcatcatgtcgggcgtcgtctccgtgctcgtctcgtcgctgtggaggagcagc

SEQ ID NO: 25612 - DNA, 569 bp, Setaria italica
  Peptide Sequence Number=SeqID_91586
ttttttttctacggccaaactatacttttggggtcctgcaggaattggatagcttcacaagagaggtaaattacatttcttttcggcgtcacagaaccttcttacattgccaaatttcctacacatggggacaagcacaactgaaaggagggaaacgatctgaacagaacaggccttttgtcatgccttcgctcgaagaaaaatgtgtatgataaacagccatgagccatcacatcttccaaatctgatgcattctgtaccgcttctattcatccgtggattcttctgccgaatcctctgaaggtgtgtccgatgacaatggtcctaggattccctctgaactgagggtcaaaccactctctggctggaatctcaacatgtcagcacgagccattgcctctgcttgagctattctctgcctgaatatctgagccatctcatcggccttttcgaaacaggcttgggttggcggacatggcgccaggtgttggctcaagcttctttgtagaaaggctgacacggcctctttcacggtcatggctcagtatcatcaccttaaggtgtctcct

SEQ ID NO: 25613 - DNA, 1382 bp, Setaria italica
  Peptide Sequence Number=SeqID_91587
gtcaaaccactctgaagaggcaatgcaggacgacgatttaataagatcagttacacgcgtagtgatttactcttacagttgaagttagatgaaatacgttttgacatgttatattattataacaagaactaaattagtagcattctgccatcacatcttccaaatctgatgcattctgtaccgcttctattcatccgtggattcttctgccgaatcctctgaaggtgtgtccgatgacaatggtcctaggattccctctgaactgagggtcaaaccactctctggctggaatctcaacatgtcagcacgagccattgcctctgcttgagctattctctgcctgaatatctgagccatctcatcggccttttcgaaaacaagcttgggattgcggatcatgtcgccaggtgttggctcaagcttctttgtagaaaggctgacacggcctctttcacggtcatggctcagtatcatcaccttaagggtgtctcctggttgcagaactgttgagatatccgcaacacggtcatgactaatttggctgacatggagaaggccattgattccgccgatatcaatgaaagcaccataaggttttaggctctcaacagttcccatgacaactgaaccaataccaagctgggcctgactgtcagccattgccttgcgattgctgaggacaagcctgccttgttcctcatcaacctctacaaacttcagaggcagttctttgccaagcagctcttccgcagttgttttcgatgacacttgggaaaatggaacaaatcccttaagcccttccacaagagctactacacctcctttgtttccgcctatcactctacccgtggtgacaacatcttcagcctgaagttgccggcacctttcccatgcaagttcttgttgaattgcttgcaaactcagaatcaaagtttcgtcgctaggattctcatcaattatcatgaattcttcaactaaaccagggcgaatgcccgcatcttcaacattatcaatatcaagaaggcatgcctcatctaaaggcaagaaagcagtagactttgattggatgtcaatatatgcaccattcgaggtagtcatgaatactgttcctttaataagggagccgatctcggtgtcgatgtcggtggactccacggcagtatcgaggtcctcgggggagaaggcgacgccctccatgggcgcggtgcggcaccgctcggaggcctcgtcgaactgctggcgcatccgctcccgctcccgctcctccttggtcagcgcgtacgtcccgcacaccagcgccgacggcggctgcctcggcgccgcggggcggcggcgcgagcgcgacgcgccggagagtggcgggcacgggaggcccgcgacgt

SEQ ID NO: 25614 - DNA, 447 bp, Setaria italica
  Peptide Sequence Number=SeqID_91588
tccaaggtgttacagaattgcgtctgggaacttttttattatgctattattttagtcattctcgtcaaagatgtacaacaaaagctgaattctggtatgtacaaaatggttaactgaatggggaaaaacatagctagagttgctattcagcatgcacctatggactatggttggtagtggcagaggggtcaaccttcatcagcttcgtttttccttttcctcagaaaaataaaacaagttacatacactcaggcatatgcttgtggagtcttgttagaacagagaggaacatggcacaaagttttgatagtccacatttcgattctgagtccatatcacaatttaacttcagattttctaattggtatcacataaggtaagtttcattgactcaaaagctttccaactttagtttaattttactaaagtaactaagtaataactaga

SEQ ID NO: 25615 - DNA, 320 bp, Setaria italica
  Peptide Sequence Number=SeqID_91589
ggtgttcgccgccatctccgagatcttcgggctcaagtactactccacgctctacaacttcggcggcatggcgagccccgtggggtcctacatcctcaacgtgcgcgtcgcggggcggctctacgacgccgaggccgcgcggcaggggaacgtcgttggcgtcggcgcgggggggacgaagcacgagagggtgtgcctcggggtggagtgcttcaagaggtcgttcctgatcatcacggcggcgacggtggtcggcgcggcggtgtcgctggtgcgtggtgtggcggacctgggggttctacgaagggggacatctacgc

SEQ ID NO: 25616 - DNA, 348 bp, Setaria italica
  misc_feature (280)..(280): n is a, c, g, or t
  Peptide Sequence Number=SeqID_91590
ttttttttttattgagtaatgaatcaaatgacatatccagcaattctaacatgcaagaatcaaacaattcgtatgaatgaattggattatagtgtagtaatatgatcctgtcgatggcccgatcgaaccatggacacaatgacacaaccgacaaccccttgtgtaagcgcaagcgcaagggagagcattcgtcactcgtcggagagcttgtcgagcagcatccgcatgaccttgacctgcacctgcaggtcctcgatgtaggtcgcggcgtcctggaacngctcgccgagcccgcacggctcgcggcaggccggcaccagccctccgcagcctccctcacctgcctta

SEQ ID NO: 25617 - DNA, 325 bp, Setaria italica
  Peptide Sequence Number=SeqID_91591
agctaaagctctctatataggcgacgatgtttcgtgtactgaatctgttctcttttggttgatatgtttgttataagtagaactctgtccgttccaaattgtacgtcagtttatagatattattatgcatctggatatccagaggtataataatattaccggttattttagcttctctagatacacctgtagatttagaaaaacttaaacgacttatattttgaaacagagggatatgattagcgactttatttattagactaagtagagttgcgtatctaataaatgcagaagctgggatcattaaaaaaaagtttgctttgcc

SEQ ID NO: 25618 - DNA, 880 bp, Setaria italica
  Peptide Sequence Number=SeqID_91592
aatccgaactgcgtgaagccaaacagggaagggagggaaacaaaaaaaggggccaaattgttggagttgaattgcggggaagatgagctccgggtcggcggtgacgggcagcggcgcggaggaggaggcggtggcggtgccgctgggggcagaatctgctggtgcacgtggcggagaacggccacagcttggagatcaggtgcttcggcgacacgctcgtcgaggcaatccagcagtccatcgagcgctactgcggcatcccgcccggcgaccaacgcctcctctgcggcaacacctccctcgacggcgcccaccctctcgcctactacaggctcccgcgcgacgaccgcgaggtcttcctctacaacaaggctcgcctcctggccgactcccggcccccgccgcccgagtccgtttacatcccggagccaaaaattccaccggcgcctcggccgcaggactcgccgcccgtggaggtgtctgccgaccctgcgttgaaggcgctggtgtcctatgaaatcaggttcaggtaccacttttcaggttgccaatgcggtgtaccgatgtagtgatacgaaatttgagctatgcaagccggctgctacgggaacagcaggtgcaggagcgagcactggacacagcccggagcaacctggatcacacattcaagaaggtctcgcagcggtatttagagtttgtgcggtgcttctcgcagcagcaccgtgcacacatggagctgctcacaaattttgagagagatttgcagaggttgcgtgctgttaggctgcacccagcgctgcaatgtgaggggaggcagtgcttgctggaccttctcaaggagaatgacatgaggaaattggcggatgggtgcttcagctcg

SEQ ID NO: 25619 - DNA, 1505 bp, Setaria italica
  Peptide Sequence Number=SeqID_91593
cacctctgcacgcgggcgggcgcacgggccaacaccccgggcgccgcctcgccttgccgctcaggagcaggcggccgcagagctgattttagagctggtgacatttgcaagcatgaaaatgaatatcgaattgaccaaaatttctacacaacccctgtacggcaatcaaaattcagatctagatttgcggtttactgcttcatctggcttgctaaatcgcaaccatttccagttagcataggattgggcctcgttgtcgaagggaacagcatcgttgcaggggtcttgcgccttgcccgatcgaggtggctctgcaatctgctcccggtatctctgccccatctcttcagcctcagaaaacaccttctctttgtctgtgataaacagtccaggttcgctctcgaggtcctttgtgctgagggcaattctgtctggagttgtcgatttaatgacaagagctttcaccgtctcacccactcttagcacatcagcgacagatctcagctgaccatgtgttatgttggacatgtgcagtaagccacctctgttagtctcgccaatcctaatttgtgcaccatacggaaataacttgcggactgttccttgcaagagagtcccttctctaaggtatgtcaccgcccatgcttctttttcactaattatcaattcgttagccccttcatcaatccttgtaatacagacatgaatttcttgaccaactttattctttagatctgtgaaatttcttggtctagtcatcatctcaggcttagggaggaatgcacgaaggccctcaattctagacagcaagccaccagcattccactcataaattttgaccttgatgggtacatttagctgttttatctgcctcgctctgtgccacgcgacgcgccgaaacagcctgcgtgcggacaccagcggccgcccgccaagtgttcgaccgaggacttcagcgaacacgatcgcgccaacgcccgccaccgccgcgcctttctccttcacattcctgccgcttgtcaacaccccatcctcctctccgccgccgatctgcctgaccatgacgcccactctcccttccgtggcgaactcggccgcacgctctgacccgacgtcgcacgccaggtacccgaactcctccccgggcatcggcaccgcctccttgttcagcatcaacgccggctcgccaccggctccgatgtcgacgtcgagggtcctcccgtcgctccggaccacgacgccggcgacgaagtcccctggcttggggtcgtagtacctgaccacacgcccgccggcggacaatccaacgctcctcgccgcctcacccgccgcgtcgctctccgcgcgctcccctgcggcggcgtccgcttccgcgtcggggtcagtgctcttcacctggaagaacttgaggaaaggcgcgagcgcttcctccgtggacagcaccgggacgggctcgggctcctcctcctcggcatcctccgcgacggagggggacggcttctcga

SEQ ID NO: 25620 - DNA, 496 bp, Setaria italica
  Peptide Sequence Number=SeqID_91594
tacgtaatggtgacaatgcatacaagattttgagttgcacgttatttgtggttctctcttcatgctgcagtcagagatcttattgtattcaacttaaggcttggcttaacatttgaaattatgatcaaattgacttattttgttttatggtctggactatggttcaatttatttcaccacttgccaattgttacattgtggtgtagtttttgttacctttttatttaactctgatgcttctcatcactatatcactattaatgttcatgaaaaccattcttcctggagcatctagcagaagctagcagatcattatctattatgcaatgctttgactgtattatacttcattgtagatggcgtatccaaagtgacatgttacctttatttatctctgttctagtttgtactttatagactttattgtaactacaccaaaattaagtcactacgttccggtcatcagacagcatgcacggttaagttgcacccaaat

SEQ ID NO: 25621 - DNA, 1037 bp, Setaria italica
  misc_feature (987)..(1037): n is a, c, g, or t
  Peptide Sequence Number=SeqID_91595
gatggagcccgcgccccaatccccggcccagcccccggccaccggcgctggcagcgggtgggggaggggtggagcatgctgtcccgcgcccgcgcgctgctcgaggagggcaagccgtccctcgcgctgcaggcggttctcctggccataagatcacaaggtggtgaacaagctctcatccaaactatggaccgtgcgtgtgaactctacacgcagagattgcaagccactccaagtgttgatgagctcgcctctttgcttgctcaatgtgccatagcagaggctcagtcatcaaatgctaatcctccacgaggacctgggtcagaccctgtggatatgctgaattctgatgaggcctgcattcttgctgtgagtggaaggaagcagatcatcctggatgcgtttgccgatggaagcagcttcatttgcctgaaatgtggtgggctctatagcacatctcgtaaggatgagcacttggcctactggtgcaggactgcatgatcctgctgacatcttgctgtggtaatctttggtcacacctggcggtgatcatgatacccgtgagattttgtaaaaacttggttcacttccgattaaccgctgctttaccacagggatgccagagatgcatcttctgtttgtcgaagccaatacattgccagtgccaaacgttatgaactataagtttccatctcaatcccatggtgtctgtgcattctgctgatggaaattggaagttgttgagatgtttggcttggtcattaaattcctgtagttgaatgtggcgaaacaattttcttgcggttagcttgcacaccgcaaaagttaagctgggtagaaagtatggaactgatagtattccctctattcctgacttttgaatcgaaaactgggattaccagttgtatttatgagaaatctgccatggagatggagcattgccatccctacctgctaccatgtaaagattgttttacgaaaactttnnnnnnnnnnnnnnnnnnnnnnnnnnnnnnnnnnnnnnnnnnnnnnnnnnn

SEQ ID NO: 25622 - DNA, 411 bp, Setaria italica
  Peptide Sequence Number=SeqID_91596
aaggaagaggcgatgagctcctgcaaggagaggagcggtaagaacacgaagagttggacgccgatcgtccacctcaacgtcggctttgtcgtcggcgtcctcttcgtgctcctcaccttcctagttttctcgcaaaaggctgcgatcagcggcctcaatgttgccactacggtcgcacaaccgtcgattaaaggtcctggtgaaacattcgtcacttcgggcgtgcagatccaaggttcaggtggatcagcagagaagggcactgtggtgtacaacaccaagggcggctactccgaaacctgcgaagtcgacggcgacgtccggatcaattgctcagccctgtcggtgttcctcgtcccgaccgcctcgtcggagcgccacgagtggagcatcctgccgtactcgcgcaag

SEQ ID NO: 25623 - DNA, 374 bp, Setaria italica
  Peptide Sequence Number=SeqID_91597
tccttgagccgccgctgcaccgcctccatgctctcacactggaaggagatgtggttgtcctttgggttgatctccgtcttcttcggtggcatgctctccgggtcctccgcctgcaggagatggatgccgatgccatagttgaacagccatgcgccgtcgaagtcgaaggatcccgggcggcggatggggatgaagccgaggacgtcgcggtagaagcgctgggagctgtcgagcgaccggcacacgaccgagatgtggttcagcgccgccagcgggaggccgccgccctggaccgccggctcgacgcacttcgtgttcaccatcttccaataagctaatgctcgttcgatccctccgcaaaatcacacgaaaag

SEQ ID NO: 25624 - DNA, 1379 bp, Setaria italica
  misc_feature (1324)..(1379): n is a, c, g, or t
  Peptide Sequence Number=SeqID_91598
tactccctgtgtcgtctcctatcccctgttgcgtggccctcagcttgctcagctcacctcgccagtcgccaccactccgccgctgcccccccacgcccggatctcgccatgggcgtcgccaccaacggctcggcggcggagcaggcgcccgcgcccgcttcggcgctcaagttcctcatctacggccgcacgggctggatcgggggcctgctgggcggcctctgcgccgcgcaagggatccccttcgcctacggcgccggccggctcgagaaccgcgcgcagctcgaggccgacatcgacgccgcggcgcccacgcacgtgttcaacgctgcgggcgtcacgggccgccccaacgtcgactggtgcgagacgcaccgcgccgagaccgtccgggccaacgtcgtgggcacgctcacgctcgccgacgtctgccgcggccgcgggcttgtgctcatcaactacgccaccgggtgcatcttcgagtacgacgacgcgcacccgctcggctccggggtaggcttcaaggaggaggacacgcccaacttcgtaggatcgttctactccaagaccaaggccatggttgaggaactgctgaagaactacgagaatgtatgcacccttcgtgtaaggatgcctatttcatcggatctctccaatcctcgtaatttcattaccaaaatcaccagatacgagaaggttgtcaacatcccgaactcaatgacaatattggatgaacttcttcccatctcaattgaaatggcgaagaggaacctcactggaatttggaatttcacaaatcctggtgtggtgagccacaatgagatactagagatgtacagagactgcatcgacccaagcttctcttggaaaaacttcaacttggaggagcaagcgaaggtcatagttgcacccaggagcaacaatgagctcgatcaaaccaagttgaagaatgagttcccggagctgttgtcaatcaaggagtcgctgatcaaatacgttttcgagccgaaccggaagacacccaaggcttgagagatggagctgcacacgactgtatgttgaattgttgatgctatttattctatctgaattgacatttttctctactgagatcatcaataagcacgccctgtttcgtgcgcattgtatttgaagcagataggtttctcataggatgtcatgccatactgcttgtttacggtcagattattacacggagctagacaaggtgtaatttaactcaggttttatatgcctcctggggtcttatcaatacgatgggaatggactgaggagcttcctctgttgtgaacaaaaaaaaaannnnnnnnnnnnnnnnnnnnnnnnnnnnnnnnnnnnnnnnnnnnnnnnnnnnnnnn

SEQ ID NO: 25625 - DNA, 1095 bp, Setaria italica
  Peptide Sequence Number=SeqID_91599
taacaaaacaaaatacccggacaaccaacctttcctataatgttctcctctttcaagcaatccagcacatcatcactggtgaagtccaggcgctggaatgcagtgagcttccatacacgtgcttcactagctttcttcaatgaccgggccttcagaattgctgctgcagcaaacgcaatggagcaaaccagcaagccaagaacaatgaggagcttgacagtattggtcaacccaccatggccatggggagtgtggtcggcaccagcaatgccggggcggcatggaccaagatatggtccacacaggcctggattgccaacgaaagatgtggcattgaagtaggtgaactgcccagtccccggcacaagcccagacaagttgttatacgagaagtcgactgctgtcaagctctgcattgtcgcgatggatggaggtatctctccatcaaggtggttccgggataggttgaggtagttcagtatccacattccagagatggccggaggtatcttcccagagaggttgttttggctcatgtccaagtaagtgagaagccggcatttcccaatctctggtggcacacctccctcaaacttgttgctgctaaggtcagccttggagagctgctgcagccgcccaatctccggaggcacggcaccagagaacgagttccgatcaagaagcagcttctgaataccagagaagctcccaagagatgccggcaatgcgccggtaagctggttgttggacaggctgatctcaccaagattaggtgctgcaacaccgatcacagcagggaaattaccagtgaggaggttatcttgtagctcaacttgtgtcagcttcggcaattcaaagagccccttcggaattgagccattcaggtagttctccccgagacggacgcggctcaaggacttgcattgaccgagtgagtctgggatggcgccaaacaagaagttgcccagcgcgatgagcgtctgcagcttgccgcccgcgcagagctccggcggcagcgtgccggtgagcttgttcgacgagaggtcgagcagctggaggcggccgttgcggccgaggcggcgtggcacaccgccg

SEQ ID NO: 25626 - DNA, 628 bp, Setaria italica
  Peptide Sequence Number=SeqID_91600
aggttggaagaaggcagtatagtattgaagaaatcaaagacatttagtttctgcaaggagggtgtgatcgtacgtgagggtgagtcttcactgataaagagcgatatagtgatttttggaactggattcaaaggagatgagaagatcaaggacatattcacatcagaatactttcgaagtattgcagttggatcaacatccacgactgtgcctctctatagggagtgcatacaccctaagatccctcagcttgcagtgatagggtattcagagagcatttcaaatctgtacacgtcagaaatccgagccaagtggctcgcgcatttcatggacggtggcttcacattgccaaatattacggctatgcagaaggatgtcattgaatgggaaaagtacatgaaaagatattctggtcgatactttcgcaggtctggcattgcaatcattcacacctggtacaatgatcagctatgtcgtgacatgggatgcaatcccagaagaaagaaaggtttctttaaggagttattcgaggtttatggtcctggtgattatgttgaccttcgccccaagaaagagtagatatcccccacacttttcctgcttgttcagattcttgcatgttcgctct

SEQ ID NO: 25627 - DNA, 241 bp, Setaria italica
  Peptide Sequence Number=SeqID_91601
gtcaaagaaaaatttactggacaggcgtaaacggataactcttgctatggatgtggctataggaatggaatacttgcattccaaagatataattcatttcgatctgaagtgtgataatttgctggtgaatctcaatgatccatctcgtcccatatgcaaggtagctgattttggtttgtccaaggtgaaacagactacaatggtctctgttggaatgagaggaactcttccatggatggct

SEQ ID NO: 25628 - DNA, 466 bp, Setaria italica
  Peptide Sequence Number=SeqID_91602
ggaggtggtggcgttgtggtggcagacgttggtggggtttggttcagccgtggtggtggaggcggtgtcactggagaagatcccacactatccatcacaacccgcttcgctggctgtccgtgcaccatgccgtccacgctaacatcatcatgctcatggtgatcgtcatcatcatcgtcgctgtcatcttcgtcatcatcgtcactatcggtcctgatatgcccatcatcctcatcctcatcctcatcctcatcctcatcctcctctcggatggcagcatcggcaggagggcggttcttggcgccggccatctggtccggcatagggatgttgggggtggaggaggatcgttggaggctggagtgggagaagtcggggaatggcggcggtggtgctgtgatgacagatgcggtggaggggccaggcggcgcggagacggatgccgccgccgccgctgccgcggcca

SEQ ID NO: 25629 - DNA, 313 bp, Setaria italica
  Peptide Sequence Number=SeqID_91603
ttagacaccgtaagcctcccctccctcctgccttccccgtccgttctcgcatcatcgcgcatttctctcgggaagctctgttggtggaaagcgccatgatgagtaaatgcagccgctgtttcgtctctggcacgggcatgtgtactcctgctacagcgcgatggttcaggaggacaagtcgtcgatgcactcggcgggggtggcgtcctcgggcgtctctgttgccgcgcacgtcgggagcccggacgcctccgtgggcaccaataatgccgctggcaccgccccgccggcaacccccggcaacaacaataag

SEQ ID NO: 25630 - DNA, 922 bp, Setaria italica
  Peptide Sequence Number=SeqID_91604
tttttagaaagacaagttagacaatgaatgagaattgttcgcttggagttcagtcactatgatgtgaaatcatcccagacaatacctgtgaaagactttgcattgtccatggttgcttctgctgacatgaatcacataaacaagctcctggacagagttgatgatttggacgacaatgctgatctcaaggatctgcgcattacctttgaggagttcaaggcatttgctgatcttcggcgaaggttggaaccatttgcaatggctatcttcagctatggtaaaataaacggtttgttgacgaagcaagatctaaaacgggctgcatcacatgtttgtggagtggacttgactgacaatgtagtggacataattttccatgtgtttgatgctgaccgagatggtaacctaagctcagaggagttcctgaggtcattacaaagacgagagagtgacattcgccagccaacaacttcaggtttcctaggggtggttgcctgctggctgaactgcacaaagtgctctcttcaacagatgctgccgcagtagattatttcgatgctcgcgatactagaaatccgttgcccttggttgctctatgtttaatctaggagctggagaacctgatcgatgaccagtagagttgggaagtgtgaccgtgcgaggacacgattttgttgtaaatactaccctgcgcgatgataatcagagttggtcatacacatactacgtagcagctgtgaggaatatataccttccgttctcgcccaagggctcagatgacgtctctcgtctccactgacgttaaaaacaaccatcgacttccctgggatctttgctacctatcttgttttagttctatatcctcgatgctaatgttctgtggtgacaatcacacttgtcataatctcatagctagtcgatt

SEQ ID NO: 25631 - DNA, 441 bp, Setaria italica
  Peptide Sequence Number=SeqID_91605
tccaggtcgcgctcggcgcgttcctgtgcgtgcgcgcgcggcagctgcgccgagcggcggccccgggcaaggccgaggatcgggtggagcaggaggaggcggcggcggcggctgcgtcgtcgtcgacgcctgcgtagtagccgaccggcgcgcgccgccgccggtccaccggtggtatccggccgagaccgagaggagcgaccaagcgggcgtgcgctgcacgttctcgtggtgattcctgcggcctccatggagtggaggatgaatggttcgtgcgcggtcgcctgcacggttgttgggtgagctgacgggggagcatcacctgctgggttctttgcttctccacccatggcaccgtacagtgtccggctgcttctgtatagttcgccgtccttgcgcggggcgcggtctgtgaggcatactgcttaaagatgtacagta

SEQ ID NO: 25632 - DNA, 668 bp, Setaria italica
  Peptide Sequence Number=SeqID_91606
cgcagcagcgggctgagcgagatgctgcaatcgctagactggagcaaagccgtctagtccttgctatgagattagcagagcatcaggggaagaggtacagagtgattgatgaagccttggcgtttgtgggtgaagtgagtgacaagagtcgatttatctcaccagaagatgtccgtgcaacccagacagaggataatgcagagggaaacaggggcagtggttcaaggatcatgtcaaacgtgctagcatgtagtttatccttagccaagaattcatttcggctggacaagattggtggtgctctaggtaacgctgcggtatttgcagtaagtatgcttgctttcttgcagctgcatcaaattgcacttggaagtagaactccagccatgggatacaggaagagaattgagtacagttttcaatctggcagctcacaacagaatgggaaagggaaacatttggaggtttacctagccagaggctgaggaattattagatcacgctgttggctgtacagaaagttttgaccaaagatcaatttttgttggttttgttagggcactgatcattctttactacgacgggctggaccctgttccaggaaactaggggactggctgcccgattcttttggatggattggaaggataccacgtattgtacccccc

SEQ ID NO: 25633 - DNA, 405 bp, Setaria italica
  Peptide Sequence Number=SeqID_91607
aggcgccgacgaggccgtggacgcgccgctgcaggctgccgttgatgaggaggatggaggacttgcccatgagctctgtcagcgagcgcgggtaccacggcacgaacgcccgcgcgtcgctctgcagcacgaaccggctcacctccgcgtccgacgtcaccaccgtcgccgaaccgaacaggtgcgaccggaacaccgggctcccgtgccggagccgccgcttgtcgacgaaggcctccggacgggccgagtaggcgcaggacacgaagtccagcgtctcgcccaccagcggccacccgaaactgccgggcgggagccgcgccgcctgctccttgcccgcgccccgcctccatccgggccaggatagcagcgtccacagggccgacgaccgcggcggcgacaaac

SEQ ID NO: 25634 - DNA, 567 bp, Setaria italica
  Peptide Sequence Number=SeqID_91608
cacgcggtagactgccgtgcggacacactcgtcagagccgaggatgcttcggaggaactcgacaacagcatgcgccccgccgtggaggcgttccgccgccacggcctccccgaggagtccattgccaagctcctcctcatccacttgggcgtgctcatggtacccgtcgaccgcatcgctgaggcatttgatgaccttcaggacctcggcctgcgcgtcacggacacgggcttcctctacggcttccgcgtgatttctatcctcaagagggagacgtgggtccgcaaggtggcgctgtaccggagcttcggggtgtgcgaggctgacctgctcagggcgttcaagacgcagcccaccatactgctcgtctctgacgagagcgtaaagaagaagatcaggttttacctggacgtgctgaaggttgggataggtgatgttatggcgcagccaatgattctgtcgttgagcttggagaagaacatcatgccaaggtgtgccgtcctgagcgttttgatgagggagggcaaaattgagcggaaactgaaatttgaatagaccggacaatta

SEQ ID NO: 25635 - DNA, 540 bp, Setaria italica
  Peptide Sequence Number=SeqID_91609
tgttgtcgaggtcggccaagagcgcgcggggcacgcggtagactgccgtgcggacacactcgtcagagccgaggatgcttcggaggaactcgatgcagggggcgaggtggttgtccaggctgcgcgccaggatgtggggctcggcggcgaggaagcggggctggaagccgagcgagaggaagaagtcgagcttgggccggatgatgcggtcggcatcgaagttgaggagcaccggatcctggcgcaccgtgcgggtgatttccgcctcggagaagccgtattcacggaggacggcccggacggcgtcggcgcggttcgtgtcccggatgcggacgttgcgggcggcggcggcggcgggggagaggccgcaggagaccaggtaggagaccgtggcggggcagggctcggggcccgccgcgacggcggttgagtagtagccgtgggagaggaggacggcgacggggctagaatggatggggttcttgccgccgccgcctccggcgaggactggggcaagggggatggcgagccgccgccggc

SEQ ID NO: 25636 - DNA, 289 bp, Setaria italica
  Peptide Sequence Number=SeqID_91610
gcggggaggcggtcatgtaggtgacgtcccagtcgaagaaggcgaaggggtcggcggcgtgcgcggaggcggccaggaaggcgagggcgaggagcggcgccagggccaccattgctctctctcgcttgttcctccctcctatggctattgctcgcttggcaccaagagggagagccggagatggagagggagatccctggctggatggagccttgcggccgcctgggccttggcttttgagtggggagcggagagcgcgtgagtagtgtgaagcggaggcaggggcgcg

SEQ ID NO: 25637 - DNA, 264 bp, Setaria italica
  Peptide Sequence Number=SeqID_91611
aagaattcgtgagcagcgagcgacgacggagttggccttgaaggagaggccggcgattgaggggcgcttgccggagtgagagctgtcgtcgtcctcgtcctcctcctcctcctcgcggcggggaaggccccacttgaacgacccctcccgcaccagcccctcgaacccctccatcagcagatctcgcgtccggctcatcatcgccatcctgcaggaagacggcggatccggtggcggagagattggccgcagggcgacggtggt

SEQ ID NO: 25638 - DNA, 507 bp, Setaria italica
  misc_feature (424)..(507): n is a, c, g, or t
  Peptide Sequence Number=SeqID_91612
aagaacggtaggaagggaggcgatcgcgagggcgaacgggacgacgtacgggctgggcgccggggtggtgacgcgggacctggacgtggcgaaccgggtggtgcggtcggtgcgcgcggggttggtgtgggtgaactgctacttcgccgtcagcagcgactgccccttcgggggccgcaagatgagcgggttcggcaaggacgagggcatgcacgcgctcgacaagttcctcgccgtcaagtccgtcgtcaccccgctccgcgactcgccctggctgtgatgtgcgaatgtgatcgatcaggcctctgccccatggtgtgcctcgcgtcgtgctgtgttgtgttgtaacaaaatgataataacttgcgtgatgcactgccggaggaatccggcttttagtaccggtccccaacctgtaaaaaannnnnnnnnnnnnnnnnnnnnnnnnnnnnnnnnnnnnnnnnnnnnnnnnnnnnnnnnnnnnnnnnnnnnnnnnnnnnnnnnnnn

SEQ ID NO: 25639 - DNA, 926 bp, Setaria italica
  Peptide Sequence Number=SeqID_91613
ccgggtctttccaccgactgcgagcggttcctcgagcggcccgtcatcgcgctgggcgtcctcctcctcgcgctctccctcgcgggcctggcgggggcgctctgccgcgcctcctgcctcctctggctctacctcctcgcgctcttcctcctcatcgtgctcctcttcgccttcaccatcttcgccttcgtcgtcaccaaccgcggcgcagggtgggtcgtctccggcagggggtacaaggagtaccgcctcggggactactccacctggctgcagcggagggtcgagaacgcagggaattgggccaaggtcaggagctgcctccaggacggcaaggtctgccagaagcttgcggacaggaaggagacggtcacccagttcgtcaacagcaacctctccccgatccagtctggatgctgcaagccacccaccggctgcaacttcacctaccagagtgagaccgtctggatcaaacccactggcttcaacactaccaccgacgaccccgactgcaccacatggtcgaacgaccagaccgccctctgctacgactgcatggcgtgcaaggcaggtgtgctcgccaacctgaagaacgactggaagaagattgcaaccatcaacattgtcttcttgatcttcctcatcgtcatctactctgtcgggtgctgtgcgttcaggaacaaccggcaggacaactcgtacccggcctggaagtgaggtgcgcctgggcgtggcaatgtataggctgtcaggctgtgtgactgcgttcctgtgtcaggagttgggttcgctcctgtgtgtctagcaagctaccgtctgtcttagggtgtgggattatgtgtcaaccgtgactagttgatgcttgctatgttgcccccgaacgcatgatgtgtgaaggctcctaatcatgatttagtttgtccggt

SEQ ID NO: 25640 - DNA, 1578 bp, Setaria italica
  misc_feature (1523)..(1578): n is a, c, g, or t
  Peptide Sequence Number=SeqID_91614
ctcaacgtcaccgtcgatgcctccctcacaggcggccgaaccgccgccgcccccgcccccgcccccgcggtcgcttacttccccaccggctacgaccccctcgccgccgccgccgtcgccgcagaggaagacgagtcggcccccaacgcgcggctcttccggcacgagaagcaccccacttgggtcgacctcgtggtcgggagctctggcggaggccccgacttcgtcggccggagctatgccggtgaggcagccacgccgcagctctgtgagtacgcacttggagtcctcgataaggcctccggtaccctcagggtcgtccccatagccgccaacaagattctgaggcttgagccacatcttgaagtgcagcagccagcacattcgcagcactctgaggtggcatcagaagcaggttcagttgcaggaaatgatgaattgaaggttcaagatcttaccatgatgtatggaaccaagacagacagggacaaggataacaagtggaggtcattaaatgaacaaaggaatgatccttctgcttatgaggacattgaccttggaaccagtaacgtccacaccaatgacagccaggaaccagtaattgttcggaacattccaccttatgatcctacagcagatacatcagaaaaggcatatcttttggatgagattattccaaagaatatgcggcagcaccttttggaaattgtggaccattttgaatcaggacaaatttcttcaaaaggctactcgagttttgtctcaaatcgtgtgcagaagttgcaggagcttcagggtcaagataaagagaggcttgcttggatactgtcctacatccaacatctcctatctttatatgaacggaatggtggcatgtccaagcatcacaggaagcacagaaaggaaaacaaggcaaaccatggaccagggaccccgctggctgtatatcgcaacctgttgctgatttttacagaaccagggtctagttccatgtcatcggagaaaaatgaacttctgattaactacatcttggtcctgacactctttgctgatgacttcagatccgatcctaaagatatatgtgcggacctgaaaatgacccgccagatgcttaaaccatactatgaccagttgggatgcaaatctgtgtccgcaggtgctttcaagtccactttcatgacgcttccagcccctctcaactttccacaggatgttacaaggagaaagcgacgacggtaatcatcatatggagagatcaatggttatttatctcagaaatggcatgattactgaatgtgagtgattggatccgccctgagttatgatacactgctatcaaaggcacgttaagcctgtaggtgcttggcccaatgttgcaatgtactgaaaatgacaagctgtttcaagtttcattttgtattccggtgtccatggatatcgctttcaagaaagaaaacatatctatgtattgatggttctatctctacctgagtacatcctagtgctagttcgatgaaaaggtnnnnnnnnnnnnnnnnnnnnnnnnnnnnnnnnnnnnnnnnnnnnnnnnnnnnnnnn

SEQ ID NO: 25641 - DNA, 250 bp, Setaria italica
  Peptide Sequence Number=SeqID_91615
acatggagtccttgtatggattgttttttatttgctgctgttgtgttagtcatgttcttttctcattctattcttgtggtgttgccaaataggtcatagctttgcctctgctacagagaccactatttccaggatttcacatgccaatctatgtaaaggacccaaagctgttgcaagctttagtcgaaaacagcaaaagatctggtccatatgctggggcttttcttgtcaaggatgacgaaggtaccaa

SEQ ID NO: 25642 - DNA, 1713 bp, Setaria italica
  misc_feature (1646)..(1713): n is a, c, g, or t
  Peptide Sequence Number=SeqID_91616
ctgctgccaccgatcatatttaatgcagggttccaagtgaagaagaaacagttcttccgaaacttcattactattacgctgtttggtgcagttgggaccttgatctctttcactgtaatatcccttggtgccctaggactaatatcaaggcttaatattggtgcacttgagcttggagactatctcgcacttggggcaatattctcggcaacagactctgtatgcaccttgcaggtgttaagtcaggatgagacacccttcttgtacagcttggtgtttggtgaaggtgttgtcaatgatgcaacatcagttgtgctattcaatgctatccagaacttcgatcttgggaatatcaatactgctaaattactaaaatttattggcagcttcctttatttgttcagcagcagcaccattcttggagtagctgctggacttctcagtgcttatatcatcaagaagctgtactttggcaggcactcgacagatcgtgaagtttcaattatgatgctaatggcttatttatcatacatgctagctgaattgcttgatttgagtggaatcctcacggtgttcttttgtggtattgtaatgtcacactatacctggtatagtgtaacagaaagttccagggtcacgaccaagcatgcctttgcgacgttatcatttatcgctgagacttttctatttctctatgttggcatggatgcattggatatagagaagtggaagattgtcggtcaaacttatagcccagtaaagtctattgctttgagctccaccattttagccttggtcctggtgtcaagagctgcttttgttttcccgctatcctttctatcaaatttgaccaagaaaactccagaaggaaagatatcttttaagcagcaagtaattgtttggtgggcgggtctcatgagaggtgctgtgtccattgcgttagcttacaataagttcacaagatcaggccatactcagcaacctagcaacgcgattatgatcaccagcacaatcattgttgttcttttcagcacatttgtctttgggctactgaccaagccgctgatcaggctcttgattccaccaaggcacctatccagggaaccaagcgctctttccgaaccatccagcccaaagtccttccttgagcatctggccgccaacagccctggtcacccagatcttgagaacggcataagcctccgccgaccggcaagcctccgcctgctcctggtgagcccaacacggtcggtccaccattactggcgcaagttcgacgacggcttcatgcggccggtgttcggcggccgaggcttcgtccccttcgtccctggctcgccaaccgagagcagcgtgccactacttgctggaaacgagaactgaaaccgacacggcaagaggatgagattcagcaaaagttttgtaaattagcttcgtttagtatgattggtgtaaatctgaggtggtagatttacttggtagctggtacacgctgatgtataggctagttgcctgacctcatggctgtacatatcattatcttgctgttcagcgcacacgcttaattaatctgtatttatataatacgtaatagcctccccagcttagctaaaatcatgccgaatctttttgttagaaaaaaaaannnnnnnnnnnnnnnnnnnnnnnnnnnnnnnnnnnnnnnnnnnnnnnnnnnnnnnnnnnnnnnnnnnn

SEQ ID NO: 25643 - DNA, 884 bp, Setaria italica
  Peptide Sequence Number=SeqID_91617
gccattccgaactctgtatgattagcaaaattccacatgaaccaattacattcaccgctaatctacaagtaaacaatcataccctttttacctaccactgcctacaggtatatatattattattgctccctccaaaatattcagtgtagcatgcaactctacactacaaactctcttgctgcacacaataacccatgcacgccagtcgtatgtttatcataatgtacatgactagggagatattaagcatacaaattagtggctatatcagttctgaaatatctagctctttgtctctaacacctatttcttctgcagccgtatcacatagcaaacatccaaccaccacagcttgtaagtaattcgcaccaatcaagaatgttacagaatccagtgctcccaggccaactgcacttcatatgaatgcaacttggagaagtggcgctccagcttcttcaaaatgtagctcatgctgaatcagccattcaactgggaaactccaagacaactgctgctcgtaacagcctcggatagttccggagtatggtggcaccagtgccacacattgaggttaccggaattatagtgggaaagtggatggggtttaagtacagtatccagttcccagtcacaaaacaactatgtaagtttacacgtacaggtacaagttaaatagtgaaaccatacaacaattcactttcaattgtaagagaaaaaacatggtgaagtgcaagcatctgcccatgaaatctcagcagatttcatcaagtggacatgtcgttccagtgcaactaacttccagagcggccagctcgcaagaggagatggacttctggaagttagttgcactggaacgacatgtccagctcgcaagaggagattgg

SEQ ID NO: 25644 - DNA, 388 bp, Setaria italica
  Peptide Sequence Number=SeqID_91618
cgagcagaaccagcgccaccgcgcggatccccggggcccaccgcccccgcccccgccccatcacctacgcccccgcggccaatcacctccccctcctcgacccagatctccgccccgcgagcgaaggcgacgccgcgagctccccaatgccgcggctagcggcaatggccggcgcgggcgctggcgccgtcgattggacaccgagcggcgacgagcaggatccagcaagggggtgttgtagaggcgggcgagcgcgggatctggggctagggttttggcgggcggactcggggttgcttcggcgcgaggtaaaatgaatgggaagagaggaactggagccgggagcccgggacgacgacgaggtcggaaggggagaggaaaattttcg

SEQ ID NO: 25645 - DNA, 1759 bp, Setaria italica
  Peptide Sequence Number=SeqID_91619
atcctttgctgcatttggtgtttcttcttgtggcccatatttgataagcaaccaccatcatatgctttaggagaaagatatgtacacgtctcaccttcatcctcctcatatgcattctcccaaagcaaatctgaacaaactgcagcagaatcacacacagatgcctcatagtcatcgttgagttcagcgttgccaacctccttgtgatacacagaaagagattccagagactccctgtatgccagcattaacccaggtgctactgtatagaagagactttcttctgagagatgatcagacactttcaagattccaaagtcattcagcctctcaggagtaggtggggcttcaggcaacacatgagaatcagctactctactgttatattcaagaaaccgaactgcataacccagaatctgtgactgccgaggctgcctggattctttggcttccagtgacttgtaaacatgttctttttcagctttagttccagaaggctgcgtctcctccagcatagttgaattgtgtgcttgcatcattttagctgtgtcagcggtttgtaaagcctcagctgaacgccagaaactcgtgattccctttgcaatgattttcataacagctttctgctttctctgaatgcttgcttcttcaaatttgccccgaccatcagaagcaatccaatggcacactttagctgcagccacacttttccaaagtcgctcctgcatgaaatcatttgccatccaagccatctcttcaagtacaaaatcccagtgactcttactcctcttctctaaagcaatattacaatgagatcgttcaccagctctcttaatactcgcctctataacatgagcctctttaagaacagaatcttcatatgccttggattttttaagctcattctctaagttagattcaccatattttggtgaaggcaaagctttaggcaaatcagtgccatcagaaataggatgggccgatttcaaatccccaacacaactatttttcctatccgaagctggactttcctcaatgttcatggtttggccagaagacaggcaccctgtgtccttctgtgcaactgttgcactgtcacaaatttccatttcatctttcatgtgaagaatattattggcttcaggctgtacaagatcggaactttccttagcactataacatctactgctgtctaggtcttcatgagactttacatcaatcttcgctgcaacaagattggtgtccccatctgaatgattatcaacaatattcatggggccttcacaaggtgggcccactgcattttttaagtgaagtagaagcttctacagcacagacaagaactttcctcctgctatcaggttgccctgcatggatatgggccatatgttcatccaagtgaccatagtcagccttctcatcaacaggacatgactctctttcatcatgtgtagatgcactaggataacaaggcctaggaacctttaaactggtgtcaggggtttctgcagatgcaaactactcacactgcgtcggagatctcaccacacccaacaggtagccgattgtgatttgcatcagttgaagatacttctttagctttactattgttgtcagcttgctttgcttcctcgttcaccacacattcactttcatgaattgcttgaatcccatccaactccatttctgcctgaccatcagaagctgcattctttggtgcattgtcacagtttgatccagactgttttatactagaaac

SEQ ID NO: 25646 - DNA, 1172 bp, Setaria italica
  Peptide Sequence Number=SeqID_91620
aagtaaggacgtgatattgacaatatgtatatatataacagacactacaaaccatcactgcatgtatccacagattctccatgctaatacacaggatgatcatactaactacgacctattacgtgccaacttctccctcatcttctgccaccagaagctcaaattggggaaagaaagaaacaacaaggacgcacacaaaaaaaaatactcacaagaggcagctggggccctttcgccaccaacagcaccatcatactctcttgaggcgtggcaccatcttttgccaaagatcaactgcaggaacaaagcaaagtcggcctgatgctcattgctcctgtctgaagaattccaaagggaatggatggataagcttacgcttgttcatcacatcacaaccctcagtgctttcagctctgcaaacggtcacaaccaggctagtcacgcaggatgacagagtcggcaatcttcatcagcggcccaaggcactcgggcgcgaatttgcgcgcaaacatgtgcgagtaggtgccattggatttcctgagctccctgatgagctccccggacacctcctccggctggtaggtgtgcggatgtccgtcggaggagtcggtccagttgaccctggtgagcgtgaacttggtggatccgccggggtcctgcatgtccagcagcgtcgggaagtagtgctcctccgggtagcacgagtacttcctcttgacgaggcagggcagcttgaacttgttccagagcctcctgtccctgaccaccatgacggcgtgcctcctggtgagcacgaagaactgcgagccgacgcggaagctgtcgtacggcacctccgggagcatgacgtcgtcgccgcgggcgtagtagcggtcgtgcagcgtgggctcggcgtcgaggatctcgatgaagctccggtggcggcccttggggccgccattgtcgccggtgagcgtgcggtagagggacgggaacgggtgcagcgggacgcaggactgggagagcggcgcgaagaagtggttggcggggtcgtcgagcagcgcggtggcgaggaggcggcgcgcggcggatatgagcgtggcggaggcgcgctgggtcgccttcccggggatgacccgtcccctgaaggagggcgtcgggggcgaggtgagcgccgcggcggggtcggcgtg

SEQ ID NO: 25647 - DNA, 195 bp, Setaria italica
  Peptide Sequence Number=SeqID_91621
tgcggccgcggctccgctgccggtggtgctcccgaaggggcggccgcgcttcgccggcgtgccgccgccgctcccgccggacttgcccgtctgcttctgcatggctagggttttggagctcggagcttcgagggcggagcgacggagaacggcgcgtgctcggagctcggaattggggtgggcaccgtgtcgaag

SEQ ID NO: 25648 - DNA, 1525 bp, Setaria italica
  Peptide Sequence Number=SeqID_91622
gcgggaggcggcggggcggcgcgttcggggccgtcacgcccgagaacgccccgctcgacctcgccaagcggctcaagaaggctcatccggagctggcaactgctggtggtggtggagacattgggaaaaaaattggccatggtggtggcgatggtggggatgatgatggtgatgatgatgattattttgatgattttgaagatggagacgaagaaggtggatttttcaagagacgaattgttatacaagagctttttaatagagagttcattgatgctgttcttcaagagtggtacaaatcaatgagtaatctgcctgctggtttgcgtcaagcttacgagatgggtttggtcagctcggcccaaatggttcaatatttgtcaatatttggaagacctacaaaggctagatatttctctcgggcttttccaggctttttctcaagagggcttgttggaagaatgcttgcagatccatctttcttgcataagatgacactagaatttctagctaccattacttcatctgtttggtgggagatggagaaccgtaaggagaggtttcaacaagaattggatttggtgtttgtcaatgtttttactgccacaatttgcaatttagctgttttctgttgtctcgcaccttgccggtcttatacaattcagagagttcccaacaatatatttgaaaagagctatcctatgagacagtttgatcttctaaggagaacccaatccttctttagcaaggctgctcagctttgcttaggtgggctagtcgttggctctattcagggtggtctatctaaagtcatttctgctagaaaagaaaggctgtcgataccaattccttctatcagcactaatgctcttagttatggggctttctatgggctgtacgcgaatttgcggtatcagatgttatgtggctttgatagatctatgctacaccattttgatgttcttggtgttgcaatcttcttcagcacagcgataaggctgatgaatattcaaattggggaagtatcaagacgtggctggatcggtgaggaagctgatctgctgcggtcagacaatttattgagaggctatggtggtctagcagagcttgctggggaacaacagtcagggtggtttctatccaataatgcgatttcatctggccttggacttctaggtattaatcatggtgatgccccttcaaaacctcggagaaagagaattgtccgaaaggtccctgctaattgattgtggccattttgatacatatggtggaacagttttggttaagttcctccgtaccttgtgttctgcagtaccaatttctaagagtatgaggcagatactaactggaaatccagctgagattcagatttagtttggatgtgtacacaacttattgttatttgaataggagagattcatcttgtaccatgtgtgaagataaatacaatggatatttgataaactagaaacataaatggagaggcctctcgatttcggtaaataaaaaaaaaaaaaaacaa

SEQ ID NO: 25649 - DNA, 652 bp, Setaria italica
  Peptide Sequence Number=SeqID_91623
cgtgccaactcgtgttgatgagagatgttcatcacactcggcctgggcgtccatctgccggcaaggacattcctcgtgcgagaggagtgagagccctgattcccttatcgtggcgacgatgaacaacgtctccttccagcaacccgcgctagagatgccattattggaaatgcactactacaaccccgaccgcgtggcaaccatgctgcaagagctgccgaaagagccgccgatggtatacaactacactgatccagccctgatcccactgggacccaaggaggcgaagttggagccttcatccgaggcaacggttgcccggcgttttaggcaaggctcggtggtggaggtggtgttccaaggtacggcgttgttgcagagcgagtcgaacccgatgcacctacatggccatgacgtgtttgtgctagctcagggggaaggcacctatgacgccgggagggatgcagcaaggtacaaccttgtgaatccacccatcaagaacaccgtgcatgtcccgaggctagggtgggttgctctccggtttgtcgcagataatccagggatatggtacatgcattgccactttggttttcatctgtaaatgggcatgctagcattgttcatcgtcgaggatgggacgacagtgggcaca

SEQ ID NO: 25650 - DNA, 476 bp, Setaria italica
  Peptide Sequence Number=SeqID_91624
tttttttaagaaacaaagtagaattacgaagaattcgcattccagaatcaacctccaggtttgcaaaacgccacatacacaaaacagaaaaagaaaaaagcgagagagaaatcaaagcctccacaggttacagactagagtccagacgggatgagagactgctaagctgagaagaagccgtcggcggcggccagacccagcgcccccccggtctccgagcgcgtcccggcccccaatgccgccacccaagcgctctgcttgctcctaccgtaggcggaagcagcgcgatcgcagccgtcaccgtcgccggcgggcggttcttggctcccccgcctcagtgctgctgccctcttggtcccccgctcgaactcctcaaccaccagcagcgcgatgtccgccattgcagccctgcaagctcgctcacacacagcgaccttttttaccttcctcctctgcactctgctctcaggctccgg

SEQ ID NO: 25651 - DNA, 157 bp, Setaria italica
  Peptide Sequence Number=SeqID_91625
ccaagctccaactggactgtcctgcttcggcgctattgtgcactgtgcacagccagcgacagcagagtctatcctgtgagcactgagcagcagcagcagcagcaatggagaggcctgcgcaggcgcccaggcagctgccgcctgggttccggttcca

SEQ ID NO: 25652 - DNA, 603 bp, Setaria italica
  Peptide Sequence Number=SeqID_91626
tttctttccttttttcctttaattttgttttctttttgtttctttcttaattttgggttaaattagtaccttctaacctacagaatttcttcaagatcattcttcacgcgcacacttctaacgaagtttgcaccattagggatgcaaataactcgtaccccatgccttgcttcctctggcagtgtctgagctgacaaagtattgcggaatatttttgatatattaattgcctcctcttcagacaggttgccatgacagagtccctcaatgtgtaactgggaaaggatcttcggtacaaatgttactagatcagtaaatgttaagttcataagaacttcgagtttttcatcaacatcccaaaatatttcacgcaagacttgtagcctcaagtaggtagaatggctcataggcttcatgttagtgttcttgtaagctctttccaaatcttccttgatgacctggtgaaagcaaggtgaaatatcagatgaaataccatcatgcagaagttcattaaattgttggcatcttctggaaatattatttcaactcttacagaagttaacttatatgctttctatctcctctttatgcctgcttagttaa

SEQ ID NO: 25653 - DNA, 2257 bp, Setaria italica
  Peptide Sequence Number=SeqID_91627
tttttatggaaaagttaactaatattgattcctcaaaggagatttttcatatatatccatgaattacaacgccaaatttggagaaaaatatttttttggcgtaaagtagaaataaagcatatttgttttttcaaaaatgaaatcgcaagatgcacaacaaaaccctatactagttcttacccaactaagaaataatgggttgatactgaataggtcaaactgcaatgatgctcttcagtttcttgcctgtagaccatctacaggttcacatggtggttgatcagcagtgggagcctgagccatttgtcatgacgcttttgcaccttggcaggcctcaggaacgtccaaaatgttcatccagccatccacacacgccttcatctgtaggagatgttcatctgtaggcatttgtgattttgcacctagtgccatccttccctcagcagaggcttgaataaaattgagacgaaaccttcaacgatttaacatcatcaattacagtccatgactgttcctggagtttggcagcctcagcaatgtccgagttgcaaccatacacatggattgctagtcgcctacgctttggagccgatgatcttatgtatgtattgtaccaagcgataacatcagccttctgaatcgtccgaagctcttcagcttccagttttggcatatcaaacaggtaccttttatcaacaatctgagaccaataatcaccagtttggtagctaagggaaggttccttttccagtttatcagctattaaaccacttctatggtgctcgaaagtctcatcgtcgagcccgtccagcagagtagatagaccgttgatgaagttatcaatccgactttgcaggtaaatagggctgtatttggaggacataactcgaaaacagtaagccaacatccggtaagtcatccgtgggctagagtccacagtatagccaagttgctccttcgttctcaactgatcaaagcaaggttcttcaataatgctgctaaaaagatctgtaatagccctgagccttgttgcctcctttccaatgtcttgctcaattgggaaatagacctcaaccacagaattttcttcaagatcattcttcacgcgcacacttctaacgaagtttgcaccattagggatgcaaataactcgtaccccatgccttgcttcctctggcagtgtctgagctgacaaagtattgcggaatatttttgatatattaattgcctcctcttcagacaggttgccatgacagagtccctcaatgtgtaactgggaaaggatcttcggtacaaatgttactagatcagtaaatgttaagttcataagaacttcgagtttttcatcaacatcccaaaatatttcacgcaagacttgtagcctcaagtaggtagaatggctcataggcttcatgttagtgttcttgtaagctctttccaaatcttccttgatgacctcaaacctatctgtcttcggagaaaaggatcgaaaagcagacaagatgttggacagcagggttggaagcttatcattgtaaccataaagctttatctcaagattgctaccaacaacagacatcgaagtctccagtttagccacataagcctgataaaggacctcattaagttcatctttgagaaggtttgcgaacagctctgtcagaacagagttttcaaggctgctacagccatcattgacagaaatcaaaaagtaagtgttcgcacgagggacattaaatgtcatgtccatcttgtaccagagctttatgaatggctcatccacaatgcaacgagggttatcatcacttgaggatctaggatagtttgcgtttcgcagagtgaagtcccctggaataaattcattcttcctaggtaaatgtaaattaggatctatttgtacaggatttcgccaactttcaatcaaagatgatgggatgtcctcctcaatgtactgtgaaccaaaccatggctcacactgaatagcttgtgactgcttatcaaatgatctactgagtacgtcaactctcatgttatccggattgaagaaacacaaagcatgcttgactaattccggatcccagtcctcatgtatatactctccacaaacaatgtgcttctcagagtaaaaaagcatattttctgcaagatcaactgcataatcatctggaggttgctcttctgaacaacaaaagacaatagacttagaactaaattaccggaatacccaagtacctacaatataataataactactaca

SEQ ID NO: 25654 - DNA, 127 bp, Setaria italica
  Peptide Sequence Number=SeqID_91628
agagacatccgccctatccgcacccgcggccccatacaatccgccgcgcgaacaccggcacggatccgccgcccgaacccagcacgacggcaacgacgacgccccagatccgaacggtcaatgaaat

SEQ ID NO: 25655 - DNA, 649 bp, Setaria italica
  Peptide Sequence Number=SeqID_91629
aaacggcagccatttagcgcttaactaggctggttcatcgcttcggtttccttgattgaattttgaggtgtgtatggggggtgggtggttcgactaggtgcccaaacttgagaagattgtggtgaactgcggtctgggcgcggacgcggggaacaacaaggggctggagtccgccatgaaggacctcgccaatatcactggccagtggcccgtcaagaccaaggccaagaagtccgtggccagcttcaagatccgtgagggaaacaccatcggtatcgcagtcacctccgtggcagggtgagccccattgttcttttgacctccttcaaattgacgttcacaattgacaggtttgcatatgaaatttgcgtgtctcagcaattagaaacctagaatttcagtataatctgctgtactagtgaaaattgttagcttgattaatttggtgtccttggctgtagataatgtacaatttcctggataggctcatcaaccttgggcttcctagaacaatggactttctcggtgtcaaccccaacagctttgatggccacggcaactacagtcttggtctccgtgatcagggcgtgttcccggagatcccctacgaggtgggtgggaagaaggaacggtatggatgtgtgcatcg

SEQ ID NO: 25656 - DNA, 438 bp, Setaria italica
  Peptide Sequence Number=SeqID_91630
tataagccggctcaaaagctgacacggctgatttgttgtgagagaaaaatactgttaagggactgataagccggctgataagctgaagctcacgggctgaagaaaatttagacgggattggaacaactcgaactaatacatgaaaaaaaaatcagaaaacagaaagagttaattccccgaagctacaactcctagcacctaactctaaatctaactttcaaggaactacaagcctacaattccatggactagtgtcacatacagttgtaataactttgcgaaaacgggaaaaagaaaaaaagggaaaagaaggccgcattagagcgataagtcacctgggttgatgatatagccgagcgcgatcgagatcagaagcggcagaccctccggcgtctgcctccgatccgatccctaccacgccacgggctccgattccga

SEQ ID NO: 25657 - DNA, 481 bp, Setaria italica
  Peptide Sequence Number=SeqID_91631
ggaatatgctgtcacggttgtaaactgcattccagagcaggagttgttgtcactctgttgcttattgcaacaaccaatttctactagtcttaagcatacagtgctttcgttcttcgttaagctcctctcctttgatcagcagtacaagaaagttctcagagaagttggtgtcttgggggtattgttagatgacttgaagcaaaacaagcttttctttggagatgagcagcacaacaaggcctttgagtctacagagaggatatctaatgcaagtaattttcagaagacggtggacaacaaagatgcaattctttcgccaaagttaatggcttctagttccgcaaaatttcccatgtttgaagatgaaggaacaattactgttgcatgggattgtcttttttatctgctggaaaagagctgagcctaaccagcaatcattccgatcgtccaatggcgtcaacatcatttcttcctttcttgg

SEQ ID NO: 25658 - DNA, 271 bp, Setaria italica
  Peptide Sequence Number=SeqID_91632
cttttcagttgcataatttcctatctgctttccatgttatcttgcattgacttgtggagaaaatcctatctgccatacagtattatactatgcatgcatgcataatagaaactggcattatatttacgccgaattgttttttttggcatatttcctcgaaggtagtgaagagttctaaaaatgaagaaaatgcaaagttcaattagaatcaccagttccttcttttgaaatcattctagctcccaaaatactaaaattatggcttgagtta

SEQ ID NO: 25659 - DNA, 534 bp, Setaria italica
  Peptide Sequence Number=SeqID_91633
cgttcccaaaaacgaattagattcgttgtcatttttcttgcttctcttcttctgatatgaactggtccatccccatatgaatagtctgtctgtttcctcaatcattcgtataggatgcccggtatatagctgaacctcgtaggatcatttccaacgttcgttatatcattatatggatggatatatgcatgatgcatctatgtgttctgcatgttggttgctcaaggaaggtacagatccctagtaaccgccttcggaagatgcacgcaaggaatccacgcgggtgacggcccaagtagcgtgaaacaggaactgcacgggcacaccaggtggtagtggtacattaccaggccaccttccacgaagacgagggaaggagaggctcgttcgacgagctgggaaatagaacatgtcgggcacatgggcatggcagagcatgagctgaagttttgcccacggccaccgcacgacgcaaaaccgaaagatggaggccgctttcggcgacgacggcaaggcgatccgacgtcgtcctct

SEQ ID NO: 25660 - DNA, 271 bp, Setaria italica
  Peptide Sequence Number=SeqID_91634
acgtgaaaaactagaagccatacaatgcaacatgatcacaatcttgaaccacagtgttctgatgcagaactgccaaagatatcatttcttgatcatcatcagcctcaccaacccatagtctggacggatggccttcaatatcatttgagcaaacattatagttgagaagtttcgtgtgattatcccatatgcgcaaatgtccatctaaatgaagaacaaataacaggtccctttcatttacgacagttaccactatatcctgcacaggacc

SEQ ID NO: 25661 - DNA, 1176 bp, Setaria italica
  misc_feature (1153)..(1153): n is a, c, g, or t
  Peptide Sequence Number=SeqID_91635
agtccgataaaatcatttacaatttgataaattcaaagattaagctagaaacaataacaaatcataatataaatagttcgaaatatagcacaaaagaaacttacaatattacttgtctgctttgtttacccgccgctttttgaataacatgaatgtgttgattatatcttcttcattcacttggaagaaaatatcccgctcaataaatgtgactagacaatcatccaaaacactatcgcctagcttattccttgactttattttcactttaaccattgcagaaaataccctttcaacactcgctgttgccactggtaaaagcaatatcattttgagaagcaagtaaaccatatcatacactttctgcctccgtgtttgaacaagcttaactgagagatcaacgatgctgtctagacccttgaagctatcatctcgtcgcatgtcatcaatataattatcaagttgcaattcaagttttagcaaatcattgttggagaagtccttaggataaaattcagccaatctgcgtaccttctgtgcatcaaacgaagcaaatgaattggaaggactgaaggctgacatacacgaaagtagctccatattgatctcatcaaaccgattatcaagctcttgactaatttgatcaatgacaccaatatatacttctcttctaaaatggtcatcatttgtttggtttcgagcacgagcgtaccttgctgattttccatatggcacataatcaccatccatagcaggaacttcaacatcatgtttaatgcaaaaagaagtgaccctctcaaggaagtggtcccaaccatcaaaccttaactgttgcattttgttctttgccacattaacaagggaaattgcattaagaatatcttgatccctcctctgcaaacactccgataactcatttgtgtatccaagaataacaaacattaagtgcacaaagaaaacgaactcaaaagtttcaaatgctccaagtacaaaatgtatctttgtccaatcatccttatgtgaaatatcatcaccaagatcaatgagcgcatcatggattgaggaatacattgtaatgatgctgcatatagttttgtaatgagagccccatcgagtttcaccaggcctaggcaaactcatctcttgatttaanccactccctgattcaagctcacc

SEQ ID NO: 25662 - DNA, 1440 bp, Setaria italica
  Peptide Sequence Number=SeqID_91636
ggctacttacatattttacgtcaatgccctgtgatgaactgacgccaactataaacatgaaataaatggcatgtatttttttctatactgcagtaaataactaaacatgcccaataacttaagcagcacatccacgagcaacccagtaaagtacctaatttagactaacacagcagtattatggtggaagcaccaaaataaatatacagtaatgcccacaaaagcacatggacagtaatatatcgacggtgaacctcagaactataattaatgacttaacatcgttatatctgaatctaacaaaataactgcaatattccagcatgggtgttcataagatcctaatttgtcaggctggcacctggcggagctgactgcaataagctactggcatcaccgctttgcataccacttctcatccaggcaatgctgctaatttctgataccaatgaagcaaaactactatttaaaattggtggatgatcttcaaactcattgaactcaggacccagcaaggagttctttcgaggccgcccgtgggtggtgcagcaaccatgcccacatttgtttggaacctcagcagcaaagtatgtaggatcagcaaacttgaatacctcactttcaggagtcagagctttaagagttgagtcaaacttgaagacagaacttggtgtttcctgttgggtaggttctgcatttcctggattgtacggtctgaaagcaccaatctttgcagctggtcgggacaggtagggtggatcaacagcttgggtactataatactgatctgcgacgtgccatgccccagcagatgtttctggaactgttttcacaggagcatcccttacatccatagcggtgaaggaactaagatcctttgaaggccaaggttcttttgaaactgccctggacacctcaggggtacttctctccacagaaccaccatgtttgcatctaccatcgttgcagtatcgacgcctcagagtggaattccagtggttcttgatagcattgtcggttctcccatccaaaagctttgcgatacatgcccacttgttcccatggatagcatgagcagcaattataatccggtcctcctcttcggtgaaaggcttgcgcttgacttgggggtcgagttggttgcaccagcgcaggcggcaggacttgccggagcggcccgggattccgcgcgcgatcagagtccagttccgcgccccgagcttctccaccaggttgctcagcaccgtgtcctcctccggggaccaaggccccctcaccctctcctccgcggtcgcggtagccgccgccgacgccgctgcggaatccgccgcgtcgccaccaaccgaagcaccggagacagccaccacgtcgtcgtcctcccggtaaggtaggttaggggtacggggggtttagggtttagttaggttactttaggggtta

SEQ ID NO: 25663 - DNA, 433 bp, Setaria italica
  Peptide Sequence Number=SeqID_91637
ctctctctctcatgcacacagccatgtctagagccttcctgcccaccgtcctcatcggcctggtcgccgtgctcagcagcagcacggcgtcggcggacacgccggactgcccgtacccatgcctgccgccgccaacctccggaggagccattaacagctacccgccaccgcaaccgtcaacaggagccggcggcggcttcggcggcagctacccgccgcctccgccggggagctaccagctgacacctccgggcgtgatgcccggtttctccccaccgtacggtgggttcccgtctgggccgaccccgccgccgccgaacccggtcctgccgtggttcccgtggtactaccagcacaccaacccgatcacggcgacgacttcgtcggcgtcctccccggccatggatgggaggtcgaggatcacggtcggggt

SEQ ID NO: 25664 - DNA, 258 bp, Setaria italica
  Peptide Sequence Number=SeqID_91638
gcaagcaatgcccaagaaccctcatcactggctggagaagctcccagggtagcggcaccctggcctccttatcgtaatcctcgtggcaattccgtccactgctgtcaccgttgatacgcatccttgacagttcctcctcaagttccttcccattctcagcctcggacgacattggtgacacggaccccaaagagtcaccctcctcttcctccaattccttctcatcaagctcaaaacggcatttgcagtactgccccg

SEQ ID NO: 25665 - DNA, 1018 bp, Setaria italica
  misc_feature (57)..(57): n is a, c, g, or t
  misc_feature (989)..(989): n is a, c, g, or t
  misc_feature (997)..(997): n is a, c, g, or t
  Peptide Sequence Number=SeqID_91639
ccgatgaggatgaagatgaggaggaggaagaagaggaggaggaagagaaccacgtgntccctcctctcgccacgaagaacccgtctccgccgccgccgaatcgcgaggaatccgagagctccggcgacgaggaagaggaggagacggacgacgaggcgccgcaggcgaagcccgctccaaaccaggaggcggaggggaagggcgcgaagccgtcgtcgagcgaggacaagaagccgggcgcacccttccagcgcacctggtcgacggacgacgaggtccgcatcctggaggccctggccgcgcaccgccgtgagcacggcacgctgccgcaggtcgacgctctcgccgccacgctcgctggcaccctcgacaacagtggcagcagcatcgcgttgctgcagggtaagctcaagagcctgaagcgccggtacagcttggctgccaataagggcgagcgaccgagcaaggatcacgaccgccggctcttcgacctctccaagagcgtctggggctccacgaccgcggcggcgaacggcggcgcgcggagggaggtcgccgagatgtgcgagctgtacccgtacctagcggaggaggtgaaggcgctgcagaaggcgcacccgggcttgttcaagcgggagttcgggatgatagacgatgacaaggcgcgcgcgctggacacgaagatcaagaggcagaggctgcatcaggctaaggtgattcagcgccgctgcgacctgatcaaggaagtgaccaagacgctcatagatctggtcgagagcactatctaggcattcctgtttatggccgttgaagtgcattggtgatcgattacctgcgaattctgtatccagtagctgaacctcctgcgaatttggcaccttgatgggtgtcgaatgtgttttgtgtcagtgatggcgatcgacttgtttgagcgtccgtgtttgagtcaggactcaggaaatgcctgcattgtggttctgttgaggaanatgtttgngtggtttatgaacttggacgg

SEQ ID NO: 25666 - DNA, 467 bp, Setaria italica
  Peptide Sequence Number=SeqID_91640
acacggtcggttctgttgccgttgctgctgctggagacgtctgatgagctcttcctcaggacgatcttccggggagtgccacatgacactgaaccggacagccctggcgcctcaggcgcggggtggcggctgcttgtggcgcgaccttaatggagtctagctctctcgtcataagtgagccgatggtgcccgttgtgcccaccttgatcgcgccgccctcgccatggacgagctcagtagcgcacggcatgatcagtccactggtcgttgggtcgctgcagccggatgaacggcggggcggctagatagcctccgacttccgagctgaattgaggagcaaggggtgactggctgggcgaggcgaagggaagggaacgcggtgtgccgtgtgccggtgtcggattcaaatggcccgatgtgtgtccgtcttgagaggagcgcaagttatatgtctgctgcctctttcg

SEQ ID NO: 25667 - DNA, 2007 bp, Setaria italica
  Peptide Sequence Number=SeqID_91641
cggcgaattcgggcggcgagcgcgccagttcaggctgccgtcggcggcgggcgtaattgttgcggacgaagcggccggttggtgcggcgggagtttgcgggtagggcggtcccggctggtgaaggggcgaaggtgctgcttggggcgtggatctggccggaggcgggcgatgtggaggagggagtagggccggattggagggaaaggcgcgatcttgtgggttcccatgggcgcatgcttctcgcaggaggagcaccggctccagagcaggccagctgaagctgctggaccagatggcctgagaaagtctaaatcggattctaaagctatagcaagtgtccttgctcctccaaaagatgttgtggacttgcaagtagaaggatatggaaatgttaatattttcacatacaatgaactgagggcagccacaaaaaacttccggccagaccaaattcttggagagggtggatttggagttgtttacaaaggtgtaattgatgaaaatgttagagtaggttttccatctagacaggttgctgttaaagaactaaacccagagggctttcagggagacaaggaatggctggccgaagtcaactatcttgggcaactaagtcatccaaatctagtcgaactgattggctattgctgtgagggttcacatagacttcttgtctacgagtacatggcttgtggcagccttgaaaaacacctttttcgccgggtttgccttaatatgccatggtcaacacgcatgaagattgcgctgggtgccgcaagggggcttgagtaccttcatggagccgagagatccatcatctatcgggatttcaagacgtcaaacatcttgttagatgcggactacaatgctaagctttcagactttggtctcgcaagaacaggacctagtggagaccaaacccatgtgtcaactcgggtcatgggaacttatggatatgcagctccagaatatgtcatgactggccatctgaccgcacgaagtgatgtttacggctttggcgttgtgcttctagagatgattattggaaggagggctgtggacaagagtcggccaacccgtgagcataacctagttgattgggcacgccccctccttgtccacaaccggaagctattcaggatcattgatcccagaatggaggggcagtactccaccaaggccgccattgaggtggcaagcctcgcataccgttgcctgagtcagaaccccaaagggcgaccaactatgagccaagttgttgagacctttgaggcggtgcagaacatgcctgaatgccaagacatactcctccagaacagtatcactggtgctgtgacactctatgaggtcccgaaggagcctgcagagagtgttgagaaggagaaggccaaacaggaaccagcagtaaagaccgccgctgtgccgcctgtgaatggaaaaccagtcccccagagcaggcgaacacggcctgggaacggccggagcaagagtgagccgtcgttggagtgcaagatgtacatcccgtcaccagactctgacggacagcagctcggcctggagacgcttgcatccccttccagaaacggaagtatgcaggaccctcctgacgaggatttgtacaagatttaacatcagagaagttttttttcccaacgactgagctgtcgttggtcatcttttgcgccaccatccatgttcttaagaacagtcagccagtgttaatttttcgatgatggccatgctagggttcttgttcatccgattagcaattgtatgtagatgagagttgtgatggaaagcatgtaatgtgagtgccttccatgacgacgctgtaaaaacctgagacggttctttccgggagaattccacgccaaaaatggaagtggagagatgtgtcctgatagtcagtgccgttgccagtgtgttcgagttacttgtaaagatgcttgttctacattgtaaacttgaaattgagagattatatttgccagtgtccacatcctgtc

SEQ ID NO: 25668 - DNA, 530 bp, Setaria italica
  Peptide Sequence Number=SeqID_91642
atccccggccatcattcaaggatctgcactacgtggatttatggagaacagattcatggagaaaagagctcctggttgtggatccacgtgctccgcggctgggcatggaggcccacgagatccgtcgaggtggcggcgagatccgatgaggctgcggtgagatccccttccccacccctctcaccgctcactctcttgcttcttcacggccacgagccactgcggcgagatccatgtgcccgaagaccgaggttaccgaggtgctccatcccgactacaacgctcggcatctttgcatggagtagaggcggacggatccctcgtggacaagcgggctcctggacggtgaataccggcggccgcaggatctaccagcaccttccccgatgatgctctgcttcgacatcttccatttgaatttgttgccatgatttgccatgtttgcgttcgtgaaggaagtaaaattcatgatgctgtgcttttggaaaattttcaatgtcctggaatgccaacatttgaatctgttcacg

SEQ ID NO: 25669 - DNA, 1170 bp, Setaria italica
  misc_feature (1145)..(1170): n is a, c, g, or t
  Peptide Sequence Number=SeqID_91643
aaccaactggacgccgggatcactgccgcagccacccgcacggcgcagcgcgtgcctttatttgtctcccccgttcccttctccctcaggctctctcctcacttggtcttcctttcctggcggcgacgactgggcgaacggcggcgctattcgttctccgcagggccctaagccggcgcagagcacccaccagcagtagcgaatagcaaggagttaggagaaatggatatgcaagagaaaacaattcctgctcaacaaggaaaggaaaagaaaaaagaaagtgcaaagaaaagagggagagcaagggcgaggtcatcatctgttttggattctactaatgacacagtcatcaatgaggaaatgccagagtacaatcttgatggacctactattggggaaaaactagcaactctggatttgatcaatagagataatgaaaggaagggcactgaagagcaaacactggctatggcactaccaagtgcagattcagtccatattttgctcaagcaagctctgcgtgctgatgataacatgtcattgctaacttgcttgtacaatagagatgaaaaggttatcgcaaaatctatatcactcctaacaccagcagatgttgtaaagcttctcaagttcttcgtactgcaaatacaatctaggggcgcagtattggtttgtttacttccatggctgcaaactttacttagtcaacacatgagcagcatagtgtcccaggagtcttctctgtccttgctcaactcgctctaccagcttattgatgcaagaacatcaacattcaagtcagcacttcaactctctacaaccctagattaccttttcagcgagattgctgatgatgaagctgatgatgaagaggtagcaccaccaataatttatgaggacaaggacactgatgatgaagagtctgaagccgatgcaatggaaactgatggggaagaggctgaagagctaggggatgttactgatgcctctgagcattccgatggaagtgagatcatgagtgactgattgacatgtaccctaggactgagctctcaaatgcgtcctgttgaggtggaattcatgaaactcatgacgactgcaagttctatgatgatggtttaactatttacttgttgtcccttatnnnnnnnnnnnnnnnnnnnnnnnnnn

SEQ ID NO: 25670 - DNA, 309 bp, Setaria italica
  Peptide Sequence Number=SeqID_91644
ggccgtttccgtccccatttctctcgtcttcttcccgtttcaaaatccccaaaatcccaacaccgagccttcgaattccccccgctccacgattcgtcgtccccttccccttccgtcgtcgtcgcccgctctccgccatttgggaatcgggggcagtccagcgaccgcgccgcgcgtttcgaggctcttggctggcggcctcgccgggtggatttggaatcgcgccttctcggcgcgcgcacgtggagtgctagcaaaaataatgcagtaaagttgtgtcataagtaaaatgtgtcatgcatgtgcatc

SEQ ID NO: 25671 - DNA, 1098 bp, Setaria italica
  misc_feature (1028)..(1098): n is a, c, g, or t
  Peptide Sequence Number=SeqID_91645
tggaagcattggattctgatttactggaagagatgaattttgtcgaaaaaattgccttatgtaatccaaaaaactaccaaatctggcatcataagagatggcttgctgagaaattagggcctggtgttgcaaataaagagcatgaattcacaatgaaaatacttgctattgatgccaaaaattaccatgcttggtctcataggcagtgggttcttcaagcattgggtggatgggagagtgaactgcagtactgcaaccagctacttgaggaagatgtcttcaataattcagcttggaatcagagatatcttgtaataacaagatcaccacttcttggtggccttaaagcgatgcgtgattcagaagtagattacacaattgaagctattgtagcaaaccctcagaatgaaagcccttggagatacctcaagggtctatacaagggcgagaataacttgctagtatgtgacgagcgcatctctgatgtttgtctcaaggtcttgaagaacgattggagttgtgtatttgctttgagcttgctgcttgatcttcttcgctcgggtttgcagccttcagatgaacttaaagccactcttgaaccaataaggaactctgatcctgaagtggcagatgctgatcttgcaaccactgtttgctgtatcctgcagaaatgtgatcccctccgggtaaattattggtcttggtacaagaccaccctttcttctcagatctcctgacattacatgggctcatccccttgatatcctcattgggccggactctgtgaggtagacagctagacataatttaggtgccttgggttaaaatggttcaccggatctgcatgatgcaaagccaaccaaagaggacagagtgtgtggctaccttcactgtggtcggacagcaacacttgtaaactggattttgcttggcagaatttgttaatgttattgttccaaataacactttttgcaacaaattttttttcgtatatgtaagcttgaatacattggttggcatgagagccnnnnnnnnnnnnnnnnnnnnnnnnnnnnnnnnnnnnnnnnnnnnnnnnnnnnnnnnnnnnnnnnnnnnnnn

SEQ ID NO: 25672 - DNA, 241 bp, Setaria italica
  Peptide Sequence Number=SeqID_91646
gtcccttgcttgctctatttcattgctcctatgtgcaaagtatgcaggatgattgggggatggaagggtatttgcttccgttgtccagagcatacacaacctttgacataactggcctgtcatctggtttttcttgaacacacaagagtgctacatgactacatagcaaaacttcatctagcaaacaagaattcgtaatagatgaatctgccaaattttttatgttcccctccatccacat

SEQ ID NO: 25673 - DNA, 324 bp, Setaria italica
  Peptide Sequence Number=SeqID_91647
cgcgccgaggcggcggtggcgtccgtggtaaccgtcctcccccacgagatccctcctttgctcagcgccgccgccaccttcttcttcatcctgagcgcctacttcgtggtgctgccgctgcgtgacgagggcgccatctccttgggcctcgacaccctcccgggccttttcgccggctccctactcctcaccgtcctcgccgccccagtcgcctccctcgccttctccctcccgtccatccccaagcccagggctctgattttgatacataggttcttcagcatctctcttcttgcattctttgggctttggtttgcttctacg

SEQ ID NO: 25674 - DNA, 283 bp, Setaria italica
  Peptide Sequence Number=SeqID_91648
tttctccccggccgcgtcgtcgtctgccgctaccaacgatagtgtcagagcccggcgcaggcacgtgtcgtcggtcgccgccagcctccggttatacctccaccgcatcttctcttcatccggggccagggatgccaccgttgcgggaagggaggaggaggaggcggtgaccaccaccgtgtcctcacctctcgcccggtccctgccgccccagccctcggcgtcggtggtgctgtccacgccgtcgtcgccgtgcgcgtcgtcttctccgttcatgtcgccg

SEQ ID NO: 25675 - DNA, 257 bp, Setaria italica
  Peptide Sequence Number=SeqID_91649
atgctggtgcagcaatcaaggcaacagatgttcttttcattctttttggtcatgctcatgaaggagcatgctacaaagaacttctgtgtgttgagtgcctctaaccatgccggcttccacattgcctgcatgatcatgtatgtaggtgaaaaaccctctggtgctgtgtgtgttctgggttggatgaggcagggagttttgaagaagagagagacgcttatgagagcttatgaaagatggagggtggggtgtttagt

SEQ ID NO: 25676 - DNA, 307 bp, Setaria italica
  Peptide Sequence Number=SeqID_91650
aggcaactccaaatcccagatctgagctgctcgcatcctcatcgtttggccgcgacgcgccgtaggaactcactcatggcagtttgggcaacggaggagaagaagttgggggaaggagggtgggggaagggctgctgccagtgatggactcctctgcgtcggaggaggcaggcgcaacagggtcgctcgcgtggctccgagcctccgatggttgatttcatcgtcgctgcttccaattcaggatagggaggcgaggatggctgtagacatcgccgcccaaggtaggtcgatgcagagctgcgagcca

SEQ ID NO: 25677 - DNA, 399 bp, Setaria italica
  Peptide Sequence Number=SeqID_91651
gaagaaagcagccagaaaacttaagaaacatgtctagattcaacaaaagatgtgtgaatatgcatattaggctcagatctacaaagttgggatcagactgacgtgcaaggtataatcaagaggtagataacatttatcaccctcagaaacaacctctggaatatgttctcatcatttccccacaagagcatggaggataagatgctctcacgctctttaagcacatattctaaaccactggatagcaactaacttttttttcccatttgaccaggaattaggccacttgaaacaaagttttatttttaaaaaggggaaaacagagcaagtgcttttgatcagaacggcaaatacaagtttttttaagaacaaaagaaaacaaaaactaaaagggaaaaa

SEQ ID NO: 25678 - DNA, 189 bp, Setaria italica
  Peptide Sequence Number=SeqID_91652
catcacttcactgcacaactgcagtgcatttacgcatctatacaaattgctttcagccatgttagagtagtcgcaagaatacatctctttaacagtaattttaggtcaacacaataaagcaaattcacatgtaatctgctgctcagtggccgtagttgaacttaagaatttgcaaacattgcattttgg

SEQ ID NO: 25679 - DNA, 397 bp, Setaria italica
  Peptide Sequence Number=SeqID_91653
gagttccagaggagcgccgcgccggcgaggttcctctgctttcacgatggggggtgggtggacgtcgacggcgaggcggtcgggcagctgcgccgggcgttccaggacaggagggcgatggtagaggccgcgtgcgggggcaaggcgtacctgttcgactttcttcgcatggtgaggatcgacgcggccaccggcgaggaggccgcgctggggtggatcgacgaccgcggggcctgcttcttcccggcgccggactgcggcggaggcaggaagcggaggagggacggcgcgccggcggaggacgaggctgagtcctcctcgggcgtcaacgagcgctccggggagagccgcggcgcggaagccgccgccaagaggaggaaggcgggcggggcgtggg

SEQ ID NO: 25680 - DNA, 252 bp, Setaria italica
  Peptide Sequence Number=SeqID_91654
cccgctctttcggcgcggcttggcctcgccgagcatggtgatgacgtcgcgcatggagggccggtcccgcggcgccctggcggtgcagagcacggcgatgcggagcacgagcagcatctcctcccggacgtgcgcgcaccggccgccgacgttcgcatcgaggtgctcctccaccgtgttgctccggatcttctccctcacccaccccacgatgtcctgcccctcgccgaactccgcctccaccgcccgccg

SEQ ID NO: 25681 - DNA, 923 bp, Setaria italica
  Peptide Sequence Number=SeqID_91655
aacacaatacaactaccaagaaggggacaaagaacgaaccggtaagacctagacctaggtagaacgaatgagccagagccaagaccgtaagaccgaaggaaagttactagacgccgcgccgataagcagcatcgcccacgacggcagcatggccgagagcgacccggcgaagaagccgacgcagtcgccgaggtccttggcgacgccgagcgccgccaactgccgctggttgtaaccaagggcttccttgaccaccggcgagatggcgccgaagaggtacccgatgccggccatggactgcagccacattgcggcgacgaacaccagccaccggttcgtgtagaaggcgcgcaccctatccccgagcctccccatcgggccggccaagaaatcaccagcaaagattggattttgtgctggaattcggggtcaggcctcgatcctagagcttgggaaacaccaggagaatagcaaatggatggcgacgaatcggatgccgcgccgcggaagaaaggagaaggcttttcgattgcgagaagcaaagaatacacgattagctgcagacggagcaaaatgctgcctccactccaacaaactagagctgcggcgcagaagcttatgagtgagcaatgctaactggaaatctggaatgctttagcgcaaaagcgaggattgatccgctggaaaacagtgggctccgatgatcagatgtaaacaatcggagacagagatggtggggattggaaaagacacaaccggttgccgaaattctgcaaaaggaaggtaaagggatgagaagaggaggaaccgaaacgaaatgaaacgaacaacgttgacggatattctgagatgatcgcttccacgcaggcggataacgatgcaatacggagggggttggggacacgggaccccctcctactgac

SEQ ID NO: 25682 - DNA, 2275 bp, Setaria italica
  Peptide Sequence Number=SeqID_91656
gatgtttatacagatattcgtctgagcaaaaagtatttattacaggactacaagtatcagagttcatggtccaagcatgaactacaccttggctatctgacacatagggcatgtaaatttccacttggaaacagcagtcatggattacaacctctgaatactgatttgggaatatacaggtaaaacttaatgttgtgtacatatgaccacatatatgcaaaaaaatggtacatggaccagcaatgggaggatctgacatctcctatccatggaagtttcatgtgcgggcagaacgatagaggtgaacataaacctgtttggttctctgaacaataatgaggcttaaaccagctcccacaacacagaaagctgacataatcagtgagctgacaaagaagcaaacagaaccttcacacttcagtggtccatctgcaaccaagcccatgttgtgaagtaatcttggagattgcaatgctgtcatgtgatgtagctgtgcttgtttctcagcttcatagtcatacaggttactagcaataaggcctgaaaaaacgagtgaccctgcagggtttgctactgtgaggaaattgtacattgcaccgaagtgttttacgccaaaaagttcagagacagcagctggcacaatagcccaatgagctccgtatccaagtccaaccaggaaggtcccaatgtatagagttccaggccaagccattgcgaagaggaaatgcccagcagccatcaggatctgagcaattgccagtgctatgtgccttgggtatgtgtgctccctgacaacaatctcagagaagtagcctcctccaacacgaccaaggaaattccatatgcttatcaatgacacgaaaatatgtgcgtctttgaaccctacagactggctcatctgacccagattgtctatcactgtcagccctgatcctgatccaagcaggagcgagcaccaaataagccaaaaatcagccttcaccattgcctgcatcagggtaaagttttcccctcggtgtggctgcctacggattctaaccccaccccttgctgcagcttgcactaacttggtctgcaactctgcaatcctctttctcctttcagatggaggtaacgaatcaatttctttaggtttctgctcttccacctcacttaaaatgacctctggttgatcctctttctcttgtgaagtgcttgtctctccttttgatggttcagaaaggagagcctcttcagttggatgttgtgcttttgatgatagtgtcaaggtcacagggatcgcgataggtgaaataagaagtatgagtaggatcacagtgagagaattaaccacattgtcactcagttgcatgaaattttggactagcatgacaccaacaagatatgaggcgaggagcaagcagatagtgtagatgaacatgaagctgttcttgtccgacgggcgcacctggcggtgacctccaacaggcctaataataaacatcaagccaatggcaaccaatgatggaccgactgcaaccatgaagacaagtgttgcatggtctggtgtgtgcatcactgcatacagttgtgtcaagattgcgctgctaaggcccgcaaatcctttcataatgcccactgttggacctctgctctttgggaagttctggatgcatgttacaagtgcagttgtgttgaagtatgtctctccattggttccaacaaagataagaacacacatcatccagaggggcagcgccggtgcctgcctggtgacgatgagccagagccagccgtagccgaggaagttctgcgccgcgccgataagcagcatcgcccacgacggcagcatggccgagagcgacccggcgaagaagccgacgcagtcgccgaggtccttggcgacgccgagcgccgccaactgccgctggttgtaaccaagggcttccttgaccaccggcgagatggcgccgaagaggtacccgatgccggccatggactgcagccacattgcggcgacgaacaccagccaccggttcgtggagaaggcgcgcaccctatccccgagcctccccatcgggccggccaagaaatcaccagcaaagattggattttgtgctggaattcggggtcaggcctcgatcctagagcttgggaaacaccaggagaatagcaaatggatggcgacgaatcggatgccgcgccgcggaagaaaggagaaggcttttcgattgcgagaagcaaagaataacaacgaattaagtaacttaagtaaactaaaagtaaaacggtaaaa

SEQ ID NO: 25683 - DNA, 212 bp, Setaria italica
  Peptide Sequence Number=SeqID_91657
atcctggttaccaaaggttcttttgtcaagatggatgggtgtgcgtataatttggatgataaattcttgccatgatcatcttgactggttgtataattcgcaactctaattcgtacagaaagtttatgctatgaggtaggaacatgtatttattatgtttagctacaggcaaagtgagcaacgctcagttgagatgcaacaaaaaaaaaaaa

SEQ ID NO: 25684 - DNA, 381 bp, Setaria italica
  Peptide Sequence Number=SeqID_91658
ttaaaactttcctatagggcttctctaagtgctatagagaagtgggtgtgcctttcttcttttcaaaaaataaatcaacggttagatggatatcatgtaagaaagatggattaccagtaaaggtcatcatacagccacaaagtggatgcagttgtgtgcctttttcccattatcgtggaggttttgaataaacatctagtgtgtgaatatattttaggtttcgggacaaagttatcatagaatgtatcatcttgcttctcaagcgtgaagtctcatcaatttatttttttcttcacaaaaattaagtttttggtaatatgttcatatttttgtatgatatattttaaaatcatttgatttttttggtttttgcagaaaaca

SEQ ID NO: 25685 - DNA, 314 bp, Setaria italica
  Peptide Sequence Number=SeqID_91659
gggggggtttgggggttggaaggggattggtgcctgccgggtttaaagggattgctggggagtctgcaggactggtggtggtggcagtgtgtcgatggaacggcgaggcgctacccggcacggtggtggaggccggtcggggagggccaatggtaggggtatcgtgaccacaattgtttacggcgatggcgatcgcgtgggtggctccagtagcgttggggccgccggatccgggagagacggcgggggatcggagccagctcagatccgactacagtgggggcgtggaaggagggggtagagggggaaagggg

SEQ ID NO: 25686 - DNA, 807 bp, Setaria italica
  Peptide Sequence Number=SeqID_91660
ctcgagtgtggaacgtgtagctcgtttatgcaatatttttttactacttgtttatgcaatagttatgatgcgagctctttgccacaagatcagagcaattccatactgtcataggaccgagctccggattttgtccacgccatggattccagcgacttggccgggttcaattggctatggaattgattttccatcccggaaaaatccatcgtatcttcggaagcctgccagtgtctccaccaaggccacgccggcaccttcctccatggtcatggagcccaccgcggacgaggtggccttcgagtccccggcgcacttccgcatctacaagagcggcaagatcgagcgcctgaacaggcctccggttctccccgccggcctcgacgaggccaccggagtcacctccaaggacgtcgtcctggacgccgaaaccggcctctcagctcgcctctacctcccgaagctccaggagccgtccaagaagctccccgtcgtcgtgtacatccacggcggcgcgttcctgctcgagtcagccgactccgccacgtaccacacctacgtgaacccactagcagcggcggcgggcgtcctcgtggtgtccgtgagctaccgcctggcgccggagcaccctctcccggcggcctacgaggactcctgggccgcgctgcggtgggcggcatcggcgcaggacgagtggatcgccgagcacggcgacgtggcgcggctcttcctcgccggcgacagcgccggcgccaacatcgtgcacgacatgctgctgagggcgtccggcgacggcgggccgcgcgt

SEQ ID NO: 25687 - DNA, 246 bp, Setaria italica
  Peptide Sequence Number=SeqID_91661
gcttattagcaggaaacatgctaatagctattagcactggccgtcgacctcaaacttcctgggagtcatctggaagaagtggtcccaggcgtactggaagctgacggtggccatgcttgcgatgggctcgccgccattcaccaggtagactcctccgtcgtcagcgcggaacgcagcaggatccacgtccactgtcgtggcgaagccccgggcatcgagctggacgttcctgacggcgcacgggca

SEQ ID NO: 25688 - DNA, 310 bp, Setaria italica
  Peptide Sequence Number=SeqID_91662
acgaacgacgcgggaccacccggacggcgcgcgtgtgcggtgacggcgtcgagatcgccgaggcgttcccgccggcgatggtggtggtcggtgggttcgacctgctcaaggactggcacacgaggtacgtggagacgctgcgccggaaggggaaggtggtgagcgtggtcgagtacccggacgccttccacggcttctacgcgttcccggagctcgccgattctcgcaagttcgtcgaggacatgaggctcttcgtcgacgagcataggtccaagcgatcattgctagtttagatcatcgtcgcgccgta

SEQ ID NO: 25689 - DNA, 650 bp, Setaria italica
  Peptide Sequence Number=SeqID_91663
caaataccaatgacatgcaataaagaacaaacaccaaattgctgattttgcgatcagctgctccggcgtgtaaacaggtgattgatggttgccaaaggaaactaagaagatgttgccaaagacgataaatgttgtggctaccatgactttcaccgaaatagtcttgttcaatacaaagtaggcaaatgcaatgttggacacaaactggattgatccaagagctgcaagaagtgactgtgcagcatatgcaaaggacatgaagttgaggcagttcccagcagcaaaaaagagtatacctattctccaagtctggaaatgcatgactgattttggaacaaatttttcattgccctcactgttgttaatagcggaaagcttttctctctgatcatggcccaatttcagaaggttggtaccaaagtttatggcaacactccccacgatgtttatcaacgcccctataacccagtcacccatgagtcaagcgtacaggtatctgctacaaatatatgggatgctccttcaacaagccccttctacaacagcacattgctcttgcttttggcagaagacttcaaaccattgagatctttctttctctctcctttttctttcctttttccgtgggtgtgttcaccccagtagtgtgt

SEQ ID NO: 25690 - DNA, 433 bp, Setaria italica
  Peptide Sequence Number=SeqID_91664
accgttaccgacccccaaccaaccgactagaccgggaccgccgctccgatcctgcggatggtgggccgcggcgtgcgcgctcgaggtcgcctcctgggtgtaccgcgtcgcgctcttcttcatggtctgcgtgctcttccgcgtcatctgctacctgcagatcctgcggatggtgggcttcgcgcgcgaggtcggcaggttcgccgacgtcggcaccgtgctgcagcaccaccgccggatcagggagcagctcaggaagatcagccaccgctaccgcaagttcatcgtctgcagcctcgtgctcgtctccgccacccagttcgccgcgctgctcgccgccaccaggccgcactccgtcgtcaacctcgccaccgccggcgagctcgcgctgtcctcgatcagcctggtggcggggctgctggtgtgcctgcac

SEQ ID NO: 25691 - DNA, 401 bp, Setaria italica
  Peptide Sequence Number=SeqID_91665
acaaaggtccaatcaacccacaccactcatcgtcagcctcagcgccgtttcccccaattccacatagtccacggcaacagctaggttagtagctggctgtgtgtctcacctctggaggttgtgcagggaaattctatgttcttttcagctccgaatcgaatctgtaagatggtaaacagagaatggttaatcgtttgtttggctaatcaagtgagtttcggtggctttgctttgcagctgtcctcgatcagcctggtggcggggctgctggtgtgcctgcacagcgcggcgaagatcacgcacaagacgcaggcgatgacgagcgtggcggcggcgtggcacgcggacgccacggtgcaagccttcgacaacgacctggagaacccggaccgggacccgga

SEQ ID NO: 25692 - DNA, 1098 bp, Setaria italica
  Peptide Sequence Number=SeqID_91666
tcgttcgcgtcttctttctttcattggtctgcgtgactacttaccgacgtacaatctgctacctgcagatcctgcggatggtgggcttcgcgcgcgagttcggcaggttcgccgacgtcggcaccgtgctgcagcaccaccgccggatcagggagcagctcaggaagatcagccaccgctaccgcaagttcatcgtctgcagcctcgtgctcctctccgccacccagttcgccgcgctgctcgccgccaccaggccgcactccgtcgtcaacctcgccaccgccggcgagctcgcgctgtcctcgatcagcctggtggcggggctgctggtgtgcctgcacagcgcggcgaagatcacgcacaagacgcaggcgatgacgagcgtggcggcggcgtggcacgcggacgccacggtgcaagccttcgacaacgacctggagaacccggaccgggacccggacctaccccccaccgccggctacctggcgcccgccaacgcctaccgcgtcgccgccggcgaggagtccggcagcgacgacgacgacgactgcggcagcgagacctcctccctcgacgaccccaagtacgtccccttccaggccaacaacatctgcttccagaagaggcaggcgctcgtgacgtacctggagaacaaccgggcggggatcacggtgtacggcttcgtggtggaccgggcgtggctgcacgcgctcttcatgatcgagttctcgctcgtcatgtggctgctcggcaagacggttggcatctcctgatgcagagcttccacctccctctccttttccctcccgtgcccccccatccctgatgcagagcttcacttcgcataccagaccagtttgtacaaattatcgagtgcagatagtgcagtgcttttgtttcgatccatccgtagtattgtagatgattcttcttactttttggccgtttctttctagagggcagaaattctgatggttgtgcagtgtagattcatttgatttgacgatgatgatagtcaggatgttagctgcccaggttgatttgttgattaccatatactcaacagttcataagccgtattttagtatcaaaaaaaaa

SEQ ID NO: 25693 - DNA, 180 bp, Setaria italica
  Peptide Sequence Number=SeqID_91667
ggaatgggtttcccgggaatatgagtttgcctcattcttcctgaaccgatttcctccttgagaagtccttgcttcctggtcaagtctagttttcagcagttcagacatgttgaatcttgatgcaatgcaattgcaactgcatgtacgatgtcctcactcattgttccttctgacgacctg

SEQ ID NO: 25694 - DNA, 858 bp, Setaria italica
  Peptide Sequence Number=SeqID_91668
caatcttggaggactttgaattcaacgagctcgatgacgttctccggtactaccctcagggctaccacggcgtcgatctgtccggtcggcctgtgtacatcgagaggctcggcaaggttgatcctaacaagctcatgcagatcacctcggtggaccggtacatcaagtaccatgtgcaggagttcgagagggcattcagggagaagttccctgcctgcacattagcagccaagagacacattgattccactactaccatattggatgtccatggtgtggggtttaagaatttctcaaaaactgcaagggagcttgttcaacgaatgcagagaatagacagtgactactatcctgagacactacatcagatgtatgttgtgaatgctggcagtggattcaagctgatctggaatagtgttaaaggatttcttgacccaaaaacttcttccaagattcatgttcttggttcaaactaccagagcaggctaattgaagttattgactcaagtgaattgccagagtttcttggtggttcatgcacatgtagtgacaagggtggttgccttggatctaacaaagggccatggaatgatcctgccattttgaagctgatacacagtatggaaggcggtggtagtatgagagaaaccaagcaaatttctgatgggtacgaaagaagtggctcttccctaagggcagaaaacctgaagggcatgctcagtgacgtatcaaatgctgaatctgagtcagatgttgatgatattggtttatcagtttctcagaagattaccgaccacagtttgcttaccccagttcgcgaagaagttaagggatcagattcttcagcctcttgtagtt

SEQ ID NO: 25695 - DNA, 1232 bp, Setaria italica
  Peptide Sequence Number=SeqID_91669
agaagctagaagcccttcactaaggaaatcgatatatgctccagggtcttggctacacctcgcagggctcctttgaggtcgtacagcatcttgttgttcatccaaagtatcaacttctcaagtgatgggagctccatgtgcaatgctctcagttttgggcattggatgattgccaattctgcaagacgtggaaacatccctgaccactgcgcctgttcccagacttcaaggttatgcatataggagaaagtaagtttctccaatgaacgaaatgtgcctttatggccatagaaattagtactgacactgacgactgtttcagctccacttatctctgcgatcttcagacatggcagtagtcccagtggaggcaatactctttcacatgacctcaaattaattagcttgatctctacaagggactcgagataaggttcagtggttgttatccaagatggaagattcttaccatcatatccaacaatctccaacgcttttaaccgttggtgaggctgcagagtttccagtaccacagaatccagtgcggcgtcatttgagtcatccatgttccaatgcaatgataatgactcaaggtttgttttgtattccaaccttgccattctcacattcacaaggtccgaagccttttcaaggctccacagacttagcttatggagatttcccaacgactgcaactctagaattgaacttccatccgtgacaacataacctaggaacatctgaaggcttttcagttggcccattccacggggtagctgagcgagcgatgagcactcagcaacatttagatattccaggctcctcattttacccatgtcctgaggcaattcgacaagattgcaacatccttcaaggtccaacttttgtaactgtgtgagcttggttgtatttggatggagttaagacagcgtgtcacaataggagagtataagtgtttgaagagactgcaacctggagattgagccggggatgttctcaatagctgcatgcgaaagattaagatatttcacacggtcaggatccgaaaatttagtaggaagcatcctgattttagtagctctgaaactcaaggtatgtatacgcctaaatgactggaaaaacatttggggaatctcggtgatctcacattgactctgctcggacgggcgcatttgttctccttcaagtaatatgagcgctcctaaacctttgcatgctcgcaggcttttagg

SEQ ID NO: 25696 - DNA, 752 bp, Setaria italica
  Peptide Sequence Number=SeqID_91670
cacttactcagacacgccactgccacaaaattgtgaattactgtgatcttggtccaacggagcttcagaactcatcacaaattctagctccttgcacctatcgtctaacagctagctagccaccatcatggggaattgccttgtgattaaagtcaggaaggagatcaagatcatgagcgtggacggcagcgaagtcctcaagatgccatcctccaccagcagcttgaaggtccaggaatccctgccggacgtgcttccggtgaaggcgccggcggctgtcgtcgacccaggcgccgccgtcagggtgaagctagtgatcagcaagcaggagctcaagaagatgctcgacaaggagggcatgtcgctggacgacatggtgtctctcatgcgaaaagaacaagcaaaggatgatcgtgaacaagagtgctgcggagggtggcggcctgcgctggagagcataccagagggcagagatctatagtagtagccgggatcgttcagatatcaaagttgcaaggtcatcaatctcctgcttacaaagtgcagggtactttttggaataagcataagcaaaacatatgctagataatatatatacatgtaaatgtatagggatagcataggtgtagtatagaggtatggtaggagttttgagatagggattctcttcatcttttcttgctgctcacatgcatgcatgctagcttgtaaagagaggtaaagatgatcctggaaatcaagcaggtcgttaa

SEQ ID NO: 25697 - DNA, 826 bp, Setaria italica
  Peptide Sequence Number=SeqID_91671
tctcagacacaccattaccacaaatttgtgaattgtgatcttccaaaccgtgcctcacactcaatctctcatcatcacaatctagctcctcttgcacttgcagctatcgtctatcagtgatcatcatgggaaattgcctggtgattcaagacaggaaggagatcaagatcatgagcgtcgtggacggcagcgaggtcctcaaggtgccatcccccggaagtgatgagtccctgacgagccggcttccggtgaaggcgccggcggctgtcgtcgaccccggctccgtcagggtgaagctggtgatcagcaagcaggagctgaagaagatgctggacaaggagggcatgtcgctggacgacatggtgtctctcatgcgcaaagaacaagcaagtgaccgtgaacaggattgttgtggagggtggcggcctgcgctggagagcataccagagggcagagatctatagcagccgggatcgtttcagagatcctgtggaggcacagaaggatcatcgtgcttacgagttgcaggatttactttttggaataagtgtaagcaaaacatgtacatgtggtggatatatgacatatatacatgtaaatatacaaagatagtataggtataggcatatggtacaatggtaggagttttgagatagggattctctttaccatttcttgcagcttacacgcatgacgcatgtaaagaagaggtaaagatgatcctggaaatcaagcaggttgttgtatgacacactctttgtgtccacatatcatcagcaaagctagctttgcctataaacaggcaggacttatctacaaaaaaaaa

SEQ ID NO: 25698 - DNA, 198 bp, Setaria italica
  Peptide Sequence Number=SeqID_91672
taaaggagtagcaaagggcagcagagcgaccaacaacggtggtggaagggccacagtgacacgcggggcacttgcaggagcaaccggagctgccctgccagttccatcaccagtggccggcgatagccggataatcaaccccacaaagcccaccgacgcgggtgacaccgcgagaccgcgaacaaactccctgcaaca

SEQ ID NO: 25699 - DNA, 387 bp, Setaria italica
  Peptide Sequence Number=SeqID_91673
gctacggttagttgagctctgcggccgtttggtcgggagggagtggcatgcatgttcgacggtggcggtcaggtcatgccggccatgaacatccaatccaatccagcaaggtcaacggctgccgccaacattctcttcaattcccatgtcgatccatctctcgcacgtccctattaaactaaacaaatctaagtatcctagtgtttccctgctgataaggccctataagtacgctagccgtcatcgtcatctcatcaacatccaaagctagttccaattccaagcgagcaatccatcaatccatctctagctagctcgagagcttgttaccatcatggcttcccagctgatgttccgtggcagcaggttcttgttgttggtgctcgg

SEQ ID NO: 25700 - DNA, 502 bp, Setaria italica
  Peptide Sequence Number=SeqID_91674
ccattttgaagggacctagcatccatgctcaaattatcatccactctactacctgctgtcagcatctcatcactgctgctgcgtgctcttcgactgggaagctctgaatcgagaggactggtaattcttaggctgtgagtgctgcaatcactattttcactgacattgcccagtaatttatgctggcctgagattccattggaatgcgatgaccgtccagagtttggactatgtgcaattgaagcattcagcaactcattacgtggcgggtgaattccattcatgctagagtagctagcaacatgtgactcgatgccatttggaatatgtgcttgctttgtctcattgacattgtaggcgcagtgatctggtggtaatctttcagccatgtccttcagctgagcagttaaagattttataacttcttttgcagctttagattttgcagattcttctgccaccagtgtcatagcctcttgtactttctggagctgaccaagca

SEQ ID NO: 25701 - DNA, 260 bp, Setaria italica
  Peptide Sequence Number=SeqID_91675
ccagatttttaaaaattatctccggcgagcagcctagctaactactactagcttaactcagactgagggcgtgctttctcgcttaatttccatgttaccactagtgctctagccttagctacccttgctgagtgcctttgcagtgctgggaggagaaggacaaggtctctgatcagctgagcttgtcgctggtcaaaggcgagagctttgttgtgctgcgagtccaagctcgacaggaccactgccactgtgtgaagcac

SEQ ID NO: 25702 - DNA, 290 bp, Setaria italica
  Peptide Sequence Number=SeqID_91676
cgaagcgagaggagtcatggcatggtgatggacctgctgctccccgccgatctaatcactgcccccccagtgctgggaggagaaggacaaggtctctgatcagctgagcttgtcgctggtcaaaggcgagagctttgttgtgctgcgagtccaagctcgacaggaccactgccactgtgtgaagcacagcggcagcggggccacgtcccggggaggcggaagctgccaagcgggtagatctacgcaaatggagaccaaggacgtggccccgctccccgccaccaccgccg

SEQ ID NO: 25703 - DNA, 856 bp, Setaria italica
  misc_feature (1)..(50): n is a, c, g, or t
  Peptide Sequence Number=SeqID_91677
nnnnnnnnnnnnnnnnnnnnnnnnnnnnnnnnnnnnnnnnnnnnnnnnnntttttttttggtatacggttacatgatgctttgcagaaaattcagacagctcaaaaagtgagtttatcatagtaccaagcttcagaaccaacataccaggtacaccagcagattgcatccaactgatgcaagagccaaaaagggggccaagcagcaactcagtgacaagaaacctaaaagggtcaacacaatccagagcatggcaatgcagaataggtgatctctgcgtgtttttggcttctacacagctacaagactacgcctttaacttaacagttactgggataatctgataagtgggtacaagattttgctagtagaagaagccaaggaccttccctcccacattctttctccttgcctcttcgtggtccatgatgccagcagaggtggtgagaacgatgtagccgaactgacgtgagggaagcagccttgctgtccaggactcaatttccttcacaccaacatcaaagcgagggctgatcacaccacatttgttgagccttccattgagttcaactactatcttaccagaacgatgatcatcaacaaactcaaattcaccaatgtatccatgcttttgcatgacgatgaggaacttaatgatgaccttcgaagacggtctgatcatgacctggcgcttgccgcgcttttcagcattgtacatgctcttgagggcatcattgagcacacttactctcaccatttcttcgggcgaggcttcggcgtcgtcggcggcggcgcaaggccgggaaggccgaagagtttggggacttgaggggtggtggcggccgaatgggatcgcg

SEQ ID NO: 25704 - DNA, 469 bp, Setaria italica
  Peptide Sequence Number=SeqID_91678
taaaggcttgggaggagagcgagaagagcaaagccgagaacaaggctcagaagaagatgtcatccatcatgtcgtgggagaacacaaagaaggcggctgtggaagcaaagcttcgaacacgagaggagaagctggagaagaagaaggcggagtacgcagagaagatgaggaaccagattgcggccatccacaaggaggctgaagagaagcgcgcggcggtcgaggccatgcgacacgaggcaattctcaagtatgaggacatggcggccaagcaccgatccaaagggaccaccccagcaaagaaattcctgggctgtttctagctggtgactggtgaggaacgcagtgtatcatacagttcagtcatgctcttgcacgccctgaaagcgaccaggtgcgagagcctgaagaagcaatttgatcttcacagcatctgaggtttcaactcttcggttctgcctggaatggc

SEQ ID NO: 25705 - DNA, 366 bp, Setaria italica
  Peptide Sequence Number=SeqID_91679
tggttaacgacctgccgtaagaaagatatcgggaagagatgtagaatttgtggacggtcagttggagggttttgatgccattgttctcgcaactggctacaagagcaacgttcccttctggctcaaggaccgagagttattttctgaaaaagatggcttgccaagaaaagcatttccaaacgggtggaagggtgagaatggcctatactcggttggattcacccggcgtggactgatggggacatcgctcgatgccaggaggatcgctcacgacatcgagcagcaatggaaggccaaagggacgcgtccggatgtgttcctgtagctctcgtcgctgttgccatgatgacggggagccgtgtgaat

SEQ ID NO: 25706 - DNA, 417 bp, Setaria italica
  Peptide Sequence Number=SeqID_91680
aatcaagaaaaatgacattgctcaccttggtccatgaatcttgattgtacatcaacttagggaagccgtcgacattgcccttaatgtcgaagctgagagggccgatctcgtaggcgaggccgctgaggacggagcaaccggggccgccggtgagccagagcatgagagggtcgtcggccgggctgcgctcggagcggacgaagtagtagaagaggcggacgccattgctctggtccacctccacgtaccctgtctggaggtggaaggggagggggccctggaagccagggagaggggtgatcgcgtcgccgccgctgctgttggagatgggagggcgcgacggccgggaagcataggagcagcagagcaagaagaagaagaaggtggcgcagcagagttttccggggaaccttgttc

SEQ ID NO: 25707 - DNA, 241 bp, Setaria italica
  Peptide Sequence Number=SeqID_91681
cggcctccgacccgtcctcgctgctgctcaccctgagcgagaagtgcggcggccgcttcgggtccggcagcgacgacgagccgccgccgtcgcagccggcggcgagcatcgccgtgacgtccgccatggtgggccggtcggcggcgctgtcctgcacgcacagcagcgccaccttgacgcaccgcatgatggtagccacctcgccgcactcgcccagcgtcgggtcgatcagctcgaaccg

SEQ ID NO: 25708 - DNA, 561 bp, Setaria italica
  Peptide Sequence Number=SeqID_91682
ggaggacctgttcagtgttcttgggggaggagaggccggattacagatgggttatcattggaccagctggatcagggtcgtcgttccatgttgacccgaattcgacatcagcatggaatgctatcattaaagggtccaagaagtgggtgatgtttccacctgaggttgtaccaccaggtgtccaccccagcgcagatggagctgaggtcaccagccctgtatctatcatggagtggttcatgaacttctatggggcttgtaagacctgggagaagaggcccatagagtgcgtgtgccgagctggggaggtggtttttgtgcctaatgggtggtggcatttggtgatcaatcttgaggagtccattgccattacccagaattatgtgagcaggaggaatttgttgaatgttcttgactttctcaagaagcccaatgcaagcgagcttgtctcggggaccaaggacagagtgaacctgcacgacaagttctgtggtgccatcgaggccactcaccctggcatgataaatcagcttcagctggaggcacagcagaaggctgctg

SEQ ID NO: 25709 - DNA, 772 bp, Setaria italica
  Peptide Sequence Number=SeqID_91683
ccggtgagagagagacagttatcgtgccaaattcagacacttgtggagccaaggaggctgctgcagccgtcctgctccagacgctgcccaacgctaccagcaccaggcttcgtcgtcgcggaaccgatcagcgacggagcaggcaggacgacgacccggcggtcggggctgccggactccgtcgacgacgacgaaccgctcgtcctggagtccacgctcgacgacgcctccttcttggccgccttgttcgtcgcgcccgtcgtcccgaagcaccctagggacagcgtcagctcgaggtcgctctcctggaggacgagccggggagcggcggctttcttccccttctcagggtaggcgtcgtcccacgacctgctcgagccggcgtcgttctccgcggcgcgcctctcgtcctcgaggtcgcatcgggtggcggcgggcattgctgttgctgcgctcgccgcgtcggtcatcagtagcttctggacccggtacagccggtgcagttcttgaacctgctgcttgaatgtctcttcctgcttcagcatggccatcttcatgtgctccttctcgtactgcttcaggtgatatcttgacatgttgtagcagcagaagctgcaaagaatctgcaaaatcaaattggaaacaaatcagctaggtgttctaccatacagggtctagtctactcatggaaactactaaactttcaaagaatcaaggaaactgcagcctgccagcctagcttttgagttatccgatggaagaaaaaatacgg

SEQ ID NO: 25710 - DNA, 246 bp, Setaria italica
  Peptide Sequence Number=SeqID_91684
cgaacgaccggaagtaggcgccgtccacccgcgccaccgcgtcgtggatcgcctgcgccgcgtgccgcagcggccggttcaggaggtcccccaccgtggcgcgcgggaacgcccacaggaccaggttcccgaagtaccccggcggcgcggcgaggcgcggccgcccgtcgacggagatgcggatggtcgaggtctgcagcgggttaccgagcccccgcgcccgcgtcatggtgcgccacacgtggg

SEQ ID NO: 25711 - DNA, 267 bp, Setaria italica
  Peptide Sequence Number=SeqID_91685
gccgcgtcaagaccgactggtccaaggcgcccttcgtcgccaactacgacaacatccacctcaacatctgcgagtgcggctccggcgggtacggcggcggctgcgccaccggctgcccggccgccgccgccacgccgtacaacggggcgtgccagctgagccccgcggagctggggcagatgcagtgggtgcagggcacctacaggatctacgactactgcgtcgactacaagcggtgggtcaatggccagaagccggtcgagtgcg

SEQ ID NO: 25712 - DNA, 1186 bp, Setaria italica
  Peptide Sequence Number=SeqID_91686
ggcgccacaccccatggcttggtgcccatgctgccaagggccctgttcgccagcttcgccggtcccttcagggcttggatccactgatcacggcaagcatgtttgctggtgcacggtgcattggggagaagaaggtgaatggggaggattgcttcatcctgaagctgagcacagacgctgagaccctcaaggcacgcagcgaaggctttgcagagatgatcaggcatgtcatgttcgggtacttcagccagaggactggtcttcttgtccacatcgaggattcacatctgacccggattcagtcaaacactggaggggatgcaatctactgggagactaccatcagctcgttcatggaggattaccgtccagtggatggtataatgattgcacattctgggcgctcggttgtgacccttttccggtttggtgaggtggccatgagccacaccaagactcggatggaggaggtgtggagcattgaggaggtcgcgttcaacgttcctgggctgtccatggactgtttcatcccacccactgatatcaagtctggatctgttgacgagactatggagcttactaatggagagaggagcagggccggtcctcccccaggccaccgtgctaaagttgctgcgcttgagaaggcagaagaagataaagtggcatggggaggtggaaccatacttgaaaaccacaactgatctgcagtctgttcatacttggttctcacagtgcagctgctgactctgttgcatctagtgtaggagaaacaagtgaaatgggaggatttggaagtttagtaaatccaaatgcctcccgtgtataggaagaagcatgagattttcacaaggtcttgcacatggtggaagcggatctgtgtgaagtatcctttttctgatctcatccagagatatggtagtaggtagccctatttgctgcttcaggcttttttttgtcagtgcctcctagctgtgttctccatcccgaccacatgagaaggatcattgtggttggttctcttttagctatactaattggtcactgccgtcagcggggaagaaggattttcctcttcctgcaatcggcagtgacttagctgtcattgcatccgattggtggtggttcagtgtgcttctcttggcgatggattcaggtcaagctaacctctcagagaagaaaaaaa

SEQ ID NO: 25713 - DNA, 592 bp, Setaria italica
  Peptide Sequence Number=SeqID_91687
ttgaacagaaaaccaaaatacacattaaaacaacttgcaggcatcagacgtaccataagtttcctccagagaaggaggtaagggaatacggaggacaagtagttgttggcgtcttgcgtctgcacaatctttagcccttccttgatcctcttcatctctctggtgttgccatagagcacagtaggctcgggaccctttatgccttgccgcttcagcttcttccttatgttctctgatcttaggcatacctggtgtaacaagtatgacagagccaagctaagtataagaagagcaatagttagtgcaggcaactcctccatgaggcataggaagagaggaagaaagtaatctgtggaagtattcagatataaggcaatgccagatatgctagagtacactaggtcttcaagaaaccacctttatatttctttaagatcccgagcattcgagtcttgtttgacctttgctactttttttataggctgcttctaaaccttttgttttctgccaatctactcgaaattatgccctctatcgtttcccctgacaaaatatatgagccagtcttcagttccactccagacatgctgct

SEQ ID NO: 25714 - DNA, 637 bp, Setaria italica
  Peptide Sequence Number=SeqID_91688
acaataaggctttgcgagatctttttagataattaggcttccccagctctgatggcgtgcggtgaccaatgtccttcaccatttctggatcagaaacatgcagtatctctagagctcctgttgagtatacgaacaccgggccataagtttccctccagagaaggaggtaagggaatacggaggacaagtagttgttggcgtcttgcgtctgcacaatctttagcccttccttgatcctcttcatctctctggtgttgccatagagcacagtaggctcgggaccctttatgccttgccgcttcagcttcttccttatgttctctgatcttagacataccattggtttctgccaatctactcgaaatatgccctccatgtttcccctgacaaaatataagagccagtcttcagttccactccagacatgctgtattctcagcagtcagacagccaccaatggatgctaccctgtctgaaaaggacgcaagctggaggcaccttgaatctttacgtgtataagcattgcacaattgagaaatagaaggtatcaaataccattacatactttccggagctcagaaaactgtaggaaaaatatgtgattcaattcattctactaagtaagttcatgaaggca

SEQ ID NO: 25715 - DNA, 265 bp, Setaria italica
  Peptide Sequence Number=SeqID_91689
ccccagaccacccatgtcgtcggcaccatggggtaccttgccccggagctggcacgatcagggaaggcgtcccctctcaccgacgtgttcgccttcggcgccttcatcctcgaggtcgtctgcggccggaggcccgtggagcagagcatggcggacaaccggctgatgctggtggactgggtgctcgaccactggcagaacgagtcgctggccgaggtcgtggacgcgaagctcgaggggagctacgacgccggcgaggcgacgc

SEQ ID NO: 25716 - DNA, 269 bp, Setaria italica
  Peptide Sequence Number=SeqID_91690
atgacaggtttgtgactgaattaggcagttgcccgctgaaagagttgttgccgagaacaagaacctgaagctgggagcagtttgccagtgaagtgatgaattcccacccttgactgtcgtttgctcctagcctgttaacacccaagaaaagggcagtaagactttgcaactttcccaaagcagaaggcacatatccaataaaaccattttcttgaaggattagttttgtgagagcagagaggttgccgagcgaaggtgggatagctcca

SEQ ID NO: 25717 - DNA, 652 bp, Setaria italica
  Peptide Sequence Number=SeqID_91691
cgccggcgcggcgctgttcctgctgttccggccgcggcccccgacatcgcggtggccgcggtgcgcctgccctccttcgcggccgccaacggcaccgtcgccttcaccttccagcagacggcgtcggtgcgcaaccccaaccgctccccgctcgcgcacttcgacagcgagctccgcgtcgcatacgctggcggcgagctcggctccgtctacatccccgccggcctcatcgacggcgggcgcaccaaggacatgtccgcgaccttcgacgtcccggccatccccgtcgccgcgcagccgacacagatgggcatcgccgccgccgaagaccagcagcagcaggcgccggcggtgatagaggtggactcgctgctggtggtgaaggggagggtgaagatgctgcgactgctcacgcaccgggtgcaggcggccaaggtctgccgcgtcggggtctcgcccatcgacggcagggtgctcggcttccgctgctgacaagacaagcttgctcctttagcatagttcatcgtcggcggttgatgaaagaaccgcagccgcaggagatgggtgacgtagggaatttgtcgagcgaggatttccttcttttttgtgatgatcaggatcgaatccacaggatcgatcatcttgatgaatg

SEQ ID NO: 25718 - DNA, 523 bp, Setaria italica
  Peptide Sequence Number=SeqID_91692
gcaaaaattaaaacaaatggaggctactgccgcgaagctcatccgcagggaaaaagaatcacgggcgccaccgcggccctgttcgctggttccgtcgaggtccctgagaggttcctccgaacccaaggaggtccaggcagccggtgtggtcgtcggcgacgacgagacgttcgagctgccggtggtaaacatggcaaagcttcttgatccggagctgtcggcgtcggagacggcaaagcttggctccgcctgcagaggctggggtttctttcagttaacaaaccatggcttcgacgaagcagcgacgcagctgatgaaggacagcactgcacagtttttcaacctgccacttgagagcaagaacaccgtggcagtccgagaaggcggtttcgaaggatttggccaccactacaacggatcctcaagcgataagctggactgggcagagaacctgttcctctacacgcagccagtccaggacagggacatgggagttctggcctgcctaaccccaccccaccct

SEQ ID NO: 25719 - DNA, 352 bp, Setaria italica
  Peptide Sequence Number=SeqID_91693
ccgcccgtcgccggcgccgccgccgccgcgggggcctttgacccaccctgcgccgccgcagtcgaggcgtcggcggagaagaagcgcgcgcggctcaggaacgccgctccgagctgaggcgcacccagcccggcgatctgatgcagagctcgagcgggaggagggggaaggctgggagcgaccgctcgcgagaggagcgcgcggaggtgggacgcgcgcgccgtcatcgtggtcgccgtccgcgtcgcttcgccggacgggggatttgatcctgctgcagggagaacgggttgctccgcaccgtcacgccgtgggctcgtggctccggcggcgccgtgggttcagaagggga

SEQ ID NO: 25720 - DNA, 242 bp, Setaria italica
  Peptide Sequence Number=SeqID_91694
atccaaacatccgatgtgacgggtgttaaattttaacaccctattaccaaacaaccccttgtgattgccatggacatcgatggtcatgcagatgcagtagtggacctagtagtggagatggagagcagctaataggaatggagcttcagactcgcgcgtgatgcacagtgaggaagatgaatggcccaaggtgctgcacaacagcttcagtgaagagacgccggtgatctcgctcgagggca

SEQ ID NO: 25721 - DNA, 275 bp, Setaria italica
  Peptide Sequence Number=SeqID_91695
tttagctccgcctttatctgatcctcagtaggaactgaagggatgacgcttcggtatgggatgtgcgcatcaatatcttggagagcatccacaaggtgtggtataatgcctctaccgaagtcagagtcctcgtatatgggtacgacttggtgccagttgaagagttgaaccagagaagcaattgctgggacctgggaggaatcatccagggcagtgcgaacgaagtacttgggagtgcttagctgacaagtaaggactagtagccgaatatgaca

SEQ ID NO: 25722 - DNA, 697 bp, Setaria italica
  Peptide Sequence Number=SeqID_91696
tttcgaagcagcactggtagaacagaacatctcagttttacagtaaagtccctaatgtaaaacgcaaattacaacaagcactctacggttcatcttcctcttcaggaacttcaagcctccaaactcacctatgcaaatcaaaggatggactccaaacattgataaattgcatggatcctcggttgaaggccagcagctgtcgatcccgttgattttgaccccataacctccttccaccgtggatgtgaaccatcaagaagatccagagtgcagcacaagcacatatagaggaacaccaacaactcctccgaagagggcacctcagaagaagagtcctatccgctagcactcagatggatccaaatcgatctcaccggacaatcaagaagaggatcttacccgatctatcctggaggagcaaaatccaccccgtcgagccgctgtcaccgacgatcgtcgggaggaacataagccgcaaaggaacgaacgtcaccccttccatccgcatgcaggcgaacaaaatcgatgacatcgttcctccagcgaaccctagctccactgccaacctccaacggcgagcaaattctagatagactcctacctaacctatatacatccacacgataattcatcagtcctcctccttttccgacgccgaactgcccgtcggagaggaagagaatcggcagaatcgctg

SEQ ID NO: 25723 - DNA, 1286 bp, Setaria italica
  Peptide Sequence Number=SeqID_91697
tagacctaccgacctaccaacctagcggtggaaaacaacctcgcttgcagatggaggtcggctttcgtttcttgtgccggaggtggaccaagtggacacagtgccaccggagaatatgcacaaatggaggatggtgatcgcctatgacgggacaaagttcaaaggttggcagtatcaaccatcgcctccaaccatacaatgctttttggagaatgcactgatacgcatcactaagctggatcggaagaagctatgcttggttggtgcaggcaggacagatacaggtgttcatgcatggggtggcacatttcactacaccctttgcttatgattgcctccatagcattcattctgcaatcaatggacttcttcctcctgagattcgagtcagggaaattagtgccgcacgtcctgagttccacgctcgttcatccacaaagagcaaaatctatcactacaagatctataatgaagcaatcatggacccctttcataattgttatgcttaccatagtgcttacaaacttaatccgcatgccatgcgacaggctgcaaaacactttgttggaatccatgacttcacatcttttgctaatgcagcacataatgatcgggaacgcagtcccataaagaagattacacgatttgatgttactgaaatgggtgctctcttacagcttgaggttgaaggcacaggttttctgtacagacaagtgaggaacatggtagctttgctgcttcaagttggaaaggaagccctgcctcctgacatcgttccagtgataattgcggcaagggaccgcaaagaactggcgagggtggccttatcagcaccaccacacggattgtatctcatgtcggttaactatgacgaggaaatcctgaagccacctgaaggttcccctccaaattcctttggtaggacacaccagcttagtaaatgcagaattccattttactaatgaagaattatgtgccagaaatataccatcttttagttgcctcctacagtttccttggaactgtcaaccagaggacctgaatgcctgctagtttctgggtacaggatctggtcaagggacccttacaagttatctctttacactcatcgattcttttcctaacgaagtaacgaacaattgttttgagtgaatagtagattcatctgtgaatgtcagtaaactgattcttggagcaaacctttgtatagaaggaaaagctattaccctagacactcaagaacatcaggatcattctagaaccttaaaaaaaaaaaaaaaaactag

SEQ ID NO: 25724 - DNA, 280 bp, Setaria italica
  Peptide Sequence Number=SeqID_91698
gagccgccgcctcctctggtactcgcgagctcttctccactccacgtctcctccatccatccaggccgcccatcacaactaccaagcttccaaacacaatcacgcgcacacaagcctctccgccgtttcgaaatggagtgcgagaacggtcacgtcgtcgctgccaacggcaatggcgtctgcctgccggtgccgccgcgggccgaccccctgaactggggcaaggcggcggaggacctgtccggcagccacctggaggccgtgaagcggatggtggagg

SEQ ID NO: 25725 - DNA, 320 bp, Setaria italica
  Peptide Sequence Number=SeqID_91699
gttgacctcgacgtcaaacaactggtgcagccgtgcaaacagccctgccagcttctggcgcaggcgctgaggatcgaccgccgcgagcgctgggaagaagtccgacagggttggggctccccgccgtctccatgatctcggtcaccacctcctggaactccttggacccaccgtggtcctccaagctggtcaggtcgcgggagaacatggtgcgcgagaggaggttgagccccgtcgtgaacaccacgcggccgacgtccaccgccgcgctctcccgcgccagccgcccgacgtggtctacgagttcctgcaccttctcg

SEQ ID NO: 25726 - DNA, 2012 bp, Setaria italica
  Peptide Sequence Number=SeqID_91700
aatagtcttgttgtaccctgtgtggatttatttatagctatgctgaatgcctggctctgcattccaatgaaaattctggagtttcagtgggacctgcagttgcgctactgaagaagctactctttgcaccatatgaagcagtgcagacttctagcagtttagctatttcatcccggtttctccaagttcctttcccgaagcagacaatgatagctaatgatgatgctcctgaaaaccatgcaaaaccgagtgcatctgctatgggttccagcagtggaaatgctcaggttatgattgaagaagatcctgcatcatcatcagtgcaatactgttgtgatggctgttccactgttccaatacttaggcgaaggtggcactgtaacatatgtccagattttgacctatgtgaaacttgctatgagatacttgatgcagatcgcctaccggtaccgcattcaaaagatcatcccatgtcagcaataccaattgaacttgatacatttggaggcgaaggcaatgaaatccatttctctattgatgagctaacagattctggtgttcttcatcctcctgctgatagaagtgttcagacctccccatcatcgattcatgttttcgatgcaagtgagtctgcagacttccctgagactattgcaggccaaacaactgtttcaatttctgcatcgaaacgtgccattaattccctgctacttagccatctaattgaagagcttagaggttggatggggaccacagctggtactcgtgccatacctttaatgcagctattctacaggctttcatctgcagttggtggtcctttcatggatagttcaaagccagaaaatttggatttggaaaagtttgtgaagtggctcatggatgaaatcaacataaacaaaccattccctgccaaaacgcgatgcacttttggagaagtttcgatccttgttttcatgttcttcacacttatgttccgtaactggcatcagcctgggagtgatagttctcattcaaagtcaagtgggagctcagatttgacagagaaaggtcctgttcaggttccggcgtcaaccacagttgctcttccatcatcccgtggtgaccaggataaaaatgagtttgcttctcagttagttcgtgcctgttctgccctcaggcagcagtcgtttttgaattatcttatggatattctgcagcaacttgttcatactttcaagtcatcatccataaatggagaagctggttcttctggttcaggctgcggatccctattgacagtaaggagagagctaccagctggaaacttctctccatttttttcagattcatatgctaaatctcatccaactgatctgttcacggattactacaaattgttgttggaaaatactttccggcttgtatatagcatggttcgaccagaaaaggagaagtctgctgagaaggatagaagctacaaggttcccaacacaaaggatctaaagttggatggatatcaagacgtgctttgcagttatattagcaatcctcatacttcatttgttcggaggtatgcaaggaggctcttccttcatttatgcggcagcaagactcactattatagtgtgagggattcatggcagtattcccatgaagtcaagaaacttcataaaatcgtaaacaagtctggaggtttccgaaatcctgtgccttatgagagaagtgttaagctcataaaatgtttgtctattctttgtgatgtggctgcagcaaggccaaaaaattggcaaaagttctgcttgaagcacatggatcttcttccatttctcgtggacaatttttaccatttcagtgaagagtgtattattcagactctcaagcttctaaacttggctttctattcaggaaaagatgccaatcataatgcgcaaaaaccagagtgtgctgatttaggaggttctacaagaactagctcacagtcttcagactcgaaaaagaagcggaaggtcgatgatggttctgaaggttcc

SEQ ID NO: 25727 - DNA, 233 bp, Setaria italica
  Peptide Sequence Number=SeqID_91701
acaaccctttatgtatgagacagcattgacagttcgtattagaaaatgtgtttatttgcaaaatgcattaggcaaaattgcaatcaagtcagggttcaccaatgatcaagatgataccgttatgctgtttgtttgcagggttcacaagtcacaacatcaaatgtttgtcagatattgggtacagagcacaaacgcaaaaccatccaagcaatttgatgaatgtgttggtattt

SEQ ID NO: 25728 - DNA, 267 bp, Setaria italica
  Peptide Sequence Number=SeqID_91702
ataaggatgaggaagccattagactttcaatctgtatcccctccattgtcagagagatagccgtcaggcacaacaaagctatcttcatcctcttcatctgtaattttggaatcttcttccataacttcatcaccatccttctcacagtcagaaagactctcaccaggatcctcctcttcccattcatcatcactatcaacctcatagtcaagatcaggatccatcttaagtggacaccttgggccaacaaaagcacttttcttcctc

SEQ ID NO: 25729 - DNA, 356 bp, Setaria italica
  Peptide Sequence Number=SeqID_91703
ccctccaccatttgtgccacctcctccaccgtctccaccatttccaccaccacctcccccgccaccttgtgcattccctccgccaccaccaccacctcctatcacaacattgccatgcccatcatgattacctcttcctttgccaccatcacctctaccatcaattcctcgacctcgaccatggctattgcctcgaccaatccctcttccttgacctttacctctacctcctccatctcctccgttatcatcaccattacttccatcctctccgccaccaccgccgccaccaccaccaccaccacctcctccaccgccaccacctccgccgcctctctcgctcggatccacctcca

SEQ ID NO: 25730 - DNA, 376 bp, Setaria italica
  Peptide Sequence Number=SeqID_91704
gcgtcggcgacggcgactccgccgccgcccagggggaaccacgcggaagccgaggtgatgccgtcgtcgaacatgtgctcgtgggccgacgtcgccgagcggtatgtcggcgccgtgaaggagtggttcttgctgccgcaggtcgtcggcaacgccctctggtgcgtcaactgcaagcctctcgcggcgaggtactacgccggggtcaccgccgcgtggctgctgccgcatgtctacggatacctccggccacctgtccccggggctctctactactactcggcggctggtgccgtagcggttccgggcgtcggagtcgcgctagctctcctggtttttgtgcagcagcgatggaactacaaaattgttggctggg

SEQ ID NO: 25731 - DNA, 262 bp, Setaria italica
  Peptide Sequence Number=SeqID_91705
agctagtctcccgcgctcttcttctaccatctcgcatcgcgtcatctctgttccaccaccgacagcccagcgagatggcgtgcaacacggccattgtcacgagcgacccgctaaactggggcaaggcggccgcggagctgacggggagccacctcgacgaggtgaggcgcatggtggcgcagtcccgggagcccatcgtgagggtcgatgggtccagactgcacgttggcaaggtggcggccgtggccgcggccaaggaccg

SEQ ID NO: 25732 - DNA, 811 bp, Setaria italica
  Peptide Sequence Number=SeqID_91706
ccagacgttcgctgccgccgacaacgagctgaccggcggcgtgccagacgagatcggcgactgcccgtcgctctccgcgctcgacctctccagcaaccggctttcggcgcgattccggctagcctcgcgtcgtgccagaggcttgtctctctaagcctccggagcaaccagttcaccggtcagatcccgggggcgatcgccaagatgtcgacattgtctgtgctcgatctctccaacaacttcttctccggcgagatacccagcaacttcggcacctcaccggcactcgaaatgctcaacctggcgtacaacaacctcacgggccccgtgccaacgacgggtcttctgaggacaatcaaccccgacgacctcgccgggaacccgggcctgtgcggtggcgtcctgccgccgtgcgggtctagctccctgcgggcttcttcgtctgagacgtctggcctccggcgatcacacatgaagcacatcgccgccgggtgggcgatcggaatctcggccttgatcgtcgcgtgcggcgtcgtctttatcggcaagcagctgtaccagcggtggtacgtcaatggcgggtgctgcgacgacgccgccctcgaggaagacgggagcggttcatggccgtggcggctcacggcgttccagcggctgagcttcaccagcgccgaggtgctcgcctgcatcaaggaggacaacatcgtggggatgggcggcacgggggtggtctaccgcgccgacatgccgcggcaccacgccgtcgtcgccgtcaagaagctgtggcgcgcggccgggtgccccgaggagg

SEQ ID NO: 25733 - DNA, 1241 bp, Setaria italica
  Peptide Sequence Number=SeqID_91707
tacacggtggatgccattcagaacgcaactttgcgtacaccaacaactcacaacataatacaaattacttgaaatcatgtcataggaaaccggaaagaaaatcctttatccgatcgatgtagggcgaccgggtggggattatgtggcccatatcatgctcaacaatggagcagcaatcctgctgaaattgatcagcaagttcacagctcgccctgttcgctatctgccgatcatggccttcgccattgccaaaacaatgcagcgaggggagcttgattagttcggcatcaaaatcacccactggtgctggatacccagagcagaacatcccaaacctgaacttcggagcaccggaggtcttctgctgcttcctgcagaacaaggcagccatggcagcgccctgagagaagccaaggattccgtcgaagcaccccatctgagagattgtgttttctaggtaggtgtatgattcctcaaagccttcggtttgttgctggtactgaagtgggtcgaatggcgcatctgcaaccttccagtcttgctcggtgctgcagctggagtttggagcgatgagccatgcgaatttccgttttggtgtctcaggcggaggtgagggtttgtcagagcagtggctctgggttggttggtatacaaaaggaagctcatgaggagcgtctatgaagacaagctcagcaatgtgcttcagcttcttggcaagtgctgacattcttcccttaaaattggatgcgttctgccggaaaccatgcaagcagaggatcctcagctttttcagctgctcgctaccttaccattacaccaggggactttggaggtcagaatgtgattgcttatggatggcttttcaaaaccagaaggttcagatagccctgtctgtatctcacagtcttgccttgttgatatttggcagggttcctttccattcttttgacacagctcgcatacatactccttagtggaatcctgacatgtagagcacactaagaccaacattctacagttgctgcaacgacaccgggatgaatagtcatcataggaagaaccacatatcaaacacgttccaagtatgttctctttcaggcttcccactgagattctgtggtcaaatacaaaattctttccttcaaaatagccaccgtctggaaattgctccagataccgctggatgccaccatatagctgaaaaacgttctcaaatccttcaccttttgagcgaatataag

SEQ ID NO: 25734 - DNA, 314 bp, Setaria italica
  Peptide Sequence Number=SeqID_91708
ggcgccctcatcatgatctgctaccacttgatgtcagttgacctgtcagttttgccatggataccctactcttttggtcaagctagctacagttgtaggtataagtgcttgctttgtggagttcatgtttcatttctgatgacttgtacataatcttttcatcttttgtctgtagtatacccttggttaactgatagcatatacaaagccaggtaagaagtagctggatctcttacagcactccagaacgttttgctggatcgccctgtttacttccaaactctccgtaacctgctttcaggcttgcggcagtg

SEQ ID NO: 25735 - DNA, 196 bp, Setaria italica
  Peptide Sequence Number=SeqID_91709
cgcggagatgcagtggaagtggaacgtgtgggagcactcggccgtgaagatggcctgcccgccggcggcgcccatgccgccgaggcatatggcgcaaggattgctctggtcgggggcttccatgtgaaggctcgcgagatagctgaaaagctggcggtttcttcaataactgtggactgtggtgttctatctgtcg

SEQ ID NO: 25736 - DNA, 536 bp, Setaria italica
  misc_feature (533)..(533): n is a, c, g, or t
  Peptide Sequence Number=SeqID_91710
tagacggtagcctggcaattgcgccgtgctgcagtcgaacgggacgcccgcggcggcgcactgcgccggcgggcgctgcgctggagccccagggatgcagttccacctcccgtccgccgtggccgccgggcacccggggcgcgaggtgaagaagttgtcctcgtaggtgaagttcctgaggctcctctgcaggccgcagaccgcgggcggaatgggcccccggaggaggttgcccgcgacgttgagctgctggagggcactcatcccggcgacgctcccggggagcgggccctggaggtggttgccgctgacgtcgaacacggtgacctggctgagcagcccgacctgcggcgggatgcatccgctgagctcgtcgtcgatgagcacgatctcgttgagcgtggcggccatcctcccaatcgacggcgggatgcatccgccgagcctgttgtgcgcgagcacgaccaccgacgccggcgagttccccaggttggccgggatggggcgcgtgaggcggttgttgttgatgaagntgg

SEQ ID NO: 25737 - DNA, 275 bp, Setaria italica
  Peptide Sequence Number=SeqID_91711
ggcgagcggtgggagctccctttttccgcgggaaaggaggcgtcccgcccgttttagctgctggatcgatccatccgtcgccccgggctggcgcgcgatccaacttgtttccttgtgcgcgggcgcccccggccgctattattggcagggcatgcggagcagaaatgcattgctataattggccgtgcagcccgcagcccggcacggagctgtttttttttgccccggcccgtgaccctttgaactcgggctggctcagcccggtggctcgtgcg

SEQ ID NO: 25738 - DNA, 841 bp, Setaria italica
  misc_feature (754)..(841): n is a, c, g, or t
  Peptide Sequence Number=SeqID_91712
tccagattcccacagagatccgggggcagtaacactattctgtgaggggcgatacctaacctgatttattgtcaagtaatggcgtcatgaataaagtgccagattgtagtagaagctgtgcagttaattccattccttctgcttctgtaacattatacttgctttaatgccatgatgcattacttcaacaggtttatgtcaaatacagtgctcttttccgcatctcaagagaagcatatccatatgaggacactgctcagcttctttcccatgtgatatctatctatggagccaatcgaataatgtggggaagtgacttcccttatgttgttcctgaatgtggctacaaaggagcaaaggatgcagtctctcatgttgcgggcaaggtatctgtttcaccatcagatttggaatggatcctgggaaaaacagtgagccagctattccaaggtgcatgggttgctccatgagggagctgtcatggtcagtgtattgtagtgttttttagttgttgctgcttgtgttgttagttttgtggtttgttgtcgtcattacttgacccttgcttgaccccttggggtcttgttgcactattgtttgtctaggatgggtttgatctttttaatataattggcagctctcctgtccggttcacttaaaaaaagatggtgtagtgtagtgttgctggtaggagctaaatcaagactttgtcttatttccaatgttcaaatgtatatagttgtttaatttgatnnnnnnnnnnnnnnnnnnnnnnnnnnnnnnnnnnnnnnnnnnnnnnnnnnnnnnnnnnnnnnnnnnnnnnnnnnnnnnnnnnnnnnnn

SEQ ID NO: 25739 - DNA, 312 bp, Setaria italica
  Peptide Sequence Number=SeqID_91713
caagctcgaatgcggatcatgctagagttgttgttcgtctccaaatcaggttggttgacaatagaaaagttcatggttttgcggcccaacaaggactccgacgtatctatcctaccgtcgtctatcttccttgccaccatcaacctcgaaacctcgcgggtcacgcgtcgagtcgccgacatggaagcagcagaggagacgccgagcggagggggagacgacgagaaagtcaaatatccggtggggttccggttcaagccgaacgctccaggagctcgtggagttctacctcctccccaagctgctggacaa

SEQ ID NO: 25740 - DNA, 266 bp, Setaria italica
  Peptide Sequence Number=SeqID_91714
gcccggcgatcggtgccggcggctgccgcgatgcgagcacagcttccacgccgagtgcgtggattcgtggctgaggaagagcagcgcgtgccccgtgtgccgcgccgacgtggtggaccggccgccgaagggcgagggaaaggcggcggcggcgggagaggccggggtgccaggggctctggagatggcggagcggaggagcccggtcgcagtggggggtcgtcgctgaaagatagccaaaggtatggccagaccgccggagcggg

SEQ ID NO: 25741 - DNA, 578 bp, Setaria italica
  Peptide Sequence Number=SeqID_91715
gccgccgccgccccctcgtcgccaccgtcgctgaacctgaggcacccccgttccttgcagaaccgcatgaggtagtacaccccgaccccggcggccgtgaacgcggcgctgatggcgtacaccttccagccggcgatggccatgacgaagacgaggaacgccgacggcacgaggcacagcgccacggcgccggggaggcgggccggcacgcggtacggccgggacaggtccggccgcttgatgcggagccagatgaaggcggcgaactcaaggagcatgccgaggctgtagaggaagtttgcggcggccacgatgttgttgaagctgaagaaggacatgcccagggtgatggcgctggtggtcacgatgctgacccagggcgtgttgaagaccggggcgcgcgtcgcgaaggcggacgggaggaggccaaggtccgccatgcccagcagctggaacgccgcgctgctcagcgtcgccgagtagaggccgatggaggacagcaccgcgcccacctcgatccagtacttgagccacctgcccgcgatcatgcctgcattttggtatacattgcagccagt

SEQ ID NO: 25742 - DNA, 387 bp, Setaria italica
  Peptide Sequence Number=SeqID_91716
ggtttcttcaggctccctaatgaccttccaaaacttgtgtggaagtacccgatgtacttcatctcctaccacaagtacggaattcagggattatacaagaatgaattccaaggattaacatttgaggaccaactaaaccgtaatggagttctctccggaggtgacaacatactaaagaactatttacaagtggagataggctactctaagtgggtagatcttgcaataatgtgtgcaatggttataatctaccgggcaatgttcttggctacgataaagttgactgagatccgtggaccgattattaagtgcggaaggatgaaagtctaatggtgctagctaatttatatttttatatttattggccaatcaaaaaaaaaaaaaaaa

SEQ ID NO: 25743 - DNA, 596 bp, Setaria italica
  Peptide Sequence Number=SeqID_91717
ccggcccgaggaccggccgatgatgaaggacgtggcggcgctgctgcgcggcatccagcacgacgacggcatcgaggcacggaaagccggaggcggcggcggagcggaagcagaggcgggagtggggaaatgggccgacccgaagcagcccatttcgccgacgaagttgatggctttggcccagccagcccaagctcaagcccaggcccgggaaagttcagggtcacagagcctgctcaagaaccgggagggatgatctggacagatggggcccgctagcagtgtgcggagttgactaaacgagggtgtacacacctcgggggaccctagaaaagatggatcgccggtcagatattgttgcgctctgtttgagagtattagggctgcgtcgttttgctaggtgtaccctagtgtttgtgggtactaaatggaatctttgtggtagggaatttagtgatataggtgatccatagaggtggggtcatgagtcatggaaaagctaataatgttctgtaccataaatccggcatagtgcaatggaggttagtgtaaattatatacttgataataaagctcggtagtgtattctaaaaaaa

SEQ ID NO: 25744 - DNA, 269 bp, Setaria italica
  Peptide Sequence Number=SeqID_91718
gaaaccgaacggttggggagtagccgttgtgcttcttggagcggagtgcctccacgacggcctcctcggcctcgagcggaggcctgaagctggcagaggcggtggggtcgccgttgccgatcgccaggacagggcgtgggccggaggagtcgacggcggagaagacgcggtcgagcaccgcgcggatgctcatggcccccgcggctgatagtggcacgcccacggactgccggcagatgcgccacgcccgcggtgtcgctccggcggcg

SEQ ID NO: 25745 - DNA, 806 bp, Setaria italica
  Peptide Sequence Number=SeqID_91719
acccccgctccccgtgctgaacgagatgaaccgcaggctccgggctcggagagcgacacgccgccgccgtcgagcaggtgtcgctcggggcggaactcgaggggggtcctcccacacgttggggttccggccgagcccgacgcggctgaggatgacctggctgcccttggggatggcgtagccgacgacggacgtgtccgccatggcgacgcgcggcgggttgaaggggtggtacgggtgcagccggaacgcctcccggatgcacgccttgaggtagctgagctcccgcacgtcgcgctccgccaccagccggtcccggccgacgacggcgtcgagctccgccaccgccctcgccatcacctccggccggttcagcatctccgccagcgcccactccgccgcgttcgacgggttgtcccccgtcgcgatcatgatgtcgatggtttgcgccttgatctcgtcgacggtgagcagcggccggcccgcggcgtcgtcgagggaggcgaggacgtcgaggaagtcggcggggtcgcggcgctcgccggccttccgcagctggcgccactcctccaccctctcctcaacgacggggtcgtgcaggcggcgcagcgtccgcatgatgcccctgacgacgcgctcgtggccgtcgaggtcgagccccaccagcgccgggaagtagtcggagacgcagaaggcgtcgaggtagttgagcgtggcgaagagcgcgtccacgtgctccgcctcgtcgcgcccggggccgccggttccgcacgccggcggggcggtggcgaagtggcgccgcccca

SEQ ID NO: 25746 - DNA, 262 bp, Setaria italica
  Peptide Sequence Number=SeqID_91720
atggaaatgttcgacaagagaatgtctaaatctgatagaaactatacttttggggttccctcaaccttatgtttgagcatttcattgtttgcaaaagtatagctgaacaatttaaatttggtttctgctgatcgtattcagttattgtgtcttagccattgttgtttgtagcatacaagcactaatgaaatatatggtttttttatgttccttttattaggcaatcccccatgcggtagctcttgttagatcatcagacaag

SEQ ID NO: 25747 - DNA, 431 bp, Setaria italica
  Peptide Sequence Number=SeqID_91721
ttcgtccctattgtcccttactttaaaaatttttttttttttaactttttttttttgtttttttttcttttttttacgttttttatttttttaaacctttttaaaccttttaattttatttacataatactactagaaactattgcaaatgattatagcataagaaagtgcattcagttcaaaatgctacagacttcttaccagatctgcatcttttgcagcagcagctagttctgagctaacctgccggaaatcaatacatggactgccacagccattctccacaacaattagtggcactgactctggtgcatccttgagatcatcttggatgccagccattgcatcgactagcaacccaccagcttctgcagctttccggaggataccacagtgctttgaggcttcagctataatttctggaagttcat

SEQ ID NO: 25748 - DNA, 3052 bp, Setaria italica
  Peptide Sequence Number=SeqID_91722
tttttttggcaactaataacatcacatgcatggattaataacaacttatttttgtcatgacggcattctcctcatcagcgtcggagacaattttattgcattgattcgaatatattacttcagccctgcaaggctgataatgagttcttacttttcaggtgcatgcttgatcctccttaaacaggaacttctgattagctgggccaaacatctattcaatatttctcgaaatgatctttaaaccttgactatgtcgttcaacactattgtcacagagacacatagctgctgtatactgaaagggggttccggtacatcgaaagcatcattgtgcagacgaaccaagtagcttctgcaagttgcaaatcctccggtcacccacatatggttaacaaacgggttcaaatttacagatggagtcgtatatgtttccattgaaaagcttttctgccaatctctgattcttcaccatagcaagcttcagagcatcacacttaaaacgggcattgaggttggtatgcagggctcgccccatgccctctaaaattaacagatctgcatcttttgcagcagcagctagttctgagctaacctgccggaaatcaatacatggactgccacagccattctccacaaccattagtggcactgactctggtgcatccttgagatcatcttggatgccagccattgcatcgactagcaacccaccagcttctgcagctttccggaggataccacagtgctttgaggcttcagctataatttctggaagttcattagcagtaacatcatttaaagccggcaatgaatttgcaacaagaacaacctctgttccatggcgtaaaagctcccgagctaacggaagcattccaagaaccacatcagcacctgagttatcaacaaaaagcagtgctcttttgtatggttggttcttcctatcagtaagcattctctttttgaacatatcaaagtcatcaatccgccaaggacgttgcatcttcttgcgactcatgcgatagatttctattatagttcccttgtgataaagttccacacaagctcgagatccccaatcaaatatgtttgcagcaaggacaccttcaattagtgcaagcagcctagcttcctcattcatactatcaagttccattagaagatccggtaaaacagccagtgaagcttcattttccctttgcttgatgctaatatatgcatcaacaaactgaaattctctcagacattcttctctcaactccaacagattggccaaaccaaactttccataagcggcaggctcctccatcaatctcgctagatgagcagaaaaggcatgcgcaaatgcatctcccctctttttggcatcatcagtcccaccttcactagcaactgccttgtccacgaggtctggcaaatggtctgacaaaatcttgaaccagtacttaaactcatcctggtcaagatcaattgtgtttggttcatacgtctttgggtcctctaacaatggaaacacatccaatgtgggtacgagatggagaacaccaacatttaaggccgcacttgcatctgaccgcaaaatatcaccctttgaagtaggcctttcaaaacctcccatacctgttgtagctggaactcccataggtacaggggctataatctgagtacccttctgcacaaacttctccatccatgatatcttctcattgagatctccaagaggtggcccatgaatctttccaccaacatatggagcacccattgggaagcgttcaaccaaatgatgtatccttaagtcatcaagaccatgcttctcataactcataaatgcaccaagagctcctagaaagccctcatggcgcagaaacatggcttgtgcctctccttttgaccagaaatttactgcaaaagaaattgtgtccatggtgtaggcatgaccacggatgaagaatccaccaaaaaatatcctcttgagtccataacgaagtgcattaagataggaaatctggccaatgttgtaggaaatcatccgtaacagagacagcgatatatcctcaggcctataatctgatagctccttgttttctgaaatcgtcttcccgaaactagaggcgattgtagatgctgaaaggccaatcttggagtagtccagaccaccgtatatgtctcccacaagcatgtcaatggtgctgttgtctccacgctggctcaactctagcaactcatcaaaactcttgcactttgtcattaacctccccaatccccagtatgtaccaccaccaacatttgtcccacttactcgctgaaacttcccatgcccatcaaccttgattatactaacaccagatccgacattaacaagaaggaagggaaacaaatcattctgatcaatctgaacatattccttgtggccatccatgtgtgtaaaagcttcatgacgtatagccttaagcaaaaaatttgctccagctacgagacagtccatttcatcttccttttcaaggctgactcccaatctttccttaaagagatccgcatacttgtatgctccaccacctgtcgccttgattacaatgtcatcaggctgagctcctgagcgccacgaaggcgaatcaactcctgcagcatataacaccacgatgtagttgtttggaagaaatgaagtccaagcattcatttagcttctcagtctcgaacttgacaaagtggagcctccctccaagaatcgggtagcttctcctgccaccattaaacatcccaagtcttctctttgtggatatcttacgcttatcctcagttgagagctcagcatgtcgtgagaagtataccagtttgataagagaaccgccgatgtcaagggcgaggtgggagatgtcgtcggactggttgggcagcaggatggtggggttgcggtcctccagcgtcccgtggatcgccgcgccgctgaggtccagctgcggccgcgagctcgaccggggcagcatcgtcgtcgcggtcgcctgcgccgcggaagacgtcgtcccctcctcctcctccgcctcgtgcttcacgcccg

SEQ ID NO: 25749 - DNA, 683 bp, Setaria italica
  misc_feature (565)..(565): n is a, c, g, or t
  Peptide Sequence Number=SeqID_91723
aatattgcaagaggaatgagttacttacatgagcataaacctcaagcgatcatccatcgtgaccttgagccttcgtgagtactttgtggttactttctttttaagtgaaaattgcttgcgtctttctctgcacaccccatgaggtgcttaagtacttggtttgttaaaaagactttatatgcccattgtataagctaacaggaatatattgagggatgacactggacatctgaaggtggcagattttgatttgtgtaaaatgctaaaatggagaagaaaagttagagaagagaaagcagtaacttctccaggcaatgcttgtaggtatgtggctccagaagtcctgcgaaatgaagagtatgataccaaagtggatgtattctcattccgctttgatacttcaggagatgattgaagggtgtcttccttattatgataagagaatgatgaaatcgagaaggcacacaattctaaagaaaggccgccttttagagctcctccaaagcattatgctcacgggttaagagagtaagcactcattctttcctctcttttctcctacagnggcaattactaactccattagagcattagtgtggcttgctttgcattctgaacttttagcaaacatgtttctgcaaacgatgctaaatctgactacttgtatgtgtgaaatttaatgt

SEQ ID NO: 25750 - DNA, 1559 bp, Setaria italica
  Peptide Sequence Number=SeqID_91724
ttccagctgatgtacctggcccacgagggcaacgcggaggggatccgcgagctcctcgacggcggcgccgaccccaacttccgcgactccgacggccgcacggcgctgcacatcgccgcgtgcgaggggcacgccgatgtcgtcgagctgctcctccagcgcggggcggaggccgccgtcgaggaccaatggggcagcacgcctttggcggatgcaatgcattatcagaatcatgatgtgatcaagatcttggagaagcatggctccaagtataagattgctcctatgcatgtgaacaacgttcgtgaggttcctgaatatgagattgatccttccgagcttgatttcagtaatggcaatgatttgtccaagggcacatttaggaaagcaacatggaggggcattccagttgctgttaagaagctggacgatgatctacttgtggacgagaacaaagtgagggcattccgagacgagcttgatgtgctgcaacttatacggcatccaaatgtagtgcaatttctcggtgctgtgacacaaagcaatccaatgatgattgtcatggaatttatgcataagggtgatttgcgcactcacttgaataagaaaggagctctgccaccatcatatgcagtgaagttagctcttgatattgcaagaggaatgagttacttacatgagcataaacctcaagcgatcatccatcgtgaccttgagccttcgaatatattgagggatgacactggacatctgaaggtggcagattttgatttgtgtaaaatgctaaaatggagaagaaaagttagagaagagaaagcagtaacttctccaggcaatgcttgtaggtatgtggctccagaagtcctgcgaaatgaagagtatgataccaaagtggatgtattctcattcgctttgatacttcaggagatgattgaagggtgtcttccttattatgataagagaaatgatgaaatcgagaaggcacacaattctaaagaaaggccgccttttagagctcctccaaagcattatgctcacgggttaagagagttgattgagcagtgctggagtgaaaatcctgcgcaccggcctgattttagagaaatcatcaaccggttgtctgctatccaaaatgagatagctcaaagaaaccgttggaaggtgagacctctcagatgtttcctgagctttgaaggaatgtggaagaaagatcgcaatgagggcagcaccacccgttcatcacgttcgtcaagatccaatttttaacccccagcaagctgttaatttcatttagaggatcatattgatgattgctagaaaatatactcaactgtatatcatatctttgtgctctgaacttctgaaaatggatgttttgtaactggttgattctcagctgatcatagttgtatatcagacttttatccctgggccctgaaagaaggattctttggcactggccccagcctcatgtacagattgttgccggcattttgttgtttctttaatttaatacaaatcaatagagctgctcctgggttggtgcaaaaacaaaaaaa

SEQ ID NO: 25751 - DNA, 657 bp, Setaria italica
  misc_feature (649)..(649): n is a, c, g, or t
  Peptide Sequence Number=SeqID_91725
tccttcctgaacatcctcaaccttatctcgtttagttgactcatcgtgcattttcagagtcttcttcatctgcgccttctcggcaaacgagcaaaggttcttagtaacactattaagcaaaagaggaaggagaaagctggtaaatgggatgttcctttgccaaaggttagacctgtggcagaagaagagatgttcaaagttcttcggactggcaaacggaaaactaagcagtggaagagaatggtcacaaaagcaacatttgttggatctggatttacaaggaagcccccaaagtatgagcggttcatccggccaactggcttgcgtttcaccaaagctcatgtgacccatcctgaattgaagtgcacgtttaatcttgacattaacctcaatgatggtaccccttgtcataacaccaagagatgtatacattggaccattattgaggttaatgtgagtgaacttggtcttgtgactcctgccggaaaagttgtctggggtaaatacgctcaagttactaacaatccagagaatgatggttgcatcaatgcagtcctactagtgtagaaccaacctctgttctgttatacgtgatggtgaacctctaaacgcatctgagctgctgtggtcttatggataaaatttttgnggtgtaat

SEQ ID NO: 25752 - DNA, 1096 bp, Setaria italica
  Peptide Sequence Number=SeqID_91726
tcccctcctctgcaccgggcgccgctagggtttcgccgccatgccgcagggagactacatagagctgcatcagaagcgccatgggcggcggcctgactatgaggagcggaagcgcaagcgccaggcgcgcgaggtgcacaagaactcgaagcaggcccagaagctgcttggtgccaagggcaagaggtttgctaagaagcggtatgccgagaaggcgcagatgaagaagactctgaaaatgcacgatgagtcaactaaacgagataaggttgaggatgttcaggaaggagctctcccaccatatctacttgatcgtgatcagacacaacgagcaaaggttcttagtaacactattaagcaaaagaggaaggagaaagctggtaaatgggatgttcctttgccaaaggttagacctgtggcagaagaagagatgttcaaagttcttcggactggcaaacggaaaactaagcagtggaagagaatggtcacaaaagcaacatttgttggatctggatttacaaggaagcccccaaagtatgagcggttcatccggccaactggcttgcgtttcaccaaagctcatgtgacccatcctgaattgaagtgcacgtttaatcttgacattatctcagtaaagaaaaatcctaatggtccaatgtatacatctcttggtgttatgacaaggggtaccatcattgaggttaatgtgagtgaacttggtcttgtgactcctgccggaaaagttgtctggggtaaatacgctcaagttactaacaatccagagaatgatggttgcatcaatgcagtcctactagtgtagaaccaacctctgttctgttatacgtgatggtgaacctctaaacgcatctgagctgctgtggtcttatggataaaatttttgtggtgtaatactatggaactgtattgtacttgcactgttgccttcctgcttacagtaacagagtttagtgaaacagtaaggaaaagaattctggtcggtttgatttgggctgaacaacgaactttacgtgtccaaatgcctttgtagcaaactggatgtttgatcaaggttatgcgtagggtcctttatatcttg

SEQ ID NO: 25753 - DNA, 425 bp, Setaria italica
  Peptide Sequence Number=SeqID_91727
atgtcttttcatctggtctgcaatggtgtccacctgatcttctttagtcccttcaggcggatctcttaaccgatgctgtgcactggtgattagacagagacgccgctttcctttggtattaccatatttcctaatcagcatatccaagccaacaacaacagcgtccagaaaatcaccagggacagatcctgctgggaggttttggagagcctgtgaagtcccttcatctacaactttaatatcatgtgcaactgtcacatgcttatagcccccaagctccttcgcaagctcattgcatgtttctttagttccaaagaggacaataccgacctcatcgctcctattataaaccaacttcttatgcaccagagttgaacatatgttcttgacctcctgcagccaccccatgcattgaaggaccaaca

SEQ ID NO: 25754 - DNA, 483 bp, Setaria italica
  Peptide Sequence Number=SeqID_91728
aacaatcttcactaaggttatctgcagcttcttgttgttcatcagtgggctgagatgatgatggcaggctgctaaaggatcggaactgaaactctctgatgtcctcagcaaatgggagcacattgaagtagaaggaatcttggatattgttcactgatgaaatgtttggcgtcaatacaccaaaagcaacattcccttgaccttgcctccacacacatcgaacaatagcaaccttgttcatttgatgcattgctcttgctatggcggaaactgcaagagttgctttcgtgttacctggttcaggtataaacaagcatacatctttcataaagtggtgccgtaatatgctggatctatctgtaaatcctagaagcttcacacctttctctggcttgaacttgaccgcctcccattcagcagatgatatagggacaacttgaggaccataaaggtatcccttaatcctctgatctggtggaacaa

SEQ ID NO: 25755 - DNA, 1555 bp, Setaria italica
  Peptide Sequence Number=SeqID_91729
gtgcttcccctttgctgataagtgaaatatttttcgaggacagaagctgaaagaaattggcaacatcacccttcttcaatctttcgtaagtctttgtaaggaactggttgaattcctctggttcctgttcaataatgcaggctttccgcagagcagcgaaacattcaagtgcctttgagtaattatccccatcacgggaattttctaacaaagctgttgtgtacttctgcatctcttcaattgccttttgaacccacgttgagctagatctctttgccagcatggcttcaaaatcttgaacaggatgtaaatctctgatctccccgatattctctgttggaggatataaaaccaccaaaaccccatccttttctgcagagggctctgctactgatttagcttgatcaccagcaccagtatatgccagtctgtcctgtgttcgtgctttcttcttcttggggttctccttcagctcaaaggctttgcctaaattttggattaatggcgtttgttggtcaatgacatcaggatcaggttcagttatcctccttagacatctttcaagtggtggcacatttgcatctggctgcttcgcctttagatcaaggtaactgtaaaatctctccaacatgggatttggtgtgaactcgggcttgaggacttctcttccaggtggtgctaggtctaacatcttcactaggttatctgcagcttcttgttgttcatcagtgggctgagatgatgatggcaggctgctaaaggatcggaactgaaactctctgatgtcctcagcaaatgggagcacattgaagtagaaggaatcttggatattgttcactgatgaaatgtttggcgtcaatacaccaaaagcaacattcccttgaccttgcctagttgctgttaggttcaggtataaacaagcatacatctttcataaagtggtgccgtaatatgctggatctatctgtaaatcctagaagcttcacacctttctctggcttgaacttgaccgcctcccattcagcagatgatatagggacaacttgaggaccataaaggtatcccttaatcctctgatctggtggaacaactttgtctggttcgacaacgcttttgtactcataatccactttgacttcatgagaggcaaatttatcacttggaggagccttgtctgaatacttcttcaaagtggggaatttctcctcagctgttttcttatagacccacaccttgattttaaaattggagctcacttccaggtctcccctgaagacggtaactggaagcacatttcttgtcttcagagcacccaacagagatgttgggctgtcaacctggaccacctttgctactgatctattcctgaactgatacaacaaccagtcattttcatccattacagcattatgatggattcccggttctctgaagacaatgcactccatcttgatatcatgtctttcatctggtctgcaatggtgtccacctgatcttctttacgtaacttggtaagtctactattttctttgttctttctagtagtctaccctaa

SEQ ID NO: 25756 - DNA, 477 bp, Setaria italica
  Peptide Sequence Number=SeqID_91730
tccctcctccggcgccgccgccgctcgcgccgtcgggcgcggagagccagtaggaggacgaaggaggcggcgcggcgccgaggccgccgccgaagaagcccgcgcacttgatgcggtggtgctggtcgtggtcgtggtccccgtcgtcgccgtgcgcgccgcccaggtggcccagcgcacccgcggccttgggcttcggctcgcggtgggactccacgcgccggagcgcgcagtcgccgaagccggtggagaggcgctccaggaagtcccccgagaagctgcggctgccgcaccccacggagcgcgaccgcgccaccttccgcccgaacgacgaggacgaggacccctcgctccggcggcccgggctctcgggctccacgatcgcctccagccggcccccgagcgccgccgacgacgccgacgccacggacacggagttcctcctcgccaccgcggcccgccgccgccgccgttggc

SEQ ID NO: 25757 - DNA, 285 bp, Setaria italica
  Peptide Sequence Number=SeqID_91731
gtgtgaaattaaaggtctctttcataccttttggcattgggccacttcgaaactccgggagatggttgtacccttgtacggtgcaaagtaagccggacagttagggtacctcgagtcaactaggtaaaactccctacaaataaagatattattgtcaggtaaatgaagtagttcatgtaagaggtagtaatgatcgtgtatagagtagtgtacctggatgtggatgtgaaaacttgttaccatatttggttatgacatcattgaacactctcatatcatgtaccg

SEQ ID NO: 25758 - DNA, 334 bp, Setaria italica
  Peptide Sequence Number=SeqID_91732
ggagggagcaggagcagtcgcacatggcggcggcggcgtccttctttcctccccctcgcacgaggcggaggatgccctcgaagacctcgacgtcgcaggggatccggagcgcgccctcgtgctggaacccgaactcctcctcggcctcccggagcagctccgcgaacgcccagtggccgaggtactcggtggggatcacgaaccgccgcatctcctcgccgacgtacacggcgaaggagcccctcggcacgctgctccggccgccgcccttgccgccgctgccggacgccgacggcgtcaccgtggccagcttcttccacttcttgagcagctg

SEQ ID NO: 25759 - DNA, 774 bp, Setaria italica
  misc_feature (734)..(734): n is a, c, g, or t
  misc_feature (747)..(774): n is a, c, g, or t
  Peptide Sequence Number=SeqID_91733
cgccgccgcgctcaacatcgtgcccacctccaccggcgccgccaaggccgtggcgctggtgctccccaacctcaagggcaagctcaacgggatcgcgctccgggtgcccaccccgaacgtctccgtcgtcgacctcgtcgtgcaggtctccaagaagaccctcgccgaggaggtgaaccaggcgttccgcgacagcgccgccaacgagctcgccggcatcctcgaggtctgcgacgccccgctcgtgtccgtcgacttcaggtgctccgacgtgtcctccaccgtcgacgcctcgctcaccatggtcatgggcgacgacatggtcaaggtcatcgcgtggtacgacaacgagtggggctactcgcagagggtcgtcgacctagctgacattgtcgccaacaattggaagtgaagcctcgcattgtaataacccatcctcggcttcaaaattttccccagggtcttccctgatgataatttgtaatgagaaatcgaggacccaaactcccaacaattccttttattttctctctcccttctccgatttttcattgtccagggacggagtataatcgacttccggcaaaggaaatcgcagacgctgtataatgcagatttgtaatatatactatctgttgcaaggttcttttgtagatttcaaaaactatatttgttcaaagatggctaaatgaaattagagccaattttcttcaaaaaaaaaaaaaaaaaaaaanaaaaaaaaaaaannnnnnnnnnnnnnnnnnnnnnnnnnnn

SEQ ID NO: 25760 - DNA, 297 bp, Setaria italica
  Peptide Sequence Number=SeqID_91734
atttgacagaatgcatcacatatttctcccatgcggcgaagaagccgtgcgtcgccgacaccacccagctcatcagttccactagaaacgcccgaccggcggaagaagatcgagccatggctgagctcgcgtcgggcgccgtgagctcgttgctggtcgtcatccgcaatgaggcgctgctgctccgcggcgtccaggacgacgtgcagttcatcaaggaggagatggagagcatgaagagcttcctggcgcatctagcccggagtgcgccgcccggcggcgagcacgacgagcagg

SEQ ID NO: 25761 - DNA, 309 bp, Setaria italica
  Peptide Sequence Number=SeqID_91735
ccttctccgttgtcgtcacctgcctcatggcggcgtccggcggcctcatcttcggctacgacatcggcatctcggggggcgtcacggcgatggagtcgttcctgtccgccttcttcccgggggtgctgcgccggatggccgccgcgcggcgggaccagtactgcgtctacgacagccatgccctcacggcgttcacctcgtcgctctacctggccgggctggccgcgtcgctcgtcgccagccgcgtcaccagggcggtcgggaggcaggccgtcatgctcgccggcggcgcgctcttcttcgccggcg

SEQ ID NO: 25762 - DNA, 506 bp, Setaria italica
  Peptide Sequence Number=SeqID_91736
tagaaggttgaggtctgctctgagtctttggcatgccaagctgacggccttgagaagaagtttcttgtggactccatggtgaagtcttctcatgatgcaggtccatgcaatctgcctcctcccttcagctctcatgaactcaagatgctaaaacagaggaaagaaaattcagtaaagcagattgaaatgtgggagcaaaaagcttcaggggcttagataacaagcttggagccctgggcccctgggacttactttcttccaagcataggcataactaacttttaactgtttgtaacttacggtctaattcagtgtcattgtagttctaacaaatacgaatcatttgtttactgaaatcaacgtgtaagcatctggagatattgagcaaataacagtttttcttcagctagttttttcttttaaagtgattttagttataaacattcattttttctgttatttgattttgtttggttaatgtttgtaaatccattgtaaccgtctct

SEQ ID NO: 25763 - DNA, 250 bp, Setaria italica
  Peptide Sequence Number=SeqID_91737
catggcaacaacagcgtgagacggtgcgcaaattatcagtgcagatgatgaatgaaccaggtttgcatggcaacaacagcgtgagatgaatatcaatccatcacttgtacctagctaattcatgggccacaagaagtggcgaacatagagcacaaactaagtgtactcgatgtccagacctaaccattgttaattagattcgcgtacatttcacgtaggaaaaggtattggagacataaaccaaaaaaaa

SEQ ID NO: 25764 - DNA, 1142 bp, Setaria italica
  Peptide Sequence Number=SeqID_91738
gtgtggaggggatcggttgatagggtttcggctgcactcttgttcgggcgccgccgctgctcaggagcttctgttggccgactttgaagcgcttaggggttagctgcggtcgggctggagtgcgtgaagcagcgtgtggccgcgttcgagtgcgaggatgaaggcgggcggcggtgctaaaaagcgcaagctctcaggatggcctgaatccgaagcgagtaataaagcaatagaattcaacagcatcttacatggcaacagttcaggccttgaggttttactgcttaatagaatcgcgatagcaaaaagcctctctcctccaccaatcgtctatgacttggattggaatccaaagccacgtagctgtaacggcaaaaacgctattgctatgttggcttgtgcttcatcctatggagcacacatttattattacccaagatctactaggacatggactacagtggtgatgatgaacaggccaactagaaaaggagactgtattcgttggcataaatctggacgtacccttgcaaccacatcaaactacagtgatgaaaaagacgggaaagtcacaattttctcatatgacaacaaaactttatgttttgatgctacaggcagttactcgattaaggaacatagaaatgtgtcatcattggcatggataaccggtactgagatcctagtcggtgccatattcccttcgtcgtggctttacttctttgaactgaaagaaggtttaatatcatgcgtacaccaagaagagtgtaatggcttcccgaccaactctccaattgttctccaaccagatccaaatactacttacttttttgctgcctgtgaggatgctacaaaaattttggtttggaacaaactggaaggcagtgaccatatctggactatcattcgtagtgtgtaagtacatatctggactatcattcataggtgaagttaaatgttcaattctttcgctcttttatagtatagatagatacggtagtaacaagtgtatatcaattaaacataagtgttaaatgacattgcattgcaaaaccataaaatattcctgtgatcttctattattctccttaagtctaaatactctccattataagtaacatttgcgtttgcttacttttgga

SEQ ID NO: 25765 - DNA, 2491 bp, Setaria italica
  Peptide Sequence Number=SeqID_91739
tgttcttacataacgacagaaggattggctagttgagctgctgaggtggtccttgcctccttggtacttagtacttagtagtttgttccatgactatgctgtaaaaatgcaatttcctgtgatctaagaaaataagatacggacaagtcaaagcttgtccaaaagttgtgtttctgaggatcttcggaatcaatagtagctgcagggtgttctcttgtattgtatgccatgccctacactattacggtgggttttttgtctgttgctgctgtttctcttttggtggcaaatttctgtaatagttgttttctttttagaaatcgtgacttgttaattaaaggttctatcacgtgattttgcaacgtcccctctttatagatcacctttaattagaggtagagccaagcctgctgagtacctagaacaccattggatgattgttctacaagcacgtgatggagatattgtgactttgactggttaaactcacaacattctcagcagaaatagttgattcttgagtaaataagcaggtcaccgtaatttctcgagcagctgtgcacgttttttggacatgtaacttccagaaactggaatactattgccaattctctcatgaacaggtgtcacagacataaagatacccatgcagccaataggtacaaatattgtgcttgatggacaaaataagaagaaaacaatagaatatatgattctttatacgagacactaagttaaagtagttttttgaagtatttcttacattgagctacttataactgactaaaatccattttggtcaaagctattttgaagcttacacctgttttcatcagaccgtaataaactcgcatcataaaccactgtagtagttcaacagattcggactagaaattgtttttgagttaactgaaatccttattcatggaactgtagcattgttcaggtcgtcagatctttcccttttttccttgtcacatcatctgcctattaaatagcaattaaataactgatgatgacactgtccttatgctgttgaatatgtcactttcagatgcattgtatgctcactctcccttataagtaacatttgcgttcgctacttctatttttttttgtcttgcagtggcctgtgaggatgctacaaaaattttggtggaacaaactggaaggcagtgaccatatctggactatcattcgtagtgttgattgtgatagaggtatctgtggaatgcaatttggcatgttaactcgctcactaattactattcagaagggacattggaatgtttggcactgggttgagcaaaaggatctgaagttacagtttactagtcttaatgaacacaaaattgtgaaaggcaagagacttaaatatcggtctgagcttatatcacttggagtttcctgcacaggcaaagttgtagcgagtggtggaactggtgatacattcttagtgtatgcaatgactggaacagctgctggtccccctattgctgtccattggaaccctgcatgttcgcgcaattcaaatttttgttatggcgaagttcgatgcataaagtttaatgcaaaggaaggtgcaaacttgcagatagcaacgggaggtgataatggatttatccatatttgggccctcaaaaagactagcagcagaagcaaagaaaaggtggatataactccagaccgccgttatgaacataagtactattctaatcatctccaaccagagaaaatcaagattccaagtacttccgatgatgaggaggacgacgaggacgttgacaaagaggtggtgagggaaggccctttcgaggtggtcgtggagtatgtggataaggaggtggtcagggtggcacagaaaccaaagttttatcagattagagaagatgctgaagccattttggaaatcattaatggaggatatgatctaccaaaagaacagatcaaacttctgtgcgatcaaattatcagtgcagatgatgaatgaaccaggttttgcatggcaaacaacagcgtgagatgaatatcaaatcacttcttgtggccaatgaattagctagccacaagaagtggcgaacatagagcacaaactaagtgtactcgatgtccagacctaaccattgttaattagattcgcgtacatttcacgtaggaaaaggtattggagacatccaaaaatctttgttttgccgttttcagggggtctctatgggcacttggtatttcagccgagcacttgaactaagacattggtcctctatgggcactcgcatttcagccgagcacctgaataagccattgatgtgcgcaagtagtttgatgtcttattttctattacctagcccaaaaatgcaattgattgattaacttttttggaacgtttactttttttttctcaatacctagcccaaaagtgcaattgattgattacctttttctgaatgtttacctttttttcctcaaagagtttattatgcaatgaaaaaaa

SEQ ID NO: 25766 - DNA, 626 bp, Setaria italica
  Peptide Sequence Number=SeqID_91740
aaccatggagtatgaatatttcaatggctttaccctgacagatatggcacatggatatcaagagaatacttgtggtgatggcagcactgttctaaattatggtgtagtgattccaaattcttcaactcattcagaatttcacagagatttcatggaaatgtgcagggaagaacatgagctcttcatgtggcatagtaggttgaagcatacaagctctgctccccttcaaatgaatggcaacaatgctgacttttacgtggagcttgaaaccaacaattatgcagaactgttactagatactgtaattgaccagattggtcatgcgtcgaataatgcatcttctcactcaactaattctccatttacacgcgaaacacaaattgaaaatgatcatgcgttgaggctggatgaatcgtcagttcctgatatccctggtggtcaagaactttcacctatccccatgaatgagaacgaaggcttcataatttgtgcaacgactgatgcttcacctacagaaaccaacaagaccataactgaagaatacatagttcgaaatacattgggacaaattcagctaaaataaaaaaagaatagacaggaaagttagagactccagagatcaattg

SEQ ID NO: 25767 - DNA, 515 bp, Setaria italica
  Peptide Sequence Number=SeqID_91741
ccctgcctgatgaagaaggcttggctaggccaggagttgttaaagctattgatgaatttaaggcttcagtctatggtgaaaattatgaccaagaggaggctgaagcagcagcagcaaaagcttcccgtggtgacgcttcgaagaagcggaaggcaatcactgatgcagcctcgctgaaaagtgcagcttatgattgggcggaattggcagataatggaaagttgaaggacatgacagtcgtggagttgaaatcgtacctaaccgcgcatgacctccccatctctggtaagaaagaggcacttatcagcaggatcttgactcatctgggcaagtgaagccacttacgtgaacttggttttcccaaaagccaactgtcctggactgctgtctcatgggtagcttgaaagcttgtgtacgatctccctgtgcatgctacgtgccaattttgtatagcgatgttgccaaaaaaagttgccagttgaactttgttgttagtttatctagaggtcgtgtgg

SEQ ID NO: 25768 - DNA, 1904 bp, Setaria italica
  misc_feature (1861)..(1861): n is a, c, g, or t
  Peptide Sequence Number=SeqID_91742
cccgccctcctccccccgtcgccggcgcgcccggcaccgccgcggccgacgaggtccgcaccatcttcatcacggggctccccgtcgacgtcaaggagcgggagctccacaacctgctgcgctggctcccggggttcgaggcctcgcagatcaacttcaagggcgaccagcctatgggcttcgcgctcttcgccaccgcgcaccaggccgtcgccgccaaggccgcgctgcaggatctggtgtttgatgcggagacgaaatcggcgctgcacactgagatggccaagaagaacctcttcgttaagagaggtgtgggaactgatgcaaatgctgtggaccaaagtaaacgcttgcgaacaggtggagactatactcattcaccttatgctccacctccatttcatccacccccaccggctgtttccatgtggggaactgcaggttatatcgctgctccgcctccttacaacccctatgcctatccagtgcccccggtagctatgacttcaccttcgcctgtaccaggtccaactgcctatgctcctgttcagaacaccaaagataatcctccctgcaatacccttttcattgggaatcttggtgaaactgtagttgaggaggaattgcggagtctcttcagtgtgcaacctggttacaaacaaatgaaagttttacgccaagacaggaacactgtttgttttattgaatttgaggatgtgaatgctgctacagctgtgcaccatactttacagggtgctgttattcctagttctggtcgtggtggaatgcggatacaattttcgaagaatccctttgggcgaaggaaggattcagttggtggcgttgcaggaattctaaatggagcttccgcaaactgagagttgccaaaggggatgtatcttgaactttagcatgccatcatggatttcatgccactccatcctatatatcatctgcatgcttcttctaaatgctctgttttttctcatgtgtgacattggcatcttcatttggtgaagtttctgggacatcacatcatcttcattaggtggagtgtctgggacatgatcatcatctggtagacattgcattgtcaccaatatggttgctggtgttgttttctctatatttgcagttttgagtaggccatcttctaggtgtgcatttggcatttgtcgtggaatttatgcagttccctgtatgcagttacaacatttcttgtgttcatgtcattatcacttcgctatatggacatattgtaatagttatgatttctctggcatactaacaattcggaatggatccataccatcatgtcatggcatgttcatgagggaagggcagttgatagacatggcatgtcatactcattccatgaattctggagcattgccttatcctattgaagcatgcaagcatccattgctaatgaacaaattaatttgtttagtattgttttcactccaggctaagagaggctaacagtgactgtaaaatttaaaacttgtgccagcctttttccccctcttagcagcagatggcgaagtgcgaatggcagtggttctggttctttcgtaagaggttagtgatgctgatgagaagccagatgttatggagaaatggtttcaagacagacttgtgcatgaggcagctgatagagtttcattctaggatgctgagtgccgttgttatctgctcattatttctcggtttgttttcttcacgaactgttaatatggatgtttgagtaggtggttgagaaacgatgcacttgtgccagatatgcttgcagcagcatgcttgttttgctctattcgtaagaactgaagtggattgtgagaatgtagagtaacttgaaaanaaaaaaaactaaaaaaagagaactagaccaaggacacacaggg

SEQ ID NO: 25769 - DNA, 417 bp, Setaria italica
  Peptide Sequence Number=SeqID_91743
tgttcttcaatggatgcacgcaccattcatggccgatcagatgcttatgcttgctgcttgaggtgagcactagagcttagcagaggttgcagtacagatgtggaagaagctactacttgaattagagcggggaaaggagaaaaaggagaaaaaaaggaaactaaggaagaaggggtaggtaaagatgtggaagagcgagcctagagctcgaatttgtatgtacaatgccgtggccttggtcggcttgtggatcagtacaccttcttggagaagaaggtgcggagcccgaacagcccctgcggcgggttcccttcctcggcggcgccctccgagcaccccgcgttgttccggcagccggccgcgggcgcggccacgctcggcgccgccttgtcgtcgtttgcggcttcggcggtggcg

SEQ ID NO: 25770 - DNA, 500 bp, Setaria italica
  Peptide Sequence Number=SeqID_91744
ttgcgggtgccgtctccgcctcccgtcgcatcgcgcgcagcatggtcaccacatcttcgacgcggccagcgttcatgtaccccttcatgagagtggtgtacaccctggcgttgggcggataagccttggggagcagcggcacctcgtctgtgccatgttctggcttggccccggcgacaatgtcgtcaagcagggcagcaccctgctcggcgtcgggcacatcgtcgcattccatggcgacggctctgagcagcaagcatatgtccttgcgttgtcctcgcatcgcttgcacgatcctctccgccgtggggatgtcgccgaagccgacgaacgcggcgacgagggagtggaaggtggtggcgcagggggcgatgccggaggagagcatgcgctccagcacgctcgcgacgaggcccttgcggccggcgcgcgcgcacatcttgatgacgacgttgtaggtgagcgcatcggcggcggcgctccactcgctcattgcgtcg

SEQ ID NO: 25771 - DNA, 264 bp, Setaria italica
  Peptide Sequence Number=SeqID_91745
ggctggtgaaacaatagtgagtggctcctctgactgagataatgctttgatcttagccttggcagctttgattcgcgtggaaatgcccgacagcttctcgcgctcctcagcggttcgcttggtgatggcatcgaagatctggtcggcagcggcctgcaggtcgaggagggtgcggccgaggtcgccgtagccggcggcgtgggccgtacgacgtctgtccccgtcctccgacacccgcagcatctcctccctcttcctctctcc

SEQ ID NO: 25772 - DNA, 1342 bp, Setaria italica
  misc_feature (1)..(33): n is a, c, g, or t
  Peptide Sequence Number=SeqID_91746
nnnnnnnnnnnnnnnnnnnnnnnnnnnnnnnnngttttaaaacgagtaatttggagagtcattcattcatgatttaatttaaagaatagtcataatatagagtacaatcatcggccgaactactcatttgaagaattctacatggccgccaacatccatacacagcagcttggcttcggaggccagcttcctgctcctaaacaacactaggttcgtgagccggtgcttgggctgcggctcgaaggatctcgcatcagcgtccttccccaggatcaccagctccctcgctggcatcacgttgccccaccagaaatcacgcaagacctcgtggatgagctcccagtacgcacggtcccggggcacccggaacaggctgctcccgttaggcgtccagcagtagagttccacccagtccctgcccatgatctccatcaggccctgcacctgcggcatgtagtagtacggcatggcacgccatggcagggcgagctcgggcttgcccttgttgaatggacacttgacctccaggatcccaccgtcgagctcacatccgaggattccatcaggtgaggctcccagccatctggagttggcttcggtgtgtactgcaaagccgagggtgcccaccagttttcctgtgatgcttgtatactgctctatggccacgctttcatgatttgtcccccagtccatggcggacctggccgcatcagccagtttgatctccgtttgtccaaaaactttctcattccacagctccgcccgtctgttgccagcccagaaacccaaggccgtgctgaaggtgcttgtggtgagcttgtccttgcggagagcaaaaccattcctctgaccgctgggccacgtcagaagaggtgagctgggaggacaccatgagagctgaagatggctgcaaggttagcagtgatggctggctatagatcttcaatgatgaacgtgagcagcttcgaggaatatagccttcaaagtttcgtcttgatggcaagaatgtagacagagttaaacacacgcgaggagttgaagaggctgttgggatttgcagaaatgtcctaaacaaacgaggaactgctcaatggttagggagcatgtgaaatatgatgtatgctgtatcttaacaaaggcgagaagttaatctaggaaagcatgtaggaagcactcaacaagaatgattaaccacagaacatgcagtacatgacaatggtatgcttcatttatatgaactcgcttcacttcttgaatgaagcatggcagaatattgcaagcaagggtttataccttaccaatttcagcaagaagacattgcttgggacaagtaaagatttgg

SEQ ID NO: 25773 - DNA, 309 bp, Setaria italica
  misc_feature (273)..(273): n is a, c, g, or t
  Peptide Sequence Number=SeqID_91747
cgccgcggccttcccgccgccgtcgccgcgccggctccccgtgccgccctgccgctcggcgtcctccggctctcccgcggcgaggaggttgccggagagcttccagtaggtgcaggccagggcgagcagcgacagcgctatgagccccagcatcgcggccagcccaccgaagaggtacggcaccggggactgccacggcgagtgcggcgccgggagcctcgtgcccgagctcggcgacgccgccgtggggccgtggaccatggccatggggtnctcgccgccggcaggccacatggtctcgctgatctt

SEQ ID NO: 25774 - DNA, 406 bp, Setaria italica
  Peptide Sequence Number=SeqID_91748
tactcacccatacgaggctagtagaactgcagcgccatcacgatcgaatcacttctcgccatggaggaacatcatgtagaacccgccgaggacggtcgcggcggccatgatccacgccgcgaccgcgaagcccaggggcaccatcgcgccgatcttccaggtgaaggcggcggtgagcgtcgtggtgagcagccacacggcgagcctggcgcggccgcgcgccggggacccgtgcggcgagacctcgaagtggcggatcgcgccgaagaggagcagcaggttgaggtgggagaacccgacgaaggcgaccgcgcggcggtcgtcgccgccgacgcggcggacgcagagcgcgaggttgacggcgaggccgaggaggatcgccacggtgacccaggggagacggcgg

SEQ ID NO: 25775 - DNA, 208 bp, Setaria italica
  Peptide Sequence Number=SeqID_91749
catacagcaagcgccatcggttctgttctcaagtccgctcgcaactcatagcagaaggatgtcggggttaaatagtctgaccggccttcttaggattgacttggttgtcgaccggtttattagacacccatacaacagtgcgatacacagtataactttcttcgacgaattgcgctctgggtgcaaaattatctaattaacctgctgt

SEQ ID NO: 25776 - DNA, 262 bp, Setaria italica
  Peptide Sequence Number=SeqID_91750
cgcgccttatgcacaggtttgctgcatgcaacatgcagtagacctcgttttcgcagaagcgacctcctaggcgagggtcaatcagctcatcgattgcatactcttccaacaaaggccgagcccattctgttaagaattgctggcccttcggtctgttaatatcgacagccttccgtccagtgacaagttccacaagtacaaccccaaatgagtagacatcagccttctcagttatttgcccactctgagcatactcaggccg

SEQ ID NO: 25777 - DNA, 453 bp, Setaria italica
  Peptide Sequence Number=SeqID_91751
cagaagaagcaaaccctgtcgctctgcttctatcatccgccatgatgttgcggcatttgcagttcccgtcattcgctgaccggctggagacggcagtgaagcgtgtcgttgcagaaggcacatacaaaacaaaggatctgggcggcaccagcaccacacaggaagtcaccgatgcggtgattgccaatctggattagattccaggcacatgactggaactgttaattctttgggggggactagttggctagtcttgactcctgagtgttattctacttcacatagatttagattcacatttttccagagcgattgcaatgaatccatttttcagattttgtttagaaaataatcaaggaacccacgaggatgatactgtgttcaaggtaaagaccttgagttacaaagtgaatggatgcagtctcaaaataaaaaaaaagaattaaaaaaaaa

SEQ ID NO: 25778 - DNA, 789 bp, Setaria italica
  Peptide Sequence Number=SeqID_91752
ctcgcggccgaccctccatccccgatcgcatcgcatccaccccgaaaccctaaccccggccatggcgcggcgatcgacccctctcctacgccgcctcctcgccccttccccttcccccaccccgtccactcccctcgccggcgccgcgtcccgccgcagcgtcacctacatgccccgcccgggggacggcgccccgcgcggcgtcacgctcatccctggcgacggcatcgggcccctcgtcacgggcgccgtgcggcaggtgatggaggcgatgcacgcgcccgtctacttcgagacctacgaggtccacggcgacatgcccacggtcccgcccgccgtcatcgagtccatccgccgcaacaaggtctgcatcaagggcggcctcgccacccccgtcggcggcggtgtctcctccctcaacatgcagctccggaaggagctcgacctctacgcctcgctcgtacactgcttcaacctccccgggctgcccaccaggcacgacaacgttgacatcgtcgtcatcagggagaacaccgagggcgagtactcggggctcgagcacgaggtcgtgcccggggtcgtcgagagcctcaaggtgatcacaaagttttgctccgagaggattgccaagtatgctttcgagtatgcttaccttaacaaccgaaagaaagtcactgcagtgcataaagcaaacatcatgaagcttgctgatggtttgttcttggagtcttgccgtgaggttgcgaagaagtaccctgggattcagtacaatgaaatgattgttgacaa

SEQ ID NO: 25779 - DNA, 1052 bp, Setaria italica
  Peptide Sequence Number=SeqID_91753
aatttcttgctttcagttaatcctttacggcttaagcaggtttgttatagtttatgtaccataaggttctctgagactttgaataagaaaatattgttgaaataaatttatccatattatgtttttcctttttaattcttatctgagcctgtttctctattactactcttacgaatgggtttcctaggtgatcacaaagttttgctccgagaggattgccaaatatgcgttcgagtatgcttaccttaacaaccgaaagaaagtcactgcagtgcataaagcaaacatcatgaagcttgctgatggtttgttcttggagtcttgccgtgaggttgcttcaaagtatcctggtattcagtacaatgaaatgattgttgacaactgctctatgcaacttgtctcaaagcctgaacaattcgacgttatggtcaccccaaatctttatggcaatctggtggctaacgtagctgcaggtattgctggaggcactggtgtcatgcctggaggtaatgtgggtcaggaccatgctgtctttgagcaaggtgcttctgcaggaaacgttggaaatgagaatattgtggagaagaagagagctaaccctgttgcgctgctgctctcatctgctatgatgttgaggcacttgcagttcccatcgtttgccgaccggctggagacagcagtgaagcgtgtcattgcagaaggcaattacagaaccaaagatttgggtggcaccagcacaacccaggaagtcacggatgcagtcattgccaaactggattaacgaccagccgtgtgtttttcaaactttgttctgctttggtggactaggtaactagtcctgacgaaatattcgttccttgtagctttagatcaccattttgttcggcaacgcccttgtacaatcttcaggtgtctcatttctgccattctggttcaggtctggagtaactgagcaaactcggtgttaacctttacgcatatttttgtgaccttaattcttaattggaaataagagaatatgaaacaattcttgtgccaaaaaaaaaaaaaaa

SEQ ID NO: 25780 - DNA, 964 bp, Setaria italica
  Peptide Sequence Number=SeqID_91754
ccgtaacgactaggaggtcaggatacagaaaaaagaaaaaagagcaggagactgtagacacgagcaatgttctcttaagaagcatcatccactagaattctagaagagtactcattctagaatatatacagcaaacagattagtccagtcgctagcctaaggccgggtctccgatgagatacagagatacgcatcccgtatgctaagcagttgttgtgaggttcagttcccaacaggcaacatcttccttacaaccaggtacgttaacattgaagcatagtatgctacatcagatgtgcccaaactgttgtccaggaccagaaagaacttttgattgctggggcattccttccatcatggttaactgtcttctcagcttggcaatgtgagcctgaacctgctgccgagccgcagctagttttaaaagctcatctgcctcagagaaattcgagaaccactggctcaaagcatgatccttagtgtcaccacgcttcttttcatatggaacaatttccatggagcctgacggaggcaaggttatgccaggagggagcctgggcacattagctgctggatgattttgcacacgctgaaaaaaggcctctgtaggctcagggaagacaatttcatcatatgtttccacaataactggttttttggttgattgaggtccggcttcttcttccggatacagcttaagctgatgaaacagatccaagcgcttctcacagacatcgctgtggaaataaagggttatagctatttcaaattctccccatccagattcagacaactcaaaaggtggctgctctacaactcttgttgggttttgaaaacttgggtgaagttgaaacaccacacgcttaactatgacactcaggtcctcattgtttgccgaacggacataaacagtccacttgtgagagttgtactcgctcgccttttaccaagccagaaagaaatg

SEQ ID NO: 25781 - DNA, 294 bp, Setaria italica
  Peptide Sequence Number=SeqID_91755
ccgcggttgaaggtgagcgtcccggcgggcgtgcgagccggctgggcgccgccggcgccgctggcgaccgcgccccactccacgaacgggtacgcctcgctgatgtcgtagccgctagtccacgtcaccgccatctcgtcgtgagtcttgccctgggcgaggcgcgggtacaccggcgccttggggttcttgaacgagatcggctccgacaccgcgatcagcttcgggttttcgaggccgccggtgaagagggcgaaggcgaagtcgtagcgctggttgatgagctggaaccgg

SEQ ID NO: 25782 - DNA, 778 bp, Setaria italica
  Peptide Sequence Number=SeqID_91756
tcttcatcaattattcttttgtggtttcttcatgcagcatattggaaggggcactaccaagaaataagaaagatttatcattctctttgacctgctcatgccctggttttgctgccccaggaactgtagctgaaacaggacatttgaaaagtgatagcttgtttttctcatcctgaactataccccttgcgctgtttcctgccttcattagggttcttatatcttctgctttcacttgcctgataggaaccgcaggggtaattggtataccagagccaagtgcaggagaggtgttctcccgcttcttcctcttgatggaagagccaccactcccatctacatcctttttcctgcccctctttggcacacgcttatcttgttccagaacaggatgtgaatcagaaacccgacccggagcaatattcatgctggcatttctaaggtacgcacccctggacactcatgcgtgttataagacgcatagtcatcaccctctacgaacgctgagcttctaaacaaacggagaaatccctctgcagcctctggaaaaatgaccatgttgggggtccttccctaagccccgcacaagcagcaagacatcttccacaacaatgctgtctggcaattgcaataccttactgccatcttcagcagctttgggcacagatgcctttggcgtaccaaccggcttacgggggagcacatccacacccaagttagtagtcctaagttgtctactatttacgtttctttaacttttagtttaagttttacttta

SEQ ID NO: 25783 - DNA, 343 bp, Setaria italica
  misc_feature (72)..(72): n is a, c, g, or t
  Peptide Sequence Number=SeqID_91757
acagtgaggtccaagaagatgtctttgctggtaaatgacttgttgcattttgaacacttgaatcctgacctntaaattgctggcaagtttatgcctgtgggccttttcttatcaatgcttcgtagcaaacagggcatgcaaacacctcagtttctgaaatgctattctgctgatcttccgtttccgtgaaggtctccatttgcagcagcactgaagaacgccgcgctaatggacctggcactaggttgcttccagctcggcataaccgcaaacacgtggtgggcaaggcaaccagtccggaagcaaccacaagtcagcgctcgacaaaatcgctatgtacacg

SEQ ID NO: 25784 - DNA, 418 bp, Setaria italica
  Peptide Sequence Number=SeqID_91758
ttggcttccaatgaataacacagtgatacccagtaaaccatataattgataacatgtttgggctagtttgtttccatcaagaaagttctttgtccttccctaacttctccatagctagtttgtgagtatgaagtggtactggtttggaaaattatggctcctaattcaactccaaacccctcttattctgcatccatgatcctacataaatttttctatttgaagtatgcaagccatttcttttagtattattgggaaatctcaaaacaaatggcaaaacaaaaagattcagaaccaggacagagatcttacgctttgaggagagtatcatcttgcttaatgaattcatagcattggcggagcatattctcagagaagtccaaagcaatcacagctgagtatgtcccagattttgcaa

SEQ ID NO: 25785 - DNA, 1402 bp, Setaria italica
  Peptide Sequence Number=SeqID_91759
tttttttttttaaatttcacagagaagtagggtcacttgtagtgtttctctcaagaatctgcagcatgcatttttgtacaccattgttttgaatacattcagaaacacgtatctatacagatatgaggaacccttagccacattattctctattggagatgtaaatataataatttttagtaaatacattttacaaggaatcctgaagaatcagtagaggttggagagatatcttcagtatggtttttgcccggagaacatgatgaatgacctctgaaccttactgctgtagttaacaaggccacacgatttgcacaagtcctccagctctccttcggtgaagtagttgtagctggtgttaactggtccaacaatctgtctcagtggccttaatgcttcaacagagaatgggttgttcctgggagatgataaaaaagttgtgcccacaaacacaccaccgggtctcaggacacggcttatttcagctaccgcattagacggtgatggccaacaatggatagcagctccagcatgaatggcatctacagaacaagaagcgaaagggagccttgaaatatccgctctcacaagtgctagattcgctttgaggagagtatcatcttgcttaatgaattcatagcattggcggagcatattctcagagaagtccaaagcaatcacagctgagtatgtcccagattttgcaaatttcctagtaaacaagccactgccacagctgacatcaagaaggataccaccagcaacaggttggaaatagtcttgagccatttgaaactcttcatcaagaccaggaaagccactccgattgaagttttgacgccatcctctctcataaagaaatgacacaagcggactcctaaagagctcagttctagcaggcttctgttcggtatattcttttgtccctgaagtcacagtgaggtccaagaagatgtctttgctggtaaatgacttgttgcattttgaacacttgaatcctgacctataaattgctggcaagtttatgcctggtgggccttttcttatcaatgcttcgtagcaaacagggcatgcaaacacctcagtttctgaaatgctattctgctgatcttccgtttccggctcaacggcgaccgccgccgcggcagctgcggcgcggagcgaagggtacctggggcggcggggacgggggcggcaggggccagggacgacgcaggtgctgcgggggagctggagcgaggggtgcggggatgaggacgcggctgcggcggccgcccccgctcgcactagcagctccatggcgtgcagcgcagcgaccctcgaagagttcggcaggggcctcccgggctagcgaagctgcgtgcttgggttgccgagcagagcaacgggagcgctcgccttg

SEQ ID NO: 25786 - DNA, 445 bp, Setaria italica
  Peptide Sequence Number=SeqID_91760
ctcgatttcagctcccagccaaaacaggggaggagcaatttactgccgagccgccgtgggagtgcggtttgccggcaccaggcgccagctgattcctcctccggcagtccggcctcgccctcgccggcggcgtggcccgtgggggagagcagccaccagcccagctcgcgccgtcccgatctccgggcttcccttcgcgcgtgatgggagctgctgggtcgtgacctgcctgccctgtttcagctgagagatgaaacgggacgagaatcgaagttctgcgacacctgacacttctaatttaaaccgtgaattgcaatcaccatggggtctgggtcagtgactctgaagcaaaagaaacgagtgaaaaatgcaaagaacaagtacttgaaacctggtagccctggctcagattcgttatagtaggagtaccagcagggacataggg

SEQ ID NO: 25787 - DNA, 751 bp, Setaria italica
  Peptide Sequence Number=SeqID_91761
gaaaagtagctcagaacatgcagtcgccactcaggcatgatggacatgagagcaatggcatgaaagatgagaaagacatggaatcaggaagtgaagtgagccatcccgcgaagaaagcaaaattggaagtgcatgaacaagatacaaatgtaatcggaaattctgtttttcttcaacgtgcggtcatactactaattctgcaaaagataccgttgatgatatgtcagagtttcttccacaacatgaatctattcccgatataatgagtattgttgaaggtgaggcctacataagggatcctggtagagctctggcaaaacccgtaggacgaagagcaggagataagcctggccttagagtgaaaaagatcttccgaaaggaagagggaaaacaatcaactgctatggttcaaaagctacagaaagagataagggaagtggttagagatacaggcactaatatacttgagaaggatggatcttttgatgaacaactgttgactgcattccgtgcagctataggaaagtcagtggatggaacagccaaaagtactaaccaattaataagaacaaggaggtcattgcttcagaagggcaagaaacgtgagaatctgaccaaaaagttgtatggaacatccacaggaagaagaagaagtgattggcatcgtgattgggaagttgaattctggaaataccgttgctccccaggaacaaatccggaaaagattgagacactgcaatcagtactccag

SEQ ID NO: 25788 - DNA, 514 bp, Setaria italica
  Peptide Sequence Number=SeqID_91762
gaaactatctgtgctcctcagggtactagcatctgcaatagaatcatgtttaaaagcatctttggaatggcttggatatggattgtagttaaatgcttcatgtgctgtcttcaagtctagtgaagcttctgatagatcactcctagtttcagactgtacacccaccattgatacaacaagggcagtttctccctcatcagcaacagagacagataccctcccagaaaatgatgcatcggcacttgtcctatcagaatcaattacacattccccacctaggttttgcttcaagataacatctgccgcgtgtttcacttcagtagacacgcaccttgggcacagccatgtattttcagaagtcatttctggattgaaccccacgcatatagcatgataccatttatcacaggagtcacaagcaattgatgtatctaaagttgaatcatcttcagctgtcacaagtccactccgaatcttgcaatcaccatcatccaaacaaaccactgcttctgca

SEQ ID NO: 25789 - DNA, 403 bp, Setaria italica
  Peptide Sequence Number=SeqID_91763
ctacttgatcgtttgcatgaaggtgacaaggttccaatgtggaggattcgcgattggtcttcggatcaaccactgcatcgcagacggcttcggcatgatccagttcctcagagccgtagccgacgtggcacgcggcgaggccgctccggcggtgctgcccgtgtgggaacggcacctgctaatggcccgcgcgccgccgagcacaggctacgtgcatcggaagctgatgttgcttctcaaggaccctcctgccgccggcgccggcgcaacgccgccggcggcgagcgtggtgtgccggcacttcctcttcggcccggcggagatctccgcgctgcgaggccgcgtcgcggggtacgacgacctcggggcgtcgtgcacgaggttcgagctgctgacagcggcg

SEQ ID NO: 25790 - DNA, 262 bp, Setaria italica
  Peptide Sequence Number=SeqID_91764
cctgaaacaaaaaggaaaggcatttgcgtgcagaaccaacggcatccacacgatcagagcaccggcaccagccaccaagtgcattttgcatggcagagtcaccagcgaaccgtgtggtgcaggtaactgggagcaatggaggtaactaccaatggcaacaaaactgcaacggtgtataagagtgtaatatcgtcttcattgatatatcaatggaacatgtgatcggaaactctagctagtagcaaaactggcaacaattgtt

SEQ ID NO: 25791 - DNA, 621 bp, Setaria italica
  misc_feature (1)..(96): n is a, c, g, or t
  Peptide Sequence Number=SeqID_91765
nnnnnnnnnnnnnnnnnnnnnnnnnnnnnnnnnnnnnnnnnnnnnnnnnnnnnnnnnnnnnnnnnnnnnnnnnnnnnnnnnnnnnnnnnnnnnnnnaaggttcaaaggcacatggcattgcatttctgcaagtaacgtgaacaaatgaagcagtgttacagcagcatcacgtgaacacaaacattagggagcagaggtaaaattattagttagagggaggaggtacctcactagttgttagtcagatctaacagtgtctcctcaacgaggtcctccaaaaccattgagcaaactgccgcgccgagcttaaatatctctaaccgagccgtgtcagcactggccgcctctgccacctccctcttgagtatcatctccagcaatagatttctttcaatggcttcacctggaggatacttctcgagtatcgaccagttccttatgactcgccaaatctcctcatccaccgaattacttgaaccattcttgcaatccctgtgctccagagagcatgatctaccccaggggtatgcagccagttctgccatcgatgtaagctcagcaagtgcttcatttacggcgtcaaaaagaagcctctgttttgaccgccttttccctgacttc

SEQ ID NO: 25792 - DNA, 633 bp, Setaria italica
  Peptide Sequence Number=SeqID_91766
catggatcggaggcaccggaccggcaggaacggagagtttggacaagcagtgtcggacgagcaacaatggtcattcgcaaaaggccagcgccatcagtcagtttgaggcggcactcgctgacgctaatcgagctgccacagttgcgtgatggaagagatgagatgagacgagacgggaatatgggatgcaacgaacgcaaccgacaccgggagcagctagcagcggtggcacgccccacagcccccattgcatgtgcggcgacggatccggcacgttcgcggcgtggctacgtcgtcccatcggccaacgccgtgcggtgacctgcggtagcagtatgcttggacggatgggcacgtatctggatgggcacgataattggtgatgtcgaggcttttggcgcggaaagggatcggcgaacaatgggtgatggacacggccgagaaaacgcatcgtgtcgccgtcggtcgtcgctacctgctgctgctgctgccgccgccggtcgttgtattttccatgtttttccttgtccatttcctgcatgtctatcctcccgagcacgaggttgcttatttaagttgcagataacagtatgtaagaggtccccttcaacgtgaacaaaaaaaaaaaaaaaa

SEQ ID NO: 25793 - DNA, 258 bp, Setaria italica
  Peptide Sequence Number=SeqID_91767
ctctctgcagtctgcaccgcgcccgccgccgtgccggtgccggccggccgccatgaggaagccgacgaggcgctcgagcttggtaaagaagggcagtggcggcaggacgacggccgtcctgctggcaaagcaggagctggtgctgggccacggcggcggcgtcgacgcgttcgaccggctccccgacgacctcgtgctcgccgtgctcgccggggtcgcagcgtgcgccgcgggccccgccgacctcgctgcggcggg

SEQ ID NO: 25794 - DNA, 320 bp, Setaria italica
  Peptide Sequence Number=SeqID_91768
gtagatcagaattggagaaagggcagtgaacagcatttcggcatgaggagatagcggagggcgacgagagcaccctccggcgcagcagggcggcaaccgccattatatggttgtatcgtatcttcccctccctccctcactcccctccgcggcacagtacggttcaggactcgacggcggcgaggcgcccggaccagcttgattgcgcagggcaaaggaaacaacagccaatgcgctcgtgagggtaggggatggaggaggcggcggccgaggatttcgccggaaagcaaggccgcagaggaagcggagacgaaaaccat

SEQ ID NO: 25795 - DNA, 522 bp, Setaria italica
  Peptide Sequence Number=SeqID_91769
gcagttgccaggcacctgtcactcgggcccttcccttccgatgcttggttagcccgtcgtctaccacctgggcctgctgctgccccggcaaggccgcgaccgcgatcgctcggttgtcgagcacaaggttgttggtagccggcctcgctcgcgcgctgaggcctttttaacaggacctcgccgtgagcgagctcgctctctcgcccgtgcgcggcgggtagctagcctagctcggagcgagctgctccgacgacgacggccgggtagccggcggcgccgcggcgaagtatatatataaatttgggcttctcgggtatggggcggcagccgtgctgcgacaagctgggggtgaagcgggggccgtggacggcggaggaggaccggaagctgatcaacttcatcctgagcaacggccattgctgctggcgcgcggtgccgaagcttggccgggctgctgcgctgcggcaagagctgccgcctgcgctggaccaactacctccgccccgacctgaagcgcggcct

SEQ ID NO: 25796 - DNA, 440 bp, Setaria italica
  Peptide Sequence Number=SeqID_91770
gaagtagtcgtgctgctgctggtactgcgccgccgggtaccagcagcagcacgactacttctaccacccggcggcggccgccaacacgcacacggtggtgcaccacgagtacgcgagcgaccccaacagctgctccgtcatgtgaggcgttagttgcccggatgctgcgtgtttcccgtgatctgggaaagaacttcctgttgcaaaccatccgttgtcgtcgtcagttggtgcggtgacccggtgttacagtcacatgcagacactacgctagctacttcctgattccgtgtaattagtgtacagcaagaagtacaggcgtggctgcgtgaacctgtgtgtgtacgtactccagctacaagctttcctactacggcgccaagtgcaagcttgtttggaacaaagggacatggctaggacatgtgtgcaatctctagctc

SEQ ID NO: 25797 - DNA, 497 bp, Setaria italica
  Peptide Sequence Number=SeqID_91771
atgacctcagggcgctgatcaggtttgacgtttagttttataagcatcagctctctctcaacctgaggttctttagatagatcttcgacactgaggacgttgacaagcttattgagctgcttcttacccagaccttatagaggcactgccaaaaaatccacttacatctgtaaataggacagttaatggcagtttggatcaaccatccaatgctgggggtgatgtttatcctgtggaaccttatgagagcttatcgatgaaccaagtacttgatgcccattggggtgttcttgatgatgatgatgattcaactggacttcgctcacataccctctccatccttgtgaattgattgtactggtgtcctcaacattgtaacaggggtctttgctcgcaggggctacaataataacaagaagaccttagactagttaggacccaagactagaagaaaggaaaggacaatttacgacgtaattaaacaaacaagtacgtta

SEQ ID NO: 25798 - DNA, 1205 bp, Setaria italica
  Peptide Sequence Number=SeqID_91772
attgctgcagtgcagaggaacctgaggaaatttggaatcaaagaaatttgccgaacgggaaaaattgctttgagacgtgaaaagattggtgccactgcccgtttctggcgattttctgctgcttcttacccagaccttatagaggcactgccaaaaaatccacttacatctgtaaataggacagttaatggcagtttggatcaaccatccaatgctgggggtgatgtttatcctgtggaaccttatgagagcttatcgatgaaccaagtacttgatgcccattggggtgttcttgatgatgatgatgattcaactggacttcgctcacataccctctccatccttgtgaatgattgtcctggtgtcctcaacattgtaacaggggtctttgctcgcaggggctacaatatacagagccttgctgttggcccagctgagaaggaaggcatttcgcgtattacaacagtcgttcctggtactaatgaatccattgagaagttagttcagcagctttataagcttattgatgtgcatgaggttcatgacattactcacttacctttttctgaaagggagctgatgcttattaaggtttctgtaaacactgctgctcggagggagatcctagatattgctgaaatcttccgagcgaaacctgtcgatgtttctgaccacacagttacgctgcagctctctggggatcttaacaagatggttgcattacaaaggttattggagcattatggcatttgtgaggtcgccagaacaggtcgtgtggcgctggtccgcgaatccggagtggactccaagtacctccgcggcttctcgctcccgttgtagcccggcatttgtgatgatggcccagcaaagcgcgtgcctggttgctagagcagattgtgtagggaacccttgttcggttttgtgcatctgcaggacttgtttctttcatttcatttcgtcgactccttgactttctttcttaataatatgctccttggtggacgcaagctgaggttgtatggaggtgtttggttgccgcactggtaacattaacgggactgaaaataaatcacaggagcatttgaggtgggatcgctgtttacaggatttgtttggttggacaatgtaacggtattagataccggtacaactatttggtttgcaactcaggtatcggaagacaattttcaaatttaaaaaaaaaa

SEQ ID NO: 25799 - DNA, 810 bp, Setaria italica
  Peptide Sequence Number=SeqID_91773
ctgatgcttataaactaaacgtcagctctctctcaacctgaggttctttagatagatcttcgacactgaggacgttgaccatcatcatcgaggaactaagactaaaatcaagtacttggtgcatcgataagctctcataaggttcctaaagaaacaattacacccccagcattggatggttgatccaaactgccattaactgtcctatttacagatgtaagtggattttttggcagtgcctctataaggtctgggtaagaagcagcagaaaatcgccagaaacgggcagtggcaccaatcttttcacgtctcaaagcaatttttcccgttcggcaaatttctttgattccaaatttcctcaggttcctctgcactgcagcaatttttccaggatctccagctacctccagggtaagggtggtatcagatatatcaacaacttttgctctgaaaatatcaactaaaaccatgacctcagggcgctgatcaggtttgacgtttagttttataagcatcagctctctctcaacctgaggttctttagatagatcttcgacactgaggacgttgacaagcttattgagctgctcgatgacttggttgagcaccttgtcggtcccggagacgacaatggtgaagagggctttgtccttgttgagccccacggcgagcgactcgatgttgtagcctctcctggcgaagaccccggcgatccggttgatcatgccgctctcgtccccgacgaacaccgaaatcgtgtgccgccgcaccttgtctctggcggcggcggccgcgggggcgaccgccgtc

SEQ ID NO: 25800 - DNA, 480 bp, Setaria italica
  Peptide Sequence Number=SeqID_91774
cttcctcttcgagtaccgcggcgccaaggcgctcatctccgagcagttcccgcccgacgtcggcgccagcatcgcgtcgttccgggtcgactccgacgtcgtctcgctcaacgggcgggaggcgctgcaggcggacgccgaggtcggcagcgacggccgcgtccacgtggtcatccgccgctccgcgtccgcgtccaccacgggccacggcgccgcgcgctccggggtgggagggtaccgcccctacggcgcgtcgtcggcgatgactccgcgcgcgtccaacctcaccggcgtcgagatctactccctgcagacgtcgagggagcccacgccgcggggctccagcttcaaccagtccgacttctacgccatgttcaacgggagcaagatggcaagcccgctggcgcagcccggctccggcgcgcgcgcgccggggctcgacgagcaggtggccaacaagttcgcgtcgggaaagcaggg

SEQ ID NO: 25801 - DNA, 122 bp, Setaria italica
  Peptide Sequence Number=SeqID_91775
gtgaattaggaagaggcaatgtgtcaagcccaccttattcccctacataagctgaagctttgtgtccatcagtttggccacaacttcagcttatgcttagaataagccacatatgggatttt

SEQ ID NO: 25802 - DNA, 421 bp, Setaria italica
  misc_feature (19)..(19): n is a, c, g, or t
  Peptide Sequence Number=SeqID_91776
ctacatcagtagctaaganactgattaacaatcagtgcatcctcgggttgcaatcttgctgatcatgatcaaagcagaagtttaccataggagagcgagggagtatgcaactagctagcctttcatccaccgaaacaggcaatggaggcatcttgctcattattccaggaatttggctcatgctttgaagaagaccgttgatgttccttctcgtatgatgaaaaagatcaatgttgttctgagcctgtgatgtcaaaatatttatttctatttgattgagaagtcgagcgttttcttccaatatatttagcatttcacaatcaatttgagagtcaacctccagatagaaatccgttattatgtctggtgttacgaggcataaaggcagaagccatcatcatgggttaccaatcctcctgtt

SEQ ID NO: 25803 - DNA, 432 bp, Setaria italica
  Peptide Sequence Number=SeqID_91777
taggaatacttagttagaacaatactagacaatagaccaaaacgaaaatttacgacaactcccaacttcaccctcacaaacgtgtcatcaagcttcagaacaacacttgtaagttctcaaccccccttgaacctttctcccaagatgaggaaacttttgaagcaaatattacagttccattgtgatacagcccagatcagctcgacaaccagggctccataaactcattgaagtaaccatggatgccatccaaacaatgaagatgattagcaaagcttcactgaatagatctttcttctaataaagtatactcagttttgagaaacttctacactagacttcctacagaagacatgaaaaaagtacattagtgcaaattgctccttggcaacatactaatactagatggttaccacagcacacatggtacta

SEQ ID NO: 25804 - DNA, 216 bp, Setaria italica
  Peptide Sequence Number=SeqID_91778
ttagtattctgatcaaaattgagatgctgccctgtctggcagtggcctaccatactcttggctcttcttttaagtgactgctgccaagaacttgtgccataggagagcgagggagtatgcaactagctagcctttcatccaccgaaacaggcaatggaggctagctagttgcatactccctcgctctcctatggctcttcttttaagtgactgctg

SEQ ID NO: 25805 - DNA, 384 bp, Setaria italica
  Peptide Sequence Number=SeqID_91779
tccaccgaaacaggcaatggaggcatcttgctcattattccaggaatttggctcatgctttgaagaagaccgttgatgttccttctcgtatgatgaaaagatcaatgttgttctgagcctgaaaagtattgtcaagttgaattgaaacttactcctgcacagctaatcttccaacttcttatgacagtttatcatgaaaatgtgtgccaaacagacactggaatgttttgtttttctttctccactgatgagaagtgttatgagcacactgaatagtgccaactattaaccttattgtgtatgctacagatttgtggcagactaaattaagagttactcttgaccaatacacattatttttaaaaataacacttaggccttgaa

SEQ ID NO: 25806 - DNA, 633 bp, Setaria italica
  Peptide Sequence Number=SeqID_91780
ttttttttttaagtaacatccaaagtaggcttacagcattgcctctatatacacttgattggaattcggataaactcttgcagtttttaagagacacccagcacataaaggagcccagtttagagagccaggcttcatatgaattatactagatacacacagaaggttgattaccttgtagtaactgacaaaaaggctaagcttttcctgctaattattcatatcaggtttagtttctatgctacacctctgttaacatcgatcaccaggacaaaacccaaaaaagaatcaatatgtgcaaccaaggtgaggaaaactgcatattacagaaaactcgccctatctcaaattctcaatcactaatatagagcttcctgagaagtcaagctggacagagttttgaaggccatatggtgcagtggatcatgttgcttcatagctttcagacatcagaaaaggcatgatctttcttggacctatgcttctccatgcagatacccaagcacatggctcttcagatattttgatcaaactattgctgaaaattgagatgctgccctgtcaagtaactaaggaaacaaagtaaaggaaacctaaaaccaaaataaaaactaaaacttaaaagaaaacaaa

SEQ ID NO: 25807 - DNA, 1697 bp, Setaria italica
  Peptide Sequence Number=SeqID_91781
tgtaaaacttcgtcccttattcttctaaatttcttctaattctacttaattattagtagtctttaaaggtgggaggaaaactgcatattacagaaaactcgccctatctcaaattctcaatcactaatatagagcttcctgagaagtcaagctggacagagttttgaaggccatatggtgcagtggatcatgttgcttcatagctttcagacatcagaaaaggcatgatctttcttggacctatgcttctccatgcagatacccaagcacatggctcttcagatattttgatcaaactattgctgaaaattgagatgctgccctgtctggcagtggcctaccatactcttggctcttcttttaagtgactgctgccaagaacttgtgccataggagagcgagggagtatgcaactagctagcctttcatccaccgaaacaggcaatggaggcatcttgctcattattccaggaatttggctcatgctttgaagaagaccgttgatgttccttctcgtatgatgaaaaagatcaatgttgttctgagcctgtgatgtcaaaatatttatttctatttgattgagaagtcgagcgttttcttccaatatatttagcatttcacaatcaatttgagagtctccagatagaaatccgttattatgtctggtgttacgaggcataaaggcagaagctctcatatcagtttgaacaggaggattggtaacccatgatgatggctcagccattttgtcctttctatcttttatcttttttccaagatagtgttcttcaggcttacgtcgtcttgtagcttcttttctcgctgccatccattggcatctcatggcaacatctcttacagtcttgtctggtaacatggccgctatctttatgtacttcatgattcctggttcatttgcatacttgatgaggccatcattcaacatttgcagctcaggataggaccactccacagccataggtgtactatacttgaggctctggccagaagaatcagaagtcatgtttggtgaaccagtggatacaattgttgaagaagtagtgttcaacatcgccatattgccattcattccactggaagtgtccagacaaactggcatggctcctgatccactggtaattgaactcgtctgaaatgaaaccacatgctggttgcagaatgaatgcggaaatactccaaagtggttaggatctgttgacatctgcatgccaaacgaaatttcgcactcccacttcaccctcacaaacgtgtcatcaagcttcagaacaacacttgtaagttctcaacccccttgaacctttctcccaagatgaggaaacttttgaagcaaatattacagttccattgtgatacagcccagatcagctcgacaaccagggctccataaactcattgaagtaaccatggatgccatccaaacaatgaagatgattagcaaagcttcactgaatagatctttcttctaataaagtatactcagttttgagaaacttctacactagacttcctgagccgacgccaacgattcgtccgccgagctagcgggagcagaggaggcgaacgtgcagcggcgcgatcctagcgtgaatggagtgtgagctggtggtctcttctcctcctccgccgtgcccttggccttctttaaatggtggtgccgtccagctttgtgcgctcaa

SEQ ID NO: 25808 - DNA, 407 bp, Setaria italica
  Peptide Sequence Number=SeqID_91782
gcagagtgcttttggaagaacacttgcaaggataatgaaataaaagaagatttgactttatatggcttcatattaatggctatcttgacctttgttttgctactggtgtacaactgctctggcctatttattacaattcaagtaaaaatttcatctagagctcgtaaaaaggctgcaaaaaaggaaaataaatcagccgcagcacgtgaaagatggaaattagcaaaagaacttgtgctacggcatgaggtagaaatgcctgggtctatcaatacacctgagaaatcagctagagctatgaagataaacaatgataaattaacattctctggagtggtgtctctagctactgaagatagaccacaaaggccaatgcttgaagtggctttcagaggtctaacactatc

SEQ ID NO: 25809 - DNA, 301 bp, Setaria italica
  Peptide Sequence Number=SeqID_91783
cttgaaaccaagaaggcatactcacagctaccgaacagcctcgaaggctatggccaggtctttgttatgtcagagaagcagaaactggactgggcggacatgttctacctcgtggcgaggccgaatgaggcaagggacatgaggttctggcctgctcacccatcttccttcagaacgtccatagataggtactcctcagagacagcggaagtggcacgctgcttgttggagttcatggccaaggacatgggagctgattcagcatcattgttacagatgttccaaggccagccgcagggtt

SEQ ID NO: 25810 - DNA, 655 bp, Setaria italica
  Peptide Sequence Number=SeqID_91784
cggggatttattcatgctgtttacatgttgctttttcctggtgtttttggtgaatcattcaatcgacaagagactagccagatcttagtattgttctgcgaggttcatttttcaatattatacattcttcagcttgagctagtgtccagtgctctggagcgcagtggttcattaacaatggaggtactctcacagttaggtctctcaaataatgccacaacaaaggacttcgtagggataggctcaatagtgtgcttctgcgctgtgcatagtcatggttttaagatgctcttttcactatcagcagttctgcggcacacaccttctccacctgttggattcacaattcttaaggctggtttgaacaagtcagttctattatcagtttatagttcgcaaaattcgcgaaatgatgaagaccgccgtaattcacatgagaaaaaaattgcatcatatctcagtaaaattggtcagaaatttctgtcagtgtaccgttcatatggaacttatgtggcttttctgacaattcttttgactctatacttggtgacccctaattatatatcatttggttacctgtttttccttctattttggataattggaaggcagcttgtggaaaagcaaaaaggcgactgtggtttccgctaaaagt

SEQ ID NO: 25811 - DNA, 258 bp, Setaria italica
  Peptide Sequence Number=SeqID_91785
aataagcatgatctgctgttaattcagtaacgcacatccgaatgcgacaatacacagttgtataatgctgtatattgtcgcattcggatgtgcgttattgaattgtacctaaaagagctacatgaataagcatgatctgtctgttaattcagtgtgcagaatggataggatgtctctggtatctgtctgatttttattgttcataggtgtactgttgttaattggttgatgaagcagaattatccagacacttcagct

SEQ ID NO: 25812 - DNA, 609 bp, Setaria italica
  Peptide Sequence Number=SeqID_91786
gtcttgtttaagtaggtattgctgttggcaaatggggatgtaacagtggccaagcatgcatcgctccagattacatcataacaacgaaatcatttgcaccagaactggtatagatcaccatgagcattgcaaccaatgaatttatggcaacaaagccagaaattaaacttccaattgatgacccatgaataattctttggcaggttgactctttgaaaagagttctggaaaggttctatgggaaggatcctctggaatcaggggacttgtctcgtattgtgaattctaaacattttcagagattgacagaattggtagaagaaaagaaagtagctgacaagattgtgtatggcggccagactgacgagaagaaattaaaaattgctcccacaatattgttggatgttccccaggatacagcactcatgacaggggaaatatttggcccctaccttcctattgtgacggtcgaaaagatcgaagaaagcatcgactatgtcaactccaagacaaagccacttgcggcctacctcttcaccaagaacaagaagctgcagcaggacttcgtggagaacgtccctgcaggaggaatgctcgtgaacgacgtcg

SEQ ID NO: 25813 - DNA, 486 bp, Setaria italica
  Peptide Sequence Number=SeqID_91787
ttaggaatagttaccccaaggaataacaagacaactacaatagaacaagggggaaaataattttagggccccctaacccttcctattgtgacggtcgaaaagatcgaagaaagcatcgactatgtcaactccaagacaaagccacttgcggcctacctcttcaccaagaacaagaagctgcagcaggacttcgtggagaacgtccctgcaggaggaatgctcgtgaacgacgtcgcgctgcatctcacgaacccgtacctccccttcggcggcgtcggcgacagcgggacgggctgctaccacggcaagttcagcttcgactgcttcagccacaagaaggcggtcctgatccgcaggcttcggcggcgaggcggcggcgaggtacccgccctacacgccggagaagcagaagatccttaggggcctgaatcaaacggacaagacttacaatacgaccctacaatacctaggcgcttccttggggtt

SEQ ID NO: 25814 - DNA, 1976 bp, Setaria italica
  Peptide Sequence Number=SeqID_91788
tcctaattccgtttccgtctaggtaggggcgaatccggcgacctgcctgacgtgtgcgtatatataaagcgccggccctccgccgctgcggtcgctcctaccgccaccaccggaccctcttctccccgctcgccgctaagctctgctgtctccgttgccgggaagagaaggaggggaggagagaaccagaggcagaggaacgaaggggggcatggcggcggagacggtgcgggacctgcgggccagcttcgcggcggggcggacgcgcccggcgcagtggcgggcggcgcagctcaaggggatcgtcaagatgatcgacgagaaggaggccgacatcaccgccgcgctccatgacgacctcgccaagccgcacatggagtcatacctccacgagatatcgctcgcgaaatcctcgtgcaagtttgcgctcaacgggatcaagagttggatgaagccggaaaaggtacctgcgtccataactacattcccgtcctctgcgcaaatcgtcccggagcccctcggtgtggtgctcatcatctccgcatggaactaccctttcctgctctctattgacccggtcattggagcaatcgctgctggaaatgctgttgtcctgaagccatcagaaatagcgccagcaacatcggctatgtttgcaaagctgctgcctgagtatgttgatagcacatgtattaaagttgtggagggaggtgttacggaaacgaccgcactcttggaacaaagatgggataagatcttctacacaggtagcggaactgtaggacgcatagtgttggcagcagccgcaaagcatctaacccccagtggctctggagcttggtggaaaatgccctgttattgttgattctgatgttgatcttcacgttgctgttaagaggattgctgttggcaaatggggatgtaacagtggccaagcatgcatcgctccagattacatcataacaacgaaatcatttgcaccagaactggttgactctttgaaaagagttctggaaaggttctatgggaaggatcctctggaatcaggggacttgtctcgtattgtgaattctaaacattttcagagattgacagaattggtagaagaaaagaaagtagctgacaagattgtgtatggcggccagactgacgagaagaaattaaaaattgctcccacaatattgttggatgttccccaggatacagcactcatgacaggggaaatatttggcccctaccttcctattgtgacggtcgaaaagatcgaagaaagcatcgactatgtcaactccaagacaaagccacttgcggcctacctcttcaccaagaacaagaagctgcagcaggacttcgtggagaacgtccctgcaggaggaatgctcgtgaacgacgtcgcgctgcatctcacgaacccgtacctccccttcggcggcgtcggcgacagcgggacgggctgctaccacggcaagttcagcttcgactgcttcagccacaagaaggcggtcctgatccgcagcttcggcggcgaggcggcggcgaggtacccgccctacacgccggagaagcagaagatccttaggggcctgatcaacggcagcttcatcgccctcatcctggcgctcctggggttccccaggggagaggcgctagacgatgaccgcccctcccggttcagtacaggctcttgttcgtgttcgtccggtgcagagtatacaaccaccacgctgtcgaatacacagttgtataatgctgtatattgtcgcattcggatgtgcgttattgaattgtacctaaaagagctacatgaataagcatgatctgtctgttaattcagtgtgcagaatggataggatgtctccgatatctgtctgatttttattgttcataggtgtactgttgttaattggttgatgaagctgaagtgtctggataattctggaatcaatggactggagggcacaaaaccaaaaaaaaac

SEQ ID NO: 25815 - DNA, 295 bp, Setaria italica
  Peptide Sequence Number=SeqID_91789
acattgcaaagctaaatcatccaaacctctcagagctagatggctactgctcagagcatggacagtgcttgctggcatatgaattttacaagaatggatctcttcatgacatccttcacctgtcagatggcaacagcagatcgttgtcttggaatagccgtgtcaagattgcgctaggatcagcgagggcattagagtaagtcaggcagactcatcaaatgattttataattttttgaactcaatttgtgctacttttcaggtatctacatgaaacttgttcgccatctatcatc

SEQ ID NO: 25816 - DNA, 1173 bp, Setaria italica
  misc_feature (1135)..(1173): n is a, c, g, or t
  Peptide Sequence Number=SeqID_91790
acttcacagttgcaatttaatgttattgtttgttagtagtcagttggagtcaagtgtgggatataactcagtattaaaaacagtctgtcggaccttattctgatagactgcatcttgcacttagctatcttacaaaacagaagattttgggttccgtttgtgaagttttcttttgacatcctaatgcattttgaagtttgtgcacttatgaatgggcaaactttatctaaaagatggatctcttcatgacatccttcacctgtcagatggcaacagcagatcgttgtcttggaatagccgtgtcaagattgcgctaggatcagcgagggcattagagtatctacatgaaacttgttcgccatctatcatccacaagaatttcaaatcatctaacatactgttggacgatgagcttaacccccacatttcagattgtgggtttgcagacctaattcccaatcaggaactccaggaatcagatgacaactcgggatacagagctcctgaggtgaccatgtccggtcagtactctcaaaagagcgatgtttacagctttggagtcgtcatgcttgagctcctgactggtcgtaaagcattcgacagctctcaaccaaggtcccagcaatcattagtccggtgggctactctgcagctgcacgacatcgactcgctagatcagatggttgatccagcactggaggggctgtaccctgcgaaatcactctctcggtttgcagacgcaatcgctctctgtgtccagcctgagccagaattcaggccaccaatgtcggaggtcgtccagtctctggtccgtcttgtgcaacgatcaagcatgggggcggggctagcttagtagcgagaggaattcttgccggttcgatgactctggtgaccacacattctaggggaaaataatgatgtatatttcctacagtctgatgaggaaccatagaagactcggaagtcaaatacattgcagcttggcaatgctgtgacggtgtgccctgtgctgactgagaaaccagtgtcaggtgaaatatgacttttacctatgacatttcatgagtcattacttgttttgtatataaattaatcaaagcaatggcagaccttttctgcagtactgctgcatctnnnnnnnnnnnnnnnnnnnnnnnnnnnnnnnnnnnnnnn

SEQ ID NO: 25817 - DNA, 1105 bp, Setaria italica
  Peptide Sequence Number=SeqID_91791
aagctccaaagtaccagtgctgcagttgcagggattgtgatatcactggtggttgtaggtgcattggttggcttctttctgatcaagaggaaatctatgaggcatcaacagggaggtgatcctgaaaagaatgagcacctcagccctcttgcatccgggaaaattaaacaactgaggcccatccgctctatcttgctctcaccaactggaaaagagctgaagaagaatgtatcaatgaacttgaaaccaccgtcgaaaatcgagctgcacaagtccttcaacgaaaatgatcccactaacaagcctgttgcgaagaaagtaaacctctcttccatcagggcaactgcatacacggtgacagacctgcaggtagcaacggagagcttcagtgcttacaatctggtcggcgaaggctcttttggccgtgtttacagagcacagttgtctgatcagaaggttctggctgtgaagaaaatcaatttctctgccatcccagaccacccatctgatttcttcattaagttggttgccaacattgcaaagctaaatcatccaaacctctcagagctagatggctactgctcagagcatggacagtgcttgctggcatatgaattttacaagaatggatctcttcatgacatccttcacctgtcagatggcaacagcagatcgttgtcttggaatagccgtgtcaagattgcgctaggatcagcgagggcattagagtatctacatgaaacttgttcgccatctatcatccacaagaatttcaaatcatctaacatactgttggacgatgagcttaacccccacatttcagattgtgggtttgcagacctaattcccaatcaggaactccaggaatcagatgacaactcgggatacagagctcctgaggtgaccatgtccggtcaacttcttctaaaagtagtcgtattgtttttacttagttctttttggtcagaaagaagccaaccaatgcacctacaaccaccagtgatatcacaatccctgcaactgcagcactggttacttggagctttgccaccactgccaccattaccggtatccttcctcgttgatggacttacttgtttattgt

SEQ ID NO: 25818 - DNA, 326 bp, Setaria italica
  Peptide Sequence Number=SeqID_91792
ttgtccccgccgatctggtggtggcggaggcgggaggcgaaggagcgcggactcgtcgaacgccgccgggtcctcggaggcccccgcggggagttcccagggggacttgccggagccgagctcggaccacgcggtcggcagcgtggacagcatctggtcgaagaagtcgtcctgcccgccgccgccgccctgcatttcgcggccgctcggctgcatgggtgttgggtgccggctggcgaggcggctccttcttggcaagaacctgttgcagggagagggggggagaagggtaggatggtaatggcggtggtgactggtgagggggg

SEQ ID NO: 25819 - DNA, 274 bp, Setaria italica
  Peptide Sequence Number=SeqID_91793
gtagctcaacgcaatatatttgacctgacattgctacgagttagtttgccctcatacttgtcccagatggctccctaatatagtgttcaacaggaccaaatggctttttttgttagatgaaactttgaaccttttgcatcaatgggtttccatttggcagtaggttccaagaatagatataaattgagatgacattggacacctcaaacaagaatccaaagtcaagctagggaagactgtgtatcacttcacattctcagctgtgacgtaatgg

SEQ ID NO: 25820 - DNA, 1863 bp, Setaria italica
  Peptide Sequence Number=SeqID_91794
tcaggatcagttctttcacatcagatgtgttgcttttgccagcagcacttacccatgtatctttcacactgttgaataatcgatctgcatggtcaaattgtccaccctgcaatttctgattttctgtgctaaaaggaggcaacctcaagagatagaaaaggacaattccagcacttgaataatgagaaccataatgaaactttggtacgtcagggtcatcccagctatcatatctcttgcgaaattcgtcttctccttcctctgtttgacatcccataggtttatcaagcttgcgaaatgtctgtggatttctcagatctaaagtatcgctctcataatctgcgagaacccatggaaatactgggtactgtgtgagatcactataacctcgaccagcaagtgtatttagatgcatgagatattggaagttcgtaatttctccactttgccatcttttagaaaacgattttgccatgactttaaaaagacggctcccctcaccgctgtcctgtttagaggatgctgatatggttgtgtccaacatgctattccgcgggagattcatggcaataaggtttctgaaaacttcttccctctcctttttgtggaaaactagaagctcattgcaaccatccatgctgaaaatttctattgcgacagggcggagctggtaatcacgttttagtagctcatgaacactatcaagcttccacatatgccatggatgaggcagattgctgctgctgcaaagcttctccttaccccaagcacctccgttatatgcccatgctctgccaccaagaccgacctttgctgtcgcaccccatgtggaaggtgatttcagctgagattcactgcttcccattatatccttgtttacacctaaagcttgatcaatgacggagagctcatcttcactgctcttttcacaaatgcaattggaatcatcaatgtagaagttctcaataatgtataagcaaagttctcctattagaaatattccatcgcgtttatcaagacctgcaaccctttcacagttgtacttatgccttattttctcatagggttccagatagggtcggataaggtattcaccattgtcaagcaactccttttctgatttatcctccgaagtttttgcatcagtaccttttactgaaggtgccctccttggcgaactaagttcagatttaccatggtgactctctgtcatgtgaaaagaaagggaacttgattttgctccaaattccgtagcagaatgaaggctttgttcattaatgctacttttatcatcagtccagccaattggagctgaaattgtgcttcctcctttgaatatgtcgtcatcgtctttgaacgatgcaaattcagcagcatcaagatccttctgttcagtgccataatccaaaagattcaagcctgacattgtatctgacccagatgtcatcaacaagtctccatcctctttactggtcatcttagcatcatcgaatccaaggttgctggttagaacattctgaatagtatctatcttaaatttggagtgttcaagtttcttccgcattctatatggtccttcaacagcacatagcagccacgcaggttctgtggatgattgccgcatgggaaaaatacctctctcgtgaacaagttcttggagctggctttgccactcactttccccatgcaatatccatccgtatttatcttgacggattgctcttagttctgtagacatcacatcacgaaccaaatcaagattatacctccgctcatttatctgttcccagtgcctgacatctagttttacagattcccgagtatttccgtcccatctctttcctgcgcctgacttccattcct

SEQ ID NO: 25821 - DNA, 2319 bp, Setaria italica
  Peptide Sequence Number=SeqID_91795
tttttatactcccaactgaaccatggattcgctttgttgagcaaaactcttgcgtgcatgtatgtacgtgcaagcgcaaatgatctgaccgaacacaagtaaacaagggtgcgcaaattacacccagtcaaagaatgaacaacaacacttcaagggggggagggagggagagaaactgaacctaacacctctttcctttgcttccgcagccccaaacaaaacatcgagacaatacatcatcatcgtccgcctcaaaccggcaccaccaaaattaccctgtacaaactttacaaacactggcgcaccctacaaccccccagcatgaatccttttctcctcaaaaaaacaagaagagaaggtacagccatctgataattcacagtataagattatgatgtcagcgcggcgacgcctcaatggcctcatccacttcatcctttcatcgtgtgtctgttgtatttcaatttccctctggcccgaatcatcgaatggccaggtcatgggcatccaaggaaaccttcgtatactctggtagcacgctgatctgagctcttttctcaatgcacgcctatgctcatcagttctggatgagagagaccagatataatttaatcagcgctttctacatgtgcagatgaatccctaaatttgactgtcgctatgaacccttgaaactgtcgtctttcaatgaccacgaaagcaagtgaccgctggcatccccgctaagaagctgtttcaggtccggtggtatacaaagggcagtgacaggatgcttatgagacttgagcaccttctgcagaagtagcctatactctggtgtttggccattcaagctaagcccaccagaagggattgcaggcgatttgctcttgctatttactgcctcatcagacgagcagtgcaccattttccataccttaacagcgccactttgatgacctgtcacataccagttggtgtcctgccagtccgagtgtgttgtgcttgccacagataagatgaggtcagaaggaagctgtgaggtgttcaccacagcaaggcagtccccattgatgctccaaacagcaaaaagaacaccagcaccggtcagaatctcaccagtgaggttgttcacatgtagcgcagatactgatgctgggaaccttggtagctgcttcacaaagaccaagcttgtcaggtcccacaaaataacagaacagtcgtcagagcctgacacaattaatgagtaaggctggctgacatagacgcaagttatcttgcccgtgtgagcacacaaagccttctccattctcaggagacggcggatgccatccttcacaaatcgccacactgcaacaactccatcatcaccacctgtggtgagaatattgccgtcatggctcactccagtgcactgaatttgactaccaccatgaaggttttcatgtgtggacaaaagtctatcctgatcatatgtcaatattctcaagcttcggtcagggaatccccaggaaatgtattcactgtaagctattggcttgagcaagctgttagctgcggcaattaggatcttatcattgtaggagacaatctgggacactgaagatgctgtcttgcgaatctcttgttgtgtaagataggcgctgtaccgtagaggatgaggagggactttcctgtcagtccgtctttgtgggtgtggtttttggaataactgttttggggtctgaccaaaatggttgatttgtgccagtattgaagccttcatggtaggatctgatactgcatcaatatcaacattgccttcatatgtgtagtgatagaagacattgacagcatcttcagctgcctttcctctctgcttatatccaaaaataagatcaatccaatgatgtagattctcagatacataatctgactccaatgcttcccgatgcttcctaatgaattctctggtactgcctttagcccaaggtggcagaacaacatcaccaaccttctctcctgattgcttctcgcccagatccagattaaaccggttttccaaaaattcaggcaaataatagaactcagggatcagttctttcacatcagatgtgttgcttttgccagcagcacttacccatgtatctttcacactgttgaataatcgatctgcatggtcaaattgtccaccctgcaatttctgattttctgtgctaaaaggaggcaacctcaagagatagaaaaggacaattccagcacttgaataatgagaaccataatgaaactttggtacgtcagggtcatcccagtcttattctattattcttctttgttcgttaaattttcgtttcttttctt

SEQ ID NO: 25822 - DNA, 485 bp, Setaria italica
  Peptide Sequence Number=SeqID_91796
aggcgcggcggcgaggggcggggcaggagaggtcgttgacggcgagggtgtagtggggcggggacgggtgggagaatgagaaggatggcgaggcggagtccggcggcgaggaggaggacgtggacgcagacatgagcagcgccgggtccagctccgacgacaggtccttgtgaggatccatggttctctccacgcctcgcagctgagcaggcgacgacgaggacggcgcgaagcggctcagcaaatatagctcgccgctgccgtcgtcttccatttgcaaattaatcccagctcgattgcttgaacgtgttacgcatccatgcgcttgcacccacgaaatgtcgcggcacaccaccattaccttgttgccggtgccgagcttctagacctgctccgctacatggatcacgcaaatcagagcgaggggagctggcagcttcttgttagggtggtttgggtgagcaaatgggagcaagaaaaaccaa

SEQ ID NO: 25823 - DNA, 452 bp, Setaria italica
  misc_feature (354)..(354): n is a, c, g, or t
  misc_feature (411)..(411): n is a, c, g, or t
  Peptide Sequence Number=SeqID_91797
gggaggggcatctttctttcgtgcacaccttgctccttgtacaaagcccagaaggctgccagagggtagcgtttacacctccagcttggtgagtctgggacaacagcaagcaagatcagagggaggagagagatgagcagagtggagtgagaaagagattatggtggtgtaggcagctgagtgggaaggggaggagcgagagagggagcaatggtggggggatgcgccggcggcgacggcgccgccgaggggacgctcgcgcggtggcgaagggcggcggccaagcggatcggcctctcctgcgcctcgttcttctcctacgccaccgctccctccccgccttcttccaaactntctcatgctcggcactgaatgcgcctgcagacagcagtgatggagagcagcaaaagntggaacaacccaccagcaccagagtggctgacaagatcatg

SEQ ID NO: 25824 - DNA, 332 bp, Setaria italica
  Peptide Sequence Number=SeqID_91798
cagaacacgagctgcctccgttcccggaggtccacctgccgccgttccctgaggtcgacctgccgccaaagcccgagctgccagaggtgaagctgccgcctaagcccgagacccccggcgttcccgagttccacttcccagagccagatgctaagccatgattgcacgatcgggttgcgtatcggtcatgtgcgtgtatggattctgtttgtgtcatcgtgtgtacttgtgatgtcccctggacccctggtccatgtacttgatgcatgatgagagtgcttgtgtgtttatcaacaacaataagatggatatatcaatgtttttccgaaaaa

SEQ ID NO: 25825 - DNA, 460 bp, Setaria italica
  Peptide Sequence Number=SeqID_91799
gacgtggcgagcgccatccgcgcggcggcgcggacggcggggctcaccgtggccgcccgcgggaacgggcactcggtggccgggcaggccatggcggagggcgggctggtcctggacatgcgcgcgctggcgctgtcccggcgcccgcagatgcagctcgtgggttgccccggcggggggaacaacggcccctgctacgccgacgtcccaggcggcgcgctctgggaggaggtgctccactggggcgtgaagaaccacggcctcgccccggcgtcctggaccgactacctccgcctgaccgtgggcggcacgctctccaacggcggcgtgagcgggcagtccttccgctacggcccgcaggtgtccaacgtggcggagctggaggtggtcacgggcgacggcgactgccgcgtctgctcgccgtcctctcacccggacctcttcttcgcggtgctgggcg

SEQ ID NO: 25826 - DNA, 255 bp, Setaria italica
  Peptide Sequence Number=SeqID_91800
gttgagaagatgcaggcaagttagtaggggtttaaggggtaaggtccagcttctacaattctgctaagcataagagaattctgaactgctgcagtttgctgatttagagtctgtaattcttgttcctcatgccgttagtcaggagacagaagtaaacatggtttcgggctctcagtgcaccaatgccagattgctacttggccgattaaattataaggacaaactgttttagtggccttggtagcaccacattcg

SEQ ID NO: 25827 - DNA, 413 bp, Setaria italica
  Peptide Sequence Number=SeqID_91801
taagttcctagtctttcttactaatttcttgtcttaagtctattaagtagtaatttcttgaactgcttgcagtttgctgatttagagtctgtaattcttgttcctcatgccgttagtcaggagacagaagtaaacatggtttcgggctctcagtgcaccaatgccagattgctacttggccgattaaattataaggacaaactgttttagtggccttggtagcaccacatgttccaattatgttctgacctggatcttgttgtagcatactagcattacatgttactgttatgttcacttgatccttatgtatgttatataatattttgttagtttaagtttggaacagaagtggattggatgttttcttgtcaagtaacacagtacatctgtcctttcatgttgagagctaa

SEQ ID NO: 25828 - DNA, 492 bp, Setaria italica
  Peptide Sequence Number=SeqID_91802
tgatggactactacaaagaggcaccatcttcctaaacacaagctgcccggtttcttccatatcaatgtcctcctccctcatcccttgaggaagttcccagtcaaagcaatacagcaggttggccagtgcaagctccacattggcgacgcccatggccacggcagggcatgaccttcgccctgaaccgaacgggaggagctcaaaatccgagcctctgaaatcaacatggcttccctcgaaccgctcgggcctgaactcctccgggtcatcccaaatgctaggatccctccccatggcccaaacgttcacaaacactcttgtgcccggaagcacgtcgtagccgccgatcacgcacctctgcatggtttcccttgggatcaacagggtccccggtgggtgcagcctgaagttttccttcaccaccatctttaggtacctgagtttttttgacatcttcttcatccaccatcgttagggtttccacctagaccg

SEQ ID NO: 25829 - DNA, 348 bp, Setaria italica
  Peptide Sequence Number=SeqID_91803
tacctaaattaaacttagtaccccctaacttaagggggtttgccttctgctctggtagttttggtgggagttggaaaacttcaacattttcctctagtgttggcagtgataactctgtttgttgctatgaccttggtcagctgtgcgatacttcatcactgagacagcggatggggagaatagcagaaacagaagggttagatggtgtgtcattagattgtgctaatttattgaataatggaattgatttgttcttgaaacagcttattggatcttgtattgaactagttaggtcaagatctcagcatgatcgaataaatcagatggcactaaagcaacggttaagta

SEQ ID NO: 25830 - DNA, 245 bp, Setaria italica
  Peptide Sequence Number=SeqID_91804
ctttgtgggcgaggccagcctcgttccgcggcgtgtgtcgtggattctcctcgagcatgtccgcgagcttgccgtaggcagctctgaacaggctgcgccgggcaccgggcatgagcatctccgggttgacgaacaggaggtacgccatgtagttggacatctccctgctccggcgggcagcttcgcatgaggaagtcgtcccgtggaggtggaagcagaagtcggtagcgaggtgccagaggagg

SEQ ID NO: 25831 - DNA, 193 bp, Setaria italica
  Peptide Sequence Number=SeqID_91805
ggctggaataaatgtgctagttttccttgccctgttgtagggaaatgcttttgttcacgaatgttaccgtgtagccttgtatgttctgatgcttcagtgtatgcttgatggtaaatcgttgttccgttgttgcacacgttgccgtttcgtgcacaaaaaaactaactaaagagactgccaaggacacacaggg

SEQ ID NO: 25832 - DNA, 1134 bp, Setaria italica
  misc_feature (1111)..(1134): n is a, c, g, or t
  Peptide Sequence Number=SeqID_91806
ctccttccctccttccaaccccctcaatggcggcggctgctacttccttcgcctccctcgccatcgcgcgacctgcgacggcggctgcggcatccgggcagcgggccctcctcgcctccaaggcctcctcgccgcccctgtccctccgcgctgcccgcctcccctcacaggccgtctccttctccgggggcctcgcgccttccccttcccacagccgcgcgcgcttcgtcacatccgccagcgctgaacccaaggaagcagatattcagtccaaagtcacaaacaaggtctactttgacataagcattgggaatcctgtggggaagaatgttgggaggattgtcatcggcttgtttggggatgatgttccccaaacagcagagaacttccgtgctctttgcactggagagaaagggtttggatacaagggatccagtttccaccgtgtcatcaaggacttcatgattcaggggggagattttgacaagggcaatggtactggtgggaaaagcatatacgggcgcaccttcaaagatgagaacttcaaattggttcacactggacctggagtggtcagtatggctaacgctggaccaaacaccaacggcagccagtttttcatctgcactgtcaagacaccttggttggatgggaggcatgtcgtgtttggccaggttcttgaaggcatggacatcgtaaggctgatcgagtcgtcggagactgacagaggtgaccgtccgaagaagaaagtagtcatcagtgagtgcggggagcttccagtggtctaagctttacttgtcttacctcggatggaagtcggcgtttcccccacttgggttgacttgagaatatcatgatactgtgaacttatcgtgctatctcccacaagttatagagtttatttcgagttaaagctaaggtcacaaatctgaggcatactgttgctttttggctggaataaatgtgctagttttccttgccctgttgtagggaaatgcttttgttcacgaatgttaccgtgtagccttgtatgttctgatgcttcagtgtatgcttgatggtaaatcgttgttccgttgttgcaaaaaaaaaaaaaaaaaaaacaaaaacnnnnnnnnnnnnnnnnnnnnnnnn

SEQ ID NO: 25833 - DNA, 819 bp, Setaria italica
  Peptide Sequence Number=SeqID_91807
ttttttttttttttttttactaccccaaacagaaacgcaactaccacatagctccattatagaaaaatgctgaacattcaaaaattctgaatatgagatcatcctcaaaacttggaatttgggaaacaaaattctttgacagttgctctactggtgtaattattttagggatggtacacagcataaggtccagtgaaacaaaaggccatcgataaagatttatgacactctagcaccctgaagtgatttgcagaaaaccgaccctgcagaggtacgcattggatgctcaccgagaactgctacacagttatccgttgttttaagatgtggctgcacagattcccaaatcttcttcttttgtatctgatttggcgatgcaggttctgattgacgatccttttcttcttctgaaccaaaccatactctttcaccaggaacagatccttccggaggggtaagcagctcgacattctcatgcgaagcatcagaagctgccatgagcatgccatttgacttgatgccacgcatgttccttggtttgaggttagcaagaacaatcacactgctgtcctggagctcttcaatggggaggaagttgacgaggccgctgcagatggtgcgcggctccgcctcgcctacgtccacctcctcgacgtagagcgtgtcggcctccgggtgcctccacgccttcaccacccgccccacacggatgtccagcagccccgccagctcctccacggtaggctccgccttctcgtccccgcccggcgccgccggcttcgcctcctccgccgcggtctgcgtgggaggcggcgctac

SEQ ID NO: 25834 - DNA, 586 bp, Setaria italica
  Peptide Sequence Number=SeqID_91808
cacggggaggaagaggtgcgtggacgccacgcggcggagcgcgcgccagtaggtgccgtggggcgcgaacccgatggcgcggtggaacaggagcccgtacgcggactccttgacgggccggtccgcgaacgccgggctgttgaggatctcacgggccacctccgggtgcgcggccaccaccatccgggtctcgccgagagagaacgccatcagccgtctggcgcgcaggcggtccgccgccgccgcgagcttgcggtgcgtgagccccgtcatgagccacatgctcccgatcaccggcaggcccctaggccccgggatgcccgccgcgccaccggcgcgccgcgtccaccgccacctcccccacgcggggcctcccgggaagcaccagtggaggaggcaggtgacgacgcaggcggcggcgcagaccgccaggaagccggcgaggcggtacggctggtccccaccgcatttcgctgccagggacaggtacagcagccagctgccacagtcatcgggggtcgccaccatggcttctcttctctcgtgttccactccctcagtctcttcgcagaggattggaactggt

SEQ ID NO: 25835 - DNA, 519 bp, Setaria italica
  Peptide Sequence Number=SeqID_91809
ttaatctctggcagctcatcttcaatgttgagctgctcaataacctttttgaaatacaagtaatctcctgaacgatgaattatagcatcatgaacttgcaacgggtttttttctcctcgtttttaaattttgcccgcacctgatggcgggtcttagcaggcaataattgctgtatcattgcaaaatcactaccaaattgctgaagaccctggtaaaacaagtcagtatcagatttcgaccatttggctcgagtttgtatgttcatgtaggaattgtaattcaactttgttacattttgtatatggttttctgttttgtcgttgtcgaagttccttgcttcctcatgtatgcagtccaaatcatccatatcttcaagttgaaatcttgtattagaggatggtacagatggaagctctttttgcattaacatgctctctggcctcttgtaacaatctgagatgtgctgcactaagcttcattggatctatctcctcacgaggtgtttcgagttaaagtctt

SEQ ID NO: 25836 - DNA, 919 bp, Setaria italica
  Peptide Sequence Number=SeqID_91810
ttctttcgtttttttaaattttttgttcccgttcttacctttgttattggtcgggttctttagtctaggtctaattaattgtcttgttatctattgcaaatcactaccaaattgctgaagaccctggtaaaacaagtcagtatcagatttcgaccatttggctcgagtttgtatgttcatgtaggaattgtaattcaactttgttacattttgtatatggttttctgttttgtcgttgtcgaagttccttgcttcctcatgtatgcagtccaaatcatccatatcttcaagttgaaatcttgtattagaggatggtacagatggaagctcttttgcattaacatgctctctggcctcttgtaacaatctgagatgtgctgcactaagcttcattggatctatctcctcacgaggtgtttcgagtaaagtcttaacctctttcattctcttctggtgaattctatgggtaagcttcttctcaggtttttgtaccaatgcatctttcaaggttgtattccaacccccggaagacacctggcttttatctttttgaacctcctgctgctgtggctcttctacaccagcccttggctttttcgtaaacttcttcttaacaccagcaatgttgttctcaccactatcattatcttcttcaactaatgaatgttcaacgcaggcttcatcaaaacagtcaacaccagtatgcttaggtgtcccaacttttctgcaacttttccctacaccgtagtttcatagttgcaagatcttctgcatctgagaatgaactatctttggcccttcatgatcccaaatcgatgcagattccacctctgctcgctgctcacatgcctcccggcgcacggacggatttggagctggggcagccgccggagagcggcgcggcaggggcggcggacgg

SEQ ID NO: 25837 - DNA, 577 bp, Setaria italica
  Peptide Sequence Number=SeqID_91811
gtgatccagttacataaacaagtgttgatgttttttggagaatgcagtgcttgctgcttgcttgtaaaccacaaaagacaaaggaaaagatgaaaaggaagcagagagagaggggggtaactttgatgggcagcatcttccctgacctttctgtttgtctcctctacctctaccctccactcacatggatgggtgtgccaagagattatactactctcataaactattatcaacaactgttcatcagaatagtatactagtactactaagtagtggagtggcaaatgaccttttagataacataacaatggagtagtaatttggtagaaccacttaatcacggttaacaaactaatcctattgaccagacgccgacaatatagcaacctcgcacatctctaagctagttaaccttcaccatgaacagcattgatggtagcttcactactttttacttgcaccaaaaaaactagtcttcatcctaaaaaaatattaatatgtatatatcggtgaaattcccgtgtttatcttgcattaagtctaagggttagtatacagtagtatacttgtagctata

SEQ ID NO: 25838 - DNA, 336 bp, Setaria italica
  Peptide Sequence Number=SeqID_91812
aaacaaacagcggaagagtttctgcagaacctgatctccgtgacagcagcactggacgtggcggtcaccaaaatgattgatttcatcagcgggaagcgcatcactgatctctgagaactccaactgcttctccatgctgtcgtggtcggcagaaaaaactgaatatgctcatgaaatccaagatcccccctcttgctttgatacacaatactaggatacaatacaaatacaataggctgtatgctagtattgtgtatcaaagcaagagggggatcttggattgatacacaatactaggatacaatacaaatacaataggctgtatgcatgattttt

SEQ ID NO: 25839 - DNA, 496 bp, Setaria italica
  Peptide Sequence Number=SeqID_91813
taaagttaaagaaaacaaagtaagttaaggtaactagtaatacggacaatactacttgtggcttatgcttccattcaagcattgaagccagaccttatcattaatgctggcactgctggtggcttcaagaccaaaggagcaagtgttggagatgtcttcctagcttcagatgtggcattccatgacaggaggataccgatacctgtttttgacatgtatggagttggagcacggaaaacttttgcagcccctaatatcttgaaggactcaatttcaagcttggcaagttgtcgactggtgattctcttgatatgtctccccaggatgaggagatgatactgaagaatgatgctacagtcaaggatatggaggtatgcattcttctcaagcaatcagcatatgaacgaatacaggcatacagccagaaaattgttgtcatgcaaacctagcttcatttgttgaaaagcatccttcatttattctgggaccatttcta

SEQ ID NO: 25840 - DNA, 1239 bp, Setaria italica
  Peptide Sequence Number=SeqID_91814
gtttttttttttcgcctctcgcttggaaccggctcgagccccaccctgtcagcgacgacccgcctcgccgccgcgcacaatccgtctgctagggttcgagctgccggccatggcgccgccgccgccatccgaacagccggatgcccccgctgccggagccggcgccatctccaaggtcctcatcgtcatggcgatggagacggaggcgacgccgctcgtcaacaagttcaggctcgtcgaggcgcccgcccacgaatccatatttcctaaaggtgctacatggactaggttctatggaaactacaaagacctccaccttgaccttgtgatgcctggaaaggatgttgtttttggagttgacagtgttggtactgtatcggcatctcttgtggcttatgcttccattcaagcattgaagccagaccttatcattaatgctggcactgctggtggcttcaagaccaaaggagcaagtgttggagatgtcttcctagcttcagatgtggcattccatgacaggaggataccgatacctgtttttgacatgtatggagttggagcacggaaaacttttgcagcccctaatatcttgaaggaactcaatttcaagcttggcaagttgtcgactggtgattctcttgatatgtctccccaggatgaggagatgatactgaagaatgatgctacagtcaaggatatggagggagcagcagtggcgtacgtcgcagacatattctcaactccagcaatctttgtgaaagccgtgactgatatcgtggatggggagaagccaacagcggaagagtttctgcagaacctgatctccgtgacagcagcactggacgtggcggtcaccaaaatgattgatttcatcagcgggaagcgcatcactgatctctgagaactccaactgcttctccatgctgtcgtggtcggcagaaaaaactgaatatgctcatgaaatccaagatccccctcttgctttgatacacaatactaggatacaatacaaatacaataggctgtatgcatgattttttggaggggtcctgtatgtgaggtttaacattcttaacccccgtgtacaaaatgctgggcgattactctgggcgagacatagcgtcgaattttgtagaataatttgcgaggtgtactttcttgcggaaataaaacgctgggggagaactggaatcctcgtgggattagttgaagtaaaaaaaaaaaaaaaaaacaaaaaaa

SEQ ID NO: 25841 - DNA, 1306 bp, Setaria italica
  Peptide Sequence Number=SeqID_91815
aatcatgaagcaccaactctttttttttgtaacgaatgggcacgggacagtgcctatttcaccaactcttgatattatatcccttcactcgtgatggaatgttaggtgatcgggttcagcttctcatcaggcatcaatgaagtggatgtcgaaggtgttcggatggatctgccacacattcagggatgcatactcctctaggcactccttcaattgagcctcactatatccctttctggagatcaagttaagagcatgagcatatctcacatccatgctgctcgtccttgccgcttcatctctcaggatagaatatatgtcagaaatcgcatctaggccagaccgctgacggtcatctgagtataacgagtacttggacatctgcatcagtcgcagtgcttcatcaacatcgctctgagccacagtgtctgaaaatctaagccttgctaaggcaatagaaatgcggagtatgctgaggagtgtcctgatagttgtgtaggaggttggtgcatttgactttgcttcctcttggcggatgctggaatatgcagttgcgatgtattcctcgagctctcgaggaacagaaggaatgactcttctcgcagcagatatgtaggctctaagaacagatggttcaagtggtgtgaaacccagtgctggcgattcaagattttggtgcacatgaacaacatgtcttgccatctcaagatcactttccatgtctgcacgatccaggatcaaccaaaggaggtcgaaacgagacagaagtgctggaggtagatttatgttttcagctggagtcctcctcatgtcgtaccttccccatgctggatttgcagcagccagaattgcagttcgtgcattgagtgaggtggtgatgccagccttggcaatgctaactgtctgctgctccatcacctcatgaatcgctgtcctgtctgactcttccatcttgtcaaactcatctatcgcgcaaatacccatatctgccagcaccagtgctccaccctcgaggacaaactcactagtaattggatctttctgtacggcagcagtaagaccaacaccactgctcccacgtccagtggtatacactcctcttggagcaacatttatgatatgcttcagaagttgactctttgcaacaccaggatctcccatcaagcatatgtgaaggtctcctctgatcttcatgccatctgcgagcttccgatggggtgcgccaacaagcagcaacagcagtgccttttttacgtcttcatggccaaatatttcaggtgccagggaccttgccagcttactgtag

SEQ ID NO: 25842 - DNA, 463 bp, Setaria italica
  Peptide Sequence Number=SeqID_91816
gccggaaagccgtcgaggctccccggtgccgacgagttcaccccgcggcaaagctggtgttgcacgccgccgaacggccagtgggcggcgccgccattctccaatcttcagcgctgcctcgtccacttctccaagacgaccaggaaccgctgatcacctccgggcaggaagcgaaatcctcggcatcagcagacatggcgctggcaccacgggcctcggatctccagcgagtccatgtcgcttgcgggctgcggcggcgacggcggacgggaagccatgggcgtcagagcagagggaggaaggtgcaaagccgattttctggatgagggtgtttctgcaaatatttggatcgcgattattaatcgcgatccaaataagggggttttatgaaaaaataaaatatatatttacataaaccccctaggatccaaactagggggttttgtgaaaatatttggatcta

SEQ ID NO: 25843 - DNA, 456 bp, Setaria italica
  Peptide Sequence Number=SeqID_91817
tccctttgtcaaaagaacatgtcacgaccctctctaactcggtgagaaatgtgtcatcaagtggtggtggtgtggctgacctttcttgttttagggcttctgacactgaatctaggaagagtgctgagtcaccgaacctgctagcctcggctgtgacattctctgctctgcagtggggtgggtcaataccatagagtgctaagcgacggaacatgcaaccagtgccgaggtatgagggtccttgcaagccattaagagcaagcatggttccatcaaagaatacccgattgtggttgccatagcggtccgttgggtcaacattgtcgaagcgctgtgggaactggacgaaggcagtgttatcaccatctcgctggtctagcatgaagcagaccgcagaacgtagggcttgagaattgttgatgtagtggtcgcagtcaaagttgatgatgagttggg

SEQ ID NO: 25844 - DNA, 238 bp, Setaria italica
  Peptide Sequence Number=SeqID_91818
cgggcggggcagctgcgccacgggcgactgcggcggcgttctccggtgcgacggccgccccggcgccacgccagcgaccgtggtggagatgacgctgggcacccccaggtcggcgctgcacttctacgacgtgtcgctggtggacggtttcaacgcgccggtgtccatgtccccggtgggcggcggcgctgggtgcggcgtggccgggtgccaggcggacatgaacgtctgctgcccg

SEQ ID NO: 25845 - DNA, 1515 bp, Setaria italica
  Peptide Sequence Number=SeqID_91819
aaagaagagggagtcggcgtctcgttcgtcgacggcgtgggcacgtgctctgaagtgagtcgccccctcaagccgcgcgttgtacagctcgctgcgagtcgtcgccggcgccgcggatcccttgtgcgcgagcgggattttcccgcggatggcagcaaaatcttctagagcatgccttttcttcctcccccagatcccccacctcaaaagccagtccaacatctgcagcgcgagcgagcaacatgtagcaagaggagaagtaggtggcggcggcggcggcgcgtgagttgcttgctgtggcggcaacgcagaagcggaaggctgctgtggcacatgtgtggaagggctcggcgtcgtcagcatggtagctgaatggcaagcagcaacggcgcagctgcggaagggtgcggggagcggcggcggcgatggcaacataaacgcggaatggcgcggggagcgccgccgctgcgctggagcgtggtggtggatttaccgcagctgcttcaccaacgggagcaccttcttcaccggcaccttcttccccaacgctgaacatagcccgctgtctcaactctcaaccatcgatgtttcctcaatcttcagatccagctacctgctaacaaatcgttcccaatttttcttgagattgttcatagaaactagtgattgcagggattgcaatcaatttttgccgataacacatctcagtagatgcaagtacatttgatccatgattaggcccccaagatgcaagtacatttaggagatgtttgagtccagttctattagaaggtgtggtttgagtatagtttttatattgctcagttgggtgaattagttcaacttatagttgacacggatattgatagtgagtaatactttatgatcaatacttacctctattagacagtaggtctggaccatccatttgtatgtgcaagatcatgaagattaggaataaaactactgaaagaaaaccctgaacattacaacagctttgctgaatctcaacatgtttagcataagatggcattgttcgatcattattgggaaccagagtgttatttacatcatccattgtgatctatgcagctatttttttgcttatctgtaatatatcatattgctttttgcatagtgtacattttgcagggacaaatccagtctccagtcaatttcgccaggtgatgatcctgctccggacggtgatggaccaggcactcttgaagtcactgatgaaggcacagaagaaatggaggctacggatgaagctcgagtctgaagccatggagaaacttgaagattttgatccaacctgtacacagttgaagatttcatcgctgaggacaacacattacaagcatttggaaggaagattgatgaaaagttgaaggccaagatcgacacattattatacatcatctgaaccatctcatcggctacatagatagctacaaagatcagatttatccttaattaccatgtctatggataaattaaataccttgcagatag

SEQ ID NO: 25846 - DNA, 458 bp, Setaria italica
  Peptide Sequence Number=SeqID_91820
gatgatgatgaacaacactagtcccagctagctagctagaatatatagctaataaaccaccaattgtattgtgttgcatgcatgatcatcatatccatcatttgtctgcactacacttgcttatgcttttaatttgacggttctggaaatgtgatcacccgagattttgagtcatataccaactcagtactgcaatttgcacatttcacattgtttgttgtaccgccactagagactgacagtatagtcccaaagaaggaaagattttcagtaccacaattcggacatggacccttcaggattagaaagtcctggactatggctttagtcaacaattgtgctaagaacaatattagtggcagagcagcaaaccatgtgaaaatgaaaccaaaaggctctggcagctggaacacattgatctcaaagccagtcagttcatcgatgaagaagaacagtca

SEQ ID NO: 25847 - DNA, 1727 bp, Setaria italica
  misc_feature (1)..(39): n is a, c, g, or t
  Peptide Sequence Number=SeqID_91821
nnnnnnnnnnnnnnnnnnnnnnnnnnnnnnnnnnnnnnntttttttttgtctgtcgttttcccgccaccttaaacttttaagtgtaactgatcgatatgatgcatgtaacttagtaataattagtactttaaatcaaagttgagacttacgatcgcacagcgctagcgtatgtagtggactgttaatagtcactgtaccatcggcagctatacctaagcttttctatacacactctacagctctcatcgcagaccatgcatgacactctgatcctgctctggatgatcggattcttttaaccaactctactagtggttgcaggctttgcagtttcttgagtggactgcggacggccacctcgttcgaaagaatagacaatgctggagctctttgttccttgcttatgcttttaatttgacggttctggaaatgtgatcacccgagattttgagtcatataccaactcagtactgcaatttgcacatttcacattgtttgttgtaccgccactagagactgacagtatagtcccaaagaaggaaagattttcagtaccacaattcggacatggacccttcaggattagaaagtcctggactatggctttagtcaacaattgtgctaagaacaatattagtggcagagcagcaaaccatgtgaaaatgaaaccaaaaggctctggcagctggaacacattgatctcaaagccagtcagttcatcgatgaagaagaacagtcccagagcaactgtggtggctggaacatttagcaggaacatctttaagtagtcaacactcaagtcactgtacaccttacgactcctgagactgcacctgggaccttccgtcacaatgacactcccgtctttcttcaatttgagtttcaactcgtcaaattcagcatcagacatgatggggttgccagacgcataggccatggaagcctccaaaagcttttgctcatcagggcttagcatgacgacgctgcttccttcccacatgagctcctccttgaggttgtcgaactcctcgttggacatgatggccttctggtcgtagtagaaggactggagagcttgtaggaactcctgctccatctctcccatcgtcttcttctgcttcctgtcgatgctgcagtaggggaggacgttgctgtccaccacctcgtcctgctcctggacctgctggccttgctgctgctcggtggcgcggagaagacgccagcggcggcggcgcagcacgacgggcagggcacggacagggcggaagcgaggtggtgcggtggcgagggaggggaggcgggacgccgccggagatagccacaccttggacgccatggacaccgatcgagctagcagatggagaagagagcaggtgggggggagcggcgggagagggatatgggaatcgggatgtgtggcggttcctcccttggcatttggaatgacagcatgtggtggtagctcgggggactgacacctgcccactcactgctgctctgctgacagggatagagagatttttcttctctctttttttcttcaaacttgtatcgtcagcaccatcacctttcaggctttgaacaagctgcacaatatatttcacatatgccacttgaccaaattgcttgtatcacttgatccatcatcgtcgatgcgggtaatctatctgaagttctctcttttgcaagcgattttcattccccttaataggctataatgcatcgc

SEQ ID NO: 25848 - DNA, 529 bp, Setaria italica
  Peptide Sequence Number=SeqID_91822
gcagcgaaggggaagagaaagatcagggggtggcagacgagcaagccgggattctgagcgcgatggcctccaagatcggcatggccatgtctgccgccaatggcaatgggaacccacggcaccgaggacgcctccaagacgagcaatggccacgctgctgatggcagtaacggtgatgagaagggggcgacgcgaatggtggtggaatcctgaacaccatggcttccaagatcggcatggccatgtctggcgcaaatggtgacgaggaccatggcggcagtggggtcaacgccaagacgggcagcagcgacgccgttgatggcagtaaggatgaggagaagagggacgaggcgaatggtggtgggattctgatcgctgtcgcttccaagatcggcactgactgtgtcgggctccaatggcaatggcaaccacagcaccgaggacgatgccaagactagcaatggagaggaggagaaggagaaggggcataatgcgaatggtgctggaatcgttgagcagatcatctcca

SEQ ID NO: 25849 - DNA, 464 bp, Setaria italica
  Peptide Sequence Number=SeqID_91823
gagaatacagatgtcttggatccttctaaagagtacttggacttaaagtcaatgtcaaagactgtagagccatcaagttcctcaaatggaggagactcagctgtcgagaagtaccatgctgaaaaaacagaatgcttgttaggcacggaatctatcacccctgcactggataacgtccagggatcaagtcccttggcagagccatcaagttcctcaaatgggggaggagaacctgctgttgagaaaaacagcactgaaagaactgaatgcttgtcaggcatggaaactgtcacccctgcactagataatgaccagggatcaagtacctctacagcaaaagattgcttagtttctgatgtagataactcagatgaagcaaatagatcaggtaaacattttctgtgcaccatagaaaacgagagagggcaattggaggtctaattagacaagtacaacaaatagaa

SEQ ID NO: 25850 - DNA, 312 bp, Setaria italica
  Peptide Sequence Number=SeqID_91824
tccctaccgatgttaatgatgaccttgcacatattttaccatatccctagtgacccaagtgatagggcaataggggtattaccgtattaacgtatccctaccagtgctaactatgggatggcaccaatacagtttcctaacaaaaaatgaactcaagttactacacatgattgttactaaacatcattggcaactaaaataaacaaacaaatatcaagcaatataaagtcaagtaattaacacattgttaatgccatcattctagacaaagtccatctttggttatggatagcctggaccacaaggaatact

SEQ ID NO: 25851 - DNA, 1350 bp, Setaria italica
  Peptide Sequence Number=SeqID_91825
ccgtcctcccgcccccgcctccgcagccgcagccgcagccgcagccgcacccgcacccgcgcgccgctcgtcctccctgcgccgcctcggggacgccccggtcggcgatgtggcggagactagctgggaccgctcctcaggctcctctccgggtgcggcggggtctggcccacctcaccggcccccggttccgcctcctcgggggaagactctgagggccgcgacggcctcctctggtggcgcgacctcgcgcgctgccacgccggtgaggtctccgtcgccgtcgcccaggccaaccaggttctcgaggatcagtgccgcctcgagtccgccccgcccctcggcaccgtcgtcggcgtcttcgacggccacggcggctacgacgccgcccgcttcgcctgcgaccacctcttccccaacctccgagaggcgtcctccggcccggggggcgtgaccgcgaacgccatcagggaggcgttcctggctacggaggaaggcttcctcgcgctcgtgtcgcgcctgtgggaggcccagccggacatcgccacggccgggacgtgctgcctcgtcggtgtcgtgcacaacaggaccctgttcgtcgccaacctcggcgactcccgggctgttctcgggaagaaggtgggccgcaccgggcagattgccgcggagcagctgtgcagtgagcacaatgccaaccaggaggccgtcaggcaggagctcgtggctcagcacccagatgatccgcagattgttgctctcaagcatggggtctggagagtgaggggcatcatacaggtgtcgagatcgatcggtgatgtatacctgaaacatgcaaagtataacacagagcggatcaaacccaagttcaggctttctgaaccattcaccaagccattgctgagtgctgatccatctatcatctcccgcacccttcaaccaagtgacagtttcatcatatttgcgtcagatggtttgtgggaacacctgagtaatcaggatgccgttgagattgttcacagccatcaacgtgctggaagtgcaagaagactgatcaaagctgctcttcaagaagcagcacggaagcgtgagatgcgttactcggaccttacaaagatcgacaagaaggtccgcaggcatttccatgatgacattactgccatcgtcctatttataaattatgacctattaacgaaaggcgctgctcaaggacaacccctctccatcagatgcgctctagattattgacagctcctatcagcagcaagatccagagtccaatggcatgtgatcaaccggttgtgtgcagcacacaacctccggcggcagtttcctttgttttccatttttgca

SEQ ID NO: 25852 - DNA, 904 bp, Setaria italica
  Peptide Sequence Number=SeqID_91826
atagttccggaggtttccgctcctatttcacctccgccaccgggctccggcgagaacccgaggggattccagtcagtctgtagctcgagagacacatatttgacatcctatgccatggcctctttgctttcttcacaaataaaattaagcaatgcatttgttaggaggaaggttcatgagaatggacaagcaagtttgccaaggtctcttcgctggaagcctttgcaatcaggccattttgaaaatctcgtgttgcggtgtgccaagaatttgtgttgggagtcttcgcttccatatgcttccgtggaggatgatgccagcataatcaagggtccaaatgctattgaacctattgatacagaagaagctccagagattccaatcttccagagtaatgaagatgtggtggaggtgaagaacgaaccttccatgcagctaacagtgttcaaactgccaatgtggctgatagggccttctattctgttggttacgggtatagttccaactctatggctgccattgtcttcagtatttctcggtcctaacattgctggccttctatctctagttggacttgatttcattttcaacatgggagcaatgctgtttttccttatggctgatgcatgtgggcgcccagagaatactattttcgacctgaaaagacaaatcccagtttcctacaggttttggaatctggctgctagcattgcaggctttgttgctccatttgccctgttttttgcatctcataggggcactctgcagccacagctatcattcattccatttgcagtgctgcttggaccatatcttttactgctatcggtacagatgttgactgagatgcttacatggcactggaaaatcgccggtatggtggtggctcctgtggttatgaggg

SEQ ID NO: 25853 - DNA, 380 bp, Setaria italica
  Peptide Sequence Number=SeqID_91827
gcgacgcggcggcttgtggcacgtggagcgcaggccggcggaaagccacgcgcggcgccgcgcggcggtgatgcggaggcgcacgcgcaggccgggcttgtggtggtgctccatgtacctgggcccctcccccgcagtgggggaaccgggagcaagcggtggcgggtaggtggggagggggagggggagaactcagagctagggttttgggcacggaagcgccatgggagcgaggtggggagcaaaagagtggcggggaggagaggaggggaggacgaacggcgagaagagaaaatcgaccggggttagtgcccacagctgggcctgcaggacgacatggctcattttggacttcagtataccgaagagtcgagcaagag

SEQ ID NO: 25854 - DNA, 359 bp, Setaria italica
  Peptide Sequence Number=SeqID_91828
cgcctggcgccatggctcggcgcagacggggcaggagaggacgccgttagcggaggaggagcgcgcgtgggcggcgatgcaggggaagtggaaggcgtgggagcactccgccgtgaacaccgccgagctgccgccgctcttcacgccgcgggagcacacgccgcaccgggccttggacgggaggagcgaggccttgagcagcgcgaatctggaaggggatctgggcgaggccggcgccgacagcgcctggagcagcggcatccggtgcttcctggcgggcgccggcgcggagggcggcgtcacgggggcggcctccgccggctgctgcaggggcttggtccggcaccgcagggtgggcg

SEQ ID NO: 25855 - DNA, 1303 bp, Setaria italica
  Peptide Sequence Number=SeqID_91829
cgtcaagaacgtcgcgtcgcagtcgctcgaggtcaagaagctcgtctacctctacctcctccactacgccgacaagcgccaaaacgaagcccttctttccatcaacattttccagaaggatttatcagatataaacccactagtcagggcttgggccctgcgcaccatggctggcattagactgcatgtcgttgctcccctcgtcctggttgctgtcaagaaatgcgccagggatccatccgcgtatgttcgaaaatgcgctgcctatgcactttctaagctctgcgacctgcttccggaccaagctacgactttacaggagattgtagacatcttgttcgacgacaattcccctggagtagtgggagctgccgctgttgcattcaagtcggtctgtccaacttgtctaccattgctgtcgaaacatttccggaggctatgtcagacactccctgatattgaagaatggacacagatcattcttattgacatcctcttgcggtatgtaatagctaggcatggcttggtcgaggattctttactctccgcttcaaatttatctacggaggttcagggtatcacggagtcgggtcctgttgctaccatgcccacacaacctgattctatcggcaatggggtttgtggtactatatcaaacatcatgctattccggcactacatcgaagaatattcaggttttccttgacaggcaaggcaataattcgagcttttcatctgtcaccactaacatcaacgatgacgttgcacttcttttgaagtgtacatcacctcttctatggagtcgaaatagtggagtcatccttgcagcagcaagtgtgcattggatcatggctcctgttggggatctgaagagaatcattggcccgattttgtttaccctgcggtcatctcctgatgcagcatatgcgatgcttggcaacatactagtttttgctaagacaatgccatcattgtttgccccgttttatgaggacttttttataaatgcttcagatccataccagactagggctttgaagcttgaaatactgaccactattgccacagagccatccattccagccatttttgaagaatttcaggattacattaaagatccagataggaaatttgtagcagatactgttgcagctattgcgttgtgcgcccagaaacttccctctattgccaccgcttgccttgagggacttttggcacttgttattttatgaatcgtctatttgtaactcagttcactttgatggagaagatgctgttctggttcaaggcaatcttgtcaatc

SEQ ID NO: 25856 - DNA, 505 bp, Setaria italica
  Peptide Sequence Number=SeqID_91830
gccgctcactttcgccggaaaggaggtcgacgccttcctagcaagtagtagctactactggttcataaaaggtggtggtggtgggagaaggtggggtggatattcgcgtgtccggacgcgggattcggatcaggatctcggcgagatgaaggatcccggatcgggcggcgtcacgcccagcccagcagaaggggacaagaaacccatcaactcggagctgtggcatgcttgtgccgggcccctggtgtcgttgccgcccgtgggcagcctcgtcgtgtacttcccgcagggccatagcgagcaggttgctgcttcaatgcataaggagctggacacgatccccagctacccgtctctgccttctaagttgatctgcaagcttctaagtctcaccttacatgcagattctgaaaccgacgaagtttatgcccagatgacgcttcagcctgttaacaaatatgatcgagatgcaatgctggcatctgaactgggtctagaaacaaaa

SEQ ID NO: 25857 - DNA, 612 bp, Setaria italica
  Peptide Sequence Number=SeqID_91831
aagaaccgtaacgaaaggaaacttaccgacggcgagtcgatggtgcagatggtggtggagaaggagatctacgcgtgggacgacctcaacgacctcctccaccagttcctctccctcaactcgccgcgccaccacccgctcatcctccatgccttcgccgacctctggacacgcaacggcctcttctgcccgccgtccccctgccagttctagccaaacacagctagccgtccattgcacgtactacgcttgcatagtgtattaaccactactctagctagctagtctctctgtcttactgttactaccgttatgttctgccattaacggagctcgcagtcgcagctcgcgcgtgaccggggctctattaaccgaggtcccggccggcgagctgcatcttgcatagttgcatggacatggtgccaaggtcttgagcttaaactgattgtgagcaagaaagaaggctatgcacgattaactgtcgatgcttgctgtagttttcagtacaaaccagtgtaatgtggtcatttcatttcgtacatgtcatgtaatgttgtactttgcacgtactgatgcgtgctaatgatgtgtgcgtgtggcgcccaaaaaaaa

SEQ ID NO: 25858 - DNA, 282 bp, Setaria italica
  Peptide Sequence Number=SeqID_91832
ctggcgcacctcgccggcaagatgagcgtctggctgatcccgcagcacttcgccatggcgatgcaggtcccgctcacccggttcctgcagagccagctcaaaaactgggtcaccgcggccaccgccggcgtcacgctcgtcatccacgtcgtcgcaacgtacctgctcgtgcagcggttccagctcgggatcgttggggcgtcgtggccgcggatctgtcgtggtggctcgttgcgctgggccagttcttgtacgtcgttggcggcgggtgcccgctatctt

SEQ ID NO: 25859 - DNA, 416 bp, Setaria italica
  Peptide Sequence Number=SeqID_91833
ttagcctgccgctacacgcgtggcggcgcacggcggctgccggtcgctcttgcggctgggggcagttcagttggtgatgtttttgttacagagggctcaacaaatgtgaagtttcctcaggagttaatagttccaggctacacaggctctttggttatacttggcacaggttacagagataagttctttgtcaaagtatatgctgcagcattctatgtggattactcacttggcattgacactgcgcagtggaaagaaaagattggtattgagagctttgattctaactctgttttcaattccattttcaaagcaccggttgtgaaatcattgagtattatccttgttagagatgtttatggcaagacctttgtgaatgctctgaatgatgtcattgctcgccaaacaaaaaaccc

SEQ ID NO: 25860 - DNA, 875 bp, Setaria italica
  Peptide Sequence Number=SeqID_91834
cagttggtgatgtttttgttacagagggctcaacaaatgtgaagtttcctcaggagttaatagttccaggctacacaggctctttggttatacttggcacagtggaaagaaaagattggtattgagagctttgattctaactctgttttcaattccattttcaaagcaccggttgtgaaatcattgagtattatccttgttagagatgtttatggcaagacctttgtgaatgctctgaatgatgtcattgctcgccaaataaaaaacccaaatgctgaggaagcatcttccttatcaacgttccagaatacctttcttgggcgcaatctcaaacagggcacaagcatatatttaacttggcttgaaccctcaagaatgctgatctccatttcagaaaatcaagatctaagtcaagtcgatgcagagataaaatctgctactgttaattatgctctatacgatggcttctttggtaattctcccgtgtcgccttcgctgagatcatctactgctcagttgctggaagctcttcttacaaagtgacagtaaagtcatggtctgcctatacgtggttgatgggtacggatagggatgcaagtacccaatagtttgttgtcagctgataaaattacgatggcatgtcactctattttattttccctcccaaattatttacacagaatgccattctagtgcattttatcaattattttttatcgacccaatgatccaaaatatgtataacttgtatccctaggtgcggatgagtagtccctcttattcccgagaaacgcgtccgggtacccatgattaatagcctctttgatacaggaaactaatttaattctgagacagttcgtatagtaaaaaaaaaa

SEQ ID NO: 25861 - DNA, 409 bp, Setaria italica
  Peptide Sequence Number=SeqID_91835
ttgctttggccagttcaagtaaccttctggttgtagtttccttctctgatggagataccgtactagcatggagatcttccaacaatcgagcaacagtagacattgcactttcaggatcatcaacttctgctaggtcacctttttcccttgatatggaagatgatgtggatggtgaaggtgacataggttcctgagagtcctgatgttcggacgagttgaaatttgccatgattaaatcgacagctttagaccttgaattaatttataagtccggcggcggcggaggaggcggcggaggaggaggaggaggcggcggcggcggctcctctcgctccactcgctcggctcgcccactgcgctggcgccagtgtgggggtgtgtgcgcgtgcgtccgttacagagtcggaga

SEQ ID NO: 25862 - DNA, 854 bp, Setaria italica
  Peptide Sequence Number=SeqID_91836
tacctacttacttacttagacttacaacttgtacggtagtccactactctggaaggacgtgtttgttggtggccttattggatctattatggcagtgctgtgttacttgcatttctttcctcctccgtatcatgatcaaggttggggaccatatgcatacttccaaatgttggaggaacttcaagctgcccattcaagcaatgcacaaaaccaacaatctgcagctacaggtgggcaacacattgccctatccaggcaggaacatgacaggaagtcaataaacgatttggaatctggaagtgtgtagcctgcctcctgcacttaaccgaagcagcagccatgttgtacagctgatgggtacgagcaagataaatcatggcacacagaggtttatctgcagtaaaggttaaacacgacgcataaacctctgcagtaaaggttaaacacgacgcatgagcataattgccgaatgacttaagaaggaaaaggatgaccaagtcttcagaatttaattgaagaataagttgaaaagatggccgcctttcagaacttacggcgtgagtatatgcatcgggcaactatgcagcgaaaatggtttacgaaatcaacggacaaatttgcacttgtctgcaggatgagaactcttataatatagcaaactagagaatggaaacaaggtgcggaaggtgtgtgtccattttcttttgaagcatctagttacatgttacacattgtacagtgagcgtcctgccagctttttatctttcctggcaaaaagaagagagagagagaaagaaagaaatactgtctgtataactttgttttactaacttgtagatggaaactgatgcatg

SEQ ID NO: 25863 - DNA, 341 bp, Setaria italica
  Peptide Sequence Number=SeqID_91837
acagtttcctctataaagtttgacagcttattacttcacgtgaacacttaaaagagacgtgcacatatcatcatatttcaactgtgatccatgcgcactacaaaatcataatttattttcatgtacagtgatggcatgttgcatcagcagcatccccaagctcaacagtacaataaatagaaaatgacacaaacataatgaacaaattgacatgtggttcttctggatataatttgctgtcctgatttgcacacgccaaccaactactgtaactgaggcatcaagctatcaactgaaatattggtacattacatcatttgaaaagaaaccagaggatgtct

SEQ ID NO: 25864 - DNA, 287 bp, Setaria italica
  Peptide Sequence Number=SeqID_91838
atgtagaggtctgaataatgaaactccatcttccagtaaacaaactcgagctgaagattttcagggagcacatatgaacgtttttccactaccgttccatggaggactggttgatcccccttctgcatgtaggatttcagatagagagagacaaccatctggaacatcacatttttgttttgttccagctgctataccaagttttgtgcttgataccagtagtttcagaacaaatagtcaccaccagcaacctgaagtaggaacagcaaataatgcgaatgttcatc

SEQ ID NO: 25865 - DNA, 241 bp, Setaria italica
  Peptide Sequence Number=SeqID_91839
gggatcgctacgttttgctttgcttttcttgctgtgacatcacaaatctcaaaaatctaagaagaaaccagaagtacacacacctcaaccacaactagtcaactagtacggacaatccagcctgctgatgatgttgcaagcttgcaaccagtaccagcgcctgaagccctgaatactgctatgaagtttgaacttgcttggcacaagaccagttgtgttgctttatgaagacaacatgcta

SEQ ID NO: 25866 - DNA, 260 bp, Setaria italica
  Peptide Sequence Number=SeqID_91840
cgagctcgtcggaggcaaaccggattccggtggccatgtcgttacccgcgatttccctgtacactagtccgccagctgcggtctactccgagttcgacacgagctcccgtggttcgtcgccgtgcaccaccgccgcgccgccgccgccggccgcctcccaccgtctgcctgccggcggcggtggcctctcttgccttttctcctcgccagccgcggcggctgcgccgccccgcgccccggctcacgacgagctcggcgcg

SEQ ID NO: 25867 - DNA, 223 bp, Setaria italica
  Peptide Sequence Number=SeqID_91841
tcaacagcccgccctcttcttcatgttcctccacttgactctcaagtcagatgggaggcgcgtcctgtggaagacatccctgccgtattctagtatctgaacccagggaattggcgtgtcatcctgtggggtgaattttgccattgcttccttcagaactgcttcttcttcttccgtccaacagagctttgtgcgccttccgcttggtgcaacaggattggag

SEQ ID NO: 25868 - DNA, 707 bp, Setaria italica
  Peptide Sequence Number=SeqID_91842
acattatcgaggacttggaatatgtgcatgtcattctcaaaattcgtttgaactgcttgaatttggctacaccaaaagggagaaccgccggacttttgacttccctccctatcgagaagtcgtagacagcacgccacacaacccgacgaatttgaccacagactcgctcaactatccacttttgttctacaagttgggccctaaaattatctcctttcgtgcacatccgagcgtcaaatggagtgactgtgaccagggctccaggctgaacctcttctgatctgattctgatgacttgactgaatttggtgctccaattttcataccagcagcaattttttcccggacgccctgcgcttgccgtaagcatggcaaggcttgttgctttccatccagacctccgccgggctctccgatccagcccccaggaagcattgccgagctccctgcagcacgccgtactcgacgccttcgccgagcttcccgacggcggggccgaacaacctccgcttccgcggcgcgctgttgagctccacgtaccggaggaactcggcggcgccgtcggccagcctctcgaacctctgcacggttgcgcgggcgcgggatgcctcgccgcctccgcctccgccgcgggcgagcacgaggagcgccgagacgaagcacaagacggcgtgcgcgacgcggctcgggagcggcgcccgcgccag

SEQ ID NO: 25869 - DNA, 1089 bp, Setaria italica
  Peptide Sequence Number=SeqID_91843
gggtgatggtgatggaggtggcgtggttccaggtggacctggactacgagttcgacgcgccccggtggttcgacctcgcccaggaggagccgccgatggaggccgcagcggcgcaggggtggttcgcctccgcccccagctacccgccctctcccttaattgctaagatgtttgctgaagatcttggattgcaaaccgtcagaagcattgcggttacggatgctgtgcagtgttctacaacatcttatggatgttcaagtggcgctgggcaaaaaacgcatcgggttcaaggacggaaaccgtgcaatggcgcatcagaaaatgaacgccgacctggctgtcgaactaccatgaagagcacttcattgaaaggctccacactgatgaaacctacagccagccaattagccaggcaaaacagacaagtggaaccgaggaatgtgatgcagagtaaaaagtcagtgggagttacaagtgagagaagtaccataagctcaaacgattgcacttaccaatctgctaaaagacagagattagagaatgggcatcttaacaaggctgcggctactactaaccagcacgagtttattcataaaaatcatgaaaagaatgttatgaatcgtaacatggatcatcccactggtctacctaaattaaagattacaatccccagagaacctgagctggccacaaagctaagagcagagaggtcaagggttctaagatcagtgccaactaatccgaagcagttaaatccacgggctgcaccatctgcttctacagcacaagtggcgtcaactagaaaggtagttcaacctctccgggctactggtcatggtcatcagcatgcaagcagacaacgtgaccatgttgggtcaaatgttccagcatgtacatccaatcatgctaggcatgttaacaatgttgataaaaaaccagaagattgcagaggtgatctgtttaaatttaaagctcggcctgtggatagaaagatattagcgagcaaaggtgatgttggtgtatttcgatgcgcaaaaaagaatacaactgtgcctaaggaattcaacttatcatcaagcaggaagggct

SEQ ID NO: 25870 - DNA, 507 bp, Setaria italica
  Peptide Sequence Number=SeqID_91844
ccaggcatataactgagttcaaaacgaacacaggatcaacaacagaggcatccaggaaaataactgagttcgatagattaccactccattccaaaatagatagatagatcgggcagtgccatccatgaccatggctgccttacagcttgattaaaagacgaaaacactacgacttcgacacagatccataccaccacttctacatgcgccttcttcctactacgacaagacacgaccgacgagaacgaacactactgcaactactgatagatagatagatagataggtggccatgacttcatgcaagagccaggaggtgggactcggaccggatccgacgctgcgcctagtgcctgttggggcactcgcgggagatgtggccctcgccaccgcagttgtagcacccgcggccgccgccgccgccgcctccaccaccgccgtagccgccaccgcctccgccgtagccgccaccgccgccgccctgggtgcagtccctcgccaagtggc

SEQ ID NO: 25871 - DNA, 617 bp, Setaria italica
  Peptide Sequence Number=SeqID_91845
agaagctgcgcaggtgaaatttgtggaaatgagggcgatgggcttactgccagacttgattacttacagtttgttgataaagggttattgtaaggcaggcaatttgaaggaggcattttggttgcttggtgatttgagacgtgctgggttgggaccaacagttttgaaatataatattcttatggatggttattgtagattaggtgatttagaagaagctaggagattgaaagaggaaatggtagagcaaggctgtttgcctgatgtttgtacatatactactctcatgaatggttcatgtaaggtgaggaaccctgctatggcaagagagttctttgatgagatgctgagcaaaggtttgcagccagattgctttgcctataatacaaggattcgcgcagagcttgccctaggggatgcttccaacgctttccagttgagggaggcgatgatgttggaaggaatatcttctaatacagtcacatacaatattcttattgatggattgtgcaagactggaaacctgaaagatgctgaagatctgccggatgaagatggtccgtgatggtttaaagcctgactgtatcacatacacctgcttgattcatgcgcactgt

SEQ ID NO: 25872 - DNA, 407 bp, Setaria italica
  misc_feature (17)..(17): n is a, c, g, or t
  misc_feature (379)..(407): n is a, c, g, or t
  Peptide Sequence Number=SeqID_91846
tcgtggaacaacgcaanagggagggggtggctacaaggtcatactgaactgcacgaccgagctgaaggggttctacgccaagtgcggcttcgaggagaagaatgtccagatggggctctacttctgatctaggttccactttatcggatcacactccctgttttatgttttcttcaattgattactgaattcatgaagtgcgatggggaagatctgtatgtttgcctgtttcttggaataactgtttgtagttgcctgtgagctagtgatcaatgctgcttgtaacacattgcctcaacataattatttgatgtgtggcacgtttattcaatccaaaaaaaatagaataaaatcagaaagttaaaaaaaaaaaaaaaannnnnnnnnnnnnnnnnnnnnnnnnnnnn

SEQ ID NO: 25873 - DNA, 397 bp, Setaria italica
  Peptide Sequence Number=SeqID_91847
ccctgtgttgatgttcttgaaagtgtcttaacagctatttcttgtccatcctcaagcttgcccttgtatacaggcccgaaaccgccttcaccaagcttgttctaagttgagaaatcctctgtggcttttgctattgtctcataatcgtatactggcagctccagatcatccccatgatcctttccttcactcccctccttactgcgtggaccagctctccatgtgcttgatcctggttttcttgctttggttttctttgctttccaaatgaaaaaccctgcgactgctagaagaattgtcagtgcagttatgctgacaacaactgcaatcacaatattgaccttcttctttgacttgcttgttggagcgaggtcggcggcggcgagccggaagtagg

SEQ ID NO: 25874 - DNA, 218 bp, Setaria italica
  Peptide Sequence Number=SeqID_91848
cggcagcttgacataatggcggacacggccggcgccgcgtccaccatgggcatggtggagatcatctgagccatgtgtggtcgattgctcggcgctcttgcaccaccggccgctcgcttccactgctgctgatgcagcagtagcggtggcagttgagcagataggcagtgtgcgtgtgggtgagcgttgctcgatgctgccaaagaggtggtttgggc

SEQ ID NO: 25875 - DNA, 723 bp, Setaria italica
  Peptide Sequence Number=SeqID_91849
aggctttatcgttattattgtgcaatcaacataatataattagcttagggggtcagcacaccgtgatcaattgttcaaatgaagaattcatggaatacatgtagagtttaatcacagtatcagaacatagtattcttgcaggttcagcattattgcagtatggtacatttcaaatccctgcatatacatatgatgtatcgattcactaaccatcaggaaccaatactgaatcaagcaaataacaaggttccaaactttctccagagatgccaaccacctatgtcaatggtcaatcattgtatctctcataaaatgatcaaatatgatccaccttacgtctcatctgtcccgttattttaaccttatttattatttatttgttgaataaactactcagcaatctaatgtgtgcagcactttagcttcaaggcatgaattaacttatcaacacgcataagcaactgtaggcagactaatatatgtttaaaaaaagagatagtcgatacgcttttatactcactttaatttgtctagggatgtagtgcatgatcctgaagttaactaactgcataattcatgtcagtttcaaaatgataaaaccaaaatgaaataaattatacatttttcttgatcatatatataatttaccctcaactccatattaacaacatatacctgatcaatgactcgcaaaatccagaacattccttgatcgaaatacta

SEQ ID NO: 25876 - DNA, 555 bp, Setaria italica
  Peptide Sequence Number=SeqID_91850
gaaatccacgaacatcgcagcgaaagagaaagcagatcaaacccagggaggaagaaagagggagtgtcatggcttccactgtggcttccaagagggtcgtcccgctggtccgcgcgctggagaagctcctcgccgcgccgtccgcgccctttgctggctccgcactcaggccggtggcagtcgccggtggcctccgcggttacaacaccggcgctcccctccgccgttacgagggggccgagtcggacgaggacggcgtccgcgagtacgagaactgtcgcggcggccgggactacgctgtgcccagcctgttctcagatgttttccgtgatccgttcagtgcgccgcagagcctcggccgcctgctgagcctgatggacgacatggcgacggcgtcgccggtccgtgccggcgcggtgcggcgcggctggaacgcaagggaggacgaggaggcgctccacctgcgggtggacatgccggggctgggcaaggagcacgtcaaggtgtgggcggagcagaacagcctggtgatcaagggcgagggcgagaaggagg

SEQ ID NO: 25877 - DNA, 257 bp, Setaria italica
  Peptide Sequence Number=SeqID_91851
aggcgctcgcgcaggtccgccgggaaggggtgaggtacgcgaagtcttcgacgctagctggcgtttggagcgaacgaacgccgtccagtacagctgggctggtggcaacgcagacaaggtgggggagatgagaggtgatcaggtgaggcgactcaccaaccaccgaggcttgtcccagcctgcatagtggaaacgctcgctcgctgcgttcccagtaagccaggcaacaacccctcttttgcactatccgagcctgg

SEQ ID NO: 25878 - DNA, 401 bp, Setaria italica
  Peptide Sequence Number=SeqID_91852
tacgagtgcggtggatcttgcgcgagcggctgtggtggagcggcgacgcgccccgcggtcggggcgccgtcatcgggagccctccaccgccgccccccttgttgctgttgtaccccatcccctcctgccccatccccgccacggaggacggaggaatctcccccactccggatttttattgcccgccccgggctccccgcccggccgccgcggattgcggtctgggacgctgggagagagggaaggagactgggggcgcgactcacgcaggtcacatgggcggagcggcaccgcgcagcgcgatggagtgcggcctgcggcgacggcgagcggggaaatgggaattgagatgggatcggaggatgcgaatgcgatggcgagggttgggtggggtcggggag

SEQ ID NO: 25879 - DNA, 267 bp, Setaria italica
  Peptide Sequence Number=SeqID_91853
cggaaccgcggccgtgcggtcgatgaacggcgacgggaggatggccaagccggtgctgacggccgtggcccacgcagcgtagaagaagctcatggcctgcccgtcggcgacgaggtgctggcacgccgtgccgatcaccaggccgccgcacctgtaccgcgtcagctggacatggaggagcggctcgtcggcacggtacatgtccgccttgggaaacagctggtcgatgtgctccgatatggtcggggcgcgccagggcatccgcgg

SEQ ID NO: 25880 - DNA, 694 bp, Setaria italica
  Peptide Sequence Number=SeqID_91854
tttaggacgaacttagaagacctccctccgtggatttcagagctggactggaagctccaacagcttgatttgtacatgacacagagattacaaggcctaatcaaccttatgtgatagtggtaataaactagttacccgaacacgcttacatgttacattacctcttgcacactcactcataccgccacgttccaacgctacacaagaaatactgaaagaacagcgggattggatgctacaaaggactactagtaccaccacgaccaattcctccggtggcacttctagatactaaggagatcctgctgcggcggggagtcgtgtggcccttcctgctgtcgaggcggcttctccgagctcgcatcctccttcggttcaatgacgaggggggcgtcaatggacgtggacgtcgacccgggcatgtcggccaggatctgcacgacctcacgcatcgtgggccgctcgacgctctgctcggcgacgcatagcatggcgacgtagaagacgtgggtcagttcgtacaggggcaccgtcgagaggcgcgggtcggcgatcttcatcacgccctctttgctcgagccggtcaccatccgcacccactgcacaatgtcgacgccgtcgccaaactctccgaccggcttacgaccggtgatgagctctagtaagacgacgccgaagctgtagacatcgctct

SEQ ID NO: 25881 - DNA, 500 bp, Setaria italica
  Peptide Sequence Number=SeqID_91855
gctgaccttggtgtgttaattttgatcgagtctcaactatgatgttggtacttctgccggaagatatttgagatgcttttatattagtttctatgataaatagtgaatcatagtgcattgtacgacaggtgtaatatatagtcataattttcagaactttgtgtttagaatatgccctaggtactatgctcgtgcattgccacgagtaaaaataagtctatatcactttaatataagatgtgaattgtccaattacacttaggcagcaagaattgggatggcttaaaatgtcagaaatcacaacaaaccgggaaaaaaccatcagtgtgtaataacatagagcttatgaaacatttattcaagtaatcatcatagagcactggaatagaaattcaaacttaagtactaaaggttaaacggatgtggcctttgtaaatataaattttattgacatctacttgcaggaaagagaaatcacgtcaggatgcttgctttctgag

SEQ ID NO: 25882 - DNA, 408 bp, Setaria italica
  misc_feature (112)..(112): n is a, c, g, or t
  Peptide Sequence Number=SeqID_91856
gttcacagtagtagtatagatgtcaaaattgtccctatgtccactaaatttttagcacctgttggatcaacttcttttgcgagcttaattgcatcggaagtcgcaatatccnggttttgctggagatatagccagaatgatacagttgggcttatcaacatatgagagaaccatattctctatatcttgaacaatactttcaggctgtccttctacagcaacctttgtcaaccccggaagatcaatcaacgttaagttcacaaccttgggcgaatagatgctgagctgaatagggacaggagatatttctttagttttcccagtcagtctgtccgtctcatctgcaatttcttggcgaacaagggcaaagtctgaaaaccttttctttggcaaatgtaagaactctgc

SEQ ID NO: 25883 - DNA, 283 bp, Setaria italica
  Peptide Sequence Number=SeqID_91857
gggttgggggtcctcacccccggcttgagagggcagcggcgacgaggaggtgacggcgggggccgcggcggcggcgggcggcgcgggggaaggggggttgggctcgtcggcgtcatcctcctcttcctcgtcgtcgttgtacatggagaagagggcggctatgcgctctttatcggacgccatgccgaggggggagatcgagggagtgaaggttggattcggggaggatgcgaggcgaaggccgcgatggcaaggaaggagacggaggatttcgggacagcgg

SEQ ID NO: 25884 - DNA, 507 bp, Setaria italica
  Peptide Sequence Number=SeqID_91858
ctcgcacactttgtgaagacagtgatcctctggatgtgctggttataatgcaggagccggttattccaggctgtttcctacgtgccaaggccatcggccttatgcctatgattgatcagggagaggcagatgacaagatcattgctgtgtgcgccgatgatcctgaatacaagcattacaatgacatcaaggagctcccacctcaccgattggctgaaatcaggcgcttctttgaggactgtatccttttcttattcattcgttcggtattttgttccgctagctaagattctacttatttaaaaattaatgttttcatcatgcttgcgaaattctcctaaattctcctaacttatgtgcaacatgctactttgcaaaataatactgacttgactgaacattatggcctctagtgattaactgttgaacccttgtcatgtgttaactgtcttatcccaattctcaagaccatgcaaatcttagaatagtgcttcctcttagatcgaa

SEQ ID NO: 25885 - DNA, 765 bp, Setaria italica
  Peptide Sequence Number=SeqID_91859
attcttgctttttagatgacttagtgctgtttttggttaaaatgtttatgataatgaaacacacaatgtgggcaatgcttcctgtagtagtcagtgttgaaccatgtcttattgttcttcagcgtggaccatgttaccttgtgcagtcaatgtcaggctatgtcttcagtgtacattgttccttctgcaggaagaccaattcaaatcagtttacctggatttctttccctgttatccttgccaggttgttttgatggctcccgctgttgaagtcatcaaggaggcaggatcattccaaaaggttcctgccctgaatgaaaggatattgtcatccatgtccaggagagctgttgctgcgcatccttggcatgatctggagattggtcctggtgcaccgaccatattcaactgcgtaaggccatcctatgatgagatttacgcatgttttttgtgatatgttcattttgatagcgcaatagtttgtcttttcttgggaaaaagaacagaaaaaaaactccctggcatttagaccgagtttgcttctgaacttcatgcatcatctgtctctttctggtgcatcctcaaatgttttagaaaaactcgttgacgtgggtcctatttcttttccaggtcattgagatacccaggggcagcaaggtgaagtacgaacttgacaagaaaactggactgataaaggtggaccgtgtgctgtattcatcagttgtgtaccctcacaactatggattcattcctcgcacactttgt

SEQ ID NO: 25886 - DNA, 1128 bp, Setaria italica
  misc_feature (1071)..(1128): n is a, c, g, or t
  Peptide Sequence Number=SeqID_91860
ccgtggcgtgccttctagggtttccttcctccgcctccacgagcccgtcgccgctccagcccgccagatttggatctgcgaccccaaggttgttttgatggctcccgctgttgaagtcatcaaggaggcaggatcattccaaaaggttcctgccctgaatgaaaggatattgtcatccatgtccaggagagctgttgctgcgcatccttggcatgatctggagattggtcctggtgcaccgaccatattcaactgcgtcattgagatacccaggggcagcaaggtgaagtacgaacttgacaagaaaactggactgataaaggtggaccgtgtgctgtattcatcagttgtgtaccctcacaactatggattcattcctcgcacactttgtgaagacagtgatcctctggatgtgctggttataatgcaggagccggttattccaggctgtttcctacgtgccaaggccatcggccttatgcctatgattgatcagggagaggcagatgacaagatcattgctgtgtgcgccgatgatcctgaatacaagcattacaatgacatcaaggagctcccacctcaccgattggctgaaatcaggcgcttctttgaggactacaagaagaatgagaacaaggaggttgccgtgaatgactttctgcctgcaagcgctgcttatgaagccattcaacactctatggatctgtatgcgacctacatcgttgagggcctgaggaggtaggctgctgctgcttggtgcaccggtggcttgcttgaaggatgtctttcaccggtgggagctggaggatgttgacgaaaaactaagatactgctaccttatgaaacacaaatattgttattttgttgatgacctgtataccgctagtaatggaccctcaatcaaatcccctggggaatcagtagtagttgaagctggtaacacaagagtggcaaagtattctttcctggcctcagtgcctatatacgttgtacttcattggtatcgtgatattcattcctgttgtgatataattcattggctgagattgaaacttctaaaaaacaaaaaannnnnnnnnnnnnnnnnnnnnnnnnnnnnnnnnnnnnnnnnnnnnnnnnnnnnnnnnn

SEQ ID NO: 25887 - DNA, 257 bp, Setaria italica
  Peptide Sequence Number=SeqID_91861
gtggtgcggccggatacccgtccgctgctcccggagggattcttggacgccgccgccggcggccgcggcatggtcgtgccgtggagcccgcaggaccgcgtgctggagcaccccgccgtcgcgtgcttcctgacgcactgcgggtggaactccacgctcgagacggtcgccgccggcgtgccagtggtggccttcccacagtggggcgaccagtgcacggacgccaagttcctcgtcgatgagctcaggatgggcgt

SEQ ID NO: 25888 - DNA, 695 bp, Setaria italica
  misc_feature (637)..(695): n is a, c, g, or t
  Peptide Sequence Number=SeqID_91862
gaacaaggacagacagaggcctgcctacctctaccctgctcgcacaatgcacatcttgtatcttcagtggagatcggttatctcccggatggctgcggcgaaggagcacgagatggagatcggttatccgacggacgtgaagcacgtcgcgcacatcggctgggatagcgcggcgggcaatgcatctccgagctggatgaacaacatcatggctgcccccgacatctcgtcgctgggcaacttcgcagcatcaacagggacctcctgggcttctcaagatttcgacccgcagccattgggcacaccggctttcggcgcggttgcagagagcaccggccggcaggacacggctacgtgcccggacgttccaaagccgccgaggaaggcgagggggaagaagccggaggacggttcaccggcggcgccgccgacgtccacggacgagttggcgccaccaccgccagcagccgccgaggctgaggctgccgtcggcgttgctgcagatggcacgcaatgatccaaaaaccgtgttccggtcttccgtgttgttgtgtttgtgtaggaaatggtacaacgattgtttgtctcgactttgtttactgggattggattgcggatgaaaatggaatgaatgacnnnnnnnnnnnnnnnnnnnnnnnnnnnnnnnnnnnnnnnnnnnnnnnnnnnnnnnnnnn

SEQ ID NO: 25889 - DNA, 275 bp, Setaria italica
  Peptide Sequence Number=SeqID_91863
tcttaattatcccaacatgcccaatgctaaggtccacattgggttttactcttcttacaataatacacttttacgtccagccatcacgaatgctgttcgcaaggcaaggaagttgcatggagattgtgacataattgttacagggcactcgatgggaggagcgattgcttctttttgtgcgcttgatcttgccatcagctttggaagtgacaatgttcatctgatgagtttcggtcaaccacgtttttggcaaaattaggtaggtctaaaaagta

SEQ ID NO: 25890 - DNA, 321 bp, Setaria italica
  Peptide Sequence Number=SeqID_91864
ggcggcagggaacgagcaaaggtctacaaggctatcacggaagcagtactctttcgtgtcggactctgaagaagataaagagaaggataagctggttgagagtgtcctgggcagtctgcaaaaggcgcagggttcaaagttgcgaaattgaagttttgttatatgcaaaaatggtgatttgcttcttttggcacccaattgcagctgttgtcctgacatcattctgaaacctgtcatggtccttggtcgtttctgaaacaaaggttcaccgtttgtggtcaaactctagccaagcagcataacctgctgcttgctgaagaa

SEQ ID NO: 25891 - DNA, 532 bp, Setaria italica
  Peptide Sequence Number=SeqID_91865
aattaacaaatagaaatcaactttgtcacttcttcagagaacacaggaagcacttgagaatgagatagaaaaaatcatggcaattggaaaagaagcaactgatgattttgatgtccatgatgatgagtggagtgggtcagaccatctcgaggaacctattgaagaagtaaatgaaaggataaaacgtcttgagtttagattgggggagcatcagcactgatcaaggagaaggcttcaagaatacatgaactcgaagcaacctcaattgagaataccaacctgctattgttgcaatctgaactagatcaactgtaccaggagaagatggacgcagagattcggtgcaccatccagacaagagcttatcaagcctcagtaactttgcccgaggatcaaatggctctatacgaagcgcaaaagtctctatctgaagactacaagcagctcgcacttaaactccgacacaccgaaaacagagcaacggtgttagaaggaagtaattaggtactaagtaagtaaagtacttaactaa

SEQ ID NO: 25892 - DNA, 354 bp, Setaria italica
  Peptide Sequence Number=SeqID_91866
tagaaatagcttactttacttccaatttgcaagttacagtatatcctttcaccagtctgcatagaaacaagtcgacatatggagcagcagcttactagagcagacgacaccaatttagccatttatcggcacgcagcagcaccaaatcttacaattggtcctataaagaaagatggtagatgagatacccatggggattgggaacggctagacttgcgagactcttcgttcctctctacgggaggcggccgcggttgaggatgccgagggtgtggcgcgcggcgtcgaggaggtcccggatgttgtggagcgacctctcctcggcgccaaagatgaagatggcgcggcactccg

SEQ ID NO: 25893 - DNA, 304 bp, Setaria italica
  Peptide Sequence Number=SeqID_91867
ttaaggttccttaaggttcgtacaagacgaggctgccgtcggcgaccggctgcaaccccttcaagccccggtcgtcacagcggcaaagcgagcagcagcggcgggaggaggaggaagacgaggtggtgtcgctgaagctgcttctccggctgacccagaacgtgctggagccggagcagtactacgagtggacgacgagctacgtggacgagagcagaatctacggctgggacaaggaggccaacgagctggcggaggcgctcgtcgcccccgacgacggcgagagcctgttccgggcggcggg

SEQ ID NO: 25894 - DNA, 304 bp, Setaria italica
  misc_feature (1)..(36): n is a, c, g, or t
  Peptide Sequence Number=SeqID_91868
nnnnnnnnnnnnnnnnnnnnnnnnnnnnnnnnnnnnttttttttttttttatttaacaaaattcgtccacgtttaacccatttctttagtcagtgaagaacgtggttacaagatctccatcaaacaagctcaatcggtgtctaacctaaagtatactttcaaaaaggaaagaattattatttaatctacaagcaatcagcaatcgaagaatcaatttctattgtgctgtactcgtgtcctatgctatgattgcctcagcgacaccaggtacgctggcagccaactagtgcgactaggaggctca

SEQ ID NO: 25895 - DNA, 469 bp, Setaria italica
  Peptide Sequence Number=SeqID_91869
aattatgaagattgccaattgattcaggcagttcctccagaccaatattccatgagagatccagggtctgcaggtttggtagatgacaggttgatatgggcagtgacaagctgcttgaatgatgtgacaaaataagaaattgaagttctttaaggctaccaattgatgctggtatttctggtagactactacaatgagacatattcaatgtatgcaggcgtgttatgcggcatattgagtctgggattgacttgagatcattgcattgtgataaattcaggtgcaataagtttgagaggtttccaatatttttgggcaatgattggagaattccacactgagaaaggatcaaatattgcaatttttggaggttgcatatagcatcaggaagactttcgagcttaccacaacctttaaaattcaaggtctgcaagctttggagttcaccaatggagtttggtaatgtctc

SEQ ID NO: 25896 - DNA, 762 bp, Setaria italica
  Peptide Sequence Number=SeqID_91870
cagtgcagcagagtgaacacccactggcaaaagcgatagtggaacacgccaaaaagttacatccagaagaaaaccacatttggcctgaagtaagggatttcatttcagtaaccgggcatggtgtcaaggcagaagttagtgacaagagtgtcattgtgggcaacaagagctttatgttgtcatcagacattgatatccccttagaagcttcggaaattctcatggaagaagaggagaaggcaaggacagggattattgtggctatggatcaagaagttgtgggcataatctctgtatctgaccctataaaaccaaatgcccatgaagtgatatcatacctcaaatccatgaatgtggagagcataatggtgaccggggataactgggggactgctaatgccattggcaaagaggttggcattgaaaagatcattgctgaagcaaaaccagagcagaaggctgagaaggtgaaggaacttcagttgtctggaaaaaccgtggcgatggttggtgatggaataaacgactccccagcacttgtgtcagctgatgtaggtctggcaattggtgcaggaacagatgtcgccattgaagcggccgacattgtcctcatgaagagcaacttggaggatgtggtcactgctatcgatctttccaggaagacgttcttccgcattcgaatgaactatgtctgggctctcggctacaacatcatcggcataccaatagctgcgggggtgctcttcccatcgtcccggttcc

SEQ ID NO: 25897 - DNA, 335 bp, Setaria italica
  Peptide Sequence Number=SeqID_91871
gccccttccttcttcctcctcgccgcatctgctgctgcaattccttttcccccaccccaccaactcccctccccccactctgtaagtggccgcgcaggaggaggagggggaggaggaggagacgaggagctcgtcgtggtcaagccgaaaggcgtttgcttcccttccctgccctgcaagtggccgccagggaataatcaaccgatacgcagttggggagctccatcaaattcaaattcatcctccgcacgcccggccaataggatcggacgagggaccggaaagcagattggattggattccctcaggaaccaaagcaatggatgtcaacgccg

SEQ ID NO: 25898 - DNA, 515 bp, Setaria italica
  Peptide Sequence Number=SeqID_91872
ttctggggcagcggcaccgggtgggcgcccgcgcaggcggtcggcgcctggctctccgagcgcccccgctacgactactggagcaacagctgctacggcggcatgtgcggccactacacgcagatcatgtggcggagcacgcggcgggtgggctgcgccatggtcacctgctacaacggccggggaaccttcatcacctgcaactacgacccgccggggaactacgtcggcgtgcgcccgtactgagcggcggctactggttaaccggtggccgggcgccggtgaacgatcacctactacctcttcttccatgccactatcgccttgatccgcggggccaccctccgcacggctgctagcgagctagctggccggcatgctgctgcagcctggctctcgctgcccaccattaattcgttgtcacgacattggtcgagatgctacaagtgtacaaaaatgcatcattatttgttacggtactaccatgcattactatttactttcttcttcttttt

SEQ ID NO: 25899 - DNA, 218 bp, Setaria italica
  Peptide Sequence Number=SeqID_91873
gcacgtcgcacatacggagtagcgagtagaacatcaacttacacgctgcgatcgaccaccgtataaaaaatgatcgttttattcgcgtgccatgtgtaccagaggtctcgtgggaggtgtgcgccaggaacgcggcgacctcccacttgcgcgcggcggcgccgcccgtggcgccgaaggccgggaacgcgcgcgccgcggcgacgaaggcgtcgtag

SEQ ID NO: 25900 - DNA, 657 bp, Setaria italica
  Peptide Sequence Number=SeqID_91874
acgccgccagcttccgggcctgcgtgcccctcgccacgcacgccgacgtcgagccctacattgcgcgcatcgccgacggcgacacctcgccggtcctcaccgccaggcccatcacctccatctccctcagctccggcaccacgcaggggaagcgcaagtacctgcccttcaaccaggagctcgtcaagtccaccatgcagatataccggacctcctacgccttcaggaacagagcgttccccgtcgaggacggcaaggcgctgcagttcatctacggcatccggcagttcacgaccaagggcgggctgacggcgacgacggccaccaccaacgtgtaccggagcgaggagttcatccccaccatgcgcgccatccagtcgcaggcgtgcagcccggacgcggtgatcttcggcccggacttcgcgcagtcgctctactgccacctcctctgcgggctcctcttcgccgacgaggtccgcatcgtctccgccaccttcgcgcacagcgtcgtgctcgccttccagaccttcgagcgcgtctgggaggagctctgcgccgacatccgcgccggcgcgctgtcggcaacgcgggtcacgagccccgccgtccggagggccgtctccgcgctcctccccgcgcccaacccggcgctcgccg

SEQ ID NO: 25901 - DNA, 372 bp, Setaria italica
  Peptide Sequence Number=SeqID_91875
cgccaccgcgccggcgccgccgacgttggtgatgagcacgagctcgaagtagtcgtgcccgctgatcccgaacctgatcccgccggaccggctgcacgggaccctccggtagttgacggggacgatgccggcctggtacacgccgatggtctcccacgccggctgcgacatgtcgaagtgctgccgcggcgagttgcaccacccgctggggtcgccgtagttgggcgggcagaagttggtcgccgtgacggtcaccgacggcgaccccggcttgcagtactgcgtccgcgacgcgtcgcaggcgacgatgaagcacgcgccgcaggaggcgccgtcgccgtagagcgccgtgctcagcgccgtcgtctgccg

SEQ ID NO: 25902 - DNA, 316 bp, Setaria italica
  Peptide Sequence Number=SeqID_91876
ttgatagactagatttcctatcagaaacaagatcttcatcagcatttgtattgttagccacttctttgtgctcttcctgtagtggacctccaaaatcatctaggacaggcatatcatcctcttcacttgtttccagattccccttggcataaggagtgttgtcatccccactctctgcatccatgaagtcatcaaaagtttcagatgaagagtgaagcttgctaatttgatcacgcaattcttgcacgtcttcttcgtcaacatccatttcttcctctgaatcaacttctatgtgaggcaagtattagagagcgta

SEQ ID NO: 25903 - DNA, 199 bp, Setaria italica
  Peptide Sequence Number=SeqID_91877
cgtccctccagcgcgtgcggctggggagcaacatgctctccgggcccatcccgccgtcgctgggtggcatcgccgcgctgacgctgctggacgtgtcaaacaacgcgctcaccggcagcatccctgcgacgctcgcgcagtgcaagcagctcagcctcatcgtcctcagccacaccggctggtccggggccagtcccag

SEQ ID NO: 25904 - DNA, 259 bp, Setaria italica
  Peptide Sequence Number=SeqID_91878
cgcctcccgcgcgcaggggtgagtcctcggcgccggccgattggaggagctgggcgtcgaccagaacgaggagctgcgccagagcgggcgccagcgcgaggagaggatggcggtgcgcgcgacgtccttggcggggaggcgcgagacgacgttgcggtggatctggtccgggagggcgctgaggctgtcctcggagccgccaccgggggctgaagagtcggcagagagggaggcggtggcggagacgggcgggctgggg

SEQ ID NO: 25905 - DNA, 310 bp, Setaria italica
  Peptide Sequence Number=SeqID_91879
acagcttcctgatctcccctgctttaggttgcagcggcacgcacaagcaggcagcggcagcagcagctaagctccagcagaacagctctcggatctcccgtgctttaggttgcagtgctactttaggttccagcagcacgcaccagtaggcaacgggagcggcagtaccagctatgatccagcggaacagcatcggatcccctgctttacgttgttcgcgaacagtcgccagtttcacctggcgcccctcatggtcgtccttttcgttgtgacttctcttggaacttcccctccttaggattttaggtgt

SEQ ID NO: 25906 - DNA, 238 bp, Setaria italica
  Peptide Sequence Number=SeqID_91880
cgagttcctcccttgtgtccagaagcacctcgatcccaaggtagcagctaggaacgaagagtatagtgtagtggtgcagcaatggcgcagccgcagccgagaagaggcgaagatgaggggctgcagcagcaggggcagggcaaggccccggcggtggcgcagcaggagcccatcaagtacggcgacgcgttcgccgtgaagggcgagctggcggcgcagcccatagcgccgcgcgacg

SEQ ID NO: 25907 - DNA, 358 bp, Setaria italica
  Peptide Sequence Number=SeqID_91881
tctgccgtcgacgttgccgagcttacccccggagatggtgccgaattacggagcggtaaagccacggcccgcggcctttcgttcccgccggcgtggtcacgtgatgggcagcgtggtaattatggcgccctcccccatcgtcctccctcttttcggggccacgccggccgcggcctcggaagccgcgccggagcgcgaggaggagacgggggatgttgctttcgcgggaatctcgaggctggtgtgttggtggctggtttggttagcaagaagtacgtgcggagcggattgggcgcggcccgcggatggcgccgcggaggtcgaggctgggtctgggtgggtggccggccgcggggat

SEQ ID NO: 25908 - DNA, 545 bp, Setaria italica
  Peptide Sequence Number=SeqID_91882
gtggatgcgtctctgatattagttgcatgaagccatgaactgtctctgtcaggttccagaaagtaatgctaccatctttatagtggctagcattgatgataatatgccgcagcaccagaactggtgatgcctgtggaaccaacaaggcaacatcaaaccacaatcgagaaggcaacagaagagcacggagcacaaccgttgcgtctgagcaagcaacaacaacaaagcatacggtcaacctaagaaccggatgcttcaaaagaaatgctgtaacagaaaggtaacgccagtcattttccatgtgatccataacacccagatttggctgcacagcagaggaacttccttcctcaccactctgttttatatggccagctttcaacctgttcctggtaagctttggtggcatgtgggtagttagccattgaaatgacatggccaaatcaccactttccaagtttttggagctttgcttggagtcaacatctaagccattcagacatacttgtccattgtggcgaagcccgggtggaaggcgagcccca

SEQ ID NO: 25909 - DNA, 598 bp, Setaria italica
  Peptide Sequence Number=SeqID_91883
agaggactttgataagtgcttcagcttgccacacttgagagatgtgattgatgtggaaccaaggccaacaactttttctctgaagagcaggattccgcttgagaatgtgaatggttcgatgcaagaatcatggaatggctatgtgaacgatgatgacagagcacttctgaaggttattaagtttgcctcaccaacatctgctggagctgattgcattgaccctgattgtagctgggttgaacaatgggtgcaccgtgctggtccacgtaaacaaatatatttcgagcctcaatatgtaaaggctgggattgtaacatgtggtgggctttgccctggtctcaatgacgtcattcggcagattgtgcttacacttgaaaaatatggggtgaaaacattgttgggatacagcatggattccgtggattttttgaggatcacttatcagaagtgccactttctaggcatgtagtccaaaatatcaatcttgctggtggtagcttcttaggagtttctcgtggtggtgcaaacatttcagacattgttgacagtattcaggccaggaggcttgacatgctctttgtactaggtggaaatggaa

SEQ ID NO: 25910 - DNA, 413 bp, Setaria italica
  Peptide Sequence Number=SeqID_91884
taatttaagtaattcttttgaaggaaatttctgagttggcatgcccgaatgatggttttcttgaccagttgaaattgtttgaagaaatgggcttcaaagtcgatacttcaagtcctttgtacaagagattccgcttaaaattattaggtcaatcctacaaatttggggagaaaataggcagctatatgtttgaagatgaccctggcctttctccactacctggctcttgtcaagatccttcaaagacagggcaacataaaactgcttaccgctgcaggaaatgcaggagaattattgctgtggaggacaatgttataagtcatcttcctggtgaaggcgaatcttgctttgactggaaccgaaggaagagtggtcattcatacagcaacaaagaacaagattgctcgtcttta

SEQ ID NO: 25911 - DNA, 770 bp, Setaria italica
  Peptide Sequence Number=SeqID_91885
catgagatcagagcagaaacctctggaagaagcattagaatctttgaaggaaatttctgagttggcatgcccgaatgatggttttcttgaccaggtcaatcctacaaatttggggagaaaataggcagctatatgtttgaagatgaccctggcctttctccactacctggctcttgtcaagatccttcaaagacagggcaacataaaactgcttaccgctgcaggaaatgcaggagaattattgctgtggaggacaatgttataagtcatcttcctggtgaaggcgaatcttgctttgactggaaccgaaggaagagtggtcattcatacagcaacaaagaacaagattgctcgtctttatttatcgagcctctgaaatggatgactccagtcgaagagggtgctttggaggggaagctatcatgcatccactgcggagctcggttaggatacttcaactggtcaggaatccagtgcaactgtggcagctgggttactcctgccttccaaattgttaagagcaaagttgatatcagcaccatctagacattgggaacggcctgcagagcgaccaaaccattggtgaagtttgagggataatgaggagtgtgacaatactggcaccttgctgatggtggcttcggcttaaggtttggtgtacaatatattcacatacatatagtgaagcaatagcatgttatcagaagctgtgtgcagcaaagattgtacaaaattacgcatttgatgttgtagcaacagattttgctgtg

SEQ ID NO: 25912 - DNA, 504 bp, Setaria italica
  Peptide Sequence Number=SeqID_91886
gcggcggcggcggcgcgttgggtccgcaccttggcgggcgccgcggcccgcttcggcggcgcgtcgggggcatcggcgcggaagtagttgttcttgaggaagatgagctcgccggactccttcatgcgagccaggtgcgccgtcagcagcgacgcgtgcgcgggcgggagctcgccgtacttgccctcgatgtacctggagatggccgacttgttcgacccgttcttgtcgcccagcccctcgatcgccgccaggatcatctctgggtagggcgggagcggggacggcttggcggcttcctcggtggccatggcgacggcgacgacggcgacggaggcgagcaggacgcgatgcggtggtggggaatggaattattttcctcggaggaggatataaaagaagcgaggcggatttggatcaggatagataagaaacggggaggaggagggaggggagccgcgcctccgtttctttactattttttccccttggtttttcggtttg

SEQ ID NO: 25913 - DNA, 328 bp, Setaria italica
  Peptide Sequence Number=SeqID_91887
tagttgctgatcatatgaaaagtgcctaagtacactgatgtaaaattgcaggcctccttacttggcatccgaatcaaatcgctatgccgaatgcctgtgagatcaaccaaacttcctttgccatggcattgatagttactccttagttcgtcattgcgaaggtagctgaactgacgtgtagaagtgaggggagccatcatcccagactgctttgcaagatcagatggtatctgccctttcagctggttaccacttaggtccaaccataacagactcctgcagtcacccagctctggtggtatcggcccagtgaaggagttattcccca

SEQ ID NO: 25914 - DNA, 241 bp, Setaria italica
  Peptide Sequence Number=SeqID_91888
gcacgggtgctggctgctggccggcgacagatccggccgccgcgaacgcagacggctcggtgctgcggcctgcggccaccctcccagcctcgccgcggctgccctctcccgtcatggagacctcgcggcagcgtctgctcgaggagggaggccggtcgtccggcgtcggcggccggcctggatctgctgcaatggccccatgctgcgcggccggcccggggctgtggctacgcaccctgcg

SEQ ID NO: 25915 - DNA, 251 bp, Setaria italica
  Peptide Sequence Number=SeqID_91889
gccattcatcagcatcattcagttgggcgtcgttgagcgtggccggtgagcgcgcacctgtgcttcaggtttatttgcagttggtttccatggggagatctccttgctgcgacgagagtggcctcaagaagggcccgtggacgccggaggaggacgagaagctgcttcagtacatccagaagaacggccatggcagctggaggaccctcccgaggctcgccgggctgaacagatgcggcaagagctgccgg

SEQ ID NO: 25916 - DNA, 289 bp, Setaria italica
  misc_feature (231)..(231): n is a, c, g, or t
  misc_feature (277)..(277): n is a, c, g, or t
  Peptide Sequence Number=SeqID_91890
acgaggtccaccacctcaccgtcccggacatcctcgccgtccttctccaccttgatgaactcgtagtagcacatgttcggcagcagcgtgtacgccacgtcctccggccggtccagcggcctgaggttgataccgaagtagcactcggacgacgcgtacatcgtcgacactagcggcaggccgccgccgtagaactccagcagcgggatgtactgcgccatggaccccgtnacgattacgtcgatgtacttggtcctcggccacagccgccgcacgntgcccctcagac

SEQ ID NO: 25917 - DNA, 724 bp, Setaria italica
  Peptide Sequence Number=SeqID_91891
cggtcggcggcgcggccctggcggtagacgctgttgagggcctcctccacggcgaggcagcagtcttcgaacaccgacgccggcacgggcgtcgcaccgccgccgcggagctcccagaagagcacgtagtggcccgggatggtcgccgcgtcggcgtagctcgtgtactcgacgagcgacgcgccgaagggggccaggtgctgaaccgcgccggccactgccgcgtgcagctccgcctcgtcggtcttgtccgagtcgatgctcagcaccacgttgtttcggcgcacgaagttgaacatgggcgcttggttcttgaacccggccacgcgcagcacgtcgcccacgcgataccggtacagcccggagtaggtggtgaggacgagctcgtactcgtggccgagcttgacgtcgacgaggttcacgaggtcgcagggctggggctcggcggcggggctgccgccggaggaggggacggggaggaactcgaagtagcccatggtggggatgagggtgtaggcgacgtcgctgggcttgcacatcgggttgaggttgatgccgaagtagcactcggaggaggcgtacatggtgcaggtcagcggcaggccgccgccgtagaactccagcgtggggatgtactgcgccatggcgcctgtgacgatgacgtcgatgtacttggtgttgggccacaccctccggatgatgcccttccacgacggcctcgcgc

SEQ ID NO: 25918 - DNA, 533 bp, Setaria italica
  Peptide Sequence Number=SeqID_91892
ccatagcagccattccatttgtgcattgttactaaaatcactcagagatatgcaaatctttgttagaggactagagttgggcatttgggtaagcttggcctacctggctcaggctattggtttagttacagctgatgctggccgtacatctttcatttctgcactcactgttatcattgtccctttcttggatggtcttgttggggcagaagtacctccatatacatggtttggagcacttttatcacttcttggtgttgctatgctggagctaagtggttctccgccatgtgtaagttggattatctacatgggtgggttaacatgtttgtttggaccttccgtctgcttgtcttatggcatatgatactgtgctctgcgcctctgccaatattactgttgtcttaaactttgtctcattatatcactgcttttgtaatgcatattttgaatgcttcagaaacaattacattaactattgtctattttgtcctattacttgttattttgttatttgttttctttcttaattt

SEQ ID NO: 25919 - DNA, 243 bp, Setaria italica
  Peptide Sequence Number=SeqID_91893
cgggagtttctggaaggtgcggtgctgctgcccgggctccccgaggtcgaggaggtcgccgatgatcggcttggacggccaggggccaggggggagacgccggcgagagtcacggatcagctggaagatgtacagggagaagaggccgacgacaagccatcctaggccttcaaggatgaaggaagccatcttagttgcagctagctacactaggtgctcgatctcaagcaaaatgattcgtgc

SEQ ID NO: 25920 - DNA, 598 bp, Setaria italica
  Peptide Sequence Number=SeqID_91894
atcggcattggaacccgaagttacttgcaatggatcagaaagtcgctgaaactgaagcagtacatcgttcgacacaacaacaaaactagattgtttctgcaaagcattctacgagacttccatggtagggaggaaaactatgcggaatcccgaacgaaggctcttaaccatagttcagtcggaacatgtcgttctgcacgtagaagttccctggtccaactggcatcaaatggaacatctgggagaacttgagagggtgctcgccctcggcgacctgcagtgcgccggagacgaagacgagcatgccgccgccggggccggatggctggcagtccacggtggtgacctggtgcttgcacgcggtgaacgggagggaggtgagcttcccggtgatggcggcggcgcccatgaacttggtgccctcgaaggtgagcatggagccctcctggtacagccccaccagcgccgcccggttggtgtcgaacgtcgtgtagtagtggtcaacgaacgccttcgccacgctgtcgggatccatctagtgatctccgccgctcgccgccggttggcctagggtttaaggggtttgtgcttgtgcgtg

SEQ ID NO: 25921 - DNA, 523 bp, Setaria italica
  Peptide Sequence Number=SeqID_91895
ttctgaatctgatcttagcgatagttcttctgatgcatcaataaccgacattattccaatgctcgatgagttaaaccttcctgtaaacttggggactgatcacccttcctcaacctttagagacaacctgaattcctcatcagatgatgatgaagatgactcaaaggaggatggtgaccttagctcagacgaagatagaacagaagaggagaaagctgatggaaatttctggaaggactttatggatccaagctcttcagatacggaaaagaatgggaacttggagagtttgatggatcggcgaaaagcaaagaatattctgaagtttgaacttgacaggaggttaatggacatgcaagctgctgatgcaattcagaaaatggaggaggcatcgcgcttccgtgttcaggttccctccatttctacaccaaggcgtaacccgtttgatccttcaagtggttcagaggaaatagccgagttaccgaaaattcctgattcagcaccatctgttttacttccctgg

SEQ ID NO: 25922 - DNA, 141 bp, Setaria italica
  Peptide Sequence Number=SeqID_91896
tgttcaacgcaaaaacctttgtgttttatatgcttgtgaggatttgagcattgctggagtaccttaatgtcaaaagccacaaaggtgcactgaacagggatggtggtcagatggagaaagggtgatatcgagcatcgagcg

SEQ ID NO: 25923 - DNA, 272 bp, Setaria italica
  Peptide Sequence Number=SeqID_91897
cctgcagtaatcgattcttccttcgatgatgcaacatctggatcttgcagagcttgtccagatgcaaactcagcagcagcttctacaagctcctcacagcaggtggtggaaaagatcaatgtgctggtgtgttgtgacgctgttcctgaatgggcagtgattaatacttcagatgatgtagtgtcaagaatcacctccaaagatgaaacatcttgctcttgaagagttggtgcagacgcagactcaccagcgccatccaacaagcttctcag

SEQ ID NO: 25924 - DNA, 410 bp, Setaria italica
  Peptide Sequence Number=SeqID_91898
gctagtggatattgcaaagtacaccagggaattgagggaaaggccatgcgaaagagacataccaacaaattctttctttataaaattactgggcaaacttatcatgagaaaagcagttattgacaatacgagtgttccaatcagttccagtcggaacccgagccactcgtttgcagcatagttgtggaaggacatgctcaaacttgaattaattccaactagattcttctggaaaaattcttcttcctttttgaaacatcttatagttgtagcacctagaacagtctctgagaagtgatcaataaccggtgcatttgttactccttcaagtcgagttaactcccgagaagttttaagatagcggttcatgtaccagatgttgaatagaagaagtggaattacggctataa

SEQ ID NO: 25925 - DNA, 315 bp, Setaria italica
  Peptide Sequence Number=SeqID_91899
cggcgacccacgacgcgacgacgagggaggcggagaagccatacaaccgcctcttcctcccgttagcggcggcctccgcccccgcgctctgctcctgcgctgccgccgccgccgctgtcctccgcagaagggctttccgcgacctctgcattccttccctcccactcccggcctcccctcacatccgcgcccgcccgcgcgtcagggccgaaggaatccggccggcaccgagtagcaacggtcggaaatcagaaccacggcgcccgtcgcgtggcggcgcggggtggggaactggggtgcggggacggggccgcg

SEQ ID NO: 25926 - DNA, 411 bp, Setaria italica
  Peptide Sequence Number=SeqID_91900
cacccctgaacagaccgttgataccttccttcctccaaacctcaaccaatatgcgccttgtgttcatgtttaataccctttcaggatccttctctatttgtctgcgtgtcttggcaacatcaagagggcaggtagcaccagcggagatgaccccagcaatgaagcctgcagaaaagtttgcccccaatataactgctgcattgctttcgtcaccaactaatcctgtcaagtgtcttctagttggttcaagaactgtccagcatatagctgagaaggggacatctcgtgctagttgtgctcctagaccagtccataggaggtggtatccccgtaacttctcagggctactgatgctttgtctcgtattgtagtagtctacttaccttaagttcttaaagtttcttttcctta

SEQ ID NO: 25927 - DNA, 658 bp, Setaria italica
  Peptide Sequence Number=SeqID_91901
ccatccattcttcagcttgaatggttctttaatatcataacgaaatacatcatctgggaatggtcgaaaagtattggtgatgccaaatataaacgccaagcacaactactgtcacgctaagttgcccaagaaacaatatttctgccttctcatctatagttgcctccagagctttaaaccccacatattgcaaagcggattgctcaaccaatcctgttaaaacaaagcttaccccacagcctaccatgctgagcacaacagtttgccactcccatggcacatcccaccgctgaaggattcgccagttgtctgaactcttatccgaaggagggggctttcgttgttggcattatacgagaaacacgggaagcctccgcccctcctccagctcctcccccaccggccggtctccggcaaccgcagtaaccgctgctgtgctcgtgcaactgctatgcggccagattttggatagggaaatggcttcctgtgcctcgagaggaggaggggtttggacgggagcgcccggataaggagaagcgagagcggcggcgacgacgatgaggaggatgccatcggaaacatgcctttcgctctctgcccacgatggtgaagcctcgcggtgaagtatcggcgtatcgcggcgtcgcggggataagat

SEQ ID NO: 25928 - DNA, 1073 bp, Setaria italica
  Peptide Sequence Number=SeqID_91902
cgtaaattcgtcttcatttcatgcgttaattatttttgacaggtgtttctgcagttcttgcattaaggtcatctgccatgcgtactatatataaactgctttacacagtagtgatgtcccgtaaaacttccggaaacgcaaccacctattacactgaacagctaacttgcagttgcacgcccatatttctttccacgtggttttgctcacatcaggtatgccagagcacacgcccaacagagcttcatatcaccttatgcacaaaaccaggctggtttgtccaaaccttcacgatgcccccaacagctccttgatgtcatatccttgcagctgaagaaaggtgagcagtaatattactcccgagttccaaaatgcgtgtattgtgataggagttagaagattgcgggtttgagcatacgaaaaccccagtgcaacaccaagtataaacagctgtggaaattgtccaggagtcagatgagcaagggcaaatacagcagcactgacaagtacacaaactggagtcggaaaccacttagtcaaggacaccattagaaatcctcgaaacaaagtctcctccagaagtggtgctaaaactccagtaattcccaccaaaaaggcagtgctggtagtggatgagccaatcaggggcaacaaaagaactagcgaatcagtctctctctcaggaggttcaccattcagataagtcatagcagctccggttaaaccaatagaaattattgctccaaaaaggccaactccagcccacaaaagccatccattcttcagcttgaatggttctttaatatctgaaagttaggaaattcctgcatatatttatacgtttttcctttgacaaaaaattgttgcaaagaaacgttcatcacaaattaactttgagaagcagcacgcatgaaaaagaggataaatctagactgttaattatcatttacatggtaacttatgtttcatcaaaatatcacacaacacttctcacttgacaaaatagctttcatgagaaaaatgctttaatacttgcataataaatttattgagtgaccaagattacaagattg

SEQ ID NO: 25929 - DNA, 717 bp, Setaria italica
  Peptide Sequence Number=SeqID_91903
ctagaacttttgattaacagaaaaccagaaccaggcttacatgcagctaatcgagtatcatcctcatactctataatctagccagttgcagaatccgtattatatatgtacatggatggatcatcaagcagcaccagaaaagcatggaatcgatcgagcaaagaccgaattaattacgtgtatacatgaatatatcaggattgaggagggattcatccatcatggcctccacatgtccctgatggtctcgtggaagcttgcgagcacgaggaggagcacgacgagcatggcgacgccccatggcgagctcccctcggcgggcccgctgtcgtagcccggcctccagcgtctctcgctggggtagaagccgaagaagtagccgtcgaaggactcgacggaggagatccagcggatgagtagcacgagcgcgatgggcacggccagcagcgcccagctgaactgctcggccgcctcctcgatgaagtcctcgtaggtgaagaaccacgacacccccagcaggagcgtcaccatgagcaggatcaggatcaccgggtacggcagcggcgacagcgtgaacgcctccacgatcgacgactccggccgccggtcgccgtagtacgacatggctgccttggtttggttcgggccctctggtgattcttggcttgggaggtcgatgagagggaaagcgagggagggaaggaaggggaaacacgc

SEQ ID NO: 25930 - DNA, 424 bp, Setaria italica
  Peptide Sequence Number=SeqID_91904
atattaggtggactggacctgagatttggaaggacactgctggcaaggtggacatatttgtagctggttctggctcaggaggtacggtaacaggtgttggaaagtatctgaagatgcaaaacccagctatcaagatcatctgtgttgagcctgcagagtctccagttgtttcaggtggcgaaccaggaaaacataaaatccagggaataggcccgggatttatacctgaagtactggacacctcagttatcgatgagtctgtcacagtgaccactgaggaggcaatggtgaccgcaaggagactggccaaggaagagggccttcttgtgggtatatcttctggagcaaacaataggacaagacaataagaacttagaaaaggtaacgaacgtaacgaaagaaagaaaaagaaaaaaacaaaaga

SEQ ID NO: 25931 - DNA, 283 bp, Setaria italica
  Peptide Sequence Number=SeqID_91905
tccgggcagggctggctcaatcactcggtcgcatcgcacagattcggagctcaacggcgacggccaaggcggcggggcaggcaggggaagcgtcgaggaggtggcgatagggtggaggcgccgaggcgggagactgtggaccgctagcagggggctgagcggcggcgggccggagttgggtcctgcagaaagcttctgcggacgcagtcctagcgatgggcgatgcgcaggcggcaggggagggtccgcgctgcgtcggctgcggcgggcgcgtgaagacgct

SEQ ID NO: 25932 - DNA, 269 bp, Setaria italica
  Peptide Sequence Number=SeqID_91906
gccgaacacccttgcttttggggaggacagggacagaggcaggcgcggagggagggcgtcacctggaggagcaggccgtggccttccagcgaccagaaggccggacgggcgccgccttggacgctgcaggggcacggacggccgggatctgagcagggacggcagggaggcggcggaccggtgggggatggacgggggccgacggagggtaaggatgcaggcggaggccacggaggcggccgcgcggaggccacggaggcaccggccgg

SEQ ID NO: 25933 - DNA, 558 bp, Setaria italica
  Peptide Sequence Number=SeqID_91907
tccacaacctcctgcttgggcgccttcgcgggcgcgccgtagtagggggcgctgggcacctggtgcgcctcggccttggcgaacgcggccgcggcggcgtggccgccgaaggagaggatggtcggggaggaggagtccgcgggggagccctgctccgtgatgcacgagtcccagctggtgttgaccttggccgccttgcgcggacggtgctccgccgccggcgccggctgctgcagcggcatcgtcagcgccgccgccacggcctggtccacctccccctggccgaacgccacggcgatctgctgctccgtgtactgctccagcagcgcgtccgactgccactgatggaagaagctcggctcgtccatcaccatgttggagaaccactgcgtcgccatctgcagattgctcgctcgcttgcgatttgggacgccttgcttccaaacccagacccaaaggactactagtgctgtaggcaactagctgctcgaagctcaacaagtcctgtggagattggaattggagcgatgggtgaggtctggtccctttcctgcgcac

SEQ ID NO: 25934 - DNA, 506 bp, Setaria italica
  Peptide Sequence Number=SeqID_91908
ggctgtagtagtagtacggcggcggcggcggcagggccggtggaggcggcgacgggtacagcacggggcagtcggcgccgccgcacggcgagcacccgccgcacttgacctccccctgggcccccgctgcggcggccgtggtgaggatcgccgccgcgacggcgacgatcgccagcgccactgacgaccttcccatggtcctgaggcggcagaggcgcgagctgctgtgggcttgactaggctaacacgctacgctacgaggctacgagaacggtaagagacagaggaggcctatggtgaggtcgcgcgcgtcgttggcccgcacctctcccagccgcgctcttatgatgcgagaccgacctcgagtgtatccatctactcccgttgtttgcaggaatattagttgggactcgttggatcggagcagcagcaggtaagcttggcggtaggggagttactggaactgcaaggataagcagaattgtacgtgcaccgcgctgttttag

SEQ ID NO: 25935 - DNA, 951 bp, Setaria italica
  misc_feature (186)..(186): n is a, c, g, or t
  Peptide Sequence Number=SeqID_91909
tattgtagtcttattggtttaataacttttcaacctggaatgatgaaagttagccaaatcgtatactgacgtgctcctccttgtgttatttttgtcttgtgcacttggtgaaaaatctcttctttcccaagcacatgataatataactggagttgaagtttgcatcagtatgtgatgataaaaacngggattggtaacttactgaccagaaatatcctggagcttgagataaattgttgccaatatacaaatatgtaagattgcagtcataatttgttttgtctccatgattagtttgtgcaagtttgatcatcatgtggtatgtttgctactctgatggctgtcgttcagctgggggctttgaaaccataaattttggggtcatccagttaacacttgtttgaggttggggtccacttatgcaatcacttctgattggattatcattgtgattttaaaaaaagatattctatatgcatttctgaatttatttgtcagatgtgttctaatattaagtaacataactgatgaaactattccaaattataaacagagggggaaaatggcacattcatattcagagaaaacctgtcttttcttttttagttcttgtccaatactttataggacattcttctccagcatactgatttgaatttgagtcaagtgatcattcaatcaatcacctcactattttgttctggagtttttaatcttagtttgatggactgaagtcttaggttgcccttttttgatacccctttctcttcaaattgctacaaactttatgttccccctcattcgtttacatgctgtaatttggtcttaacagttatatatctgttttcactctttccaggcacaaaattttcaacataagtatgtcggggctagttgtttcccccaagagagaagacaggagaacaatctgtgggacctcttgtttatcgt

SEQ ID NO: 25936 - DNA, 885 bp, Setaria italica
  Peptide Sequence Number=SeqID_91910
atgagccatgcaaatagagcaattgaggcatatcaggtatttgaagaaactcgattacgaggatgtagaattaatgtaaaggcatgcataagtcttctagatgctttgaacaaagctgaatgtcttgagcaggctgctgttgtgggtgcagttttgagagagattgccaagtcccagcatgcttcaagatccttgtaaaattcagcttcactggttgctatctttacggtacatcagccaaattgatctggcttcttcgtactgtttgaccggattactgtgattcaacgttaagatagtgttctacaatccggtgtgaacacctcgtcagccattccttccgatgctgataatggaaaggaggtctgaatctccaaatctcagccagctaactaggagaataatatcagtgtcttgctccattgctacttggtagcttcagatctaccgaggattgttctctggagatgtcaaagaatccctggctcagcatgcagattcagaagtttaaatgaaacttcaagacaggcacaaaattttcaacataagtatgtcggggctagttgtttcccccaagagagaagacaggagaacaatctgtgggacctcttgtttatcgtgtgatcgtgtcttgttactaaatttttcgaaaaaaaagtgcccagggactataggtcatcaaagataatttctgtttctttggaagacaggagaggaggaatgaccaagaatgtttgaggtcccgatagaaacactgtgccttggcagcagaggtgctccgaataatctgctcattcaaatgtcctttgattagattaacttcatgcaaaacaaagattatttctagcgtcgtgacgtgtacaattgcacataattaaaaaaaaa

SEQ ID NO: 25937 - DNA, 418 bp, Setaria italica
  Peptide Sequence Number=SeqID_91911
cacgcacaaaggcgacgcaagcagcgttgctttcctttcctctccctgctctgcctcgccgcttccccccctcccctgcctgcctcagcgattcttccgcttttcctttttcaaatcgccatttcctcgtgcgcgtgtcgactccgtcgtgctcagctgccgggttcgggaggacgccgcctcggatgaggccgcgctgaccggagccggatcattcgcccacccatggcgcggccgcagcgagtgtacgaggcttggaaagggaacaataaattcctctttggtgggaggctcatattcggacctgacgccaagtccctgatcctgtctgtttcgctcatcgtggtcccggtgctggtattctgcgcgtttgttgctcggcatctccgccaccatttctcggcgtacaatgcgggat

SEQ ID NO: 25938 - DNA, 232 bp, Setaria italica
  Peptide Sequence Number=SeqID_91912
gtggtgaggtgaacagcccagtgtggaagccacacgatcgcaggattgactcagtgaatgtgcatgtcgaacccttccccttggtccctgcgacgtgaatcaccttcatccgtgcgatcggctcctccagctccagaatcttgaggtagtgtgccatcaggtcccactggttgcctcggttgccgctgtgcgcgcgcaccttctgcgtgatgagcgaggagaggcggcccag

SEQ ID NO: 25939 - DNA, 298 bp, Setaria italica
  Peptide Sequence Number=SeqID_91913
gcaacgagcaccggcgcctcggttctgaacacctcgacgccgctgacgccgacgtacgggtctccgcctggcgggtacgggagctctccccctgccgggtacggcaactcccctcctctctacgggtccatgtcgccgccggactacggcggcgaaatcagcgccgccgcggtgacggtgcccggcagcaagaagacgacggcgatcctgtcgctgacgacgtgcgtcctggtcgtgacgctgacgctggccggctgaacctgcgcgcgcaacagcccaagctgccgcgtcgcgaccg

SEQ ID NO: 25940 - DNA, 294 bp, Setaria italica
  Peptide Sequence Number=SeqID_91914
gactttccccgtctacgcgcttacccccaccagcggccatagccgacgagcggcggcggcgccgtgatctccccacgaagctactgggcgccaccagcggttagaatgggggaggaagacgaagaccccgactggctcaccgcgtttcaggcaccaagtacggcgccagtgatgctttcttctgggtctgatgcttctcctgaagctagtcctaccaggaccacttcatctagagaacaaggaaatggagaaaagcaggctagttcagatcatgcaggtgatagagaagaccct

SEQ ID NO: 25941 - DNA, 357 bp, Setaria italica
  Peptide Sequence Number=SeqID_91915
gctcctaaaagatactcctaccagcggccggccttgactgctcccggccccgacgcgcgccgcagatctacacctgtaagcgtttgctgtggccgtggctttcccggccggccagcagctagggttctcgtgagctgctgctgctgctgctgctgcttgcagcggcggcgccggccggccgggtggagcggatggcggggaagagggagcggatagcgatacggaggatcgacaacctggcggcgaggcaggtgaccttctccaagcgccgccgggggctgttcaagaaggccgaggaactctccatcctctgcgatgccgaggtcgggctcgtcgtcttctccgccaccggcaagc

SEQ ID NO: 25942 - DNA, 572 bp, Setaria italica
  Peptide Sequence Number=SeqID_91916
ctagtctcttttttttgggtacaaaaccttcctgaagtatacgttaacgttattgcctaaattatggttctcgacgttaatttcctactacaggcagatgagaggagaggagctccagaggctgagcgtccaacagctgcaggagttagagaagaccctcgaatccggcctcggatctgtactcaaaatcaagagcccaaaaatcctcgacgagatcaacggtctggaaagaaagagaatgcaactgatcgaggagaactcaaggctaaaggagcaagtaaactcctgtcctcctttgcatgaggtttccattccgctctgcatcttttcgagtgacacctccgtttaagccgcggcgatctgaagctgcaggtggcaaggatggagatgcagctcggtgccgattcagaagttgtgtatgaggaagggcagtcatctgaatccgtgaccaacacatcctatccgccggccgacaccgacgacggcggctccgatacatcgctcaggctcgggttaccactcttcagctcgaagtgatggagcagaactgttctggaccagagtgacgccgt

SEQ ID NO: 25943 - DNA, 503 bp, Setaria italica
  Peptide Sequence Number=SeqID_91917
cgtttagttcactcggtgaagctagctgtgccgctgcaagcactccacgagctcgtcgacgtaccgctcctgccggccgccgtcgtcgccgacgaccagctcccgcagcctcctcgcgttgagcgcgagctccttcccctcctcctccaccatgacgcgcgtaaccgcggcagcaacgtcgtccctgctgaacccgccgtcgtcgtcacgccgcgccacctccacgccgacgccgcgctcggacatcatccgcgcgatgagcccctggtcgacgacgaacgggagcatcaccagcgggtgcccgaaacggaggctctcggcgacggagccccacccgcagtgcgtgaggaaggcgcccaccgccgcgtgcgccagcacgcgcacctgcggcacccagcccatgcacgccgcgccgcgaccgcgcgtccgctcctcgaacccttccggcagcaatggctgctcgccggtgccggtgccgccgccgccgctcggcggccggagcg

SEQ ID NO: 25944 - DNA, 1068 bp, Setaria italica
  Peptide Sequence Number=SeqID_91918
ctttagtgtttttttttttttttttagttacagtaaattacttcagataatccacatacaaatacccaagctaatggcacaaatatttcgtagctttgtcttgtttctccatcactttccgttgccactgtccaccagtggcaagcacgtactgtagcctccggaaacgaacaggcaggtaaaaacaccaggcagaaaatcaccccggctcgatagttttcacacaccactgtcacttcagtatacccccatactgtttaccgtgttacagcatgccccacggttaatcaatctctgcagagcgagcgtgcatgaccccacccaattaaagtaggtccgtcccatgcccagctttaatggccaagtcccgaccgcacgactttaccgttactggcccactgcgcctcttgactcctgctgcccgccaccttatcggcagctccggggcccactccacgagacgtggcagcgtccccacttggcagtcacatgggctgcagccacgtcaccacgatggggctccgcacgtcgtgcccgccgccgtccgaccagacgaggtacccgtacacgggcgccgcggttcccggggcggacggcgcggtcaccgtcaccgtgaagctctgcttcttgacgcccggcgagaagacgagcttctccggcttcgcggacacggacacgccgctgccagccgccatctgcacgcgcgccgtgtacgtcgcggacgcctgggcgccgacgttggtggccgtgcgggtcaccgtcctcgactggttgccgccgcggagcaccacggaaatggacgggtagttgaggtcggagcccgaggcggcgttgcccgtcgacggggggcacgacacgggcttgtgcgtcaccacctcgatcgcgttcggctcgtacccgatgctgcacatgaacgcgacgtagtcctcctccccggcgtcgtagaccaggccggggtccagggccttgccgagcgtgatgtgccccgcgccgtagtcgaacggcgtcgcggcgcgcccgggctcggcctcgtcgcccacgggcccgccgcggttgtcgttcacgacg

SEQ ID NO: 25945 - DNA, 378 bp, Setaria italica
  misc_feature (347)..(347): n is a, c, g, or t
  misc_feature (369)..(369): n is a, c, g, or t
  Peptide Sequence Number=SeqID_91919
taaggactctacaaagcaaggtgatagagaaaaaaagaaaaaaaactaaagaaatctattattaacaggcatccatccgcaactgcaaggaaggatgaaacggggagtcaacagcttgcctaccaaacactcttcaacgccgccgcggtgggccgaccggcggcggtcagtaggagcaggtgacccgatgggaggagcggtcgcggagcatgccgcggtagagcgcctcccggttggccggcatcatccgctcgtccggctccgccgccgcggccgccgccctgcaggtggaggtggccgccgacgacgaagcggcggccccggggtgacgggtcgggcgcggggcnccctcattgtcgacgacgtccncgcgaccgc

SEQ ID NO: 25946 - DNA, 429 bp, Setaria italica
  Peptide Sequence Number=SeqID_91920
aggtgaggggaatggagcacgtacaacacaacaccagatgacgaggggttgggatgggagggaggggggaaaacttgggagggcatacgacaagcacgggggcggacctaccggctagctcgatgggctcgaccgctcgagtagaccttagttgtaaattcggcgggatgagacgagactgcgacgcgatgacgcgaggtggttggatgggcctccttggacctagccttggggttgcaggttgcagcttcaaactggcggcgccggcaacggcagggggggggcggcaggagcaagagcaggagctactcgtccggcacccggtacgcgtcggcggtgatctcggtcagccacagcccggggaacagcgaatcgagctgccgctgcacggcgcgcggccgcttacggggccgccgccgcggccgggcg

SEQ ID NO: 25947 - DNA, 1845 bp, Setaria italica
  misc_feature (1757)..(1845): n is a, c, g, or t
  Peptide Sequence Number=SeqID_91921
aattgcagcctgaatgcctgataaacaagaacatgagctatactggcgctgcattattgcagtccagtcacacggacaccttcctaaggtctccccgtgttgcacgatgcccttcgatcactccctgagctgtcatcgcccctttccgttcaacggggacacgtctagattaatggttacgcacatacgtacacatgtgtaaactattggcgaaccttttcatagttagctgcagagattatatctaaacgaaaatactgaattgccagcattgcccttgtttaataattgtattcgaaaacacacactttgcagtataaagatcatccgcaagaactcccgtagcaagagccagagcagacagcgatcctctgttcctcactcatcgtctcctctttcctctgatcttggctggtttggtttgcgtcggacaacgaacgaagcaatggaagacgaagttcagcaactcaccagggccttctcaggtcttggcggtctcggcgtggacgagccgacgatggtgtcggcgctggcgcggtggcgcaggcagccggagaagcggtcgggtttccggaagggcttcccgggtttcttcaagagccacggcgagatcgaccggtgcgaggaggagtacatgctgcacctggccgccgagttcgcgcggttcaagaacctgatggtgctgtgggcgatgcacccgtgggagcgcgacgcccggctggcgcaccacgtcctccaccagcaccacccgtccgccatcgtcgtggaggtcgcctgcacccgctccgccgacgagctcctcggcgcccgccgcgcgtaccaggccctcttccaccactccctcgaggaggacgtcgcctaccgcgccagggacaagccctactgcaacttgctggtggggctggtgagcgcgtacaggtacgaggggccgcgggtgaacgaggaggtggcgcgcgcggaggccaaggcactgggcgcggcggtgaagagcgccggcgggaagctggcggagaacgacgaggtggtgaggatcctgaccaccagaagcaagccccacctcgtggagacgttcaagtactacaaggagatgcacggcagacgcatcgaggaggatctcgcccacggcaacgaggagaccctgctggagaccgtgctgtgcctcgccgcgccggccaagtacttcagccaggtgatggagggggcgctgagggacggggccgaccaccacgggaaggaggcgctgacgagggtggcggtgacgaggtcggaccacgacatggacgagatcagggccgcctaccaggagcagttcggggccaagctggaggacgccatcgcggccaaggcgcacggccactacagggacgcgctgctctcgctggtgggagcgcaccaccagcagtgaacgacgtccgtgtgagtgctggcttctggtgatggtgacgagctcgatcgatcgatcgagtggctggtttctttcttctcttcgatcgtctctgcccgtgttcgtccgtctgtcgtcgtggtttctgtctgtgtgtcgtgtacgtgccaacgttggggtctgctgccgatcgagcgggactgttaacatttttctgctgagtttgtgtgtgtgtggatggtgaagaggtcaaataagattcgcaatcgtttattttcttcatcacgatgtagttgtatctcaccctcgagaacccatttctgtgctgttgctcagatgcaaccaagactttgattctggttataaagttaannnnnnnnnnnnnnnnnnnnnnnnnnnnnnnnnnnnnnnnnnnnnnnnnnnnnnnnnnnnnnnnnnnnnnnnnnnnnnnnnnnnnnnnn

SEQ ID NO: 25948 - DNA, 209 bp, Setaria italica
  Peptide Sequence Number=SeqID_91922
gcgagtcatgtgcaaatgatgttgagatccccagcaatgatccgcagttgcaggaggtgacggaacagtaggttgggtgttgggatgtttaggagaattatatgttcagaacagggagcctgttcctccagttgctgttataccacttggaaccggaaacgatctctccagaagttttggttggggtgcttcattttcattctcattgt

SEQ ID NO: 25949 - DNA, 269 bp, Setaria italica
  Peptide Sequence Number=SeqID_91923
gggcagcgcgtactgggagcagtcctcgacgccgccggggcagggccggatgcagtcgagcggggtatccgtgcagttggcggtgaccgtcgtcgccgcgtacgggcgcaacggcgggtacatggctacctcggatcggatggcggcgggggcagcggcagcggcagcgcagcgggctcggcggcgcgcatcggggaggtggccgcgtgcgcgagggggcggtggtggagggctggtggaggtggagacggggagtggattggtcgctg

SEQ ID NO: 25950 - DNA, 247 bp, Setaria italica
  Peptide Sequence Number=SeqID_91924
cccgcgcggcagcagggccggcacgcggccgccgcgtgcacgtcggtgatgatcagcgccggcgccagccgccgccctcggcgcgacggtgacagagctgttgctcaccgtcacggcgaccttgcgatcgccggtgcggtgtgcggtgacgagcaccggggcggacgacgcctcgttcctcgggaccgcctccatggcaggagagaagccgcgagcaatgccgtcgatgacaatgagcggctgctcg

SEQ ID NO: 25951 - DNA, 427 bp, Setaria italica
  Peptide Sequence Number=SeqID_91925
actacaagtacgacaactaagtctctcctcccttctcctctccttccaccctccgcccactcccgatgccacgccaccgccgcaacatcctctccctcctctccctctccgattctcctcgccgcgggggcgattagggtttttggggtgcctcgtccacgccaccccccgcaacctcgcacctccgtcgcgttcttacggcttgcagccagcccgcgcctctctcatccggggcggcggcggcggctgtggctgagcaggaggcggtggcggcatagatgaggagtggccgtggggaagcgcgaagaccggggtggcggcataggtcgaactcatcgtcatcctcgtcatcatgctccgctcagctcccatcaaggcgacctccacaggccacgggcgagtcgtcgtcttcgggcggcgctgaagg

SEQ ID NO: 25952 - DNA, 401 bp, Setaria italica
  Peptide Sequence Number=SeqID_91926
ttaagtactaaagcatctaaattctaaaccctcaactcctactccattatttcaatgcatctgaaagtcacaagattaattagtgtttagtgaataagcaagtaataaacgtgattcttccagcacactcaatggaagaggcagaggtattgtgtgaccggcttggcatctttgttgatggcgatttccaatgccttggaaaccctaaagagctaaaggctagatacgggggcacatatatactcacagtgacaacatctctggaccaagaacaggaggttgaactgctagtgcatcaactctcacccagtgcaaacaagatctaccatctatctggaactcagaagtttgagctacccgaagccaggaggtgaaaaatggacatgttttgctgcagtcga

SEQ ID NO: 25953 - DNA, 1227 bp, Setaria italica
  misc_feature (1146)..(1146): n is a, c, g, or t
  misc_feature (1174)..(1227): n is a, c, g, or t
  Peptide Sequence Number=SeqID_91927
tctagtatcagatgatagcttggtttatcctggaagggatggaaaccctgacaagcaggctgttcgaggattatctattgcccttcaaaagggccagtgctttggaatgcttggccccaatggagctgggaaaacatcttttattaacatgatgattggactcattagacctacatctggtactgcttatgtccatggaatggatataaatacagacatgggtaacatatatacaaatatgggtgtgtgcccacaacataacttgctttgggaaacattgacaggaaaagaacatcttttcttttatggcagattgaagaatcttaaaggtgctacattagtcaaggctgttgaacactctctgaagagtgtaaatctatctcatggtaatattggtgataagcaagtcaagaaatacagtggaggcatgaaaagaaggctcagtgtggcaatctcattgattggggaccctaaagttgtcttcatggatgagccgagcacaggactggatccagcatcaagaaataacctgtggaatgttgtgaaggaggccaagagaaaccgggcaattattctaactacacactcaatggaagaggcagaggtattgtgtgaccggcttggcatctttgttgatggcgatttccaatgccttggaaaccctaaagagctaaaggctagatacgggggcacatatatactcacagtgacaacatctctggaccaagaacaggaggttgaactgctagtgcatcaactctcacccagtgcaaacaagatctaccatctatctggaactcagaagtttgagctcccgaagcaggaggtgaaaatagcccatgtttttgctgcagtcgagaatgcaaagcgccgtctcacaatacatgcctggggcctagtcgacactaccttggaggatgtcttcatcaaggtcgccagaggagcacaagcattcaaacgagtttgcatagataataccttgaatactgtcttcatggccggcaacggaccccagttattagatgggacttcgttgcacgctgcatagagaatcttgcgattttgtaggtagttaatcttttcattcgtgagaagcattcttctcagaaaaattcttctgcatgcttgttttgcgttgtttgtacngaaatatattttgatgtgccattgcagnnnnnnnnnnnnnnnnnnnnnnnnnnnnnnnnnnnnnnnnnnnnnnnnnnnnnn

SEQ ID NO: 25954 - DNA, 450 bp, Setaria italica
  misc_feature (1)..(55): n is a, c, g, or t
  Peptide Sequence Number=SeqID_91928
nnnnnnnnnnnnnnnnnnnnnnnnnnnnnnnnnnnnnnnnnnnnnnnnnnnnnnnactttaactaaaagaaaagtagtactactactaaatcatcatatacacagtacacactttaatgctacaaaacaggaaaatggactcccagtaacttcataagcccattccaacttgctggaaataaacagagcactggtttctatcacgcaagcctagcaatgtctccccccttgtctagaagatgacaagattgcacaacactctgcacctgcatgcataaccacccaactatactacactagctacgcatatcatacaccgactgttggtgtgtgacgacatgggcttccgcatggatcacggactgctggagcctttctcggctacgtgcacggacggcgcggccttactgaaccgaaacccctttatcatgggcttcacgttctcagcga

SEQ ID NO: 25955 - DNA, 440 bp, Setaria italica
  Peptide Sequence Number=SeqID_91929
gaagccaggtgaaaatggctggacttacgacacgaaagcaaatatcatgctatcaggtaaccgcaagctgcagaaaagactggaccggtttgtgtgcaagttgtcggatttcaaggtcgacagtattgagatgatcggaaaggaggcaataccaggtatcacgtacattaaggagaagaaagtccggcaggagatccgcaacctggagctacctgtctttcccagcgaccacttcgggcttgttctgactatcagcagtcagtctcaaaagttctgattatgttccagaaactactgtgtgatgtatggccctctttttgtaaatactaggtaatagcatatcctaactttatctaagtgtcacgatgattgtgattgatgctgattgacaatggtaggcctaggatcatctgcgggcctccttcacattacaacaaaaa

SEQ ID NO: 25956 - DNA, 1299 bp, Setaria italica
  Peptide Sequence Number=SeqID_91930
ttttttggttcaaacaaaggcaataatcacatgcattcatcaccaccgttgttacaaaatgttgcatccaagggggccaagaagaaaagataactattgctgaaaaagcttctaacatcaacctgtggagagaaaatagtatgctttctggtcaaacaaagacaataatcacatacattcatcaccaccttgttacaaaatgttgcttccaagggggccaagtagaaaagataaatatgatgaaaaagcttccaacatcaactcatggcatatgaagttctgtgctgcttcaactgtggtgatatttggtaatttctctcggcagcaggaacattgtagaactctgctaggtactccagagcttcataattcccatcacaaaccttccaaagcgctgccacttcccctggagccacagtgccccagtcctggcagtcattcaggaagtccagcagcttggagtaataagagtcatagttgaggagcaagaatgggactgggagttccgatccaatccgctccagttggatcagagccatgatctcaaacagctcgtctagtgtcccaatcccacccggtaatgcgataacagcagttctgtcagaagggctgctccgcacagcagcatccaccagtccgtgcttccttgccgagaagaacctgcaggtgaggtaggtctctgaaggcaggtaaggatggaagcctgagcttgtccattcaccagcctccttggcgatcttgaggccaccaatcggcttgtctgcctcaatggcaccttggatggcggcatccatgaggccaggtccggctccggtccatgtggtgcagtcaagcagccgagctatctctctggcgagctcggtggtctggaggaagtgcgggtgcgtgggcgggaccctggaggagccgaggtagacggcgcccctgccgaggcggcggacgaggtcgaagcaccgcgtcatctcctccctcacctcgtgggtgctgctcctcggaggactcagggccgagccggcttccgcctccgcctcgagttgtcccagttgccgccgctggccggcagacgcggcggcgatggtaccgcggggacgggctcccccgccgccgcagaggaggcgcgcggccggccggagcgggcgcaggcacggacaagaaggggcgcggcgctggctgtgcctgaatccgagggcgggacgcagctggggtccgaatcccggccccaaccgagctcgccgccgccgcttccatggttgacgagcgtcctcggtcactccgcagtccgcactcccctgctctgtg

SEQ ID NO: 25957 - DNA, 575 bp, Setaria italica
  Peptide Sequence Number=SeqID_91931
gatagccctgtccgggaagtagcgacctggttctttagttaaaataccaagcatcttctgtttgcagcttgtcaactcgatgaagatgttgagctttcatcccataagcaactccatcgtttcttgtggtcaccatgacacgactacctgaagcaccatgactgagtggcactctcagcaggtcattccacaccttttcgctccacacatcatccatcaccaacaaacttttcttttgccgaaccgtgtccttcaaagcacgctcgagcaagtcctatttccaacaaagccttcatgtttggcaccaaaagaagctagaagactttgtaggacactaatctcattgacctcctggttaacgctcaaccagatcctgtcctcaaagttctcctccaccctactatcaccgaagaccatccgagcaagagtggttttacctatcccacccattcctgtgattgcaagatcaacaatcacattgttgctatttaatcctacgcgagagtccacattcctgatgagtagatcaacgattttcttggtatcctcctcgatcttctcgccgacaacatcag

SEQ ID NO: 25958 - DNA, 353 bp, Setaria italica
  Peptide Sequence Number=SeqID_91932
ctgacgttgaagaacatgagctggctcaggttccccgccgccgccgggacgccgccgtggatcccgttgtggctgacgtccagtgacgcgagccgctcggggagctccagccgggacatgtcgaagctgaaggcgttgcgcgagaggttgacgctgaccagcagcggcttcccgcggccgaacaggacggacgcgtctccggcgagcgcgttgcgggacaggtccacctggacgaagctgacggatgcgaactcggcggggacgctcccggagaggttgttgtgcgacagggtgaggaacgcctccgcgccggagttgacgaggagcagcggcgggatggcgcccgtgaggcg

SEQ ID NO: 25959 - DNA, 299 bp, Setaria italica
  Peptide Sequence Number=SeqID_91933
gtgacgttggcgaagggcccggggaggttgccgagcacctcggaggcgttggagacgcggccgtcgcggcggcccgctggcacggcgaagccgatcccgcccatgatgcggcaggcgtcgcgcgcggcgaaggcgacgatgtcggcgcaggagacggtccgccggcaccgccgctccagcacgcgcttcgcgcggtcgatgacgccgaacccccggaggcttgggttgttggcctgcgacgccttctccaccgaggtcgcgttgctgccgggggcgtgtccagaagcacggacgcgtcg

SEQ ID NO: 25960 - DNA, 365 bp, Setaria italica
  Peptide Sequence Number=SeqID_91934
cgataaattcattagttccttaattatgcatgtcatcaacaccaaacccacttaggggccaaatgcactttcaatatgacccacaagatatgaaatgtatatcagccttttatgatgttgaattgttgatctacctattgtttaagtagtgagtatcatttgttactccagcaaacccaaaacatgtacctcactggtatatggtgcgagctcttagggtgtggcacattgttggatcaagtccgcatcttttgaaacttaagctcaataaccctggaaagtaatatgcaatatcactattgctggaaaacctcatggtagcacttgcactccgcctacgtattcatgtatcccattgttcttgg

SEQ ID NO: 25961 - DNA, 457 bp, Setaria italica
  Peptide Sequence Number=SeqID_91935
cccctccttccgccgctgctccgcgccggcgcccgccgcccgccacgggtggtaggggaacaccgagcaccgccgcgggtgcatcttgtccctgacctcctcgccgcgctccgggaacttggacagctcgtcggcccgcgcctgctccagcagcgccagcagcatccggccgccgcacttgcgcgcttcgtcgagcggagtggtgccccatctgtccgtggcgaacacgctggcgccggcctcgacgagcatcttggcgatgaggtagaggccctcggcggcggcgatgtggagcggggtgcggtggtcgtagtccctgcagttggggtcggcgccgcaggccagggaccgccggatgaagtccgagtcgcccttggcgaccgccgtgcacaggtggctgccggcgttcttgaggctcagcttggcacccttggcgtacagcaacgccgccacccgc

SEQ ID NO: 25962 - DNA, 235 bp, Setaria italica
  Peptide Sequence Number=SeqID_91936
ctggatctttgccttcacattgtcaattgtgtcagagctctcgacttccagcgtgatagtcttcccagtaagtgtcttcacaaagatctgcattcctcctcgaaggcgaaggaccaagtgaagagtagactccttctggatattgtagtctgccagcgtacggccatcctcaagctgctttccagcaaagatgagcctctgctggtcaggtgggattccctccttgtcctgaatt

SEQ ID NO: 25963 - DNA, 636 bp, Setaria italica
  Peptide Sequence Number=SeqID_91937
cctggcatttacctgattacccacttgacccagtgctgtgcaacaaagtatcagagttgcaagagaaaagttcataccggaggcttcttttcgactgtgtgaacattgctctaattgaaatcggcgagaacgccttactaagcgcattcccatggaggaaaagacactctagaacatggagaaacacctcatctcctgatttgggtgtagaggtctggagtatcctaaaggactggatttacggtgcacggatgttcgtggtgagcaggagagacaatgctgggatcatgttggacagaattgtgaagcaggaggttgagggaagaggctgggtgaactcgatgatgttgcaggtggttggtatcaccgaacatctcgaaggtggagtgatggaggagctggtggaagaagccgtgctggatttcgcagtttgttttcgacgatgaagcgtttgtttgtaactggtaaaaattttccggggtacagctggcttgtgcattatcttgttttggcagctgctccttggatcgttcatccttgtagcctccagcttctatttcgggccggttccgcttgttgcattctgtaagttttgtaacattccggtagatgaaaacatggtaattatgcagttac

SEQ ID NO: 25964 - DNA, 331 bp, Setaria italica
  Peptide Sequence Number=SeqID_91938
agcggatcggatcacacaagaagctgttaaaccagcgactccaaacagtcaatagtggcgggttccgattataagaccccttcgccaatgtccactccacaaagcaaggtatctacaatcccttctccgttcacggccggcttgccaggtctttgctaaccaccaacacgcgcgcctcgagctcctcgggcacatagccatggagagcacacaggggtagagagacaacaccatctagctagcagcagtggagcggtcgatcacagagctacaagaaaaaaaagagaagaagagagaggccgatcgtgatccatggcggttacacgtgttg

SEQ ID NO: 25965 - DNA, 289 bp, Setaria italica
  Peptide Sequence Number=SeqID_91939
gaacggcgccgacgcgaacaccgacttgcgccgctgctgcatctccggagccccccggtggcctctgcgcccgcgctttatacgaactcacccacgccgccgccgcccgcacgaccctttcggggtggcgtgcactcccacgatcgggagcgtgaaaaggaagctccttctgcttcgatttcctctattcctcctccctctctgtataggatagagattgggagacgaaacggagctcgcgtagcttagtttgctcgcagtcgcaggtcttgcttgctgcggctgcgtg

SEQ ID NO: 25966 - DNA, 578 bp, Setaria italica
  Peptide Sequence Number=SeqID_91940
atcaaccagaactttccaaccttcaatgagagtgcgcacgaggtggcgaatctgctgtgagttgtgcttccgcagccgattaacagccctcccaatctcagtagcctttagagtggagacagacaattgcatcaactgcagccttctcagggactcaaacaaagtggcatccgaatgatcttccttgtgcaaaagaaggtccttgatgcggaggacctcaccgacgatctgtgactcctcgtcgatctcattggtgagcgcctcgagctcctcagcctcatggttctcttcctcttcctccgcatcatccgccgcgtgctgctgctcatcctcctcctcttggtcgtcatcatcatcatcatcgctagttgtggccgtagttgctcgccgcggcgcggcggaggcgctcgtcgtcggaatccgaatcgtcgtcctcttcgccgtggccgtggttcccccgccgtgggcgccgttgctgctgctgtctaccttgctctccttctcggcgacgcggcgcacgctgcccttgtcctcctcgatgggcgtggccggcgtggcggacgccgcggcgctgccga

SEQ ID NO: 25967 - DNA, 420 bp, Setaria italica
  Peptide Sequence Number=SeqID_91941
ccgatcaaatcgagctacatgtccactctacaattatccagacatggctagactctccaaacgcaggagcttcactcagcccttgcagcttcaaggggaaacccttcattggaggtgttttgttcaaaaaagtttgttctagtcctggcagctggtttcagctcctttggatgagcataaacacatttcgcgtccggactaggcaggcatggcaacaattcatcagtgaggaaaaaatcacagaggagttagcgccgcccgttcgcccaattcctaaggttattccgggacttcaccataggttgtctgttttgatgcttgggctttggtatgtcacccagctccattacttgtatcgtgcgctgccttttggctgcacagatgaatcattgaacagttagataaaatcttaattgtaga

SEQ ID NO: 25968 - DNA, 492 bp, Setaria italica
  Peptide Sequence Number=SeqID_91942
ctactagtaactactctctctctctctctctctctcttcttcaacctctgaattttttcagtttcgggtttcggaaagcgaaggcggtaaaggccaatgaggatcctcatagaagccacaaacgatagtgtaggatgagaactctagggaggcctgagcaaagggagtggtgctgctctcacacacataaatacacgccattgctggccgctcctccagagcttcagagcttgagcttcaggagcgccgggtggcggtgcgagtcgatgaggatcgaccacagcacctgcacgtcctcgtcctggcaggactgcacgtccttgtacaggaggtgcattcccctccggttccggcgctcggaatgcgcccgaacccacatcctcctgagaggagagaagagggagtggagccaccccatggagcaaaaaacaacgaggaaacgctgtgtctgccgggctcctacgcctcctactcccggggggaaataggcag

SEQ ID NO: 25969 - DNA, 689 bp, Setaria italica
  Peptide Sequence Number=SeqID_91943
catcatcatcctcctcctctccaacctcgcctccaacgtcccaacagtgctgctgatgggcggcgaggtggcctccgcggcggcgctgatctcgccggcggcagtgatcaggtcgtggctgctgctggcgtgggtgagcacggtggcgggcaacctctctctgctgggttcggcagcgaacctgatcgtgtgcgagcaggcacgccgggcgccgcgcaacgcttacgacctcaccttctggaaccacatcgtcttcggcgtgccctccaccctcatcgtcaccgccgtcggcatccccctcatcggaaagatcaacgtctagttacgttaataatcctgccgaccgccggccgtcgtcagctagccaccatcaacgacgcctcattaattctgcattcctggcctgcatgcgtatgttgttagcagctagcgtggcgtatacttgcgagtataattgtacgtacagtgctgttactagttgcgtatatgtggtgtgtaatggctccaaagagtttcacttaactctcagctccggacagttattacgattgtggagcgagaggcagtgatagataaccaatggtaaatcttccaggaaaaacgcaaggtagtgttctaagcagtgcactgtctgcctgcctgcatgaagaatatgcatgtggtcttgactatcaatatcagttgtcttt

SEQ ID NO: 25970 - DNA, 401 bp, Setaria italica
  Peptide Sequence Number=SeqID_91944
ggcttcccaatagcagattgcttctggttatagttcaatcaccaatacattcttggggcacccctttccattttacaagaatttaactagcataatactagtagttggaacagcccagcaactctacaagtgtacaaccagaaaatacatgaacatgttcttcctatggcaagaaaagcaggctcttcccacttctcaaagaataaacaaatgagtaaacaatttccctatacacacagagttggtcaacttgtcaccccgagattgggatctctagtcaggcaccaaccaggcaaccagccaatgcaggttgagctagcatccccattgactaatgaaggtccagatctctcatatgagattggtattctgaatttctggcgagaaaaatccataagaaa

SEQ ID NO: 25971 - DNA, 594 bp, Setaria italica
  Peptide Sequence Number=SeqID_91945
aagtaacatatgaaaaacctccatgcaagaatggcatgactgaaaacatgttgtactaaagttccaacataagtaacaaaaagttgcttgtgactcactgaaagtactctagttgtcaatgtgctaactagggccacccttctgtgaaccattggagtaaagaatggaacattcatttagctaccaagccttttaaggaaatagtacatcctaccaaatggctgatgccatatgaaatggcagcatgctaaagacaaccaaactaaacgcaataactttgttttaagaaattttgtggctcttgccaagcatctttttaaataatggtcttcctccaagcaacagttagtatattacaggacacactacacactacctaataactaggtatgacttttacgggggtgcttggatcccttgctggaccttgctttgcctagctaggcaagaaaacttgcatttggttttctgagcaagctcttcctgaagtctgtgatggcaagctttttgcttgcttctgagggagagggatttttgctaggccttgctcgagctggcgaggtgaggctaggctggccaaggtaccaagcgccg

SEQ ID NO: 25972 - DNA, 323 bp, Setaria italica
  Peptide Sequence Number=SeqID_91946
gtggcattttagattcctccctgattcatctcaggtggctaatgcaattaagttgatgcaagatgaagggctgtatgccagagagggatttccaggagttccagtttttcagtcaaggagcttggtcttgatgagtgataacaagagatatcgtccagttttcttcagaaaggaggacttggataactcactgtaccggacctctcgtgatcagcaaaaacctaatcctgctgttaggcttggtgacactcaggtttcttctttggaagatatcatcaaatctatgaaggataactcctcttcaaaatgggatgatgttgtat

SEQ ID NO: 25973 - DNA, 591 bp, Setaria italica
  Peptide Sequence Number=SeqID_91947
taccgattaacatgtttctttatggttggtgttccttcaaatatttgtgcatgacatgtgacccacatactttttagtcaaggagcttggtcttgatgagtgataacaagagatatcgtccagttttcttcagaaaggaggacttggataactcactgtaccggacctctcgtgatcagcaaaaacctaatcctgctgttaggcttggtgacactcaggtttcttctttggaagatatcatcaaatctatgaaggataactcctcttcaaaatgggatgatgttgtatttattcctcctggatttgaccttgctactggctcgaagccatcacacctcaacaagtagatcattctatagaaggtggttagcagtgctatacttagtcaggcaactttacatttgacagtctggacactttgatagaagtagaatatatatacatatctttgacaaagtatgtgcttttgtccctccaactagcattatcgttagttcctgtgttagctgtatgtagtgtggcattagccagcaggaaactgaaatggaatgtaggtagcatgcagtttcgctacgacatttgatatgcctt

SEQ ID NO: 25974 - DNA, 198 bp, Setaria italica
  Peptide Sequence Number=SeqID_91948
agggagtatataagaagcatgcaaattcaagatctatccatgttcatctacattttcctcgtaccagaaaagctcattcactacggaatatacaagtatactaacaagtatactaattgattcttatgcaaaaagaactacatgtactaactgtttcggtaactacaagtgccccagaaccaaaataaacagattttg

SEQ ID NO: 25975 - DNA, 488 bp, Setaria italica
  Peptide Sequence Number=SeqID_91949
gccaaaaagttttatttagaatgcgtttcattcgtaggcttgtaacgattacatcagagagaacttgagatacatttccagttgtgcaaaacatttggagagatctacctcgccctctactgctgtaaaagtagtaaggtccaagggaaaacctagagcagaattcaacaacatgaggctgaacacaacctcatatatgaacagacttgacattgacaacactccgggattatcacccaaaagctagcttaaccattgcattcctccttagatcagtgtttaattccttgtgtgggattgggtgcggcagaaaccaagacgcagatgctggatttctgatctacctcggcactgccagtgtgttgccgtaccggccggagatcagtgcccgcccgccatgagggtggcgttggacaaacctttcgtcttggggagcaggacgactgccaggaccgcacagatcagggcgaaggcagcgccgatgccga

SEQ ID NO: 25976 - DNA, 635 bp, Setaria italica
  Peptide Sequence Number=SeqID_91950
tgaaaacgaggagcaacacgggatcagtaattttgtattgtgctcaaaagaggcaataatgcttgaagacaagtcgatggtaaagaaagaaatttgcccgcccgccatgagggtggcgttggacaaacctttcgtcttggggagcaggacgactgccaggaccgcacagatcagggcgaaggcagcgccgatgccgaaggccggggtgttgcccttgttgaaggcgccatcgattgggccagcggtgagcgcgatcaccagctgcggaaggactatggcgatgttgaggacaccaatggtgagaccttggcctccaccctcctcggaggcaacctcagacgcaacggcccacgggacactgaaaagcacggcctgcgggatgccgatgagtgcgaagacggcgagcgctatgcccctgtacgttttgtcaggaccaatgaggctggcagtgagggagggattgtagcccttcatggagatcatgccaaggacgaccatgaccgtcatgattgcgaacaccatcaggttgctgatcgaccagacgacccgggacgtgagcttccggcaaagcttggggatgaggaaggatgtgacgccaagagcgatggagcagaagaggaggtccgtacggtcgt

SEQ ID NO: 25977 - DNA, 1009 bp, Setaria italica
  Peptide Sequence Number=SeqID_91951
ttggttcttagttgtagggtagggtatttgttagtccctttctattggtagtattctattgttgccaaggacgaccatgaccgtcatgattgcgaacaccatcaggttgctgatcgaccagacgacccgggacgtgagcttccggcaaagcttggggatgaggaaggatgtgacgccaagagcgatggagcagaagaggaggccgacggcgccctcgcgcaccccggcgtcgaaggcgtccgccttgccgcccgcgccctgcggctcgccgtggtagatctcccggcccatccagtcggtgttgtactggaagaaggggaaccacgagagccaggtgacggccgtgacggcgagcaccttgaacatggcaggtggcaggttcttaaggctcttgaagagatcggcgaaagccgagcacgcgccgccagaggagacgtcgacgtcgtccttggcaagctgctcctcgccggcgagggccaaggtaaccgacatgctgatgataatgaggatcacggcagtcaagaaggcacccttgagatttgcgcaggcgtcgcagcacgccgcggtcttgagccacgggagccactcgtgccacttcgcgttggcgccggacaagtagccgaggacgctgccgagagccatccacaaggagaagatcgcctggccaacgttgggaccatgctgtccagcggaaaggtctgccatcatcgcgcgagccggtccctggacggtgttgttggcgaagtcgaggaaccagaagccgacgatgtagacggcggcggcggaccagcgggagcctttgaacgtgctgcagtgctccttggtgtcgccgaggtggcgtccgatgtccgccgagaagccgatcatcaagacagagaggcagatgatgatgcatccggcaaggacgaagggccgccgccggccaatcttcgccgtgcatcggtcgctgtagtagccgacgatgggttgcaccacaaatccggcgataggcccgcagatccatgtcagc

SEQ ID NO: 25978 - DNA, 241 bp, Setaria italica
  Peptide Sequence Number=SeqID_91952
tccctgacgagcgcgccggtggagtaggcggccatctcgacgagcagcacgggcgcggagcgcgggtccgtctgcagcgccacgtgcacgcgcccgcggcgccgcccgaagatggtgcccgtgacgcaggagcccagctgccggcgccggcgccggtgcgtgatcgccgccaggaacgctgcccgtagccgcgccagcgcgtccgcgcgcttcctcgacggcgactgctcggcggaggacc

SEQ ID NO: 25979 - DNA, 264 bp, Setaria italica
  Peptide Sequence Number=SeqID_91953
gccagctggtactaacgccatcgacgaatgctcagttttccagtagtgatagtatgatccctcgcgatcagggtcgagactcgttctcatatggttcgaatattccaattcaaatcaatttaggactatctgcatacatgattactactacatataacatcataagtaggctcaacagatttaacacagaaaataggagggaggagggaggttgttggttacattagtcgagcacgggggagcgcgagcgcaactcccttccac

SEQ ID NO: 25980 - DNA, 268 bp, Setaria italica
  Peptide Sequence Number=SeqID_91954
ttaagttatgtagttggtctcttcctctatggactttgtgattgtggatttcaatcactgatgtatcttccttttcagttgtgttgtcgttacccacctcgggagcacgtctcagaagacccaccaccccaaactgcgggaattgccctccggcgagtgcggcgcactccggcggccgagctgtcgggccgacgcggcgtcagccccgggtcaccgcagcgtcagccccgggtcaccgccgccgctgcgtttcgatgtctcgcggctg

SEQ ID NO: 25981 - DNA, 493 bp, Setaria italica
  Peptide Sequence Number=SeqID_91955
gcgtgacgcaccgcgcggcatcggcccgggcaggggcgagtggagagcttgccacggcatgtgcggccttgcgcgtcccggaggcgggggaggcgtcggcagtgaatggaagcgagacgtgccggctgtgtgtgatcctgtgtcttcaacggtggcggcgtggtgtcgcggccgtggtggtctgcgcaaggcgtgtcagcgacgccatggaggcgcggcaaggacgcctggcgcaggggcgcgctggtggcatcgaggtggagctaccttctcctcggctgaggagttgcggaggtgacaggagaggaaggcggctgggcgctagtgagggattgcgcggcgtggaggaggctacgtgcgatgacgcacatgcgtaaagtggcgacgcccgaggagacgtccggcgatgcgtgatggtgaggcggtgcggtggtggccacgtgcgaggagtggggtacagcggcgtggtacgtggtggcgcggcggcaaatga

SEQ ID NO: 25982 - DNA, 380 bp, Setaria italica
  Peptide Sequence Number=SeqID_91956
agttttggacatggactatggctcatttgtgatgccaaaatctatgttcctcgatttgtcttctataatcacgtttttctgctgaggtacctgaaggtcagaggctttcgtttgaagctgcctaagaaatttggggaattgaagcatttgctgaccgtagatgtgtcattcgtatggttgtatcctagtaatcaatcgtcggattttacgtccttgtcagcattgaggcatctaatccttccatctacacaagaaagtttagtgcgacgaaacggcattagcaggttgtgcaacctacgcactctgtttcattttgatatcaggacaaattctttagagtgcatcagagatctttgtgagttggccaatctaagggagct

SEQ ID NO: 25983 - DNA, 402 bp, Setaria italica
  Peptide Sequence Number=SeqID_91957
taaggacttacaagaactaacaaggagatccaagccaaacgatgttctgaaagatgcgctgcaggacctaatggtgatgtgccagtatataagggggacatttgacacttcagtggctgattttcgggggaacaaaccagaagtcatggacatcgatttgaacaaaaaatagaaggttctggatgatcgttagccggatggcagaaatgcacagatgtttgctgtgctaagttataaactagtctagttgtatggggtgtagtccttaaacccaaagtgtgagatgtcattggcatcagggtacttgtcagtgtcacttcaggtttcttggtcaatggttttatggcacttgatattgtttggagagaaaaaatccaatgcaatcaagtaatcaacatactt

SEQ ID NO: 25984 - DNA, 413 bp, Setaria italica
  misc_feature (12)..(12): n is a, c, g, or t
  Peptide Sequence Number=SeqID_91958
aatattcacagnttaaaatgtcccaagcagacgttacaagtgattgattgaatcaccattgcacactgtactgcttcagttatccatcgggaattgtggcaggaccggaaggaggctacgtgtatgtacaaggtgttggtggtgcccatggacgcgcggcagcctacgacaccgacgctcggcaaggtccgcgctcgacgacggcgacggcgacggtgacggagtactccggctccgtggaggcctgcgccgacgcgcagcactggagaggatccgaggacgctgctaccagcgccggcgccggggccacgtactaagggtcgctgcggcaggaggggcacgtggaggtgcagaggagccaggtgtcgacgcaggccgcgtggaaggcgtggccgcacggcgggagcacgcga

SEQ ID NO: 25985 - DNA, 673 bp, Setaria italica
  Peptide Sequence Number=SeqID_91959
cagcaatgaaaagtcatggcactttactgaaatgttactttcaaaaccgttgaaactcccaaaacaaattccagaagacactgaaccatgtagctgcattagttcaatccatctaaaaaaccgcacatataacaaaaacataacttcaactcaaatcagcacaagcaaagcacacaacaataatttgcaaaagctgctgccattagtccaaacacaaatatctttccataaccgcaagcatacccgctacttctattattataaagatttatattgcccccatgattagaaatacagaacctcatgaaatccacacattgcacaaatatcatccagtccatctctgtagccatggtatgagatgctgtgaaatacaaagcatttttcaagcatcgtacgacatggcttaatttatttatgaaggttacaatgttagagagctctcatattttcagatcaagcctctgctgggaccttcaatctcaaatgactttccctgtatgcgatgatgcactgccatattggatgcatattcatgactcatgacaatggactacaatgacatactggattaaatactatcatagtgtacccacagaaatatgcatacctcactagcctagcagaagcaaaaggcacttgtcaatagaaaagttgtaccgcaaggttccca

SEQ ID NO: 25986 - DNA, 197 bp, Setaria italica
  Peptide Sequence Number=SeqID_91960
tgacggcggcgacctcgtcggggctggcgccctcgaggtccttccagtacatgcagagcagcatgaccgtgttgacggccatcccggcgagcatggccgggaggatgccgaagaagaactggaggaaggtgatcctgctgttgaaggcgatgacgaggttctgcgggttcccgatgggggtggcgctggagccgacg

SEQ ID NO: 25987 - DNA, 626 bp, Setaria italica
  Peptide Sequence Number=SeqID_91961
atatcttgaggttgcggactgccgccggcagcgtccagccgccgctccccttcttggcgtccttggcgcactccccgccggccctcctggccgcggccgcggccgccgccttggacgcgccgaccgacttccccgcgcagtcgtggtcggccgggaagcggtgcctgaggcacaccttcagtccgcaggccttgcactcgctggtgttggagaacgtgagcggctccttgcaccgccgcgcggggcaccgaggtttccgcttcctcgccgggtcgcaccgccgcgaccgcgcgtgcgcctccaggacggctttctcgtcctgccccggcgctgtccgctcgatggcgtcgccgcagtccgggcagacgacaacggtgcggccctggtcggccgccttggcgcagccgtgttcccggtacgtccggtgcgccgcgcagaagaccttgccgcacccgtcgcagtcgaacgggaggaagtcgagctggttgcagtccggctcgtcgcagtgcgcgcccaggtacgggaacgcctccgtgccccgccgcgccatcgctgctgttctctcccttgcctcacgcttcttcttctgcagtgaatcctttggtttcttgcggcgttggcgatcg

SEQ ID NO: 25988 - DNA, 548 bp, Setaria italica
  Peptide Sequence Number=SeqID_91962
agcaccctttcttcctctcacctgccatgttttcacctcccaatgttaactcattcccacacccttccctgtcctggtgcctctgattacaaccttctggcttggcaccaacggtggcgaagaaccctctctttgctcccgtggtagtagcagtgttagtggcgagcctcgaatgtgatgggaagcaaccaagggagagtgctgtgcagctctcctgttgttgctccatcttctctctcgggccggctgctctctcctcgtcgtggacaccagggaggccgagcttcagctccagcttggtgtcctcctcggcttcatagcttgtggttcttgctgatctcccttgttctcctgcctctccgatcaccttccgttctccttcgcctcggatgaggtctagcagttgaggagtggaaggagctctccctctggagccttcctccattggaacttgatttgctgaggcaagatcgaccaggtgcagtgcagtcacctgaccggagctagctgaagaactcgacaaccctggtggaggtgaggtcgtgaga

SEQ ID NO: 25989 - DNA, 342 bp, Setaria italica
  Peptide Sequence Number=SeqID_91963
ccctcccctgcctctcgatctctctgctctctcgcagtggctccgacccaagaaagcagccggcgacagaagcgcgaggtgatcgatggcgtgcggcggcggacgcgcggcacacaaggcgttcctgctgtgcaactacacgctgctgggcgccgcgtcggcgtgcatcttcctcacgctctcgctccgtctcgcgccgtccccgtgcggcctgctcctcctcttcctccacgcgctcaccgccgtcttcgccgccgcggggtgctcgggctccttcacggacggcggcgcgggcgccggccgcgcgcacaccgcgcacaccgcgggggccgtcctcaccgc

SEQ ID NO: 25990 - DNA, 538 bp, Setaria italica
  Peptide Sequence Number=SeqID_91964
ggggagtggccggcttttgccacagatcagtcaggagggagaacacaccagcgccggcaggctcgacctcgttgtcgctgcggtagatggtgaagcgcgtgcgctccgttatctcgcacacgcggtccatgtcggacaccccggacgcgttgaccttgaacgcgtcggcgacccagcgggcctcgtggcggcggtaggcggtgccgggagggaacgacgcgcaccactcgggcggcgcggtgaagtcctccggcgtcgtgcgcgggtgcgcggcgttcgccgaccgcgtgccgaagaacgcgatcatggcgcccggcacgatctggaacgcggcgcacggcaccccgtgctcgtcggcgatcgccgggacccagctgtggcagaagtcgatgacgatccagtcgggcctcctcccgccggcgacggcgtccgcgaggaacgccgcaaacggggcggcgaggccgtcgagcgccttcttgatgagctcgttcttctccggcggcacgtcggccgtggactcggcgccctcgggcaggcc

SEQ ID NO: 25991 - DNA, 636 bp, Setaria italica
  Peptide Sequence Number=SeqID_91965
tatttttagtaatagtacagtagggggcaacagatatcagaagacaagcaacagtgtccatctgcttaacctggtcatagttcataaagatgtgatagaacaagtagaggaacagaattatcctagccaccagccaagtaacaaacattgcaattccgttgacaaggtatgctttggagtttttttcttccagcgacatcaaggaaccatcgtaggttgattcctggcgtcgtagtttcagagatgagaaccatgtacgtgtataactgtccttccccagatagcatggcatatacagcacaaacaagtgatagaatgtggtggaaaacatactccataccaccaagggaagggtaaaaccaaaatatcatggcaagatctgcaatgaagtacccaacagacacccctaatgtaaaattggagaggtgcgaactccgaaatgttactggtccatccagccgatcagagaacaaacctgacaagaagactagatatactgacataattgtaatgaatattgcatggacattggacattcccctattgttccattcaatcttccgaatatttgtaagggaagcataacctttgaagtagatagcactgatcatgtgtgtgatgtcgtaggacaacttg

SEQ ID NO: 25992 - DNA, 535 bp, Setaria italica
  Peptide Sequence Number=SeqID_91966
ctccattcctccatcaaaagctaataagcgccgggcaccactaagtaattagcatctgaaaccctagagcccgtcgccagagcaggaggtgaattactgttgtgtttgccaaacgccccataagcaaagcaatggctacttgtgcagcgaacaagaagctccaacaggtcctctgcatggcgctcatcgtggcagctgtggctgcagacgtgacgccgacttgccaggtgccaaacaatgtgacggcctgtgtcgagcagatcaaggatttcaaggagaagaaccaggggaagctgttctcgccggattgctgcaagcagctcacggagcagtttggctgcgcctgcgtcctccgcaacgcgctcaaaaatgccaacctgctcgacatccaggagcccttctgcgtcaagggcaccgcctgcgactagaacccagccttttaagatttatatatatactccgtggttgcttcatcgatcgcatgcgcgcagctcattctcttcggtggcagttttatttatcctgtttgtgtgcg

SEQ ID NO: 25993 - DNA, 281 bp, Setaria italica
  Peptide Sequence Number=SeqID_91967
atagtctcggaggactatagctatagtcgcaagtgagattgtacggactaaagcccggccggccgcagcccttgccgatgccaaaaggatggggaatatctatgttgccgcacttactagggcagtctggtcccggcgtcgaggggttggatgcagcggcaacaagatgggaggttactagggcaggaacaaggagatgccacagtagaattcgaagaggtgccatggctgctgctggattatcggcgcttagatgctaacaactagacagtgaagatgct

SEQ ID NO: 25994 - DNA, 640 bp, Setaria italica
  Peptide Sequence Number=SeqID_91968
cgccatctgcctgcagcacatgcagggggaggaggaggtcgccgtgcaccggcggaagcagcagtacatgcggctccgcaagggctacggccgcaagatggtgacgagggaggccgaccccgacatcaggtgcccgcgccggaggggcgacgggtgggtggaggtcgagctgggcgagttcgccgtggccaccggcgacggcgaggacggcggcgtggtggaggtgaggctcgaggaggtggatagccggaggtggaagaggggcctcatcgtgcaaggcatcgagatcaggcccaagcacgcttgctagctgccgccatatagccgaacgcctgcgttgattcttttttatcaacagttagccatcggattaatttttaatctaggaaaaaatcattaagaattaccgatgaattaggtccagagaggaacagctagccgacgaagctctcagcctgattcttttctggactgacgcaacttaaaaattcagctactggagaatggtcaattgcgtcagtgcttgcatgcggactagtacgtagtacgtgctgctgcagagcgctaatgtacttgatgcatggcccgcaagctgttgctaaccacaacggcctgtatgtagatgatcgcatgaggagcc

SEQ ID NO: 25995 - DNA, 260 bp, Setaria italica
  Peptide Sequence Number=SeqID_91969
cggggaggagaggaagaggcccaagttccggtcgctggcagctatatacagggagaccgagacgacgaggcggatggcgccgcccgcgggcggcggtggagagggccacgcgtatcgggattcctcggagggcgagaggaggaggaagaagaagaaaagagcggccgaggtgatcccccaagattggttcatggatatgcatgtaaactagtaggctcgattttcgtattaagatttgctcgatcatgcatagagcatag

SEQ ID NO: 25996 - DNA, 2513 bp, Setaria italica
  Peptide Sequence Number=SeqID_91970
ttttttttttgtcttcaacgagttaactcctcaattgatatgctattcgaaaactctggttttgcaatcgtgcagacctccagtccgtactcattctgtgctactaatccagtgtctccaacaaaattggatcacccttacagctagtgtcctttccgcggttatcttctgcgaagtcgacacgcaactcgctgcaagtgcacaggctgtatccaggcactctccgtcaaaaatattgccacgttccgagtccactctataacagttcctcactagctcctaggctcagctacgcttcttgattgctacataaatagtgggaagaaaaaaaaacaatgccgttcaaatcagctcctcctatggctatgccgccgcctgcgcggcggtttcatcagcacggacatgggatcagcatttcgggagtctctcgtgtcagcggccgcacctccaccatctcctgtcagccagttcagggcctccgcggcagcatccttctccgcaagcttcttgttcgcacacggctgcccgacgaactgcatgccattgaactcgacagtggacctgaagaggctgttcttgatctgctttgtcttgtaggacgggttgctgtgcccggcccgggtcaggagggtctggagctggttcttggcgttctcaccaccattgccacctccgccgttcatggaggatgatgagagcatcgtctttgctttctttgatctttgctcctgtcggccgtaaacaaaccggccgctgcatgggtcctcactgaccagcaaacggatggctgatagcaattcttcactcgtttggatgtccatccttgggttttggagcttgcaatggattaaattctcgagctcattctttagactcaaataagttgatgcaagatcacgattcatgaagaattccagataacctccaagcatttttaagtggccatccaagcccccttgttttatgttgcctccgaatagcaacagtatagaatcagatacagcagttgaatcccggaggaaaacagaattcaccttcaccttctcattgaaaactagccaggggaatggaatcttggcttctttaccattaaccgaactcgaataaagcataacctgtccgtcctccattgtcttgagggaaattgatttctccttgttcacaacagaggaaacaccaggatatagccctgcacaaattactgctcgaactagattttcatcacggctccatttattgcacacagtcatgttttcatcaaccaaaccagtatccttcagaagaaagaggaactgacgccgaagggaatctattgctttcaaggtttgcaccgaaagaaaatttttccagcagtagtcatagccagcacgatctcgttcagcctccctccatccttcgtatgcacgaacaagtgcaagatgatcactgtagtcccggcatgaaaactgtagtttagctgactcagccagatctttcttgtcaaagggagtcaagaaagggtctctaacactaagtccagaaactattgttaatattgggtccagacaattaaaaatagccccaaaaataagcatcttgcctaacttaggctcaactggaagcatagacaagtgctttccaagaaccgtcaagtcttcattctgatcaaatgctccaatgactttaagatattcaatggcattttgtactgatagagattctggtgattgcaaagctctggataaaaattctgatatacttcccagcctcaagctttttatttgtaaacacagggactggagaggagttcgtagaagttctggtaactggtagtcagcaaatgcatcatatacacatcgtggataaagatggtagcactcccctggttggactcggccagctcgtcctcgtctttgtctggcagaagccttggatatccatgtcggaagcaaacagggagtattattcagtgcatcgtaagatgtctcttttgctttgccacagtcaacaacaaaaactacatcgttgatagtaatactagtttcagccaaattggtggcaagaactattttccttactccaggctcaggcttatcaaatattaatttctgctctgaactggccatagagccatgacaagcgagcagcaaaactttgcttggatctccaagtaatggatttgcttgcagctgctcttttagtgcattaatgtcatcccacccagtcataaatacaagaacagcaccagatcgttccttttgacaaatatggcataagacattttctattaaattaaaaccgattgaatcaggattccaacatgatagagaatcacgagttcgcggactgtagttcctcaaatcagcagtttcaaccgcatcttccacagcagaagcgatttggctcttcctctttcgtagacctttgtttttgcatcttccaacttttttctggccatagtcatcaatttgattgtaaggagtcaatcgatgtccagtgaattcaagaatgtcttccaggaaatgattccgaac

SEQ ID NO: 25997 - DNA, 372 bp, Setaria italica
  Peptide Sequence Number=SeqID_91971
atgggccactgtcttcacccttgcttttgttcataatgcgaagaagggtgcgtctttctctttccctagcacctctgatagcctgaaaaacaacacagtcatcagcagaaaataatattcctctaggtaccaagccagtttcaaatatgacataattaaacctcttctagtgccttgcgttcactatcctcttcaatcgcgtcccttccaacaaggtcattgacacgagtgcagcacttggcacatatcccgagattcttggagcaatctctgcagacgttgtggtacgcctgacggacggctcgcttcccacacttctggcactttgcgggctcaacaatttgcttgtacttgccgtacctgcgcttccag

SEQ ID NO: 25998 - DNA, 860 bp, Setaria italica
  misc_feature (1)..(3): n is a, c, g, or t
  Peptide Sequence Number=SeqID_91972
nnnactcagtgtgagtagtttttttttagaaataattgaagtagagcagtaacacagaaatttatacagtaatttaaacatctccaatttgaagctttggaataaaacaacaggaagtacttttacacggcgcaatagtatttctacagcgtctgacaacggaccgcaaaagcatcacctcattactccaagaaagaacttttacagtaattcagaacctaatcttctacgaagtctccggcttcttcatcagaatcatcttgctctctagattgttcggcatattcatcaagtgatgcggcagggaatatgtcaccttcacgacttctgtcagcaatctttgggactgatgggccactgtcttcacccttgcttttgttcataatgcgaagaagggtgcgtctttctctttccctagcacctctgatagcctcttctagtgccttgcgttcactatcctcttcaatcgcgtcccttccaacaaggtcattgacacgagtgcagcacttggcacatatcccgagattcttggagcaatctctgcagacgttgtggtacgcctgacggacggctcgcttcccacacttctggcactttgcgggctcaacaatttgcttgtacttgccgtacctgcgcttccagtcgatttggtcccggcagcgctggcagacgccggtgatctccgacagcggccggaacctgcccccaggctcggtctcgttgatcttctggccgaggtgcggcttccacgcgtagctgttctggtgcttcgggggtccctgccgcttcgacatcgccgaattccggtgatctctccctcctccgcttcgcgccgccgggggtttctcttcctcccgtcc

SEQ ID NO: 25999 - DNA, 320 bp, Setaria italica
  Peptide Sequence Number=SeqID_91973
tgaataataacctgatttatctcatcttgaagtgtcatgtgattgcagcacacttttatcccttccccgctgccgtagccgccggcgctggagcagttggtcgccaggatgaggctcggaaagaccttacagccggccttctccatctgctccctcaggaaccgcaccgtcggatgtttgagcgccgaacggatgcccgcgacgcagtcctcgcgcgacatggcgggctgggttcgccgctcggaggaggactcggcctccgcgcggacacccgccgcgccgccggcgccgccctgcccctccgccatctctctctatct

SEQ ID NO: 26000 - DNA, 333 bp, Setaria italica
  Peptide Sequence Number=SeqID_91974
ggcaaatttttcgttattgaatccagacaagttgacaaggattactgcattcgcaagggctaagaaaagacgaaagctagtgttgtggcatcagagtaagctaaaatttaggcacgtgaactggttacaaagaagacaaccaaagtggatgctctgctcatcatcctgttacatatcatcgagtatggacactatgtcctgcagacaaaagtggagcttgcagagtaacgtatttttctgaactctacagtgttttcgctaatcgattggcacttccacctccatcttgagcccaggatggtcgataatctggataaaatcttcgactgaaaa

SEQ ID NO: 26001 - DNA, 547 bp, Setaria italica
  Peptide Sequence Number=SeqID_91975
ccggcgcgcgtgggctgcagcttcctgcggcgcttgttggcggaggactcctcgccgtcgaccatggcgagggacgaggggctggaggaggaggaggactgcgtggggatgcggaggacgccgtcgacggtggtggcgatcgccgggaccgtgccggtgccggtggcggcgatgatggcgggctccgactgctgcagcagccaccggatggtctcgccgtccgacttgtgccctagctcccgcgtcagctggaagatcctggccgcgcacgccgcaggcatgcggatccgccgcccgcggccctccaccttggtgtgccggtcgcggttccgtggcggcggcttgccccgcaccactgccatcccgccgaagtactccaccggctccggcttgggcaccatgaacccgtgcatggggatcgcgcccatcgccatccccgccgccgccgccgccgtcgcggcccccaccacgtgctgctgccgcgcggcctccccctcctccgccctgtcctgcgcctgcgcctccatggcgcgaatcgaaacgagag

SEQ ID NO: 26002 - DNA, 275 bp, Setaria italica
  Peptide Sequence Number=SeqID_91976
tgcgggggaggctgggccgtttcctcggattccggctccaatgcgtggacacctttctcctctatctggtcggggacggttggataaccgccaattcctctccaattcaactgacttgcagcggcgaaagaaacatcagaagctcgtcctcagaccagccgccgcgaccagattcccggccaaccttgacatcaactccagcccaaaagaccaaatcttttccacctgaagaacccaaaatgctcagaattttcgcgcgacacgcctcggtagag

SEQ ID NO: 26003 - DNA, 1103 bp, Setaria italica
  Peptide Sequence Number=SeqID_91977
ttttttaactagtacaacttttttttcttctttctcgactagtcccaatataccgaccagaagtttaactagattcaccaccaatacgacgacgcccaacttgttcacgaagggcagaaggaaaccggcagtcacccccatcttttgtcagattgattgttaaactactaccaggtgaaaccacaaaaaccaacacaccagcgagctggccatgtcgacatacacttctccagccgactgacggtcacggttgcatcgcgtcaggtaacttggttcgtcatgcttgcttcccagcacttccatgggccgcatcacttccctgggtagcggcacttccctgggctgcatcacttccctgggtagcgacacttccctgggccgcagcacttccctgagcagcagcacttccttgggcagcttcactcccctgcacaggacgtccctggacagccttgtagcatgccaggctgcagagtggaacccttgtcttggagtcacggtacttgtacgggtttgtgcaatttgggcctgcacacttctcccttggaggtggataactgacaggcttggagttaaatatgcttggaagccccatactctcagggaatgtgatgacagttccagttgggcccatgacagtctggatgcagtttttcctgtattcttccaatcttgcttgtttttccttctcctcccgttctttcagcttcttctcttcctttttcttctcagaatctatacccagtatcttcctcattgcttcagcctgttgttccttctctgccttctcaacttgcatcttacgcctctgcgcagcttctgcttttttggcttgtatctccacttctgaaagcttttccttttgctttcttgatgaagcagttggtaatccatcaggaaattcaatcaggctttcaccatgcccacccctgccttgaagggctcgctgtcttgttgtaagaccaggagtttcaatctttgcatctgaaggtgaatcaacttcctttagcccattcttttcatccatctcagattcctcctcttcaatagactcattgccatcccataattgttaaatttcttccttacctaattacccttag

SEQ ID NO: 26004 - DNA, 275 bp, Setaria italica
  Peptide Sequence Number=SeqID_91978
ctgtcaaatccaggtagaagtctctcaacaaccaaacaaagacaggtgaaaactgcccaagttcagatgcagtggaccttccgcctgaggccctgacacgtatatgctttgtcatctccgtgaccagtgagagacgatccaatgcagattcatctatacctcccatctggttgtagatgaacatgcttgacagtagaacagccaaggaaaatatttggatgctgtaagtccccgtttgatcataagcatcaattccttccgtatccaacaacaac

SEQ ID NO: 26005 - DNA, 308 bp, Setaria italica
  Peptide Sequence Number=SeqID_91979
agttggaccgtaacactgtggtgcataactggcttggaggtacagttgcagagaaagcggttgctgctggtctgagatgcattctaagcaaacaggaaagttggtacctggatcacttagatgctccatgggaggggttctacatgaatgaaccactggcaaacatctacaagccagaacagcagaggttgatccttggtggtgaggtatgcatgtggggtgaacaagtagatgcatcagacattcagcaaacaatttggccacgtgctgcagcagctgcagagcggctgtggacaccaattgagaag

SEQ ID NO: 26006 - DNA, 324 bp, Setaria italica
  Peptide Sequence Number=SeqID_91980
atatgtgtttccagtcttccataaaacattcctgagccaacaaaggaaatttggcaaacctcttatcaagtagtggtatttgttgcatagactggttgagctaagggagatcaatatcttactgctgattgctgaatctctttaccccttgccaacttgctgattacttttgcatagatgttcatttcattattttttctttaagctttatctacactagttaatcatttgttagcattagttcataatttctagttgtgcttgttatgagttttctgcgaagtatttactggtacctttttataagaaagaaagtttacagta

SEQ ID NO: 26007 - DNA, 324 bp, Setaria italica
  Peptide Sequence Number=SeqID_91981
caccgcgggcacctgccgccgcaccacggcggcgagctggtggccgccgcagccgtgctcgccgaggagcgccgacgcggttgtcgcggtgtccagcgctggcctggtgacggcgcgggggtcgtgggggaaggcgtgggcggcgtactgcgcgtgcacggccatgggaggagaaggacggatggcgcggggatcggaggtggcggcaaggatggcgccgctgggcggtgtcttactagacgtgggatggatgatgatcgatcatgcagtgagctcggcggtgctctgctcgggcgacgacgagcagagcacgatggtgttata

SEQ ID NO: 26008 - DNA, 345 bp, Setaria italica
  Peptide Sequence Number=SeqID_91982
tacgcgtctcctatcgtaggtagcactggcacgcatagcatccgagccgtccttgacacgcgctctctcacctcactgctacagatccaggctggacgctggagtgtggagatgagggatggcgctggagttttgggaggacgcgccgtcgcgccctgacgttggtaagaggattagcagatcatcagcgggagcagagaggccaggactcgcagggcagagttgccgctggggtagtgaacgctgactcgctgagcaaagaggggagtggattggaagcagagcttaggagttagaggttgaagaagcatgcggcgtgtgaaagttcagagtggtggatagagt

SEQ ID NO: 26009 - DNA, 1074 bp, Setaria italica
  Peptide Sequence Number=SeqID_91983
ccaatgaagcccaactcggtctatatcgaggaaacgggccgttcgtctttgtgggcctgttcgacgtgcaagcagttcgtcactacaaatgaagctagtgacgaggctgttggagcgttgccggggaagaacaggaggcgtgcattccacccgtagctaaccatggtgtgcgtgcggcgtgcccccacaagataaaaaaagttgagggtgggcaacggggggataaataaccccacctgaaaacggtgccaaactagggtgacccctggtcgggtagctcctccccggggagactaaccagctgcactataggccgcttggcgcgcccacgagatatattctattgatctgctaatctgacagtatccgatccttgtccgtctctgcaagcaaacggttggcaccagcaattcatctcctctaaagcttagccacgacaaagcacaataagattataaaaaatatactccctccgttccaaattagtattcgtttagacttttctagatacagaatttttctatgtatctagatatatgtgtatgtctagatacataataaaaggtatatatctagaaaaaactaaaataaatagtaatttaagaccgagggaatactacgtgtttctaaaaagacaaactttatctaacaggataaatattgggtcatcaagataacccaaaaaagaaccaagcagcataaggcattgtccaactctacacgaaactgtaggcaaaactgcacacgcaaggtccatgtataatagagtctgacctcattcagaatttaatttagtccatccatcaagaaatttccaatcgcatgattagcttctgttttttcaagaaaaaggtgcctacactaaaattgagcgttccaaattatagtccgttttaatttttctaggtcataatttttgttatacatctagatatatacgatatctagatatgtagtaatatgaatctagaaaattcataaactacttgtaatttgaagaagtagccaagtaggttactagtgaaattgcacattggtcaagccctgatggttatcaaaggacaaggccttgca

SEQ ID NO: 26010 - DNA, 234 bp, Setaria italica
  Peptide Sequence Number=SeqID_91984
cggggttcggtgaattgggtctcgaggtagctgctcgaggcctcgcggcgtatgcggcggtgacgggctggtgtctggaggtcgccggcggcgggcaacgaggagaagggttctattagagcggccgcggggtgacgtggagctccctcattggctgcagtcacgtgttttcgccgtcgggcaatggagtgcttggactgggatattgcgtggaattgaagtccgctgctgctg

SEQ ID NO: 26011 - DNA, 727 bp, Setaria italica
  Peptide Sequence Number=SeqID_91985
attgtgccatttgtcaaagcaaatggggctaatgcaaaaaactccggattggtttggctttgtcatggagattctttctgcaaatgatgcatatgaagtatggcaccccagatagtgaactccaaaactatgccatacaagcgatggaaattctccaagggaattattctcctgatccacatgcactggcatgtgttctgtatgttctccgagttggtgtcgcggatcagatgactgagccggcacaacgtgaatttttggtatttcttggaagaaagctggagtcttcaaactacacagctccaatgagagtggcaacattacggattttgtcttaccttttgagaagcttgggtgaggttccagttgaattcaaggatgttcttgataacacagttgttgcagcattatctcattcctcagctcatgtccgtgtggaggcagctttaacattgcgtgctttagcagaggttgatcctacatgtgtaggtggtttagtttcatatggtgttacaacattgcatgctcttagagagactgtatcatttgataagggcaaaaatttgaacgttgagcttgactccctacacggacaggctactgtgttagctgctcttgttgcgatctcgccgaaattgcttcttggttatcctgcgaggctgccaaagtcagtacttgaattgtccaaaaaaatgctgaatggtttcagtcgaatccagtggctgct

SEQ ID NO: 26012 - DNA, 1171 bp, Setaria italica
  Peptide Sequence Number=SeqID_91986
ggcgcctccgccgcggaggaggagcccgaggggctggagcggtggacgcggcccccagcgcgcgtggagcactcgatgacggacgaggagctgctctggcgcgcgtcgttcgcgccgcggctgcgcgggtacccgttccgccgcgtgcccaaggtggccttcatgtttctcacgcgaggcccgttgccgctggcgccgctctgggagcggttcttccgcgggcacgaggggcgctactccatctacgtgcacgcgttgccatcctaccacgccaatttcacctccgaatccgtcttctaccgtcgccaaatccccagtaaggtcgcagaatggggtcagatgaccatgtgtgatgctgagagacgtctactggccaatgctttgctggatatatccaacgagtggtttgtgcttgtgtccgagtcctgcattcctatatttgatttcaacacaacatacaaatacttccagaactcaagccaaagctttctcatggcatttgatgaccctggaccatatggacggggaagatacaactggaacatgacccctgaggttgaacttgaccaatggcgcaaaggctctcaatggtttgaagtagacagagaacttgctgttgcaatcgtcaaagacacggtctattacccgaaattcaaggagttctgcaggccccattgttatgtcgatgaacactatttccctacaatgctgactattgaagctccgcacagcctggctaacagaagtgttacttgggtggattggtcgagaggtggtgcacatccagccacgtttggcaggggtgatatctcagaggaattcctgaggagagtccgagaggggcggacctgtctatacaataaccagaactccacaatgtgcttcttgtttgcgcggaagttttctccaagcgcattggagccattgttagagctagcgcccactgtgctcggttttggttgatgacttgatgtatgcttgaagaggtgttgcctgtaattttgatattagatcagtgtaggattacagcgtggagacacgggcttagattgatggatgtaaacacgcagggtgcccgcctccactgattattatacacaaacttgttattgttttgtacagtataaactgacaatggatcggaagtttctattttttctctaaaaaaaaa

SEQ ID NO: 26013 - DNA, 257 bp, Setaria italica
  Peptide Sequence Number=SeqID_91987
cgagcacagcttcggtttcctccccgtccgcccgcctcaggccagcccaccgccgctcctctgcgagaaaaccgccgccgccaggggcaggctgccgcctgcgaagtccgaccaccgctgaggtgggcggcatctcgggagagacggcgcgggaaggggcgacgtcctgcggcgaagagggagcggagagctggaaccggaggtgcattggccgccctggcgaccagccggccgtcgccggagccattgggggcgga

SEQ ID NO: 26014 - DNA, 261 bp, Setaria italica
  Peptide Sequence Number=SeqID_91988
ggtgatgggcggcatggtggacaacgagcgcgatgaaggcggtggcggggcgcttctctccacccgagatgcgccccatcccatggcagcggtggcagccggcgatggcgccgtagatccggctctacctcggctgcctccagcgtctccgcgagcagatctatctgctcgtggtcattggtgttctggagggcgcggtgggctatcggtgtcgggggtgtggtgtcggtcggatttgggcgcccttctccggagcggttc

SEQ ID NO: 26015 - DNA, 477 bp, Setaria italica
  Peptide Sequence Number=SeqID_91989
ccgctcaggtatcagactctggccttgaaggtgagcatccactgtgagggctgcaagaagaaggtcaagaaggtgctgcacagcatcgaaggggtgtacaagacggacatcgacatgcagcagcataaggtggtggtcatcggcaacgtctccgccgacgcgctcgtcaagaagctcctcaagaccggcaagcacgccgagccgtggccggagcctgctccgccggcagcggcagccgccgatgcgcccggcggatccccaggcagcggaggcaagaagaagaaaaagaagagcaagggcaagaaccccgcgaacaacaacaccaacaagcccgctgatccggcgccggcggacggcgggagcggcccctgccccccggagaagcaggacaaggctgagggcggcggcggcggttcgtgcgatgaagcgtccgatggcgagcacgataagcctgagggcggcggcggcaacggcccc

SEQ ID NO: 26016 - DNA, 1185 bp, Setaria italica
  Peptide Sequence Number=SeqID_91990
ggtaacttcggggtcgcgaggctggtcagggacaagcagaccaaggagctcgtcgccgtcaagtacatcgagaggggcaagaagattgatgagaatgtgcagagggagatcatcaatcaccagtcgctccgacaccctaacatcgtacggttcaaggaggtttgtttaacacccacacatctcgccattgtaatggaatatgctgctggtggagagctctttgagaaaatctgcaccgcagggcgattcagtgaagatgagtccaggtatttctttcagcagctaatatcaggggtcagctactgccattccatggaaatttgtcaccgtgatcttaaacttgagaacaccctccttgatgggagtccaacacctcgcgtaaaaatttgtgactttggttactcaaagtctgctttgctgcattcaaaaccaaaatcaacagttggcaccccagcttacatagcacccgaggttctttcaagaaaagagtatgatggcaaggtagcagatgtttggtcctgcggcgtgacactgtacgtaatgctcgtggggtcgtatccatttgaagatcccgaggatccaaagaacttccgcaaaacgatcagcaggattcttggcgtgcaatactccatcccggattatgtgagagtgtcttcagactgcagacgccttttgtctcaaattttcgtctccgatccttcaaagaggatcacgatcccggagataaagcagcacccttggttcctgaagaacctgccgagggagatctcggagagggagaaggccaactacaaggacaaggaggccgccgagccggcgcaggccgtggacgagatcatgcggatcgtccaggaggccaagaccccaggcgacatgtccaaggtggtggacccggcgctcctcgccgagatggccgagcttgagagcgaagaggaagaggctgaccccgaggacacctactgatcagctcttgcatgcagaggcccttgggctgcagatacaggatctcggaactggatgtggtgccgtcggacctaaccaaccataagtaaaccaagcgagtgtgtgtgttaaggaatgctgcattgttactctgtatagcgctgtacaattgtacgttgcattgcacgggattaactatagggtgcagtgattgatttaaataaaagtaaagatgttggatct

SEQ ID NO: 26017 - DNA, 733 bp, Setaria italica
  misc_feature (1)..(58): n is a, c, g, or t
  misc_feature (78)..(78): n is a, c, g, or t
  Peptide Sequence Number=SeqID_91991
nnnnnnnnnnnnnnnnnnnnnnnnnnnnnnnnnnnnnnnnnnnnnnnnnnnnnnnnnnagagtgatagttctatttcnttaaaaatgctgatatagcagttttggtaacaacggtacgactgacctaacaataacaataacgatgatacccagctgtcttgccactccacccacgtccctgattgggtggcctgctgtccaacctactagccctttacacttgggagtgaacacggtaggcccttactccaattccacacagagtacctcagaccctaacccctaatcatgctaagagtttgagaagatatctgaagctacgaacacagattctggcgcgtagtggtgtttgaaaacacccagctcagctgcaatatagaaccctcatttttcttcacgaggctgtactctgtagtggtgggagaaaacacccagctgcaatgcacacacttgaacttgaacggaatacaaatttgcgtgcgtgtcgtacagacacaactttctttttgcttcagaaaaatgagccatgtgcagacgaatagatcttcatctagctgtactctgtagcatgctcacggaacctgttctctgtctcttccaagcgttgggattctcatctaggagtaggttagctagctggaaaaatacacgccgcaagtgggaagcgaacatatgcaagtctctttcttccatggcccagtagcaaaacgaatcgcagcccactggttggttg

SEQ ID NO: 26018 - DNA, 502 bp, Setaria italica
  Peptide Sequence Number=SeqID_91992
ggcaaaaataagtgcttgtggaggcaatggtttggctggcggaggtggaggacgtgtttccatcgatgttttcagcaggcatgatgatgcccaaatctttgttcatgggggaaagagttcaggatgcttggacaatgcaggagcagctggaactctttatgaagaagtgcctaagagtattactgttagcaatgataacttgagcacacaaactgatacagtttttctagatcccccatatgagccactctggacaaatgttcttataaaaaatcatgccaaagtttctcttcccttacgctggagtcgtattcaggctcaaggacagattctttagctggtgctactctaacttttggcctgacacattatccgtattcagaatttgagctgttggctgaggaacttcttatgagtgattccacaatcaaggtctttggtgctttacgaatgtcagtaaaaatgctccttatgtggaactcgagaatgactattgatggtg

SEQ ID NO: 26019 - DNA, 231 bp, Setaria italica
  Peptide Sequence Number=SeqID_91993
aaataagtcagcactaaaggggatcctttagtacttggtgctcaacctctatattttgtaccggtttcgcaaccggtcctttagggtttgtattagtaccaccaaggaggctcacatatcgtcgcaaggcacaagtcacgcggcgcgtgcgtggtccatgggattcgaacccacgacctctagtctcacgcgagccttccttactatctctcctacacaacacatgtggtg

SEQ ID NO: 26020 - DNA, 352 bp, Setaria italica
  Peptide Sequence Number=SeqID_91994
cgtttatcgatgggtgaacaaaagcactcaaaattacaaatgctgcagacaaatagggtacccagtatgaccatgcgatgccatacaagaaaacatgagtacatcctcctagcagcccgacaataagaagtatctcttcacccagaattggagccaagataggcattacagttagctgtgatagcattccagcagcaccaacaattagaagtagattagcaaactcatctttgctgtaaccaaattgtgccttcaggtagtacagcaatgctgtctgaagtccatgttcacctagactgtagaagaaagtgatggttgctgcccctgacaaggtcaaactgccagtgagaag

SEQ ID NO: 26021 - DNA, 283 bp, Setaria italica
  Peptide Sequence Number=SeqID_91995
ggccagaagataaactcattgatgagagctgctggtccgacatagagttctgcaaggaaaatgagaactggtacgctctagccaagacaaaatcagaagagattgccctagaatacggcaagaagaatggaatgcatgttgttactgttctgcctggcctcgttttcggaccactgttgcagtcagtggtgctcaacactagcagcaaagttcttgtatatatgataaaaggaggcccgctgagacacgcaaaaggggataggcaaggcacacaggggatagg

SEQ ID NO: 26022 - DNA, 570 bp, Setaria italica
  misc_feature (547)..(547): n is a, c, g, or t
  Peptide Sequence Number=SeqID_91996
tccggtcggtcgttaccagtccccgacgaggagggtgaagtcgccggcggggggtggggtaggggacggggatggcggggcgctggtagacgctgagcgcaccgaagccgccggcagcgcggtggagggcgagggaggggaagtagaagaaggtgccgatctggtccttggcctggaacttgtaggtgtagttggcccccggcgggatggcgcagttggtccccaccacgccgtcctgccacgagttcttgcgctgcttgatgccgttccaggtgaggaggaagggctcgtcgaggttgttgacgacgttgacgatgaggttgtcgttggtgacgcagtcgatgcgcgggccagggaactggccgttgatcaggatgccctgctgggtggtgccgagcggggtgatggggccgtaggtgacggtccaggtgtagtagcggtaggggtcgtcggcgccggcgagggagacggccacggcgagcaggaccagcagcgccagggccggcgccatggcggtggatctctagatctgggacacacggggccncagtgaatggcagggtgcggcgg

SEQ ID NO: 26023 - DNA, 532 bp, Setaria italica
  Peptide Sequence Number=SeqID_91997
ctcgccgcttgcgccgtgctctcggtgctgactctgctcggcctcctggcgctcctccccggcagggtcgtctaccgctacatcggcctcgccgtggtcgtggtgctcctgctgccggccgccggggcgtactggtacctgaggctccgtgctgacggtggcggcgaggcggcggcgcgcgaggagcacagggaggagctggacgccgcgtggaagatcacctcatgcgtcgccaactccgcgttcggcggcctcatcggcgtcctctccagcgcgtccaagatacccggcgcggtcaccacggccgcctatgtctccatcctcctcatgttcgccaccgccatcccgggcatgttggtgatgatgctgtcgaagaaggtgccggagatcaccagcctgcagctccggcggctcctcgtcgcggcgatcaagcttgccaacgtcgtcctgctctgccttctggcctccgcggccttcgccgcagccttcgtggtcctgcggtaccgcgttttcgcggcgttcgcgccgttag

SEQ ID NO: 26024 - DNA, 371 bp, Setaria italica
  Peptide Sequence Number=SeqID_91998
agcattaagcagatcatggtttctctgtacgcgcacctccgaacctacgcatgtctctgtcagatcgtccagtatcccgttcaaggggtggatctccttcatctttcagtggattggacatgaattggagaggtagaaggcaatctatgtctcctactccatcgagaagagccagttcatcccacagcaatgatcgagatcgttccagctcttacagcaaaacatctgtgacatcgtctgctgaagatgatctagagtccatgcaatctataccaattagcccagctgtaagaaagaacttgtcagtaatgaaatccaaaactattgcatcacctaagaagccatccaagagtttctcccctagttctgct

SEQ ID NO: 26025 - DNA, 276 bp, Setaria italica
  Peptide Sequence Number=SeqID_91999
ccataactcataagtgcatagcttgatttgtgccatcaaaatcaaaagatgacaagcactagttctgcaggaggtgcacctcagattaaccctgaaaaggtcaagctggtcaccgttctgagcatcgacggtggcggtgttaggggaatcatcccggctgtcgtccttgccttcctcgaagagaagctccaagaactggatggaccggatgctaggatcgctgactactttgatgttattgccggcacgagcaccggtggtctcttgacaacgatg

SEQ ID NO: 26026 - DNA, 313 bp, Setaria italica
  Peptide Sequence Number=SeqID_92000
cacttgaacccacaggattcaaaaaaattaaagaatacagcttctaggaccatggtatacaattttcgttcagccatcagtataacatcatcaaaaagttcatatgtctctggtgctggttgaagaagtgaaaccaatacagtgtattgtgagacttgagccagttgctggaggcaggaaagaacctggaaggtagtagagctgtccaacccagtagatatctcgtccatgaagaatgcctttgatggtcctatcatcatctcacctgtagttaatctctttttctcaccacctgaaatacctcttctcatgg

SEQ ID NO: 26027 - DNA, 430 bp, Setaria italica
  Peptide Sequence Number=SeqID_92001
tgatgatgttatactgatggctgaacgaaaaattgtataccatggtcctagaagctgtattcttaatttttttgaatcctgtgggttcaagtgcccaaggagaaaaggagcagcagacttcctccaagaggtcttgtccaaaaaggaccaagaacaattttggagctttggagatgaaacatacaactttgttaccgtggatcaattttgtgagaggttcaaagcatgtcatgttggtcagaatcttgccgtggagcttttgaatccttttgctaaagctaataaagctaaagcaaaagcacacaacaatgcactatctttcagcatctattcattatccaagtgggagcttctcatggtttgttttgcacgagagcttcttctcatgaagaaaaatgcattcatctacaaatcaaaatctctccaggtt

SEQ ID NO: 26028 - DNA, 361 bp, Setaria italica
  Peptide Sequence Number=SeqID_92002
caaactcacatctcattggaacttcccaattgatcccgtgcaaattattcaggcggtaggtatggcgaggaccaggacggtggcagtagcagcctttgtacttgtgttctccacggctatatcctcaatggctcagaccacggcgcaagagcaggagttcgtggcgctccacaacgccgcccgtcgtgaggtgggtgttgaggatgtcgtctggaacgagaccgtggcggcgttcgcacgagcctacgcggcaagacgtgctggtgactgcaagctcgagcactcggaccaggatgagcgcaacaagttgggctacggtgaaaacatttacatggggcctcctggtaaggactggacggtg

SEQ ID NO: 26029 - DNA, 3424 bp, Setaria italica
  Peptide Sequence Number=SeqID_92003
tagcttcttttcactatggagacttgaggaagattctgcatttccttctattctggcagctctgtttgtcattgaatgggaatgtagcatgtctttagctattgatgatgaaaatgatttggaaggccatatagaagatatggatgttggttcttctatgcacataagttcaaaagattatttggatgagaaaatgcatttgaaggccaaccttgcagaaagcatacatgctttttgccaaagcttaagtccatccttttggaataaccttccttcatgcacattgaatagattggcaaatattctagctcaatctgtcaggtattctgtatttcagacgagagacttgcatgtggagaagacagcagtcctatgttctgagtgggtggtggaaatgttgaagctcatctgtcttgatgacataaacttgcaaagcttttttgatctgttgttatccgagggagaacactggccgctctggttgaagccatgtttacaaaatgggcatgcatctgtgaaggtccagttggagccggctattacagatgaaattgaactgaaacacgagcggtttgttgctttcgttgataggcttattctcaatcttggctttggtgaagtgattttaggtattccaggaaatctacgacgtgccacatcacaatcaattgatattacttcacctatctcttccttgtctagagcatgggtggctggtgagatcctttgcacttggacatggaaagggggaagtgcactgaaaacattcttgccttctctggttcagtacatgaaagaggaatcacgtcttgaggttggcattgtgccgttgttgcttgacacgctgttaggtggcgcccttatgcatgagagtggtccgtgggtactgtttaatgcttggcatctttctgacaacgagattgggaaaattcaagaccgttttctccgtgctcttgtggctttgttatttactactaacatcaaggattgtctttggagagaatctgatgcacttgtattttttgagcaactgttgagcaatctttttatgggctcaatagtgaacagaaagtgtctgaaagttcttccctttgttatgagtaccatcataaaacccctgtcacagaaattgaatgaagattcttcatatgctgatttagtcaggaaaagcatattgagttggcttgaggtagccatctcttgcctgccatccagcccaagggaagtaccagtgcaagatattgaggactggatgcaagtggcactgtcttgcttcccattgagcataactggaggagctcagagattggaagttacggttgagcgagaaatcagtgatgcagagatatcactaatgctgacactctttcagaaataccagattttctataagggcttggcttcgccattgtccactagtgaaactgtaatatcaaggatagttgagttactgggggtgaaattgacggctgttatggttgggtattgctggacaaaacttcaggaaaatgattggcattttgtgttccgcatggtattcaagtgtattgaatcatctgctttgcttgtggaagaaatgacagatggcgtaaatgatgccgtaataaaccaggtatcaagtgaagatgccttggagaagcttaagttagtggttagcactacagataagttaacattaagccttgcggaatctgctctggttacattgtgtcacctcaaccatcttggtaatctccaagcagcagaaaattcccagagtttgcagcttattagatcaggggactatgttgagagtactaacaagatggtggagactatcctccgtttgttcttggctactggtgtttcagaggcaattgccaaatcctttggtgaagaggcttcatccatcataggttctagtcgccatgcttatttgcatttttgggaacttgtagcgtcaatcataaagaatgcttcaccacagattagaaagtctgcactggagtccatggaactgtggggacttaccaagggttcagtcagtggactgtattcgattcttttctcctcacaaccagtgtttcacttacagtttgccgctttctctctacttctgtccgagcccttctgtcaactttcattgctcaaagatagttctctgagagaaaattgctcatctgctcaacgatcagacataagccaaagtgccgagttgatgccagattcagagaaaactctatgtctcagagatgaactctcagccttagttgaattcccaacatctgaacttctaaaaacagatctgacaacacgagacagggttgatgtcttcattgcatgggcattattgttgtcacacctgcaatcactaccatcatcttccattattagggaaaatgtacttcaatatatacaggagaaggtcagtccgtgcatattggattgcattttccagcacatcccagtgaagactgctgctcctagtgggaagaaaaaggatgctgaactggtgcctgaagtggaggctgctgccaaagcctctaagaatgccatagttacttgttcattgctgccatacgtggaatctctttcaccagttgggactttgcaaatggcttcacttgcaggatcattgtatggaatgatgattagattgctaccttcttttgtgcgcacatggtttactactttgagagaccgttcattgtcatactcaattgagtcatttactagacaatggtgcagccctcctcttctgctagatgaattttctcaggttaaggattctgtgtatgctgacgagaatttctcagttagcgtcaacagatcggcttacgaaatcgttgccacatacaaaaaggaggagacgggaattgatcttgtcatacgcctccctaactgttaccccctgcgccatgtcgatgttgaatgtaccagaagtttgggcatcagtgaagtcaagtgtaggaaatggttgctttccctcacatcattcgtccgcaaccagaacggcgcgatagcagaggcgatccggacgtggaagagcaacttcgacaaggagttcgagggcgtggaggagtgcccaatctgttacagcattctccacacgagcaaccacagcctaccgcggctggcgtgcaagacctgccggcacaagttccatggcgcctgcctctacaagtggttctcgacgtccaacaaatcgacttgcccgctgtgccagactcccttctaggcatgcaactttgttggaaccgttcaatatctttctgtaaatggcgtgtgtatgtagtgttcagcgccttagacccaagcaggctttttaccccgttatctcgtagaggaagagacatacgactccgagttgtaatgcccagttgcttaactagtgtacacggcaagctcctttttataattaaagtttatacacctcttaatgaaa

SEQ ID NO: 26030 - DNA, 288 bp, Setaria italica
  Peptide Sequence Number=SeqID_92004
ccgatggccgcggccatgggggcctcggagacggtgtccatgggggacgcgacgcaggggatggagagcggcaggcggcgggagaggcgggtggagaggtcgacggcgtcggcggggaagccgatgtagcccgggaggaagatgacgtcgtcgtaggtgtaggagacgccctgcgagaagaggcgcgtcgcggagaagccatcgtcggcgaggtccgcgctgctcgccgccatcggtgggtgtgggttttagggttttggctgcggcggcggcggcggtggcggcggg

SEQ ID NO: 26031 - DNA, 593 bp, Setaria italica
  Peptide Sequence Number=SeqID_92005
tcaagcgccgctgcggcgagcacctcgacccgcagccgaggaaccccttcctcggcgtgcccaagtccttccccggcgtcaagccggagttctgggacgggatgcggtcccgcctcgccgcgctccggcccgacgggcctattgcgcgccggttcctggccgacctccccaccgtgcttgtggtgggcgactcggtattcgtccatggtgggctcctcgaggccaacgtcgagtatggcctcgagcgtatcaatgcggaggtcagtgagtggatccgcggcgagggtggtgacaatgccagggcgcctgagtatgtgcgcggccgggatgctgtcgtctggctcaggagattctctgacggcttcgattgcgattgccagaggttggagggggtgcttgggatgatcccgggcgcaaagaggatggtgatggggcacacaattcagacagtggggatcaatgcggtgtgtggagcgcaggcagtgagggttgatgtcgggctgtccagggggtgtgggaatgggctgccggaagtgcttgagatcaatgggggtggtgcagatgtcagggtgatcacaacgcctcccttcgga

SEQ ID NO: 26032 - DNA, 313 bp, Setaria italica
  Peptide Sequence Number=SeqID_92006
tgggcggtgacggtgtcctcctggttggttggggagatgatggaggcgccggtggcggaggcggctccggtgagggcgaaggagttgtgcgtggtgagccacgagtagttgttgaagggcaggccggtgccgtgggtcgccgggttgatgggcaccgcgcgcgtgcacagcttgtccccgccgccgccgcaggcgctgcagtgcaggccggcgccgcatccgccgtcggaggagcaggtgtcgcccacctgcgcggcgctcgctggtccttgagacacgcaacaggggaaaggcaaggcacacaggggatagg

SEQ ID NO: 26033 - DNA, 252 bp, Setaria italica
  Peptide Sequence Number=SeqID_92007
cttaatgttcctgtgcaagagccatggcccaagacagacccatttgtcagcgtcaaggttcctgcggatcatgggaagcatgatcagaaacttcagcagcaagatgctaacaacatggaggcttcaaatagtaaatttctgaatcacagaaatgttgacagctccaagccaccagttgttgaactacttggagagttcacatttgcaaacagcgcaagaggaagggctatcaagagcttgaatcagtatgct

SEQ ID NO: 26034 - DNA, 591 bp, Setaria italica
  Peptide Sequence Number=SeqID_92008
gccggctcccgcgccggcgctgccgcaacccgcgatgccgggggcttaggaaggcgctcgagttcgacgtccagctccagaccgaggaggccgtgcgcgccggcgccgggagcaccgtcggcggcgccgacgcggccatgtggcgcgagatcgaggcgctgccgtggaagggtggccagggcgggaacaacccggactacgagtgcctccgcgccgagctccgcaggatggctccgcccaacggccgcgccgtgctgctctttcgcaaccggtgtggctgccctgtcgctaagctcgagggatggggcgtccccaagagcaagcggcgcaacaagaagggtacgcaaggtccgttccatgaccgaggggtgaggtgaacataagtctggtagcacccatggcaatggtgttaccttagactgccgtgttgttgaataatacttctggttaaagatacatcaattacaagtggttgccccatgattgtattgttacacggggttcgctgaaccccgtgtaacaatacaatccaagacaaacgatgcaagaataaagaactgttaaaggacaataaagcataaacatttggtc

SEQ ID NO: 26035 - DNA, 746 bp, Setaria italica
  Peptide Sequence Number=SeqID_92009
taaaaaggaaataatagtaattaacaacgacttactacaatcgaaacatgttggcaaaacaacattccacagcatgacaacagaaacacaaacgcatacacgtcacggccgccatacagcatgacacaactacacacgcgcataccaaaaagagaaaaagtgtgtgaaggttgaaggcacaacaccattgttcccaagcacagcacagcacgggagcatgttatatttacagtgttacacaagctgaggttgccgaattgcagtggtccatacatacaccatgcttgtattattcaatccatattactattgagaatcttgtgcaacctggtagtagcttcattcaggccccagcagctgatccctgtccagaataaatttcccttccttgtatttctgggtcctctcagccgcagcgtcatatttccatccaagagtcactccgcagcggacacaaaagatgtcagaaatggtatgcatccctgtcatcagcatacgatcttctttttctccaacagtcacattgacaaccttatcgaagaggtaagccttcccgttcttgcagtagaaatccttggagatgatgtcgtcggtgagagctaggtgtgtgcggcagtgcttgcagcggtagacgttgccgttggcgtcgtcgagctccaggatcggcgtgcccctgccgcactccatcgggcgaggtttcctctctatgatcggatcggaagaactggatgatcggagtctagagg

SEQ ID NO: 26036 - DNA, 333 bp, Setaria italica
  Peptide Sequence Number=SeqID_92010
aacccaaacctttgcagcaatggagattcttgccagctcacaagaaagaagatcaatgcggtatatattgctgttccaatagtgatacttgtggtgattgcagcactggtactattgctttggttactgagaagaaagaaagagaacagtgtgaagccacagaatgaggcgaccgacgcgcggtcacgctcccagagtggtaatggacatgggttgccgcagcttgagaaccgccggttcacgtacaaggagctggagatgatcacgaataacttccagcgcgtgcttggccgaggaggattcgggtctgtctacgatggcttcttggatgat

SEQ ID NO: 26037 - DNA, 613 bp, Setaria italica
  Peptide Sequence Number=SeqID_92011
tcgccgccgtcaaggaggcggaggccgccgaggaggggcgctcgccggcggcctcggtgctctcgctcaacaagtgcagtactagccccggcggcggcgccgccctgcgcctgcgccagaacggccacgccaacggcaataacggccacgacgcggagtcggtgatgtcggagaacatctcgaccaagcaccggtggttcatgcagtgctcggagcagcggcggaagctgttcctcaagagcttcgcgtacgtggtcaccgtcggcatgctcgtcgcctacatgctcgggctcaacatgtcatggacagccatcaccaccgccatcgccctcgtcgtcgtcgacttccgcgacgccgagccgtgcctcgacaaggtgtcctactcgctgctggtcttcttctcggggatgtttgtgacggtgagcggcttcaacaagacggggctccccggggccatctggaacttcatggcgccctacgccaagatcaaccacgtcagcggcgtcaccgtgctctccctcatcatcctgctcctctccaacctcgcctccaacgtgccaactgtgctgctgatgggggacgaggtggcggcgtccgcggcgaccatctccgc

SEQ ID NO: 26038 - DNA, 749 bp, Setaria italica
  Peptide Sequence Number=SeqID_92012
gccaagaacagatggaatgtcctatcactcctgctaggaaagaaaaagatgagtcatctgatgacctatacgacgttaataatgatgatgatgctggttctgactgctcctcaagaaaacgaaggcgagctaattcttcaaggaaaaaggttcgaaaacggcggaaggtagattcagattgtagcattgctgcaaaacaggtcgtgcttccaattggatatgctgggagcctacccactgaagtaccaaatgaaagggcgcccttgccagtagccacaaaagtaccaaatgaacaggtgcccttgccagtagactcgaaagtaccaaatgaacaggtgcaattgccggtagacatggaagtagaaaaagaacaggcgcccttgccactagacacaaaatgggcgtcacctgagttgttggagttcgtaggacacatgagagatggtgatcaatcttttatttctcaatttgatgttcagacccttctgctggaatatattaagaagaataaccttcgtgatcctaagaggaaaagccaaattgtttgtgacacaagacttcaccgcttgttcaggaaatcacgtgttgctcactttgagatgttaaagcttttggaaatgcattttctcataaacgagactccaaaagtaagtgataaaagtgaagtgaccatcaatctaaattcggctcaagtagataccaatggatacagtgacatggcagcaaaattgtctccttgattttaagtt

SEQ ID NO: 26039 - DNA, 236 bp, Setaria italica
  Peptide Sequence Number=SeqID_92013
tatgttcgtcattgtccacacagcgcaatgctatcataatgcatctctttacttgttggcaacaaaactctacttctgaaccactgcatgtttgctgcatcctttgcctccagttttcttgaacttgatcaataaatcgtgggtgagccatgtcagaaattccgatgtagccaatgggtcctgtcattatctccatcattacaacacccaagctgaagatgtagcccttctttggg

SEQ ID NO: 26040 - DNA, 363 bp, Setaria italica
  Peptide Sequence Number=SeqID_92014
agttcatctttaacagactctgatgaaggttcttgctccttcatggcatcattctcagctgcatcatcctctacagcagcttcaccaggtttggagcccttgttcttcttgatgaaatcgatgatctcctcagcagttcttccacgttcatatgataggaggtttccagcagatgagtagaaatacatggttgggtagccctcgactgcgaaatctggtggtatgtcattggtggtagcatccatctttgcaatgatcacatcttcatcattctgcaacgaaattgcaacttcgtccaagattggggccagcttctggcaatggcaacaccacggtgcataaatctcaagaagcacatttttg

SEQ ID NO: 26041 - DNA, 466 bp, Setaria italica
  Peptide Sequence Number=SeqID_92015
taaaagcatgttgatcgtgaagatatcaaatgggaagtgaagcaatgaagaaaaatgattcaatcaggatcctattgtacattaccatctttgcaatgatcacatcttcatcattctgcaacgaaattgcaacttcgtccaagattggggccagcttctggcaatggccacaccacggtgcataaatctcaagaagcacatacgccagagttgaaaaccacatcattaagattatcggcgacaacaaccttaacaggttggtcgttgaccactggaataggatctgacttaacatgtggtaataaggtgccatctgtgtaatctttcaaccaaggtaagatttgatcaggctccacagttggtttgataaattttgcagtggattcttgtatgaagaagaggggcacttcactttctttgagcccaaaatactggaaagcaccctgtgcgtcagtaacatcaccga

SEQ ID NO: 26042 - DNA, 446 bp, Setaria italica
  Peptide Sequence Number=SeqID_92016
aacaattgaaagcaatccacagtcggaaggccaagccagcagaatcatcgcaacggtctgctggcctgctgctggggttggaaaaacaaaagaaaaaaggaaaagaaattcgccaccgtctcttgcactccagcagtcagaagaacctcccccaaatcaccggacgagatcgtcgtgggcggcactcgctctcgcacgcggtgaggcggcgctatcagagcggaagcggactccgccccaaaaccccccacgtccctccaggtaggtgtgcaccatggccgcggccgccgggctcagccaccgcttcaccgtccgcagacaagtcgagctttcgccttccgagagcaaccgtcttcgctcggtcccggtgctgtagagaagaggaaaggttaggaggagggggagaggcgagtgggagcggcaatgggggcgagttggggggcgag

SEQ ID NO: 26043 - DNA, 246 bp, Setaria italica
  Peptide Sequence Number=SeqID_92017
cggtaagaacagatcagtgatcccatttctaccgtttgcatggttaaagaagataaagagactccaatgcatcagccatatcctattctggagctgatttagaggtgatgagaagttctttgaatcgataatctcctttaagcgattaagctcttcgagcgcagcatcccagtttcgatttaaaatctctgatgccaacactcccccacaaagctctcacactcctctcgctgtttgtggacaaac

SEQ ID NO: 26044 - DNA, 705 bp, Setaria italica
  Peptide Sequence Number=SeqID_92018
aggacgccggctccgaccgcgtcatggccgccgtcctccacgccgagaaccccgacttcgtggtgtacctcggcgatctcgtgacggcgaacaacctcccgatccccaacgcgagcctgtactgggacagggcggtttccgcggccaggggaagggggatcccgtgggcggccgtgttcgggaaccacgacgacatgcccttcgagtggccgcccgagtggttctcccctgacggcgttccaccgctgcgctgcccactgacgccaagcatggcgtcttcaggtaacctgaccaagaattaaaagctgtcaagcactgcttcagttcagtagacagcaggagacaagtcgacctaaccacccttattcaactggggtccttgatttcttccgtcgatggagcttaatcctgagcgtgtctgtactaaggtgaggatcaaggatgcagctgtcgagggactccgcggatcgacctgatgacaacagaaatcggcaacaacagactgtcctactcatcaaacggacccaaggacctgtggcccggcgtgtccaactacgtcttgcaagtgctctcacacacccacggcgatccggctctgctcatgtatttccttgattccggcggtgggtcgtacaccgaggtcatatcgagtgctcacgacaagctaagttggtttctagtagttcctagtttctttcttagttt

SEQ ID NO: 26045 - DNA, 1213 bp, Setaria italica
  Peptide Sequence Number=SeqID_92019
cgcgcaggacgccggctccgaccgcgtcatggccgccgtcctccacgccgagaaccccggtctggctgctagcgtcctgcccttctttaatctgttctcgcgctgcacctgcaaaattgcagcttttttttcctctgaaactcctctcctctctgttggggaatgtttttcagacttcgtggtgtacctcggcgatctcgtgacggcgaacaacctcccgatccccaacgcgagcctgtactgggacagggcggtttccgcggccaggggaagggggatcccgtgggcggccgtgttcgggaaccacgacgacatgcccttcgagtggccgcccgagtggttctcccctgacggcgttccaccgctgcgctgcccactgacgccaagcatggcgtcttcaggtgaggatcaaggatgcagctgtcgagggactccgcggatcgacctgatgacaacagaaatcggcaacaacagactgtcctactcatcaaacggacccaaggacctgtggcccggcgtgtccaactacgtcttgcaagtgctctcacacacccacggcgatccggctctgctcatgtatttccttgattccggcggtgggtcgtacaccgaggtcatatcgagtgctcaggtcaagtggtttcagagccagtctcagttcttgaatccaaatggaaggatccctgagctcatcttttggcacataccgagcacagcgtatgttaaggtagctccagaggctaaaactgaaataagaaagccctgcgtcggctctatcaacaaggaggatgtagcgccacaagcagctgaatggggcatgatggatgctcttgccaagaggccatcagttaaggcaatctttgttgggcacaaccacgggctggactggtgctgcccgtatgagaaaatgtggctttgttttgcacggcacaccggttatgggggctacggtaactggcccaaaggagcgaggatcattcagataacagaaaacccattctccacggtgtcctggatacggatggaaaacgggacaaagcatagtgatgttacactaagctcctgaatttgcctgaatttcatgtgcagaagaggttttcttttttttaaaaaaaaaagagcactagaggacttaggggctgtttctgtaaattgcaaactaggaaccctgatttttttaataaagtgatgtgttgataatttcaaaaaaaaa

SEQ ID NO: 26046 - DNA, 965 bp, Setaria italica
  Peptide Sequence Number=SeqID_92020
actctttatgtcttctcttgatgataaagcagcactccttcaggtgatctccttgttgcttcatcaatggaaggatgagattcaaatgctgatccagatggggatccatcaggtaaatccttttgcagctccaatggaagtaactcattaacacggaaccatacctgtgtaatgtccggtctggcatctggagaagaattaagcatgtctttgatcagagttgtaatggaagaactgtactttggcaattctgggatacgataattcccattaagtatctgaagctttgattctccatcaaatgctgatttgaagtagcatattctatacaagaggcatccaagagcccatatatctactttttcactgataacctccctcctgtacaagtcccacatctcaggagctctatatgcaggagtggtgtgcttccttatgttatcctcttcaatgcccatctcctcaggtttgtcgaagcgtttatgatttgtggacacactaccaaaatcacatagtttccaagccccatcaggatcaagaagaacattttcagcctttagatccctgtgagcaagaggcggtgtctggcagtgcatcgcaaagacggcattgcaaacatcccggaagatcagtgccacattctcctcatcaaagtagcccgcccctctgccctctaacacagaaaccagcgacttctcacagaactccatgaccagcaacgcctccctcgtcctacccatgtcaagtattgtgtgtgcaatcagcgtgaccacattggggtgacccttgagcgacctcatgactgtgatctccttccggacaagctccaacgactcctcatcctgtataatcacatgcttgagcgcatactgcctcgctgggttgaccatgtcccgggcggcatagacgcacgagaacccgccctcggcaatggcctcccggacatgcaccttgacattgccgac

SEQ ID NO: 26047 - DNA, 404 bp, Setaria italica
  Peptide Sequence Number=SeqID_92021
ttcggactggacctggggtgggcacttttcacagctgcttgaggttttggatcatcaggaaatgcggaccatggtttttgggtcagggctcggtgtccctggccttgaagtaaataggccttgccgaagctctggaggagttccttcaatcttctccctcggcttcgaattttctctgaactgcttagctggtggagtaacagaagcggtagctagggcttgcttaagctcttgtatctctcgcctctgcgaggaacaaatagcagacaacttatcaaacttcaatgaaatttcttccttctccaggtttgctatctttaattgttccttcagtaaagtaacctcggcttccaattgacattctttcagcttgctaagaatgtttacattgccagcatttgttt

SEQ ID NO: 26048 - DNA, 1654 bp, Setaria italica
  Peptide Sequence Number=SeqID_92022
ttttttgacatggtaacagatagctatatctatatagcatgtgttcaaaattcattgtagtattcccacattatttgcaaaaaacatcacaggctcttctacagaacaaaaaaaacatcttcctatttctaacatctagcaattatttgcaagttacaacttacatttgcgctaaagttacaactggatgcatcatgatgcaagatcagcatcagaacaattgtccaaaagcattgccacacgtacctacataagttaaggcattcctcggtggctcttcagtctgccacaccaccaagaccatatgtacgattgacttttttggcatatagtatcactgtaaattggcatagcacaatcaaaacccggtccatccagctggttggtacgatccatctttcttttcttcagcattctgattattgaggagctgagtagtattccccatgtttgataacttgggaggtacagttccagaaggagcggccttaaagctatcttgaccaaaggcaaatggatcggcgctagaactcgcattcggctgtccaagtgagctggctttgttgctgtttgatgcccgtagagttcggactgacctggggtgggcacttttcacagctgcttgaggttttggatcatcaggaaatgcggaccatggttttgggtcagggctcggtgtccctggccttgaagtaaataggccttgccgaagctctggaggagttccttcaatcttctccctcggcggagtatcaaggcttgtgctgggtggggagagttcaaccttcgaattttctctgaactgcttagctggtggagtaacagaagcggtagctagggcttgcttaagctcttgtatctctcgcctctgcgaggaacaaatagcagacaacttatcaaacttcaatgaaatttcttccttctccaggtttgctatctttaattgttccttcagtaaagtaacctcggcttccaattgacattctttcagcttgctaagaatgtttacattgccagcattgttttgtgagttcattttgatgttatcaaagtctgccacaaaggagttgaaggcggtagcttgtatgctgcctttattttctgtttttcctgctttggttttctctagcccagactctgagccatttgcagaaaacctaatttcaaaatccccaggagaactatcaactgatgcagacagagacttccgagaggaattatgaactggtgtgttctggttcttagcctgtgattgctttgaggtgacttggctaatgggctcttgatcaaaagctggtcccttctcatcagcaaaagcgagctcttgagcatgttgagttgaccaaaatgcacccataggacccctgttctccatagcttttggaggaccttgtggcaccaggttggaaaaatcattaggagaggtactctttatgtcttctcttgatgataaagcagcactcctttcaggtgatctccttgttgcttcatcaatggaaggatgagattcaaatgctgatccagatggggatccatcaggtaaatccttttgcagctccaatggaagtaactcattaacacggaaccatacctaattcatggaagtgaagtgaatggccaatcaagcaaagaccttgcctgtgtaatgttaatt

SEQ ID NO: 26049 - DNA, 292 bp, Setaria italica
  Peptide Sequence Number=SeqID_92023
gtagatgtggtggccgcggccccggaagccgacaagggaggagatcgtgtggagaggatgggagcgaacaggatagggcgggggcgagagaaggatggagtggagcggaggaggaggagtagttatagacgtgaacgagacgacgagcaacgcgacgacgaggagggctttgctcccttcggctaccgctcgccaccccgcctctcgggcgcacggggggacgcacagcaaggggacaggcacagcacgccggggaggggatcaaaccggatggagcggatgaacgggaagg

SEQ ID NO: 26050 - DNA, 245 bp, Setaria italica
  Peptide Sequence Number=SeqID_92024
cgagctacaggaaactgaacgctcgcactttgccttgccgaggagaaggaaggagcttattggatcgatcgaattcgtcgtcggcctcgatcgatcggcagcttgcattggtcgatcgatgggcgtcgcgttcgggtgcttcggactcggaggagggtgcgtgccgcgcgacggagatcacggccagcaagtgcacgatcccaagccgctgatgacgccgtcgtcgagcttcgacttccgcgagg

SEQ ID NO: 26051 - DNA, 412 bp, Setaria italica
  Peptide Sequence Number=SeqID_92025
tgaccctaacgaccctaataatatcaaaaacctaagagtggaccgtcagttacagatccattctgggagatgatgctgtaagcaaactggtcgaagcgcgtctgggtcgtcgcttcgctgtggatgccgtgcgcaggctgtcaagccccgagcaccacccagatgctgtggtggatggtatgataagcggcaagttggcactcgggggcctgatcgtcctggtctgcgagtccgcaaggatgaatcctctccacgactcctttgcacgtgggtggagcaccggcgacggattcaagaaggaactgatgaatgactacgtgtggggctattatgggcagacgtcaagaaagctactgaagtggaagagtaaagactacgtcgagtgggaacctattccgcatctacaagccgt

SEQ ID NO: 26052 - DNA, 234 bp, Setaria italica
  Peptide Sequence Number=SeqID_92026
tagaagagatagcatataactgcttggggggccgatgcaagaagaggcagagagcaggagatacagccaaggatgacttgccggtggccactgatctgataacctctccgatcactggcatggtcgttattgccatcccaaccggcaagtctgtccttggctacaccttgctctctgcccatcatgtgttgcccttgcttggtttgagagtagatggtgtcgtgggctgcctct

SEQ ID NO: 26053 - DNA, 313 bp, Setaria italica
  Peptide Sequence Number=SeqID_92027
gggtgattgaatgtggtgcgatgttggaatcatcgctcaggccttctgggtggtaagaaggccgcatctggatagtatggttcttgaggagtggatgatcgaatgcaggctgtttggagatgggcacacagtctatgatatctccatctgcactctcaatgcttgcgagaggatccttgttgagcctcttgaggaggcttcgcacctgccgccgccgctgctccgacgtcccggcagcgccccccgctgccgccacaactgcgagagccacgacgagcgcgatcaagcacgctcgcgtcactgccattgtaag

SEQ ID NO: 26054 - DNA, 270 bp, Setaria italica
  Peptide Sequence Number=SeqID_92028
ccatcaacaacaacaacaacaacaacggcggcaacggcgtgcccatcttcgccggcggcagcctgccgcagggcaccacgttgcagaagctcctcttcgggaccatgacggtggtggacgacgagctcacggaggcgccggagctggggtccgcagcggtcggccgggcgcagggcttctacatcgccagctcggaggagggcgtcagccagacggtggcagtcacggccatgttcaaggaaggcgggttcgacgacaccatcagcttct

SEQ ID NO: 26055 - DNA, 255 bp, Setaria italica
  Peptide Sequence Number=SeqID_92029
cggcccggcaggtgccgcgcgatctgagaccacttgttgccaagcttggcgtggaggctcatgacggtctcctcctcctcccgggagaacatgccgtgcttcagccccggcctcaggtagttgatccacctcagcctgcagctcttgccgttgcgctgcagcccggccttggcggggagcgcgctccagcagccgtggccgtagcggaggatgaagtcgcggagcttctcgtcctcctccggcgaccacaggccc

SEQ ID NO: 26056 - DNA, 382 bp, Setaria italica
  Peptide Sequence Number=SeqID_92030
cggagctgttcgacgaggggcagaaggtgagcaccatgggcgccgtgcccgtcggcatactgggcgaggacgacggcgccagcgagtcgttcctccaggcgccgtcgtgcgacgccgcggggaagctggtgggctaccacgtgtcggaggagaccgtgctgccggtgaaccggagcgacatgctgctgtccagcaggctggagtggaccggcttcgtggtgagcgcgcgcgtgctgtgggaggacgccaaggagcggccccagtgggtgcgcgatctcgccgccatcgacgacgccgacgcgcgcgccgccagcccgctcgcgctcgtcaccgacgccggccgcgtcgagccgctgtcttgctgcgcccaggcggcgctcgc

SEQ ID NO: 26057 - DNA, 1100 bp, Setaria italica
  Peptide Sequence Number=SeqID_92031
agggttacgacccgaacgacggacgaccggaagaccggacgaaagaccgtacgactagccggcggcgtggctgctgctgcacgcgctcttctgcgccacctccatggccgtgggcttccgcttctcgcgcctcatcgtgtacctcctcttcctgccgacgccgcccatcaaccccgccgcgcacctcgtctcgctcgtgtccccgcccgtcatgctcgccggcgccggcaacgcgacgacggccacgatcaccaccacgaccacgaccacgaccaccgtcaccaccaccaccacggtggccgccgagatcggagccgcccacccgcatcaccaccacggccccgtcttcgtggggcgccacccgatccgcgtccgctcctggccgcacccggaccccaacgagctgctcaaggcccaccgcatcctcgccgccgtccagaacgcgcagcgcagcagcaagcgccgcggcgccgggccgccgagacccgtcattgccgtcaccccaaccaccacctccgcgctccaggtgccgtccctgacgtctttggcgcacacgctccgcctcgtcgacgcccagctcatgtggatcgtcgtcgagccgggacaccgcaccgacgccgtcgccgccgtgctctcccgctccaacctcgacttcctccacatcaccggccccggcgactccaccgcgtccctccgaatgcacgccctcagggagattcgggcgaagcgaatggacggcatcgtggtgttcgccgacgagaacagcatcctgcggacggagctgttcgacgaggggcagaaggtgagcaccatgggcgccgtgcccgtcggcatactgggcgaggacgacggcgccagcgagtcgttcctccaggcgccgtcgtgcgacgccgcggggaagctggtgggctaccacgtgtcggaggagaccgtgctgccggtgaaccggagcgacatgctgctgtccagcaggctggagtggaccggcttcgtggtgagcgcgcgcgtgctgtgggaggacgccaaggagcggccccagtgggtgcgcgatctattcttcgtccgtccttatttcgtttacgtttacgttttccgtttta

SEQ ID NO: 26058 - DNA, 354 bp, Setaria italica
  Peptide Sequence Number=SeqID_92032
gcttatactagtaacccacccacagcacaacacaatggcactaagcgaggacagcaacgacttgctccaagcccaggtggagctctggaaccagaccttcagcttcatgaagtcggtggcgctcgccgtcgccttggacctcggcatcgccgacgccatccgccaccacggcggcgccgccaccctctctcagatactctcagagattggtatcaacccatgtaagcttcctggtctccgtcgcctcatgcgcgttctcgccgtcgccggaaccttcactatccaggaaccagaaacctcgtcggacgggcatgaacctgtctataagctgacagcagcttcccgtctcgtcat

SEQ ID NO: 26059 - DNA, 412 bp, Setaria italica
  Peptide Sequence Number=SeqID_92033
ctgtggctctgtctgccatcgctgctgctgctgcctctcatactcctcctttatgtgctcctcctccacggtcttcatgtccctcagcacctgctgccaggaatctcgggctgagatcctgttccaccagttttgcacattcttccttgagtcatacaggtaggcaaatctctcggatgtaatgacatggtgggtaccaggcagatgaacaaggtcggcaagagtgaacttgttcccagcaaggtagtcgctctcaccaagcctctgctcgtagacttccagaacttcctccagcttccgcttctctcggttgatgtcttcattgttttcatcatcctcatcatgcagtgggaaggcgatatggcagaacaatgcccggcttggagggtcgaaggcctatgctcttccttct

SEQ ID NO: 26060 - DNA, 318 bp, Setaria italica
  misc_feature (274)..(318): n is a, c, g, or t
  Peptide Sequence Number=SeqID_92034
ctgccccaagtgccgagggaagcaaggttgctgatgatgcctccgcctgaagaaaaaagaaaggacattgtcttgcaattctttctctgtttttttgggtggggtagttcggtttaatggcgtggcgtgagattgagagcctgtgcttgcaagcttatctggagcactgggacttgggaggacagttgttgtggaccagggtgtgcatcgctggattatgttgctgtttaaacagatttttctaggagtatatcaagttgttcttgtgctaatnnnnnnnnnnnnnnnnnnnnnnnnnnnnnnnnnnnnnnnnnnnnn

SEQ ID NO: 26061 - DNA, 583 bp, Setaria italica
  Peptide Sequence Number=SeqID_92035
accggatgttccgacggtgccatcggatgaagcgtcggatgaattttggatgagttagtgaagaacttgggcgtgggaaggccaacggctagttgcaccggatgtttcaatgcatgccaaaacagaccatcggaacgtccgacagtatactttaactagccgttggagcaacggctctttgagctcttgggctattgataccccctccactcgtccatttgatgatgctggaatgtgcagaagtccattggagatcaagactcatcaagaacacatccaagccaccaaaagtgctgaagtgattattctaaagcttagcacaagcttaggagagtgattagtactaggataggcctagagagagggagagtgcaaggtgtgcctaccttgtgatcggttctaggagtgaaccatagttgtacaaggtatgccggcaccttggagccttgatggctcgccgacaagtcttcgaccctccggcttgatgtggagcggcgtcgacgaccgtatgcgggggacatggagacccccttccttagtggagacaacatcaaggtgaccgggaaacttggcgtgagactta

SEQ ID NO: 26062 - DNA, 367 bp, Setaria italica
  Peptide Sequence Number=SeqID_92036
agggaacctaaaagaattagcaagtaaaaaaaaaaaggcaaaacacacatgacacaaccgcatgcagagcacatgataaattgcgaacaagctgtaacacaaaatcacataattccctgcagagccagtgcacaggaatccatatttacccaaactttagcttcagaacaagtaatttatttgccaataggcacagtcaactggctaaagtcaacaatagaaacatataatcatttccaaaaaaaatcaaacatataatttccctgtagagccagtgcaacactcaactggaatcagtatttacccaaactttggtttcacaaatatgtaatttcttcacaaatcaatggctaataaagtcaacact

SEQ ID NO: 26063 - DNA, 674 bp, Setaria italica
  misc_feature (49)..(49): n is a, c, g, or t
  Peptide Sequence Number=SeqID_92037
ctggtccaagatatacgggaggatgttcgtgtactggtacgggagcganccccgggtgtgcgtgacggacgcgggcatggtgcgggagctcctgtcgtcgaggcacgcgcacgtcaccggcaagtcgtggctgcagcgggagggcgccaagcacttcatcggccggggcctgatcatggccaacggcgccacatggtcgcaccagcgccacgtcgtggcgccggcgttcatggcggaccggctgaggggccgggtgggccacatggtggagtgcgccgggaagacggtgcgcgcgctgcgggaggcggtggcgcggggagggaacgaggtggaggtcggcgcgcacatggcgaggctcgccggcgacatcgtcgcgcgcaccgagttcgacaccagctacgacaccggcaagcgcgtcttccacctcatcgaggagctgcagcgcctcactgcgcgctccagccgctacctctgggtccccggcagccagtattttccgagcaaatacaggcgggaaataaagcggctgaacggggagctggagcagctgctcaaggagtccatccagcgcagccgcgagatcgccgacgagggccggacgccgtcgtcggcgtgcggcatggggctcctcgggatgctgctggccgagatggagaagaaggagaagaagacaa

SEQ ID NO: 26064 - DNA, 249 bp, Setaria italica
  Peptide Sequence Number=SeqID_92038
atattctcttgatacgagccaatcgtcaatggcttcctcgggtgcctccacgctaagaaggatgatggccgtcgtcgccgtcttcctcacgctcctcctcctcctgtcatcgtcgccgtccatgggtccggccgccgtggcagccgagcccccggcttgcgtcaagaattgcggtgctgccaccgagtattgcacccgtcgtgccatcaaagcctgcaagacaccagggaaatggtcacgccgctggga

SEQ ID NO: 26065 - DNA, 995 bp, Setaria italica
  Peptide Sequence Number=SeqID_92039
caacttttacatactaatcatgcatacaatttaactaatgttggtcaacttgcaaagattagttttaaatcgtaagatgtcctacataaagaaaaggatggagtatgaatgttatttaggcaaaacaaaatagatagtcacatacggtatcctatggtacaatgaagtaatctgttcagtttaagctggcataacattaattagcatcgaagttgcgttgaacaccaaaaatgtatcaacgtaaatagatcccaagcaaatctacaacaactacatgatggaagtctagtcagcatcagttatgtgtttcaaagccaaatatccggaaaacaccttcatcagcttggtatttgtttttgtcatctcctgcataggccaggaggttgtacttaggattccattcaacactgttcatagctgctttgcaaggaatctgatgaacagatcgtccagtctcaacattcgcaatatcaatgaaaggatcttcactggcatatgcaatgaattctccagtatgattgaagctaactgttcttactggccactcaagttttgtgaaggttctaatgcatagcaactctttgacattccaaagactgacaagtgaatctgcacttccaacagcgaagtacctatcaaggggatccattgcaatgcaataacaccctgctgtatgagcattcaatttgcagggcttcaaaaactcaagatccttaaccacctcaatgtgtcctagcccagtagtgatgaagaatagatctccagatttattccatgcaatctcattcacctcgtaattagccttgtgttttttaacaacttttaatgaccgaacatccaaaatcgtcagttcatcctccttgtttccaacagctatctgagtaccatcatgtttatatgtgatgttgatgttttctccactcagttcaataacttgacattttccacttcgagcatcccaaagacgaatagccttgcagcagctgcagtagcaa

SEQ ID NO: 26066 - DNA, 996 bp, Setaria italica
  Peptide Sequence Number=SeqID_92040
accaaacagaaacaggccgtgaacgaaagatgtttgcaaggttgctgcagtaagagtcaaactcaacgcaaactttttcagttcgccaccaatctggccaatcgcaccggcaggaaacctaaaatcaagaaaaccgcagcaaggagaagacgatgggcaacttccggagcagaggcggcgctcctcctccaccgcctccgccgcctgctctgcaggcccatctgcacggggtgcgccctccgtactaccaccggtaccccggttggcccccgggcaccgctccggtgcctccgcctttgggggtgcccgcgtcggtggagcggcacaggaccgtcgcggtgcacgcaggcgtcaacatcaagggggactccctgcggctggagcccgatgatgacggccgtggcctcctactcgccttctctttcgacgccgacgcccccggaagcataactgtctatttctttgcgcaagaagacgaagagcttatcttgaaggctactaaggaaaacttgctcaaacctgtgacaacagctttcgacaaaggtcatgatcaggagttcaagcaaccaagtggaacaggaatcgacatctctcagtttgaagaatctgagctaactaaggttggtgaaggtggtatattcccagttgcattcaaagtggatgtggctgtgtcaaacaaccaagaattagaaggggtacatgaggatgaggcatcaaagtgtctggttaaatttgctatacttgcaaagaaagacaatgcagaatatggtgttcgtattgtgcagcagatgttgtgggtaaatggtacgcgatatgtcttgcaggagatatatggtattggcaacacagctgatgagaacaatcatgaagacgaatctgggaaagaatgtgttatttgtctttcagaaccaagagatacaactgttcttccgtgcaggcatatgtgtctctgctgggagtgtgctcaacttctaagactccagagcaacaaatgcc

SEQ ID NO: 26067 - DNA, 310 bp, Setaria italica
  Peptide Sequence Number=SeqID_92041
caaatctctcttctcccgtgcaacccagcagagcccaaggttatcgaagcatgccgcccaacgcctcgcgcctccacgtcctcctcgcgctcctcctcgtcagcgctgcggccgcggggggccacgacgacgcggcggcgcggcggataatggaggagttcgccggcttccccgcctccgatgacggggacggtccttccaccgccttccgcgtcgactccgagggcctgcagcgtcagattgatgaactggcgtcgttctcggactcgcccgcgccgtccgtgacccgcgttctgtacagcgacaagga

SEQ ID NO: 26068 - DNA, 472 bp, Setaria italica
  misc_feature (356)..(356): n is a, c, g, or t
  Peptide Sequence Number=SeqID_92042
ttattcatttagttgaatatgtgtcaaataggaataggtttggcatcacaaatgcctagttcatgtcacgcaaacagcaatatggttctgttcttttatatatctcaaaatatttcctacttcatggaagagcattggatccactcatccacagcctattgcacgcctggatgttttcttaccctgcttgtctgtttgagcatgctatgcaaaattcagctttgagtttacaatcaagtctccaagacaatcggatagataccttttttccatgcaagagcgttagtggctggctggctgctagtctggtctgagaaagagccagctgtaattagtgatctgtgagcgtcccctanagactgtgagtatacctgtctgatcacattgaagttactttccttacattcatagcaaacatagcagggctcaaagatgagctcaactgttggaagagcggtgcattatgttttac

SEQ ID NO: 26069 - DNA, 223 bp, Setaria italica
  Peptide Sequence Number=SeqID_92043
tttgcttagacataaagtggcagttgctagagctgatcacatggcgttgcatctcactcactggtacacaggacggatcgaaaccgaacaacgaaaccagcgtgatcgatcgacattcatggcgagatctagacagagagagcgggtggatgatgatctgagacctaagttggagatctaaaaccgagcctgaacatcagctggtcagttggcaggtggatca

SEQ ID NO: 26070 - DNA, 568 bp, Setaria italica
  Peptide Sequence Number=SeqID_92044
cgaggaggcccggaaggtgtactgcaaggacggcgccgcgcgcccgcacgaccgcgcgcacatgctcgtcgtggtgctcctgctgcacgtcacctgcttcgcccagtactactgctgcgccctgttctggagctacgcgcgcaaggaacgcccggactgggcgctcaacatcggctacggcctcggcacggggtgcccggtcgtcgccgggctctacacggcgtacagcccgctgggacggaagaaggccgacgagcccgacacggagtcgtcgtcgtcgtccgaagcggctcgggagcagggtgaccggaccgagaacgacggcgttggcggccaggacgtggagatcaaggtgtacaaccggcgcgtggtggtgagcagcccgcagtggagcggcgggctgttcgactgctgcgacgacgggacggtgtgcgcgctgtcggcgacgtgcacgttctgcgtgttcgggtggaacatggagcgcctcgggttcggcaacatgtacgtgcacgccttcaccttcatcctcctgttcgtggcgccgttcctcatcttcagcgtgacggcg

SEQ ID NO: 26071 - DNA, 631 bp, Setaria italica
  Peptide Sequence Number=SeqID_92045
cgatcagctccacagcgtcatgacaacaaaggattctactttgatcattgaagtggacctgcaatgcgagaaatgttacaagaagattcagaaaatcctctgcaaactccagtcgaaggaggacatcaggaagattgatttcgataacacgaagaacacggtcaccatctcgggccgcttcgacccagcgaggctgtccaagaaactgagatgcaaggcctgcgacgtgatcaaggacatcaagatcaagcctcaagaggagaagaagcccgaggacaagaagaaacctgccgaggaaaagaagaagccggaagagaagaaacccgaggagaagaaacctggcgaggaaaagaagaagcctgaggagaagaaacccgccgacgaaaagaagccggaagagaagaagggtgacgacgagaaggcgaaggcgccgtcgtcgtcgacgacgacggtgaacctgcagttcaccaacatatgcggcatctgctacccgtggccgtgcagcgacccggcgcactggggcatccaccacccgcagcaaatgatacctcagtggccgccgtgcggaggtatggcgccggtgcccgcgccgttgccggcaccggcgccgttacctgccccggttcaccac

SEQ ID NO: 26072 - DNA, 274 bp, Setaria italica
  Peptide Sequence Number=SeqID_92046
gcccttgctctcctgtccgtcgctcgggccgccgcgctgcggcgccggcttattgctcgagctcttcttggtcagccacgggaagttcccctcccgccgccgctcgtcacggcggcggcggcgcccctcgagctcgggagcggcagcggggaggccgcgcggaaggctctcgccatgatggtgcgacggataagctcgctagctcttgagcacagctcccctgtgtgcgtgtgtgcgtgcgcgcggcgcgtgatggcaataatgggcgcgcgcg

SEQ ID NO: 26073 - DNA, 348 bp, Setaria italica
  Peptide Sequence Number=SeqID_92047
cgccggtgaccaggcgttctccgggaaccccggcctctgcgtcgccggcggcaggtcggagctcggcgcctgcaacgtggacggcgaccgcagggacggcctcgcgaataagtcggcggtgctggtgccggtgctcgtttcggcggcgctgctgctcgtggccggtatcctgttcgtgagctatcggagcttcaagctcgaggagctcaggaagcgcggcgacgtagagtgcggcggcggcgggcagtggaagctggagtcgttccacccgctggagctggacgccgacgagatctgcggcgtcggggaggagagcctgatcgggtccggcggcacggggcgcgtcgg

SEQ ID NO: 26074 - DNA, 191 bp, Setaria italica
  Peptide Sequence Number=SeqID_92048
taactaacatgaagaaggttccccgacacatttcatagacacaacacatgtatagtattttgagatggcaccttaatcaccaggtgcgatcatcgcgctgcagatttcacaagtgcagggccaagaaaccattcgttctcctcccaaacactaacagcacacccaatcttcaaatgtgtgcagggccaagg

SEQ ID NO: 26075 - DNA, 260 bp, Setaria italica
  Peptide Sequence Number=SeqID_92049
acaccgcggcgacggcggcgatgaggaggagcttgccgtcggcggccatggcggcgatgacgcggcggaattgggggtttcgtaggtgtgaggatgttcgttttcacccaacaaacatcctcacacctacgaaatccccacttctttagacattgacgaccctgttcaaggcctacaccatcgccaacccaaaggaacacaaaggagggtgtatctgcaatagcctcaatcttcaaattcataatctcctcagcattcca

SEQ ID NO: 26076 - DNA, 2739 bp, Setaria italica
  Peptide Sequence Number=SeqID_92050
acttcccttgtttgtcgttgttcttaaactttttttaaagtttttaaatttttaagtttaatcaaccttactattctgaggggcttggcatgcagcaagaacaaatatactggctgcaaccttgaagcaacaaggaggagcataaaagtattggacgcattaaaagaacaccaataggagaaagtgaatcgtattttccatcacagatagttgctccagactgagccgtcggaaaaattttaattgtgcggacggaaaattcacaaggcctcagctggaccttcaacagcgttaaagctacagtttcaaaaatgtagccagctctgcaaaattgaccacagctgctagttctttgctgggggtgacttgggcctcaggctttcgatctccggagttgtcacaacaaggtgaggagcctctgggggagggtttcgaccaccacctccttgccatacttttccatccttgtccgcaaaattcctaatatatgtctctttgttgaagttcgagtaagataaatttttcccaagagtaagccagcctggacggatgttatgatcctcgccaaagagttcaagccgcctccttccaagagcaaaatgctcaatgatcctatacatgtcctcaggcttttttgttgaaccatcagttggttcttcagctataattatatctgtgtcaatatttgcatggatgacgtgaccatccgtgctacgacgcactgttccttttatgcccatcaagcaatgctcctttgaatgctgcaacaatgtatgtgagtcatgccgcagacttggtgttgcatttttcttgttcgttgggacccaacaaacatcctcacacctacgaaatccccacttctttagacattgacgaccctgttcaaggcctacaccatcgccaacccaaaggaacacaaaggagggtgtatctgcaatagcctcaatcttcaaattcataatctcctcagcattccaatattctatgtgatctgtgattcctggtgcacgatgggcatactcctcccatggaggatccacaagaataacatcgaacttggtaccaaaaaattctggagaaagaacatgttcccgcaggtcacacttgtaatacattggcggtgaagctgacttcgcaacgatttcatccttcctctgtatgagttctctcaactttggatagtcctctgctacgcttgtaagatccagttctctaatgaaattttgaggccgcatgccagtgtccacaaagttctgtgagtaatcattttgttcaccccttgaaggagcttttctgtttggtccactgttcctatgtggcgtccaacctggtttatcatggagcatgtcacggctttgcgggcccatatgattgtaacccaatcctgatacatctgttggagcacctaacccagtgtctatttgatttaagtgaatattatgaccagaaccagctcccacatttggtgtaaacctatgttcagcagcaactggaggaggcatgggaaggttgggaggaacagaaagcatattcacatcaacacctcgtgctccaggccacacaagaggtcctggaaatggcggcatgaagacgccaggtagaagaggaggacctggggaatgcggaatatttggtcccatatgctgcattggtcctggtggcaggccgagaggaccaaatggaggaggcatgattggcattggaactccaattctttgagaatcccttccatttggcctcccccttcctcctctaaatggtctatcaccttttggaccttgttgaggaaatgaagaaaccatgctggtgccgccacttggatctgattcaggataatcagtggatttatcatcagttcctcctggtactgaatcccgatgtgctcccacttcaaatcttctcccagaagcagagccctcccttccaaaattaagattactattaggccgaatctctatggaatcagaattgtcatatcgattcccataggttgagggacctctaacactttcagatctacccctagaatctctccggtacccacctcggccatggaaattcccaccatctagcctttcctgtgcatttctccattcagcatcatttgcctccttaggatctcgcaactgactgttcctaccataatccttagacccttcaagatctcgggctttctcattccaacttctgtccctccctctgtctgatttatcatccctttgggcttctcttgtgtcaaccctaagagaaccaccactttcatcagcataaacctcatctgtcctcctgactgaagccttttcctcttggtcccgttgttgcttctccctgctaccctccctcctctcggaactcctagcagaagcatcggggctaaatcttcttgaaggttcccattcattcttgtcctctcttcccctccttctatcatagtccctatccttggaatcatcagggcttctccttggaagtttgggtgatcgtgagtcctttctcacattatagatgtcttcgtcagcactgcgggccaggcctgagcttctatctgagttcctcattgattcattcctatcatttgaaggtgtgatcatcctatcatcatcctgatgcccaacttcatattcatatccatgttttctggatctgtcagaatactttctgctatctgcattctcctgattttcatgttcctccttccaactgctccttgtattaacattatcctaaactccttaaact

SEQ ID NO: 26077 - DNA, 1073 bp, Setaria italica
  Peptide Sequence Number=SeqID_92051
ccttctaaggctcccatactctatggcaccttagcaacacaacagccagcgcagcagctctttggcagcagaagcaggatgggaggtggcggcggtggcagcagcagcagcagcacagcggtagcagcggcacagggctgggcactcagactgaggaaacaatgagtatccatttgttaaaagagagctaacagcactgtaaattacactagaaaactaaatacaggaattatagccagcagtttctcgtttaagtacatggaaacaataaaactgaaatcttgatttttggacactgatgacttctcaacggaacatactcaggcatgaaagatgaaaactactccctccatcccaaattactattcgttttggcttttctagatacaccccttttgacatgcacctagatatgtactttgggacggaggtagtagctagcaagccacttgaaaggaactcagtgatgtagaatgagtcattcatttattaactagctacagaaaattagttggtgggagcgagaaatgcagcagactagaccatacagaaaattagttggtgggagcgggaaattctattacaatggacttataacaggtcatctgtcattgttgtggttcacgaatctatgagcaatattagcagtaagaactttcacagtgaaggaatagaattgatcatatgaaatacatgacatctgatgtggaacagaagacaataaagctgatcaaacagtagatcacttgaatggtgcatgctaccttagccaattggaaatcttagagaaacaacattttcattggcatgcctgttttgattggaggtaaaagttccatttcatgatgaacataggttaattcacccaaacaatttgaatacccaaatgacaaaatttgccaatctttaacttttctatatattgctctagctgtttcaatgggcagaaaagatccataagggattgaggttaaagtttaatttgtaactaggtatttctgggggagaaggatacttggcagctaattatagtcattctgttctggatttaaaataaaaaaggtatagtttac

SEQ ID NO: 26078 - DNA, 279 bp, Setaria italica
  Peptide Sequence Number=SeqID_92052
ggaatacaaggagtgaggaaaatcaaggatggttacaaccctgcaacatggatgttggaagtgaccaccttagctcaagaagatatccttgggatcaactttgccgaagtatacagaaactctgacctataccggaggaacaaagctttaattagtgaactaagcacacctccacctgggtccaaggacttgtacttcccaacccagtactcacagtccttccttacacaatgcatggcttgcctgtggaagcagcacaaatcttactggagaaatcct

SEQ ID NO: 26079 - DNA, 676 bp, Setaria italica
  Peptide Sequence Number=SeqID_92053
gcgcgttgctggggagctcgtcagagcacggccggtgatcgcggaagaatagtcgagagctgctcggcgtcggtggtggtgcgcgcgcgcgggcggatcgttgatcgatggctagggaagcggaggcggcgctgcggccgttcgtccaggcggcgggcggcgacggggaggtcatctcgggcgggccggcggcgacggcgttcctcgccacggataggacggatcggccggtggacccggtgatctggggcgacgagaagcggatgaagcgggagctcgtggcgtgggccaaggccgtggcgtccatgtcggccggcaagaacacctcctgctcctccacgccatcgtcgacgccgtcgccatccatgagacgaggcagggtatagtgtgccgattctggtgggcacggtatcgctggggcaacaaccaccctcgattcttcttccacttcaattcgcttgacagcacatcttgtcatagttgttgcccaatatgctgatttctctccataaaaggagctcttgatgtacagtaagtattgaggtattgtataggaggatgatcttgtggcaactgccaaatgtacaatgcaaattttctcccaagcagttgtacactgctagaactgttgagcatatagcaataaagaacatgcattagaaaaaaaaaaaaaaac

SEQ ID NO: 26080 - DNA, 268 bp, Setaria italica
  Peptide Sequence Number=SeqID_92054
cttttctggatgagctttcaaggccacttgtttcagcattttcagcccccaggccatcttctttgttttcatgacaattgaggtgattgaacctgagatgatggcttatggtgcttgaagacgaatgcagtcttggatttgactcaccggagatctggagatccttagcagctagagaagcctgaaaattcagagcattcactgctcgccctgattgccgagattgtacctcgttagcgcgtgaggatgaggaaggcgcgtccgcggc

SEQ ID NO: 26081 - DNA, 343 bp, Setaria italica
  Peptide Sequence Number=SeqID_92055
gtttccaccatggaggagtggcggaggcaggaggcatggcagcgccaaggacttcaggaggcagcttcgcagacgtctccacggcacaacgggcacaccctgtgtatttctttcagccatttgtcaacacattgcaggtgaaactcgtgtttgcacggaagagttcttatctgctctccgtcctcatattcagttaagcagatatggcacctgatgagacaaacacaacaatatgttaggtttaaggatcagaaactccaaaacagtgagaatgcttggagtacttgtaaaacaagggctagccagcaggcgttactctcaaacacaaggtggtcacgactgt

SEQ ID NO: 26082 - DNA, 1925 bp, Setaria italica
  Peptide Sequence Number=SeqID_92056
gtctgggaagtgttgcccaggttctttgacagaacctaacatctgcacctgacggtgaagcttcagcgttgagatgcataaaattgaatctagaatttacatatatgtacatgttgtcatacacagggaggctacaaaagctatatacaagtctcggtatcttaaagattgacaaggaaacgcctcatttgtcgcaggatctggccattctattcagcagagagactcttgcggagtcaacggtctaaggtgacaggatcaccgttgcctgactgaaactgaaccagtttccaccatggaggagtggcggaggcaggaggcatggcagcgccaaggacttcaggaggcagcttcgcagacgtctccacggcacaacgggcacaccctgtgtatttctttcagccatttgtcaacacattgcaggtgaaactcgtgtttgcacggaagagttcttatctgctctccgtcctcatattcagttaagcagatatggcactgttccatgtcatcactgcattggggtgtctcaagctttttgtagctcttacatggcaatgaattaactacagattcaggagcctgaacagagaccatggaaagtgaaagtgatgcaggttgacggtgaatttcatccaacacctcaaataaagcctcagttaacatgacaattcttgatatacttgctcgggcactagattcttcagcaatcaagaaagaatcacaggtgcatcggccaattggatgaatccccaaaggacaagctgcagtgctttgttcattgccactatcaaaaacagcacggcgatgctccctaatccgggatcttgaatactggcttactcttattgaaccatggcgtctgcgatgaaaatgtcttgactcctccaactccccaaaaaggtcatcaccaatgtctagccatgtgctgtaaaatcccagatcatcaacatcggattctggataacctctagagccacgcctggaaaatgtatcccatagaacccttctgtgactcctccttatttcactgccacttgaatctctagagcgtcctagaccatcatttgagaaaatgctcatcatgtcatcatgtaatatactcccaccagtctgaccgtgtggcccactgaatatgggaacatctgctctggtagggattgaatctggtgttggttctccagtaacggatgatgcagttgaggagttaggcgacatagatgttaagctagattgagatatatcagatctttcacttgtcataacagttgtggatgaagaaacctggggagctatctctccttctaagtcagacacgatccttccagatgttatcaacgaggggtgcaaatcagattcagaaatcgaaccaccaagttcattaatggggattgtgttagcaacatttcccagctctgatcctacagaatttattccttctctcgatgttatgtcaacatcaacagcttcattactgaaacttcccctaaccatgatggcttttctggatgagctttcaaggccacttgtttcagcattttcagcccccaggccatcttctttgttttcatgacaattgaggtgattgaacctgagatgatggcttatggtgcttgaagacgaatgcagtcttggatttgactcaccggagatctggagatccttagcagctagagaaagaattgcgcaggccatcttaacatactagagtggtaatgtgctgaaaatgcaatgatagcaatggagttcacagttcacacattgccaacaatctgctttgaatttaactaacccatgtacaactttacttttaagaacattctatatttgctgtacaacttcagacatgcctgaaagctgttagttagaatacaattgtaaatgagataacattgtaaacacaacagacaatgacaagactttggctc

SEQ ID NO: 26083 - DNA, 338 bp, Setaria italica
  Peptide Sequence Number=SeqID_92057
caggacttctgcgtcgccgacctgccccgcggcgacacgccggcgggctacccgtgcaagccccagaccgccgtcaccgccgacgacttctactaccgcggcctgggcaccaccggcccgaccatcaaccccttcaacattggcctgtcctcggccttcgtcacccggttccccggcgtgaacgggctcggcatctccgccgcgcgcgccgacttcgccccgggcggcgtcgtgccgctgcactcgcacccgggcggcaccgagctcctctacgtcatcgagggcgccatggccgccggcttcatcacctccctgaccaaccaggtgtacaccaagac

SEQ ID NO: 26084 - DNA, 580 bp, Setaria italica
  Peptide Sequence Number=SeqID_92058
cctgcctgcctcaatcacgaatgcacattggtcgtttgcgacgtggcgtggcgcacattttagttgtgcaggcagccaattcggtgcaaagtttagtgcaagagggatcattcagaaacacaagaattggctgtgacaatgcagagctcctacacaaaagtccacatcatggagcacttcttaaggttcatcaggagccctaagaaaactttctcctttttcgttaaaggcgaagaagaaaaacaattaatttagagtaaacttctttgatactatacattaatttgtgctgaggaaggtacaaccagtagctttctcgtagcatatagacttattatgttaggaactaataaagtcccccaggctccaaacagttgtggtccctccagaaaaaggtagcgcttatgatcacattttggaaccgtctgcaaactccagagcttcttattgagattctagtgagaacttgtttttctgcaaaattcttgcatttcaaaaggtttgccccctcaccatgccatatgtgcatggtaagtttggtttctagggttttcttttcctgtgacattctacggatatt

SEQ ID NO: 26085 - DNA, 188 bp, Setaria italica
  Peptide Sequence Number=SeqID_92059
tagtagcagggtatgtgctttcgagttagaccgggtagatatcttgcattctgtttgagactgacaagctatatgtgacctcccaaactgctaggcctttgagaatggagctgactcttcattctgtacgtatttaatgcagctgcatgattatcatatttaagaagataaggattaaatgcatgctt

SEQ ID NO: 26086 - DNA, 595 bp, Setaria italica
  Peptide Sequence Number=SeqID_92060
tttccctttgttaacactggaatccctcatcgtaccgtccagcctggaacacgtagtcgatcaagcagctgtaccccttcaagccaagcacaaactcaccagtaccacggagtggctcaagctgctgaatggcctcatcaaccctgccagccttgcatagcccgctcaggaatgcgttgtaggtgacctcatcaggtggacacccttggtctttcatggagtgcagcaggttctcagcttccttcaggtgtccggcattgcacatggacgacagtaagacagtgtgtgtcttgacatcgggcacgatccccctcgagatcatttcatcaaacagcttgagcgcgtccgcggcagttccccgcttgcagaggccatccatgagcacattatacgtggccctgttgggtggtaagccggtggcgagcatcctgttatagagcgccagggccgccggaacaacgccgctgttgacgaggaccctgaggacagcgttgtagacgaaggtggtggggcggcacccgaactcgtcctccatccgggagaatgcctcgaccgcctcgtggtgccggccggcggaggcgtgggcgaagacgag

SEQ ID NO: 26087 - DNA, 250 bp, Setaria italica
  Peptide Sequence Number=SeqID_92061
cgggctacgatttcgactacgatgacttccacgcttgcgttcatggaaggctgccgtatgagaagctgaagcctgaccctgtcctaaggcagctgctgctctctctgccacagaggaagataattttcaccaactctgacaaaaaccatgcgtctacggtcctgaagaagctcgggctcgagggctgcttcgatgccatcatttgcttcgagaccttgaacccgccaactgagcaagacgacatcaatgg

SEQ ID NO: 26088 - DNA, 842 bp, Setaria italica
  misc_feature (817)..(817): n is a, c, g, or t
  Peptide Sequence Number=SeqID_92062
gcacccctttgcacaatatggaccttgcaatcagagtcggcagaagcaaattgccctagcaacaaagcagcctctcgttggctttctgtacaagaagaacttaataatccaatcacaggttgcagtgccccggcattaagaacctccttcttgatgtttggtgacgaatgaaccaaatttccaataacaccaactgcttcatagtgaattgcagcatcctctgaccgcagcattaagatcaaagttggcaaagcattgcattgaacaatcagggctttgttctcatcatttttaaaagctagagtacgcaaggcccctgcagctgctctctgcaccttaagatcctgcgattcaagcaattcaacaaggggtggtattccaccttccattctgacgctagttttgatgttgctattttcatgagcgagattggtaattgcatcagctgctctcttgatgacactgttaactaccctcgagtttgtagtatttttctgccttctcaagaggttcacaagcggaggtagggcaccagcatcaacaataagttgttgatgttcaggctttacagctaggagacccagagcgaaggcagcgcccttctcgacctcatgctcgaacggccgcagctgctgatcctcctgcgccgccgccgccgccgcaggctcctccaggtggcccaccaaggccggcacggcgccgccctctacgatcacgttggcaacctcctcgtttttggcgagctcggcgaggacgtgggtggcgcgcttggcggcgacgcggtcggcgtggcgccatgaggaggcgcagcggaggnggacgtcgacctgcgtgcggacctc

SEQ ID NO: 26089 - DNA, 2263 bp, Setaria italica
  misc_feature (1)..(55): n is a, c, g, or t
  Peptide Sequence Number=SeqID_92063
nnnnnnnnnnnnnnnnnnnnnnnnnnnnnnnnnnnnnnnnnnnnnnnnnnnnnnnctgtttttttttaaagcagtaaacaggcaggatgtaaaataaaactgaggggcaaatgtttaacacaggagataacaccacagctgactattacatcgctgctcaagctcatacgtttgacagacgcgcagcacactgaactggaaactgtaaacgacactagactcggaactgtaaccaagactgacaaagttcggtcaggaccgaccaactaacccctattccagcataagctggttaacacacgacatgactcttttagccacacaccctctgttaaatgaacagaagtttgttacattatcgatgttaattttaacgaacccgctaccacgtacccacaatagataccatcgaacgctcagcgccagaaactttagctgtacaggatctccagctgcattggtcagatgacagtagcgatgtcaatgaatgtgaacgaacttaatcatgtctgcatgttcttgtcgcttggacttcttgaactcagcgccttggtaaggaaattgcggagctccgggataacacgctggatcagctgagccgaaccggctctggtgcagatcttgttaaaatgctccagaatgtacaggatgcatgtatgtctcagtgacaccgcatggaaggcttcagacaagtcatacatgtcggagacgttatctagattcacatcctttgcaatcgtatattcacataggcgtttgaggccttctaagagatactgatcagcggctctaagaacatcctgagcaatttcactggtaacctgcactgaccctgtatagataaatctcatcatgagttcaaaaacgtcccatctgatattgggaatttcaatatctcttgcatccttttccctgtacccaccatcgaacattgcacgaaatgcatctgaagaagcaagcaaggcaattctgtgtgcataaaaacgcttcccttccaccaagaagttaacatctgaaagtgttgaactattcacatattgctccccaagataaacctgtggtgttggagatggaggggcagcatccataggagaaagtgctgcagctttgttggccaatttgtacagtgctgctgaaccatcttgttgatgtttcgagctcatggaagtcagaagatcaagaagcaagtcgagaccattattatcaatgaaaattgtgctttgatcttcaggggcacaaaggtgcgccagagccagagcaacacgtctctgcacagttttctctcctactcgcatcatgtaaagcaagtgtttcagcactcgcccatttatcttctcctctaacctcttcaatgtttttgccacacagtcctttgttgcctgaacaataaattccccatcttgcaacttttggacacctcccactttaatgaaatcggagacatagtcctcattatctgcaactccgtaaagggcaaatgcagcgttatgttgcagagatccattttttgaatcaagaagttttaacaaaggcaacaaaccaccgttatatgcaatacctgcttggttatgtgtgtcctgggcaagtctcccaagtgcaaaagcagacatctctcgcagttggacatcagctgactgtagcatttcaattagtggtcggactgcacccctttgcacaatatggaccttgcaatcagagtcggcagaagcaaattgccctagcaacaaagcagcctctcgttggctttctgtacaagaagaacttaataatccaatcacaggttgcagtgccccggcattaagaacctccttcttgatgtttggtgacgaatgaaccaaatttccaataacaccaactgcttcatagtgaattgcagcatcctctgaccgcagcattaagatcaaagttggcaaagcattgcattgaacaatctgcataacagggaaactttaccatgcagggctttgttctcatcattttgcagctgctctctgccaccttaagatcctgcgattcaagcaattcaacaaggggtggtattccaccttccattctgacgctagttttgatgttgctatttcatgagcgagattggtaattgcatcagctgctctcttgatgacactgttaactaccctcgagttttgtagtattttttctgccttctcaagaggttcacaagcggaggtagggcaccagcatcaacaattaagtttgtttgtattgtttctaggtctttttactagtcttaggtagtacccta

SEQ ID NO: 26090 - DNA, 601 bp, Setaria italica
  misc_feature (378)..(378): n is a, c, g, or t
  misc_feature (515)..(515): n is a, c, g, or t
  Peptide Sequence Number=SeqID_92064
tgaaaaggcgatgggtgtgtgcttccagctggtcaggaatatccctgccgaaagccttcttggaaacagctgctgcagaggcagagtgcacgctgccgctgcatccacgagcatcggtctcatcgagggaactaatatttgcatcgggcgtgccgttctggcaaacggcctcaagagcagggctgaaccaaaactgggactgctgaggaggttgttggctataaaatggatgctgttctactccccctgtatgagatatgtcttttatagttgtacataggggataggtagtgtcatcgacctgcccctgatcgtaggtgaagcacaggttggtagggtactggtggtgatcctggagccagtgatgcaaaaaagggntcgggaagaagagtggcggcactttggaattcagagatctcggctagtgcctccatgtaggaaggcatggggtcctcaacagcgctagtgctgctgctgccagccaaggcggctgcattgcatgtcccaggcccggnatcttgaggtgtcccttgcgcgtgcacatccagaatgtcggtggcagcagcgtgcgcagtgaagaaatccccatccaggtgggtcg

SEQ ID NO: 26091 - DNA, 800 bp, Setaria italica
  Peptide Sequence Number=SeqID_92065
cttattatatatcacactctgtatatttacatagtaattatgtgcatgactacaccattagatgatttacaagcagctagatcatgcatggtgatgcatgccacgtatgtacatagatatttacacacacgctgctatctctattctctcacgaggaagaagagacaacttttttatttcctggtggatgcgtaaagatccttggtcctgcaatacgtggataataatctgtatacatgcttcagacaataataatacttctggtggcaggtactcgtcgccggttggaggtcgatgccgacgccgccatgatcagaacaggtacgccgtcggcgcgaacgccggcatggacgacgagctctcaaggtgcctggattcatcgctgcgggggagcaccctggcgacgtcccaggacgccgccttcctggtcctcgctgggccgccggcggcagccttggccgcgtcggtgctgtgctcctcgtagatgtccccgagcgacgggcgccactggtgggcggcggcggcggcggcccttctcctccggcgcctcctcctcgcggcggcggcggcgtctccggcgtggtcggcagcaggcggcgcgtcgtcgatgggtccagcacggcagccgcagggcacgaacgacaggagcctcatcagcttcctgcgcacgctcccctctatctttcccccccggcctccccctctctctctctaaaaccccctctactttctctctctatcctaatcctctctctctctctcttgatcttgtttctctctcgtaggccggcggcgagacc

SEQ ID NO: 26092 - DNA, 294 bp, Setaria italica
  Peptide Sequence Number=SeqID_92066
tcgggcggtcctgtaggagcaggaggcggcagccggcagccacagcgtggagggtagagaagcctcgaacggcggtcgaccgcgacgagcaggggatgagggtcaggcgacagtgcgaaaggagccagttagacaggattcccgagctcccggcgctggcgaccggtgcggatggacgccttcgctcgcggtggtctgtggctgttccgatgcggcgacgcggcggggaccggtggtgtgcgcccccgtcctccggcctccgcggctcgggacaagcggacggcggcggcgcag

SEQ ID NO: 26093 - DNA, 276 bp, Setaria italica
  Peptide Sequence Number=SeqID_92067
agttcatcagatttttttaccagtatctgattttcctcaaaagtattgtttgaagcttcctccagcaccttcacctgttccaccagggttttattttgtttcctccagctcacttaatctttctttaagcaaagcctcttgatgagttaaggtgccattgatgtcatctatgcacctgactttgttagccaaaacttcctccttcttaatcagcatatcgtaaccaatctgtagattactcaatttttccttcaaaagtacctcattttgtgcagt

SEQ ID NO: 26094 - DNA, 493 bp, Setaria italica
  Peptide Sequence Number=SeqID_92068
ttcctccctcaacagttggacctttggctccaactggaccattgcttgtggaattcacagaactgccaacttttgcagcatcacatccagaaggttgcactgcacttgcaacagtctctccagcatttccaagctgcacgttgcctatgtttggattacaactatgcagctgtgacttatctaaagcagcagtagcatctacattggaagaagctctgctggaatcttcaggttctgcagcaggtttgctagcaatataatcctcccctgcagattccagtttagtggtttcatgcatgatagaagctgcccctgtaacttctggtccatcggcaccttcagtacttagggaacctgtcctgagcatggtgactgtaactcctggatcagtaacagctttgcgagaaggcatccctgcaacttctggtgcaatgcttgtaacagtggcagctttagtctcagtagaaactttatctgtgacttctggatcatg

SEQ ID NO: 26095 - DNA, 879 bp, Setaria italica
  Peptide Sequence Number=SeqID_92069
aatttgacaactgcaattgtgcagctccaaatcctccaaattgcggcacactgaagtaacatgcttcgcaaaacgattatccagatggacaaagcagagatacagccttttgatatgccaatgactggggcccaatcccttgtgctgactggcaggatctggggtgcaatacttcattgcacgacggagccatcctgctacttgtttatgagcaaactgaggtgccctgccgctaccaatgtgcagcctgaaggaatccaactgtgcaatgttacaacgatgcatcaggttcaccgtgaaatcctcgaaatcctgacactccttgtccatgtcgccaccgtagtagccgtcatcgtcactgtccgaggaggaagaggaggagaagtaatagttgtccgagtcagagctttcagggtcaacgtcatcatcggtctcagagttgccgacgctgaagtctgaactgtcctcaccgccggagccatcgttgcggtcggcagccgccgccacgggagcaatagttgtctcgaaagcaggcgccgccgtctcggtcctgaactcgtcgaggtcgacgtcgaggcacggcacggagagccagaggtccctccagcgcctggacagcacgcacgtctgcaccgcctgccgggccttgagggaggacatgatgacgtggaggaggcagtccggtagggtgctcaggcggtcctggtcgccgccgccgccgccgtccccgccgggtccggccctcttccttgtggcctccgctggctccatggattgcccgagcgccgcgggttcagcctgctgcggggggaggagaggctccattcggaggcgagcggagaaggagtggcctaaaccctcgacggcggcgacggcgag

SEQ ID NO: 26096 - DNA, 705 bp, Setaria italica
  Peptide Sequence Number=SeqID_92070
ccgaacacatgtcttctttcgcacatatgagccatctcattggggggacacgagccaaaaggtatgtgaggtaacagagcagccttcatcggaggccaaaggaaatgataagagtgaatttggggctatacttgctgatgttgtcgccaacatgaaagttcctataacagttctaaatgtaactttaatgggagcattcagaagtgatgctcatgttggcacttggagttatcctccgactgtacttgattgcagccactggtgtctcccaggagtcccggatgcttggaatgaactcatattttcttacattttgacaaatggttggcgaaacatggcagggtgaatgttgtggcagcatactcaattacttttgatatttgacattatcacgtatagttgaggattaacatacgtcctggacggggcagctgcatctggcatcttctaggtggtcactggacttctacattcttttcttctttgacctctttgactttttttaaacgaattttattctttgacctgtatacagtgtgaagcatggcatcgagagctgtagattttgtatcacttcttttcgttgctaaggattagatagcttcagagcatagacattcattctgttaccgtctgtactaacagttcattttatattgtcaaaaatcaaatttatgaaacaagtgtccacttcagttaagttgc

SEQ ID NO: 26097 - DNA, 244 bp, Setaria italica
  Peptide Sequence Number=SeqID_92071
tttaactacttactgatgaactaatcacactatcttattacatctgaattaataaacaattactacttactgatgaactaatcacactatcttattacatctcaaaattccacctttccagtgcctgctaattgctatctaccagcaccttcaacgagcatgattcatcagctagagtagtcggacatggcgaaggagcagctcgacgagccgcccttcggcagtgggctccgagccggcgacc

SEQ ID NO: 26098 - DNA, 988 bp, Setaria italica
  Peptide Sequence Number=SeqID_92072
ttttttttaacgcacaaatcaatctattctcctgcaagcacaggttcataattctgttcaatgacttgggttcagccatgttccaaactcacctcaacttacatgaatcagtcaggtatccatggttctgttctctaccaaaatcactatccataaagttacaacccaggcagtagcacaagaatttgtaacagaacatgtgctgattgggtttcaggcctgagaactaaaattgctacacactgaatcaaaagagggggcatcaacatacacactgcttcactacaaaaatgtgtcatgagatctcgcttccgaattgaagagtgaactcttgacatgttcaataatcttctctttatggggactgatttgaatcaatcgatccaaaaccctccagtggccacacccgacaaaagatcttccctgtaatgagaccataaggcacagcctccaaaatgccttgaatctctagaagcataaacattatctccctgcacccaaacatgaccttgtggtaccacgacggtcttggcggcgtcgctgttcccggggtcgacgaggtaggtgacagagtcgccccccatcccgacgacgcgcttggcgaccgccttgcgcgggtcctcgggggagatcatcagcacgacgtccccgggccccacccgcccgcgcctcacgctcaccttgtccaccgccaccacgtcgcccgccaggttcatcgccggcagcatgctggggccccgcacgatggcgagcgagcagaggtggtggtccacgacgtggacggcgcagaaggcctgcgccaccagcaacgcgcgggagaaggcctcccccgcgatgttccgccacgggatggctccgaggcgccgcacgaaggccgacatggcagcggcggcggcgaggggagagtagtcgttggtagtaagtcgtagttcgtttcttcgggtaacttttacttaagggttaagttacttaacccgttaacggttaa

SEQ ID NO: 26099 - DNA, 251 bp, Setaria italica
  Peptide Sequence Number=SeqID_92073
cagctgaagcgctgcaaaaaatcagaagcgaacactccaattcgaaaatcagaagcaaacactccaattcaaaaccagttcgaaaagaattcacattgaagttagagaaggatttcctttgaccaatttctgagatcataccaaaagcctacatacagtccccatctaacaagtacagaaccagttttacaattgatatgaaccagcaccacctccacatgcaacgaatgttactatatataatatttgga

SEQ ID NO: 26100 - DNA, 922 bp, Setaria italica
  Peptide Sequence Number=SeqID_92074
ctccatctcgcccgagaggaattccccccacccaaatctccctcccctccaacaccatctcgtggaagcgccgagatgtaccaccccaccagaggcggcgtccgcggcggccgagaccaatttaaatgggacgacgtgaaggttgacaagcatcgagagaattaccttggtcatagtgttaaggctcctgtcggaagatggcagaaaggaaaggacctgatctggtatactagggataagaaatctgacacagaagatgctctgaaggaagaaatcaggagagtgaaggaagaggaggaacaggctatgcgcgaggcacttggcttagctcctaagcgcagcaatcgacctcagggcaatcgcttggataagcatgaatatgctgagctgattaagagaggatcaactgcagaggatttgggagcagggcatgctgaagcagcacaagtgcagggtttaggcttgtacaaggctcctcatgatgagggagaatcgagttcttttaaccttgatcctcctgaaatggcacctgagcaggctgaccctccgccagcattggaggaagattcacaggatgataggaagcggaaaaggcggcatgaggagaggagaggggacaaagagcagaaacgagaaaagcatggcgatggaaaacaaaggaggcgagacaagcacgagaggaggcgcgactcggaggatggatcaaagcggcatcgcaaagataagcagaagaggcgtcatgattctgattctaattgatagcgactctgcctgtatctgtatgattgtttatggcaaaataatatatgactgctgttatgtgaaggaactccatttgcatgtatctgtatgacttcaatatttgattctgattctaattgaggcgttgctggcggtgttggcaacgcacagtgcttttacc

SEQ ID NO: 26101 - DNA, 274 bp, Setaria italica
  Peptide Sequence Number=SeqID_92075
gtattttttagtcaaagtttccaatagttaacttcagattatcagataacatcaatatgtcacccagttgtttatgaatggagtacaactttacgagtgtgcaaaaccatgtatgatagattgtagccaatgttgtgaaaaaaaaaaactgtaggggaggttgtttccccaaaagacagaacaaaacaggattcgatgaaacaaatacacaattaatcttctgatgaaacatatattttgctcaaactgtagaagagcaaatgggcgcagaagg

SEQ ID NO: 26102 - DNA, 468 bp, Setaria italica
  Peptide Sequence Number=SeqID_92076
agaaagaagaatgcaccaaaatgcaagtgctgcaccaaacgctggtggttgtttcttgtttgtaagtgaatgcaacgaaaagacccaaaaataacaaataatgagaaaattcattttatagacatttcgtgctcatttccaaatttctgcttagttattcccatcatccggtaaccacaggatgatcccaatctcctttttagtaatagatctttgagatatgtctcagtctcagcggcaaggaagagaaaatgcatcaagtcgtttatcaagaaagtggacgagcatggtggtccctatatctctgaggggtgtaccacttgttttttttcaagtcggcttaagaggttcaaaagagaaagtcactctccttattcttggctagtggaatggaagcaagactctttcctatccactttgccgaggggagagaaactaaaagataaatcaagctagacagaaaggtga

SEQ ID NO: 26103 - DNA, 568 bp, Setaria italica
  Peptide Sequence Number=SeqID_92077
aagcaattcgttcgcccccaaatttacttattctttagcaaggcttgggatacatactcctatgcacggaaggaaaagaaagcccaaatagctgaatctaccttcctttacttccccagctagctcactctcattagtcatcttgctctgcttccttgctccatgaaacaaaaaccaatacaaaggacctgcgaacaagacagtttcttctgaattcccactccaaactcccaacgcgtgccttctgcataattgtcttctccatattaccatattcctgaatctacagcgcccatgggactctgcgcatccatgttgccatggaaggccaagagggaacagcccgagcccaggcgtggcacgcccaaggcgctcttcgtcatcaggaacgatggcaggctgtccaagccagaggcactggtgttccacccacacagctatggccgctcggggttacagaaacctggcggagcggacagcaggaagcatgagaagtgcaggtacgattgcaaagacgtgctgactatgaggctttcgtgcgccttaagtcccccctaaagtaaaaaaa

SEQ ID NO: 26104 - DNA, 393 bp, Setaria italica
  Peptide Sequence Number=SeqID_92078
ataatcagccatggaacaccttgcaggaactgttggtcgtcttcgcagtagaaaagtttgtcatggaaaccacagttaccatcaaggtagagaaacacatagcgaggtctagtaccagccaaagatctctctgtattgtcaccgaaaactttattctgcagcatgttgccatagctttctggactactctgagtaaactcaccatagttcagagggaaatctgaagggactaaccatgaggttccagggaagggttcgcagaaaaggtcaccaatctccttataccggtccacaagcaaaatcctgtttgtaagtagcgcatataggaacactgaagtgatctcaagcatccgattccccatgccagcatggatggtcagtaacagataattg

SEQ ID NO: 26105 - DNA, 283 bp, Setaria italica
  Peptide Sequence Number=SeqID_92079
gcgcttccgggacttgcgaggggtggccgttcgggctgtgccgccggcccgccgtcctcccgctgccccccccgcccagcacgccggccgactcgtggaagtggcgcaagagcgtcagcagcctcgccgcgagcccagctcgtgcgtatcacgcccacaagcttaccagtaaataaccgcatcgccattgattagccaaagaagtgaaggacctcgagccgtccgtgttagcaacgcctgctgagacgagacgacgacgtttagaagatttcagctagtttga

SEQ ID NO: 26106 - DNA, 385 bp, Setaria italica
  Peptide Sequence Number=SeqID_92080
ggggtgatcaagagcagggagaagcacaagggcagctttgagaccatccacgtcgaagattcactcggccaccagtttgccacccgcatgggcaacgttttcaccatcggcaaggacaagaagccgtgggtgtctcttcccaagggcaagggtatcaagctcagtatcatcgaggaggcgcggaagcgcaatgctgaggctgctgaggcttgatttcttacattttaggctacagattgctgctgctgaggcttgatttcttacattttaggctacagaaaaccattgctgtaagcattctatcaaaagatgtagacgtgcctgctggacgcatgcattgccatggggctgttctgaacagtgaagtcatcaactacttgaaggt

SEQ ID NO: 26107 - DNA, 455 bp, Setaria italica
  Peptide Sequence Number=SeqID_92081
tagtgctttgtgttcaccctaaaccatagccaacctggctagccctagtacatgtatggcttgacccatgtcaaggtttggcaacccaaatgggatctgggcctggtatgaaagtgcgcaggtctagtccacctgcatcagtgacactaaactgctaatgttttatttcctccttattcttgattacctgatgatccatccattaattaacttcaaggagtgtatcccgagatcgcggtatcaaagcatgaacattggtcatcgttggctcctcttcccctcgaggttgttctctctgctggtcaaaaggctaaggaggaacctcggaaacaaggtgatgatgctcaagggagaaataagcttgcacgagaaatgagtgatgtaatgggagaaggcaatatagagagcatgctttcagttgaaatggggcttagagagctttcttcattgaaggt

SEQ ID NO: 26108 - DNA, 277 bp, Setaria italica
  Peptide Sequence Number=SeqID_92082
gcaaggtcaggactgacaagacctaccctgctgggttcatggatgtcatttccatcccaagaccaatgagaactacaggcttctgtatgacaccaagggccgcttccgtcttcaccccatcagggatgaggatgccaagaccaagctctgcaaggttaggtctgttcagtttggccagaagggcatcccatacctgaacacctatgatgggcgcaccatccgctaccctgacccgctcatcaaggccaacgacacaatcttattggtctccaggtcg

SEQ ID NO: 26109 - DNA, 443 bp, Setaria italica
  Peptide Sequence Number=SeqID_92083
ttggatgttggacaaacttggtggagcttttgcccccaagccatcttctggtcctcacaagtccagggagtgccttcccctgatcctcatcatcaggaacaggctcaagttattgtcttcttgaattaccgtgaggttatttctatcctgatgcaacgccatgtcttggttgatggcaaggtcaggactgacaagacctaccctgctgggttcatggatgtcatttccatccccaagaccaatgagaactacaggcttctgtatgacaccaagggccgcttccgtcttcaccccatcagggatgaggatgccaagaccaagctctgcaaggttaggtctgttcagtttggccagaagggcatcccatacctgaacacctatgatgggcgcaccatccgctaccctgacccgctcatccaggtcgatcttgatggtgtcgttgg

SEQ ID NO: 26110 - DNA, 510 bp, Setaria italica
  Peptide Sequence Number=SeqID_92084
cgtaatttcatcctgaattctcaagttcctcgcgccttcccaattttcaagtgaatgctgattgatgtttgattgttctgtgtacagaccaagctctgcaaggttaggtctgttcagtttggccagaagggcatcccatacctgaacacctatgatgggcgcaccatccgctaccctgacccgctcatcaaggccaacgacaccatcaagatcgacctggagaccaataagattgttgacttcatcaagtttgatgttggcaacgttgtcatggtgactggtggaagaaacactggtcgtgttggtgtgatcaagaacagggagaagcataagggcagctttgagaccatccacgttgaggatgccctgggccaccagttcgccacccgtcttggcaatgtgttcaccatcggcaagggcaacaagccgtgggtgagcctgcccaagggcaagggtatcaagctcagcattattgaggagcagaggaagcgggattgcttgcttgtccct

SEQ ID NO: 26111 - DNA, 2020 bp, Setaria italica
  Peptide Sequence Number=SeqID_92085
ccaccggcgacgacgatgaagacgacgactacgccgcggaccacccgccaccggcacccatgaggttcggaggtggccggacagcgcacgggagcaacggcgtctccctgcttggccgcaccgcgagatctccctcccctgcgttaggtcggaacattgtagaaccacctccgaccgtccgctcatcatcagcaggcaggccatctgttgcatcacgaccgaccaccacagtggtgccaccgatcaaaaccaacacgacattgcgaaccccgtcccctatacctcccgtggctgtggagcctccagcagatcgcactcggcagaaaaggtttgatgcagggcttcatagctccagagaatcaggattaaaaagagaggcatccactcttcaagatgagcttgacatgctacaagaggagaatgagagtgttctagaaaagttgcgacttgctgaagaaaaatgtgaggaagcagaagctagagccaaggagcttgagaaacaggtagctgctcttggagaaggagtgtcactagaagctcgcctcttgagcaggaaggaagcagcacttaaacagagggaggctgcactaaaagctgcaagggaatcaaaggatggtagagaggaagtaacaacactaaggcaagaacttgagtctgccaaagaagaagttgcatcagcatttgaccagctaaaggaggcagagtctgaaacgaaggctctccggtccatgactcagagaatggtcttaactcaagaagaaatggaggaggttgttctaaaaaggtgctggcttgcacgctattggggtttagcagttcagtatggagtgtatcccgagatcgcggtatcaaagcatgaacattggtcatcgttggctcctcttcccctcgaggttgttctctctgctggtcaaaaggctaaggaggaacctcggaaacaaggtgatgatgctcaagggagaaataagcttgcacgagaaatgagtgatgtaatgggagaaggcaatatagagagcatgctttcagttgaaatggggcttagagagctttcttcattgaaggtggaagatgctgttgtagttgcacttggccaacatcgcagacctagcatagttcggcagttcacatcagattttaaatcacctggcgaacctaaatatctggaggcatttgatcttagcccagaagaagctgaagatgttagcttcaagcaggcatggcttatatacttctggagaagagccaaaactcatggtgtcgaggaagatattgctgatgaccggcttcaattttggattggtcgcaatgcacaagctccaaattcgcatgatgctatagatgtggagagaggtctaacagagctcaggaaattgggcatagaacagcaattgtgggagggttcacgagcagatatagatcaagcttctttggcgatggagaactagtaagaatttgccatggttgtctatgctccgtgtattatcccatttttggagaaacgggaactctggttcccgaccggtctcgagcccttgcatcatcagatatcacagaatagtgcttcgatcttggggcatcgagcgatgaacttgcccaatttccaacaagtttgtgtagtgcatgtgcaagcgattcatctgttgttgaaatagctttgtgaaatgtgtaatagttttgcctcggcaagagaaacaacgacggcctcacttcgagcaattgtgaattttgtgattattgcccctgtttattctctgtatcaagctcaatcatccagtgccgaggaacgtttgcaacagatgaacaaaagaaatttctgtatcatactcctgcatgttttgtgtcggtggccttcgagtttaggcttgatatactgtcgtgcttcagtcctgtgatcctctgtttatggttgatccacatgaagcagaagctctaccatttgctagcactcccggtcagtgcatgtgctgtacatgttacgttgtttgtatcttcgtcataatcatttgtcatgaacctgcag

SEQ ID NO: 26112 - DNA, 1181 bp, Setaria italica
  Peptide Sequence Number=SeqID_92086
gtttatcaccgttctcacaccccccccgccagccagctcgccgccgccgcccgctcgagcgcggaagaaccctaggcgccgagcaagatggcaaggggtttgaagaaacatctgaagaggctcaatgctcctaagcattggatgcttgacaagcttggtggagcatttgcacccaagccttcatctggtccccacaaagccagggagtgcttgcctttgatccttatcctcaggaacaggttgaagtatgccttaacctaccgtgaagttatttcaatcttgatgcagcgtcaggttatggttgatggcaaggtcaggaccgacaagacatatccatctggattcatggatgttgtatcgattcctaagactggagagaatttccgccttctctatgacactaagggacgcttccgtctccacagtatcagggatgatgaggctaagttcaagctttgcaaggtgcggtctgtgcagtttgggcagaagggcatccctttcctgaacacctatgatggacgcacaatccgctacccagaccctctcatcaaggccaatgacaccattaagatcgacctggacaccaacaagattgttgacttcatcaagtttgatgttgggaatgtcgtgatggtgactggtggaaggaacactgggcgtgttggggtgatcaagagcagggagaagcacaagggcagctttgagaccatccacgtcgaagattcactcggccaccagtttgccacccgcatgggcaacgtgttcaccatcggcaaggacaagaagccgtgggtgtctcttcccaagggcaagggtatcaagctcagtatcatcgaggaggcgcggaagcgcaatgctgaggctgctgaggcttgatttcttacattttaggctacagattgctgctgctgaggcttgatttcttacattttaggctacagaaaaccattgctgtaagcattctatcaaaagatgtagacgtgcctgctggacgcatgcattgccatggggctgttctgaacagtgaagtcatgtgctattttgaaccttcaagtagttgatacgcaattattttttggtgcttgtttttatcatttgatttcgttttaagcgttctatgaaaagataaagatgtttctgctgtacacaagcattctataaaatcaggctagtgtgtttaa

SEQ ID NO: 26113 - DNA, 1178 bp, Setaria italica
  Peptide Sequence Number=SeqID_92087
ccggcggcggcggcgcggaagcagaaggaggaggagcagctgcaagcgacgccgaggagcggctacccaccccaagctcgcaaccatggctaggggtctgaagaagcatctcaagaggctcaatgcgccgaagcattggatgttggacaaacttggtggagcttttgcccccaagccatcttctggtcctcacaagtccagggagtgccttccccctgatcctcatcatcaggaacaggctcaagtatgctctgaattaccgtgaggttatttctatcctgatgcaacgccatgtcttggttgatggcaaggtcaggactgacaagacctaccctgctgggttcatggatgtcatttccatccccaagaccaatgagaactacaggcttctgtatgacaccaagggccgcttccgtcttcaccccatcagggatgaggatgccaagaccaagctctgcaaggttaggtctgttcagtttggccagaagggcatcccatacctgaacacctatgatgggcgcaccatccgctaccctgacccgctcatcaaggccaacgacaccatcaagatcgacctggagaccaataagattgttgacttcatcaagtttgatgttggcaacgttgtcatggtgactggtggaagaaacactggtcgtgttggtgtgatcaagaacagggagaagcataagggcagctttgagaccatccacgttgaggatgcccctgggccaccagttcgccacccgtcttggcaatgtgttcaccatcggcaagggcaacaagccgtgggtgagccttgcccaagggcaagggtatcaagctcagcattattgaggagcagaggaagcgggatggctgctgcccaggctgctgccaacgcataaattcctcagaatgtgccttgagttttgctatagcgagtttatctgcaaggatatagaactatcttcccagactatcctgttttaagttttgcctgatggttgttgattcgcgaacatgtgtttgcagctagctgtaatgcgactatttatcttatcaagtgcgttttcgagaacatgtctcttgttgtgtttgccctggttgctctgaaatgcttctgtgaattatgagtatcattgtcattgttgctgtggttgttcgtactacggttaaaaaaaaaaaaaaaaaacaaa

SEQ ID NO: 26114 - DNA, 737 bp, Setaria italica
  Peptide Sequence Number=SeqID_92088
tttttttttagtttttaatttcgtctacatttagtactccatgcatgtaccacaagtttgatgtgatggagaatcttctttttacatagtactaaagttgggatttggggtgaagcctagaccggcagaggcggcctcccattctcccaaggaagtcaaaagctgtggcatctcttggatagatccaactccagctgaactgaacttcctatgcaattgcgcaaactcgcaagttgcaagctgagccatggaacaacgcgaccgactgatcagcctgcacccgccaccggtttctgtgtccgttgactcgcgcggatgccaaagctgtgttcacgggcctgggaatctgttccatgaagaaagaaaagaaataaaaagaaaagcagactgcggaacagccagcttgtgaactcatgtgaaaaattgttgaaagttcatgtgaagacgtgatagatcatagatgctccaaaagcgtgcgtaacctgcgactcgtacatgcagcaagtgaagccatgataaaatgctaaaatagactttgtttcagaataaagaaatacgctaatgcagccatacgggtaacccgagtttattcccattttgcctgaggaaatttatgccccgaaaacaaaaactataacgttaggttggttggcttatggtcagatctatcaaatatattggaggcagtatgcactatcaatccctagcttttagatcatgggcgcccatgcggctgc

SEQ ID NO: 26115 - DNA, 280 bp, Setaria italica
  Peptide Sequence Number=SeqID_92089
cgtcgccaagctcctctaccaccgcctcctattcggcgacctcggttgcgccggcggcggcgacgatgcttcttcccccacctcccggctcctcaacgccgtcctcgcgtgtggcgcgctctccgatgacgcaatggagctcgccaccctccgcgtcgttgtcgccgccgcgcggtgccccaccgtcgccatccgcggggagggcctcggccaggtcctcaagacctgttacaacatatacctcagcagcagcagcggcgccaatcagctctgcgcgaag

SEQ ID NO: 26116 - DNA, 407 bp, Setaria italica
  misc_feature (1)..(23): n is a, c, g, or t
  Peptide Sequence Number=SeqID_92090
nnnnnnnnnnnnnnnnnnnnnnnaaaaacttttcttggcacatcacaattgttcataaatagaaaaactgatacaaggaaaaggaattatatccaccagcagcataaaccgatacaaaggaaaaccaacagcaggtgcgaccctagccgggacgccatgaacgtcgtcctttgaagctgctcgcaggtaaagtttgtatgatacatgcacctttactgaagggtggtaaaaggcatataaactttacctagaggcagcatgaaaggattatttagacttatgaggaaggtcccggtccctcggttgttgtaccaccctgtaataggcttggttcatcaggcagcaggttcgacgaactagtgagagagattgattcactggctactgcttcgatctcctcaggttca

SEQ ID NO: 26117 - DNA, 324 bp, Setaria italica
  Peptide Sequence Number=SeqID_92091
gtggcaggcgctgacgtggcgatgacggaagcagatggcgtggtggctgcacccgccgccgaggtgaaggcggaggggaaagctgcagcggcgacggacgttggtctggaagggggagatgcggcgttgagcgacccgctttacgcgacggagtcggctggcatggtcggtgtagaagggcccggagatgagccagtgacgggtgtagagggggtgaacggtggcgaggaggggaggcttgaagcgggagcttgaggtcagcagaatgagacggagaggaagccggttccagcgggagatgtagctgctgctgctgctggtcaa

SEQ ID NO: 26118 - DNA, 2112 bp, Setaria italica
  Peptide Sequence Number=SeqID_92092
cgccgtggacttcgcccaacaacaccttctcgctctccttcacggcgtccccgacctccccgtccctcttcgtcgccgccatcacctacgccggcggggtgcccgtctggtccgcgggagccggcgcggccgttgactcgggtggctcgctccgcctctcctccaacggcgacctccagctcgtcaatggatctggggccgtgctatggtcgtccaacaccggcggccggggcgtcgccgccgcggccgtccaggagagcggcaacctggtgctcaagaactcgacggccaccctgtggcagtcgttcgaccatcccacggacacggtggtcatgtcgcagaacttcacctccgggatgaacctcacctccggcccctacgtcttctccgtcgacaagagctccggcaacctcacgctcaagtggaccagcggcgccaacaccgtcacctacttcaacaagggctacaatacgaccttcacggggaacaagacgctgagctcgccgacgctgacgatgcagaccaacggaatcgtgtcgctgaccgacggccagctgacggcacccgtcgtggtggcgtacagcagcaactacggcgagagcggcgacatgatgcggttcgtgcgcctcgacgccgacggcaacttccgcgcctacagcgcggcgcggggcagcaacgcggcggcggagcagtggtcggcggtggcggaccagtgccaggtgttcggctactgcggcaacatgggcgtgtgcagctacaacggcacgtcgccggtttgcgggtgcccgtcgctcaacttccagttcagcaacccctccaacccccgcgacggctgcaagcgcaaggtggacctccagaactgccccggcaactccaccatgctccagctcgacaacacccagttcctcacctacccgccggagatcaccaccgagcaattcttcgtggggatcaccgcctgccggctcaactgcctctccggcggctcctgcgtggcgtccacggcgctctccgacgggtcgggcctctgcttcctcaaggtctccaacttcgtgagcgcctaccagtcggccgcgctgccgagcacgtccttcgtcaaggtctgcttccccggcctgcccaacccggcccccgacgccgcgacatcttcctcccgcggcggctccggcgtccgcgcctgggtcgtcgccgtcgtggtcctcggcgccgtgtccgcgctggtgctctgcgagtgggcgctctggtggtggttctgccggcacagccccaagtacgggccggcgtcggcgcagtacgcgctgctggagtacgcgtcgggcgcgccggtgcagttctcctaccgcgagctccagcggtcgaccaaggggttcaaggagaagctcggcgccggcgggttcggcgccgtgtaccgcggcgtgctggcgaaccggacggtggtggcggtgaagcagctggaggggatcgagcagggggagaagcagttccggatggaggtggccaccatcagcagcacgcaccacctcaacctcgtccgcctcatcggcttctgctccgagggccgccaccgcctgctcgtctacgagttcatgaagaacggctcgctggacgccttcctcttcggcgccgcgccgggggggaagatgccgtggccgacgcgcttcgccgccgccgtcggcaccgcgcggggcatcacctacctccacgaggagtgccgcgactgcatcgtccactgcgacatcaagcccgagaacatcctcctcgacgagcacttcaacgccaaggtctccgacttcgggctcgccaagctcgtcaaccccaaggaccaccgccaccgcacgctcaccagcgtaagggggaccagggggtacctggcgccagagtggctcgccaacctgcccatcacggccaagtccgacgtttacagctacgggatggtcctgctggagatcgtcagcggccaccgcaacttcgacgtctccgaggagaccggccggaagaagttctccgtgtgggcgtacgaggagtacgagaagggaaagatcttcgacatcatcgacaagaagctccccggggaagacatcgacatggcccaggtggagcgcgcgctccagg

SEQ ID NO: 26119 - DNA, 369 bp, Setaria italica
  Peptide Sequence Number=SeqID_92093
gtttattttttttttttttttttttggtctagtaccaaaatgagcagttctcgatagtaaaaaagcacatggatccgttttgtctcaagcagcagacggcctacttacgaagctagcttacaaataggatacatacgaagctagcttacatacgaagctagcttacaaataggagcctacttcacatgcctgagcatcgtggcgcaacaggaacatgcttttgtgtctcatctactgcaccctacaatcaaaagcaaaatatacaatcgaagggatggttttacacaatgagaagctccacaccattcactcctcacgggagatcaatataccatacaatactaaaatctagttttaaattccggaaca

SEQ ID NO: 26120 - DNA, 184 bp, Setaria italica
  Peptide Sequence Number=SeqID_92094
gccaaggacaagaagatctgaatcgtcttgtaattgcgctagtttttgtctaatagtcaaatcaaataaatatggctggcctgctgacatacaggacaaatccctatccaagctagaattgggaacccaaacccctcctattttatttaggttcatgaaattcaacaacatatgacaagggtac

SEQ ID NO: 26121 - DNA, 385 bp, Setaria italica
  Peptide Sequence Number=SeqID_92095
acccccatcgtcctaactttggtgctcccaaggttaaacgtgtgactcgttctcaatgtcattgtgacatctgctgcagctgctaaagctggcaaagttgatgtactatgttcgttccaaaattcagtttgtgactttgttcctgaacctctctgtcctatgaagatgaactgtcatcgtcagagttgttctctcttcgttgtccatagagacttagaactggcaatgaggtcgtagccgagatgcggaatgacctggccgacccgatgaccgttctgtcctgctgcatccggccaacctccttgcagacatgatccagcgtcgagaggaagtccctcaccaccatgaatatcctaagagaaaggccttgcacacaggggatagg

SEQ ID NO: 26122 - DNA, 908 bp, Setaria italica
  Peptide Sequence Number=SeqID_92096
caatgctcggataatggcaaggttagatgaactcgagatggaagaaatggaagctggaagtacttctgaagaagaagaagacgatgacgaagatgatgggggtgctgtaacaagtgaggatggtgaggaaaatgaggaatctggaaatgctttaagtgatggcaatgagcaccacagttccagttttggtgcttcattttctggaaatggtggcaatgataggagtcatgggaatatccagctgaagagtgcactaaagaagcctggaggagaggaactgctgagaggcatttcccatgcaccgtcagcccacacatctcattcagtatttcctggccaaagttctataacaaattctgaagtcagggttcgtaaagctgtttcttttgaagatgacaaacatgtagttggttcgtcaaagtctccttccttgcccccagatccatcgcaccctgctccagggttcaagggttcttcagacccagctccatctcgtgagcgaaagataatatcaagtggacggcaggcctttacgggatccattattgaacgtgatgacaatcttttacccattcaacctccagtcggtagttcttcggcgaagcccggtacctctgcttcttcaaggcccatgtctagattcaagatgcagaaaggagagcggtgatcggaccgggatggatctttgatacctgcatctgcgacaaacacgataattgttattgtcgtacggacgaatgatacccgaccaagattcttgaacactgtatccgctaggtgaacacctgaggaagcatttccttgagctattgacttacgcagactgtggagcgtgtgtgcagtgaaactgtttgtggatacatggcttgttcagtttaagttcagtaaagtcgtgttggaccaaaaaa

SEQ ID NO: 26123 - DNA, 413 bp, Setaria italica
  Peptide Sequence Number=SeqID_92097
tcaaagccatgttcataacttggaatttcttcataaattatatttgtcaaaaacacctgatatattacatatttacatagcttcgattttgtacattccttgtgtgtagccaatagtacgcgcttgattaattcggcacgtgcagagttagcagtaccagcattgtgtggtcactccacgtctccagaactaaaccaacgtaaacccattcaaaccagccagcccagcccgcaccggtgatactttccaccagctagcaacccgtacaaaatcagccccacccagaccagcaagctccctcctggtttggtttggaaacaaaccagaaacctgggaaaccgaaccatgaacagggctagtttcaagtgccttggtagctagcatgggaacaagcagcatgataaattatcctt

SEQ ID NO: 26124 - DNA, 362 bp, Setaria italica
  Peptide Sequence Number=SeqID_92098
catcttccttatctccagtctcttcagctccgccatatcaccggtgttggtagtatgggctctgaagtacctgtggaaataaacagaagtgctctataccaatcattgaaggaactccactttgaagacatgcccaacctggagatttggccaacttcatcatcaatggatcacaaggacagccaatccgaatcattattcatgtttcctgttctgaaaactgtcactgtaaaagaatgtccaaagctgagaccaacgccgtgcctgccagatgctatagcagatttatcggtgtcaagtagtagtgagatggtatcatccgggaggatttcccggccgtcatcctcggtatccgcatcgct

SEQ ID NO: 26125 - DNA, 242 bp, Setaria italica
  Peptide Sequence Number=SeqID_92099
ttcagctaattccgaccagtgatgcggtggatgcactcttgttcttgcttctatgccatccaagttcagattacgtaaagtagatagaaaatcacatgagtctgccaaagcaacacagattacgttagatagtgattacatcagtcagccaaagcaacacaatcatactctttgtgagtaacctgattatgctctatactgggggtatttttagtaggaccgcgctatcgcgcaaccggtcg

SEQ ID NO: 26126 - DNA, 524 bp, Setaria italica
  misc_feature (454)..(524): n is a, c, g, or t
  Peptide Sequence Number=SeqID_92100
cttccaagaagcaaacaaaaggcaaagttatagcaacaaaatccaaacccagtttttggcgaccccatctctctctctctccaacttctttctcttcaaccgatgcgtctggataacgggatcgaagtttcatttgggtgctcaaatttacatgcatgtctaaagagacaaagatgatattggaggaaaaagcaaaagggaggatcagaaaaggaaagcaagagacataaaacaaaggtgacgtcacatgagaacggtcagttaaccgtcggttgcgcacagtgatcgatgcggaatcattaccgcaatcatagttcatcctgggctgggcttttcttttcattcccccctcaaactgtttgataatccggagtaaggataccattatacaattcattcttatgtaccttttgaattgatgggttaactgatccgtacaccattttctttaacnnnnnnnnnnnnnnnnnnnnnnnnnnnnnnnnnnnnnnnnnnnnnnnnnnnnnnnnnnnnnnnnnnnnnnn

SEQ ID NO: 26127 - DNA, 267 bp, Setaria italica
  Peptide Sequence Number=SeqID_92101
ttcttaaatcgttatgaaatggtggtgaccttcagttgatagagatctagggaggaaaaactgggttaatgcttgcacctgattcagtggattgtctggggatttcttccacagcttccatatgatgtctttgtactgatgcagagtcagaccaggtttctcttcctcgagcttcgcaacctctgcttcttcaaatgccttgtacgagaccttgaggcggcgctcggggtggcgatccggcgggagcgcgggctcggcagcgattgt

SEQ ID NO: 26128 - DNA, 279 bp, Setaria italica
  Peptide Sequence Number=SeqID_92102
ggagggaggcccaactggcaactgcagcagcggcatctccttccttccatcggcggtcggcgcctcggccgcacgccgccgccgccgccgccgccagcaggggaggcgaggggttctccgcgccgctggtggctgacacaccctgccgtaggagctgctccacctccgcggtccgttaggcgccactccacccgcccgttctccactctccaggctctgctcgaggctgcgccgcccgacatcgacgacgccctcacgcacgacgcccgagcgggagca

SEQ ID NO: 26129 - DNA, 505 bp, Setaria italica
  misc_feature (97)..(97): n is a, c, g, or t
  Peptide Sequence Number=SeqID_92103
gcaaatgttcagagttcaggctacttggttcagatagcacatatagctacttattctgaagctactgcttcttaagtcgctacttcacttgatttcngctgaactgtgatgagagcacgatggtgcgtgtgcaggatgttgactacttgaagtatgacaactgctacggaacgccacgcgtgaggccgagaggttcaatcctgtctcatctgcgcattcctgtaacccgaacgctgaagaattgcagcgttcttgtttcagatgaataccacctgcaaactgtgatgcaggtttccgaggatgtctcgcgcgctcaaggactccggccgcccaatcttcttctccctctgcgaatggggctacatggaggtggcgaaatggggcgccacgtccggcaacagctggaggaccaccggcgacatcaacgacacatggacaggcatgctggacaacatcgaccgtaacgacgccttcgcccagtacgccaagccccgcggctggaacg

SEQ ID NO: 26130 - DNA, 718 bp, Setaria italica
  Peptide Sequence Number=SeqID_92104
gggcttaagcttggcctctactcgtcagctgggacgagaacttgcagcgacaggatgcctggatccctgggccacgaggacacagacgccaagaccttcgcgtcatgggatgttgactacttgaagtatgacaactgctacagggacggcacgcctgaaaccgagaggtttccgaggatgtctcgcgcgctcaaggactccggccgcccaatcttcttctccctctgcgaatggggctacatggaggtggcgaaatggggcgccacgtccggcaacagctggaggaccaccggcgacatcaacgacacatggacaggcatgctggacaacatcgaccgtaacgacgccttcgcccagtacgccaagccccgcggctggaacgaccctgacatgctggaggttggcaacggagggatgacctacgacgagtacgtcgtgcacttcagcttgtgggccgtcgccaaggctcctctgataatcgggtgcgacgtgacgagcatctccaaggagacgctggggatcctctccaatgcagaggtcatcgcgatcaaccaagaccggctcggtatccaggggaagaaagtgagggattacggcaacgatcttgaggtatgggctgggcggctcagccggcacaggcaggcggtgctgctgctgaaccgtggcgcagcgcgctccgcctccatcaccgcggcctggccggacgtcgggatcccgg

SEQ ID NO: 26131 - DNA, 1773 bp, Setaria italica
  Peptide Sequence Number=SeqID_92105
agactattgagttgtttgatcaattcagttcgttgagaagggatgatccaagcttccagtttcgtgttgagttggatgatactaagagacagtttaagtctgtgttatggatgaacacatttcggtgatgtgataacatttgatacaacgtatagaagtaagctgtatgacatgccttttggcttgtttgttggtgttaataatcactaccaaagtgtcatactagtaggagtgctgatgcaacatgagacagttgaaactgttaaatgggtgttccgtgagttcattacattaaatgggggtaaagccccaagtactattctcacaggccaatgccatgcgatagaggttgcaatccaggaggtgttaccagatacgactcacaaatggtgtaaggtgcaggtgctgagcaaggagaatgaattccttgggccaatattttcaaagaagactggatttaaggatgacttccaaaagatcactgatagcatgttgactgttagagagttcaagtctgcttggcagcgccttctagataagtacaccttgcatggcaatgtatttcctttcttagatttatgatctcgacataaatgggcgaagccctacttcaaagagaagttctgtgctaaacagactagtatgcaaataaatgagtgcgcagactacatatttaagggttatgtgccgctgaatagatctatcaacatgtttgtgcgacactactacaagctccaatctgatcttgattcaaaggaaagcttcgaggagaataggagtaggaagaggtccagagttatgagcaagggagttccagttgaagagcatgctgcaaagatctacacaagggttatgtttgaaaagtttgatgaaatcattttccagtctggttcgcatttggtggatgaaaaggtgtgagggaaggcatatttggcaaggcacattaggagtgactgccgggagagttggtcacaggtggagtttgaggttaccattcaggctgaagatggtgcagttgtttgtgagtgtggattgggggatcacatggggatgccttgctgccatgctgtgaaggtgatgatacacttgggaatgctagagattccagctggaaatattgtgaagcgctggacgatggatgcaagggatattttgccggctcaaatgattgaacttgagagtgataagttggcagagaactcacattcgtatggacagtcggatttgttcatccttgcctttgagtttgcgaagtcttgttccaggagtgatcagacttttgaagcagggttggcaggtctggttcaattggagcaggaccttttggagctcaaacaagtcagggatggttctgtgttgtccgagaaatgcagccgttctgccgcccaaggttctgatgtgcagggcatgtctgctgcagctacatatgatcctaaatgcaagattgttcagcatacccaggcaaaaggactacaatagatgtgtacgtgccaaagcgtggcggttggttggtttgtacatatcctaaggaaggtagcaaatagcaacttgcagctcatcgaggaacatgtgagtggtggtgtttggttggttatgtaagataaccgaattctggtggtcgtagtccggtcagtaggaacttagtgagacgatagaccctggagctttttcttttgctcaagtactgtaaacattcagtgatgctgagaactaagtactagtttcctaagctgcatgcgaaacttacaacgttatatttgtcatgcttttagg

SEQ ID NO: 26132 - DNA, 323 bp, Setaria italica
  Peptide Sequence Number=SeqID_92106
ttcaatttttgtcaactaactccgaacggaggacctccagggggcccagcgcctgcaagttcttgaggtgggagttgttcgccatgtcatcggggttcctgaccgtcgtcttcacggcataccctttctccaacagcatcttgatgagcgcggaggcgatgtacccgctccctccggtgacgcacgccgtcttcatcttgtcgtcggccgacatcgccggtcacgacgtcccctagccgctatcctcactccacactagtagaggctgaatcgccggaaagaggagattcactcacccggacacctgaactttcaggagaaga

SEQ ID NO: 26133 - DNA, 377 bp, Setaria italica
  Peptide Sequence Number=SeqID_92107
cgacgaggtcagccacctcatggtgcgcgagggcatgcgctacgccatctacgcctaggcgaggcgcctctctgccgcgtcctgtgtgttgcacatgtgtgcttgtattcgtagatacacactagcacgttcacagcagtagtgacctgtacataaacgtgcatgccttgtatgcactacttgtcctatcatgctttctagttttttttatttcctttctctttgagctgatcatagctagcttattggcgtgttcttgtgctggacagtttgacccctgtcccggcgtccccctccctgtttcatgctttgttcgaaacttggaagttcatggaactcggcatgctcgccacaacatttgatgatttcacaccaaa

SEQ ID NO: 26134 - DNA, 1252 bp, Setaria italica
  Peptide Sequence Number=SeqID_92108
tcctaatagattgtggagaagatcaagattgtgtgcttggtggcatagtcgccctgggaaagtttgacgcccttcacgttggccatcgggaattggcaatgcatgcttctaaagcagggactccttttcttctttctttcgtgggaatggccgaagtacttggctggacatataggcctcctatagttgctcagtgtgatcgcaagcgagtcctttcatcctgggctccttactgtaggaatgtggtacctcttgaataccaagttgagttttcaaaggtcaggtccctgtctccacgacagtttgttgaaaggttatcaaaggatcttagaataaaaggtgtcgtggcaggtgaaaattatagatttggttataaagcatccggtgatgcagctgagttagtgaaactatgtgaggaatttggtttaagtgcattcattgtacgctctgtcatggacacagcaaaaagagctcataatggagttgcagctgctataaattcaagtgataagggacaggtttcttccagccgtgtccgacatgcgttggctatgggtgacatggaatacgtctctgaattactcgggaggaaacaccgtcttgtgctaatggttaaccaaaagtgctttcatgaaaggaaaaagattgtattccctaattcctgcatgttgaatatgccaccagctgaaggtctgtatgaaaactgcgaacttgttaatggagggtatcttggaccatgtagagtgatcatcaactctgacaccatcgtcattgagatgaaagatgagaacagtttgtctcccaatcctattcaagaagtccggcaattaggcattgagtttggataaagttgtgtaaatttgtgctctattggtgggagcccatttttttcagttgcccttttttggtgattgttgccgaaaggaaaagagtttagtgaaaatactgcaagggaagtcaaagactctgttcaagtatgcggtatgcctcaccatgattgtgttcaggagcatcttgtagtctcacaagaatgctttcttacagaaaagacaagattagtccaaggttaccatacaaggatgactgtggagtcacagtggcatttttttgacctgtcgagctgcatctatcgaatcaaattcaggaaaggggcttaccttccaacttcacgccatgtagtttatacattgtagttgtagttcacacattgatagggagcatggttggtaatctgtcaacattgtagcaaaaa

SEQ ID NO: 26135 - DNA, 1302 bp, Setaria italica
  misc_feature (1)..(30): n is a, c, g, or t
  Peptide Sequence Number=SeqID_92109
nnnnnnnnnnnnnnnnnnnnnnnnnnnnnngtaacactaacatcagccaagttgactttattttgttttgtttcggtgattcatgtcacggacgatcaagagatccacaacactcacggtaccgccatacgctttttgtatacccccttttgtgttcattcaaaagataaggcagttgaaacctgggtcacagaggggtagcatctcagaactccagcattcggcccctgaggatggcctcagcctttctgacttccttcactggtccaatgatgaacaccctgtctggaggtcccttagcaccaccaatatgaatttcaacgttgcaagattctttgacagacattatcgtcgatccctttctgccaataacccgtcccattttcccaggaggcacatctaagactgataggatatccacttcaggaacataaacatcagcttcaatgtcatcagggactggaggaagaagtggccaatctgcaaactggttgtcgtttaagcaaaagcacctacagtatagctcactgcgaactgccagacgccataaagatactttgcttaacttctccatcattttctcatggatattgagaaggaagcggacatcatccgtggctgctcgaaccatcatatcagacaagggcctaattttccaaaagttcgggtcctgccttagaagggtacggacttcttccttttcaggatatggtatgccacagtaccgaggatcagcaagaaggctgacaaaagaaatgtaatcatcagatgttctcttttttccttcctgctctcctatcagggaataagcaatctgtgtatccatcacattatgcaatttgatgccaaactgaaaatacaaagcctcactgtctcttttacaatcatgaataactttggtgatatgatcagactcaagtgcgggcttacaagcttgaatgagttcttttccaccctcaatagcatcaactaagtaaacagcatcaggaaatgcaagctgcatgatacagagagccccattgcgacagagatcaacaccttcacagtcaaatccgattaccaacttttgggcagctgagggttcaagaaactcgactgggagttgaccaggtttggtgacgatatgataggatggggatggcaattctgggctattatctgcggggacgtcggcggcgggggcggggtcgaggggctcggaatggtgggaggccatcccaatcccctcccgaacgctccgccgagggagggagacaggccgcgggcgcaccggcgacgggagagaggaacgaggacgaaaag

SEQ ID NO: 26136 - DNA, 271 bp, Setaria italica
  Peptide Sequence Number=SeqID_92110
gttcacgccaggcggcggcgccgctagtggcggtcgttgcggcaaccacagtagccgacgtcccccacacgctcgcggaacacgtccgcgtgactccctggcggcgcccctgcccgcgcgactccccggcggcgtgcctcgcccgcggcctttccggcggcacagcctccgcgcgactccaggcggcggtagcagcctcctcgaccctcccctccacaccggtcagtatatatgtaggccaagctgcacacttgtctgaagaaactatttg

SEQ ID NO: 26137 - DNA, 305 bp, Setaria italica
  Peptide Sequence Number=SeqID_92111
atccatggcgtcgtcgatgtcgtcggtggtggggaaggcgacggcggtggagaggttggtgttcgcgttgaacgggcggcggtacgaggtggccgccgccgacgtggatccgtcgacgaggctgctggagttcatccgcacgaggacgccattcaagggcaccaagctcggctgcggcgaaggtacctttattacctgtggcgtccatgcactgtgtttgtgttggtgtgcttctgtgttccaatcacgtacggacacgaaatcacacagatcaaaagaaaaaaatagtaatactacaatcactg

SEQ ID NO: 26138 - DNA, 228 bp, Setaria italica
  Peptide Sequence Number=SeqID_92112
gatgaggagctcctcggcgacggggagcagcggttggcaccgctgcaggacgatgagcgcgtcgtcccagctctgcagcaccacctggttgatgtagaggtcgcagcgcgcgcccaggccgcccacgcccaggaactccgccgcgcaccggaccgcggcgacgttgaacgggtcgagcgccacggcgtcgccgtagcagaacagcgcgatcacctcgaacgcctcgca

SEQ ID NO: 26139 - DNA, 293 bp, Setaria italica
  Peptide Sequence Number=SeqID_92113
caaaacgcccgagaacaatcacaccgcatccgcgccgggtggccgcctcccgctctacaccaccacacgcccaccaactctcactctacccaccgacccaaccaaagtgcgcggccatatccccggccgcgtcgcggcacggccgatcggagctgctgcgtgcgaggagttgggagccggagcggggcgcgaagaaccaggccactagccatgggcgccggcgccgtccccgcgctcgtcctcgcgctgctgctgctggcggtggctccgccgccgccggcgcacgctgcgag

SEQ ID NO: 26140 - DNA, 191 bp, Setaria italica
  Peptide Sequence Number=SeqID_92114
ggcttcccggggcggaggaacgcggcgtagacccagagcgcgaggcggatggcggcgcggagggccacgaggaggcccacggcggccagcgccagcgcccacgccggctgcgcgcggaggaactcgacgtgggcgcacgtgccggccatggcgggcgtcgtcggatttggggagctggagtaggagcagcg

SEQ ID NO: 26141 - DNA, 720 bp, Setaria italica
  Peptide Sequence Number=SeqID_92115
cgggtggtgcgtggcgcgggacggcgcgacggacgcggacctgcaggcggacctggactacgcgtgcgcgcaggtgggcgtggactgcggcgccatccagcccggcggcgcgtgcttcgagcccaacacggtacgcgcccacgcggcctacgccatgaaccagctgtaccaggcagcggggcgccacccctggaactgcgacttccgggcctccgccacgctcacctccgacaaccccagttacggcgcgtgcgtgtacaccgggggaggccaatgataggaggcagaggccgcactgctaaccccgacaacctcctcgtggcatgattgacttggcgagtggcgatttgggcctacggcgaagggcctggactctgctctatggacggaccgaataaagctacgaataatggtggtggttgtcgtggcgtaggaatggatgcaatcgcaaatgcagagcgtcccctcgttgttcggcttcgtcgcagcaggagagtggctgggccgctccttgtgttgtcaaatgtgatggttccggctagcgctttgggcatgtgttgggtttgctgcgacttcgtgtaaaaccaagaattgtcagctgttgtcagtgctggcgtgcggttgtattagtagtatgcatgtgcagtgtgtgtctgtaagtagaatatgactgcattattcaaaactttatttgccttttaacatgttagtcatcatgcg

SEQ ID NO: 26142 - DNA, 451 bp, Setaria italica
  Peptide Sequence Number=SeqID_92116
tttttttttttttttaaaacttttggaatttattgagaccgacgacactgccggatttcccttttgatacgttgccttttttatttaaatttcagagtgcagtacgagcaaatatatatacaactgcactgtcaataatttagacaaacctttaaagaacacacatttacatatttttcactctcaagtctcaatgtagaattacaacccaaacccaggcactccacactggagctgcctttagcttaacaatatcagttccgcaatcatgcgtatataccgttccacatttacaagacacacaaaagtaacacatacaccaggcagcattttatttggaatacacaagcatcagcaaacacacaataattactgataaagggtcccaatttcattactgatgtagggagcaggcttttttagataaaggataaaatccggccgctggata

SEQ ID NO: 26143 - DNA, 2464 bp, Setaria italica
  Peptide Sequence Number=SeqID_92117
taaaaatgataacaacctcaccagtgcagaaggagaaatctgggtgctctaccagttcgtaagcactcacagtctccactgtagggccacttcttccatagctgacagcgtcactgcctgcaggactaatccattttacatttactgtccgctcgagtgcatccacatctctcactatcccagttcgttgacatcttgcagaatcctcaacagccagtttctccaggacaaattgccctggccaaaaatcataatcgccaagggtactcacaggaaccagtgtctggggttccagaccaagagatatgcttccattttgccatagaacatcaacagtgctctttgtcttggagacaatatatgtttgagaataacctgaactataattttccaaacgcatgtgcccatgagagtcgcacttccaggctttactaagaatgcaagacttcccagaatccatccacagacatccatggtcatcagatgtaagagcacaccaatcacccagttgccaattagcataagggaagcatgacagcaaagtgaggttctttggatcctgaatgtttccaggacttgatgatttatctccccaaacattggtcacagatgtaatccagttcacatgcaccagcccaacatctacatgagagacaacaccatcatctctattggccctccatgatccacacaaccatgttgctgactcgaaaatcgagggttggacaatcctcacacgttgaccgggatagtaaaaataaggtgcatcttcaaaaagaataggaggaatgggcttcagtgcctcagaatcccttaccagcatttcacacttcgccccatcactgaacaaaagagtaacaaggtcaaatgctctgatcacccgtccaatccatggtcccataacgacgcagtccccagaaacgaaggatctcactcttgatagcttcttgctgtttacatctgtaattatgtcaccagagcttgtctccaagtcaacaaacattgcaacaccaacaacgcgtccaagctgacctgagggatcagaaacagggcagactatgtccccatgcagaaaccctctttcaaaagtcagaaaattatcgatcttgccaatgctctcgtccaggctggacaagatattttgggcatggtcactgtacgtaaattcacattcttcttggtcttcgctgtcactggtcccactatatgactcactatccgagtcaattgcaaacaagtccatgattgcaagtccttcttagaataagttgtgtactgtatggataacgtggtaatctcaagaacaaccaacaatatgcaagttgacgtttggaatggcaatataccaaggcagctggccaagtattccttccaccgtccagaagtacttcttgatattttggtagaggttgtgttcacacagccagcacacttgactgttaatgccaaaggagaattaccctgatatagctgctgctactaacagctggaggagacttacccaaaatagtaaataaggtagtatttttgccaaaggagatttgcccaaagagcagcctgaaactaaagctagaactaaaactagtgccaaaggagatttgcccacagagagatctggagtgccaaaggagatttgcccaaaagaaccagtaagtaatgccaaaggagatttgcccagcaaatcagctaatacacgacggaggaaacctgaacgggaacggaacgttctgaaacttccgccaaactaaatgagggatttctaaggggggtcatttagaagtatcttgctgctgatatttcattcaatcagagtaacagctcaggataaaccgacaaagtgatgaactctgaactatgtttgccaaaggagatttgccctaaaacaaggactttcttgtgaagggtggtaattccaatagaggaaatgccagctgccagaaggtattctctggatgatcagaggacttaagtgaccaggagcatcaatccacaatcaagcacaatcacacagaagagaatatgctaccatctgggtgaccagtactcaagaaaacaaccaaggttacagcttttcatcagagagggcttcacttataatgcgatcacagaatagagtggtctttccgaaccgattgcaaagatcagcagaccctgtgacaattcccacccgccgccatgcttcctcccgcgatcccacgaacccagacccgatcaccgaagaagaggaagctaccctcctcttcccccaagcctcaatccatccccgaacccttcgaccatggccagcaagctcctgaattccaacggttccaaatcctccaaggaagcaagaaaggaaaccgaagccaagacgcacaccgccaccaccaagtcgcaccaaatcacagcacggagcagtggaacactggagtggtcgtgcccaccgatatttcaagtggcagtgaggacgtcaaagcctagagag

SEQ ID NO: 26144 - DNA, 2078 bp, Setaria italica
  misc_feature (1)..(23): n is a, c, g, or t
  Peptide Sequence Number=SeqID_92118
nnnnnnnnnnnnnnnnnnnnnnnggctagtctttctttttttaatttagacttttttaaagatgaacacacatttacatatttttcactctcaagtctcaatgtagaattacaacccaaacccaggcactccacactggagctgcctttagcttaacaatatcagttccgcaatcatgcgtatataccgttccacatttacaagacacacaaaagtaacacatacaccaggcagcattttatttggaatacacaagcatcagcaaacacacaataattactgataaagggtcccaatttcattactgatgtagggagcaggctttttttagataaaggataaaatccggccgctggatatatatacagccagtgtagggagcaggcttgctctagtttactggccgctggtgattccagcctcagagaaggcagcggcaagcttcggcagaagcttaccaagcataatcttgaaaccggttgaacagctcttgctgccatcctctgatatgtatgctttgtcgtgtgcatgtccaacgagatcaccaccaagataagcctcgcaggcatccagaatgcatggggcgcgacaagtgaagtgctccttgaccaacttctcaaaatgctttggtggtttgtgcaaaacatacatcatggatttgcatgacagcaggaaagcattctcattgtaagtgatggagttcttctctccatcagccttccccaaaaatttgtcatagcccgcctcattgaaataaggtttttcattgagaacaagggcctgaagggataacagcagttgaagaacagtcgagttctctggattccacacttcgttaccagttcctgtccatgttttcagaaggctgaggcatacttttcccgactcatacaaattcgggttcaggcggagaccaccagagtggtagtgaacagaaggtggttcatggggatagtcaggaggaaagaaaatatcaaagaaaaaaagattatcatgataaggtgttccagctgccccaacaatgcaagccctcagaagatccatcctttcctcaaaaactcttgcatgaataccatctggtaaatcattttgcaggatcgtccattcttgttggaccttcttcacccaacctcttgtaacattttcatggccactttccttcacaaagtgatgatctgaacagtcagtcaccacatcaaatctttttgagatgttatcttctgaagagagatttggcttctcaatctttgccaccagctccacagtcagtttttcttctggcaattcgtctgcagatgtctgcatttctgccgtcataataatttgatattgaggatctaccacaactgagcttggtgatggagaaccatgagtaccaaacaaactagtagccacatttgtcaggaaatcaaaagctgtcttgggaaagagaaaagcagtggctttgcacaaggaaccagtgcagtcagtagactccagagcaatgtttgcattttcatggtgcatttcctcctgctcagccacgtctactgaatcaccggtagcatgttcctcatgcatcgattctagtgaactatcaagaagcttatccaatccaattatttcaaaatgctgcaccttggatatcacaccattagcccattggacttcgattccatcatccttgtacccaagcacatttccgatgcatgataagaagtcagagtgggtatccaatgattccctgcttgctaatgacccatttgtgagatctgcttcagacttgtctatgttcacagctgacctgataacaacctcaccagtgcagaaggagaaatctgggtgctctaccagttcgtaagcactcacagtctccactgtagggccacttcttccatagctgacagcgtcactgcctgcaggactaatccattttacatttactgtccgctcgagtgcatccacatctctcactatcccagttcgttgacatcttgcagaatcctcaacagccagtttctccaggacaaattctactacctatttagtccctatttggtacttttcgttattttccttatttcttatttccttttgtt

SEQ ID NO: 26145 - DNA, 1959 bp, Setaria italica
  Peptide Sequence Number=SeqID_92119
cgttgcgtcacggcgcgcacctcgagccgccgcggcggcccgggcggccggtgacgccggtgactcctcagcctccgccgcctcctcctcctcctcccccgccctcgtcggagatgaagtccggagttgacacttgggactatttcttctccatggacgaggggatggcctccatcgcccccgatgacgacgagatcatggctgggccggaagaggagaagtacgtcccggcatcgccaccgcgcccgcctccctctcctcctccgccggcggcggtgccactgtcggaggagtttgaggaggagccgcggacgccggagatggtcgcgccgcctccgtcgctgccaccgaagcccccgaagaattcgtccaagaagaagaaggggaaggggaagcttaaggcagcgcaccaccagcacacagagtcggcgccgccggtcacgctggttggcggtggtaaggcagggaagatagtccccgaaatgccgcgtgtggacctcctccgggtgctcgcggaaatcgacgagaggttcttgaaggcgtcggagagcgccggtgaggtatccaaggtgctggaggccaacaggatgcattaccactccaattttgccgacaaccgagggcatattgatcattctgcgagagtcatgaaaataattacatggaatagatccttcaaaggcatgcaaaatggtgatgaagggaaggatgactttgaaaatgatgaatgggagaccttggcaactgtggtagataaaatcttagcatgggagaaaaagctctatgatgaagtgaaggctggtgagattatgaagcttgagtatcagaggaaggttgctttgttaaatagacaaaagaaacacaatgctgccattgaggttctggagaaaacgaaagctgctgtaacccacttgcatacaagatacatagttgatatgcaatcaatggattcaactgtgtcagaaattcagcatctccgtgacaatcaactttacccaagattattggaccttgctgacaggatggcaaaaatgtgggaggacatgcacatgcatcacgctaaccagctgaaaactgtgctaaagctgaagtcagttgacatttctgatgccaatattgaaacaagtgattatcaccacagccacacgcgccagctgcgtgatattgtagataagtggatcacaaactttactgacctcatgagttatcaaaaggaatacatcaatgctctctatggctggttgaagctgaacctgatacccattgagagcagcttgaaggagaaagtagcatcaccacccaggatgcagcaacctcctatcaaagcctttcttcaggcctggaatgagcacctaaccaagctgcctgatgatctagccaagacagccattgtcagtttccgagcagtcttggagactatattaggcgttcaagacgaggagttgaaacagaaggagatctgcgagcagactcgcagggaatatgcgcggaaggcccgggcttttgaggactggtaccacaagcactcacagcgcagaacgtttgacgttgatccagagaccggcgagggaacaggccacaaggatgcagtcacagagaagaaattcgcggtggagagcttgaagagcaagctcgatgatgagattgaatcccacaataagctgtcgaagcaagtcagggagaagtccctgtcaatcctgaaggcacacctgccagagctgttccgcgccctggctgacttctccaatgcttcttttgatatgtactcgaagctgaggcttatgtccttgatgcaggatcagggcaacaactagctgaaggatatgtacaggagttagattgctagtaatatccctcctccctcctaatgttgtactgcttgtgttgttcacctaccccttttgcggtacatgtagctctttagacgaggactgttagggatggtggctgttcgtttct

SEQ ID NO: 26146 - DNA, 290 bp, Setaria italica
  Peptide Sequence Number=SeqID_92120
taatcctggttctatataggtatgacatattctgtaaggctgcctatgcaagtttaaagggcattaaaacagtagacgcaaagcattgtaagagacttttcatatacatactgaatctcttccatatgccatacaagtcatacaagggaatgctttgcttccaggggctaatgctttacaagcatctatcgatgccattagcaaatatggtggtgctcgtgtaggctatcgtaccatgcttgatgctctgattcctgcttcagaaattcttagagaggtgggcagttact

SEQ ID NO: 26147 - DNA, 617 bp, Setaria italica
  Peptide Sequence Number=SeqID_92121
ggatagtttaaatgaatgggacagtaaagtaggtgatggtgactgtgggacaacggtgagccatacaagctaggactatttttctgctattttctagttatactcccatagcatgtaaaaatataactttttttcaatctttttcagatgtataggggggcaatttgctatacttgatgacatgaaaaaatggtaatggtttgggaaaaacagaaatcagtttttacatgccaaccactttcttggtatactggtaaacctgtatcatgggctcatcgcttacacgctgactgggtaaaattttgctttgaacacttgacactagagacacttgagtagcaacaactatattacctcatgtatcatgtgtcagttgttttactgcaatcatttcattgtgtaattgatgctgcatctgcatatcatctcaggatttgtgtttaatatcgtatccctcttctcagctacccaatgaatgatgcggctgaaacagtgaatgagattggtgccacagtccgacgggtcatgggaggaacaactgggatcttgtatcaccactcctgctgaaattggttccttttacagattagaaaaattctagcataactaatcctggt

SEQ ID NO: 26148 - DNA, 556 bp, Setaria italica
  Peptide Sequence Number=SeqID_92122
tggttccttttacagattagaaaattctagcataactaatcctggttctatataggtatgacatattctgtaaggctgcctatgcaagtttaaagggcattaaaacagtagacgcaaagcattgggctaatgctttacaagcatctatcgatgccattagcaaatatggtggtgctcgtgtaggctatcgtaccatgcttgatgctctgattcctgcttcagaaattcttagagagagacttgaagctggggatgaccctcttgatgcattcgtggtatcatctgaagctgctatgaatggtgctgaatccacaagacacatgcaggcccaggctggtagatcatcttatattgctgctgacaagttggcactggctcctgatcctggagctatggcggctgctgcttggtacagagctgtagccctttcattgaagagcagcatgtcatgccattcaaaaccatagctctgtgttcaacttgacttggctagcaaagtttcgcacctatacagggcagcccttgtgacctcggtctactgtttcattggccttcg

SEQ ID NO: 26149 - DNA, 1189 bp, Setaria italica
  Peptide Sequence Number=SeqID_92123
tattacaagaggcgacagggttattcttctgactaatggattaggtgctactcctatcatggagttgatgattgccactagaaaggctgtgcgtgagttgcaactggaatatggaattgctactgacagaatctacacaggatcgtttatgacttcacttgacatgcaaggattctcattatccatcatgaagtcagacacaacaattttgcagtgcctagatgcctctactaaagctccttgttggccggctggagccgatggaaatcggcaaaaacctgcaaaaattgccgttccagcaccaccatcatgtgcgatgaagagtgataagatgcttcaacaaagtcgagagctgaccaaagagggctgcattttagaggtttctattgaagcaggtgctgaagaaataatcaggataaaggatagtttaaatgaatgggacagtaaagtaggtgatggtgactgtgggacaacgatgtataggggggcaattgctatacttgatgacatgaaaaaatggtaatggtttgggaaaaacagaaatcagttttacatgccaaccactttcttggtatactggtaaacctgtatcatgggctcatcgcttacacgctgactgggtaaaattttgctttgaacacttgacactagagacacttgagtagcaacaactatattacctcatgtatcatgtgtcagttgttttactgcaatcatttcattgtgtaattgatgctgcatctgcatatcatctcaggatttgtgtttaatatcgtatccctcttctcagctacccaatgaatgatgcggctgaaacagtgaatgagattggtgccacagtccgacgggtcatgggaggaacaactgggatcttgtatgacatattctgtaaggctgcctatgcaagtttaaagggcattaaaacagtagacgcaaagcattgggctaatgctttacaagcatctatcgatgccattagcaaatatggtggtgctcgtgtaggctatcgtaccatgcttgatgctctgattcctgcttcagacattcttagagagagacttgaagctggggatgaccctcttgatgcattcgtggtatcatctgaagctgctatgaatggtgctgaatctaccagcctgggcctgccatgtgtcttgtggattcagcaccattcatagcagcttcagat

SEQ ID NO: 26150 - DNA, 374 bp, Setaria italica
  Peptide Sequence Number=SeqID_92124
taagaaaaagaaacaacggaaaggaataaaagcgaatgccgtcgagcagattcgctccacttttcctccggtttataagggcagcaagagagcagcacaacacgctcatcgcactcctggctcctgacgcttggcagagagggagagtgatcaattggcaggcaaccgttgcttggcggggcggccaacgaccatcgcccatcgctagctagctgcttcgtcctcctgccgtcctgcgtgagtgcctgagtggggaggatcgatgctctcgtttcccttcccggtgcctgctcgctcctgctccgaccttggaatcttgccctgcactttagaccttgttcctcgcctatctctacaccctacctagcttctag

SEQ ID NO: 26151 - DNA, 261 bp, Setaria italica
  Peptide Sequence Number=SeqID_92125
tagtcagcactccaccagaaaggctaggccatttccccgatcaccgcccgacgaatctcgcgccccgctgctcctcagctccggccagccccccaccggcgcccgcgacagatccgagccggctcgaacggcggcgatgggcggccgcaagcgcgcgctcctggtgggcatcaactacccgggcaccaaggcggagctcaagggctgccacaacgacgtcgaccgcatgcaccgctgcctcgtcgaccgcttcggcttcga

SEQ ID NO: 26152 - DNA, 992 bp, Setaria italica
  Peptide Sequence Number=SeqID_92126
gcgaacaatgaatcttatcacagaccaagatttcacggagcttgtgcaaaaagtccccgaaggctgtctgctcaccatagtctctgattcatgccatagtggtgggctacttgacaagaccaaggagcagattgggcacagtaccaagcagaaccagacccagcgccgggaactagaagagcggtctgattctggtaccagcttccgtgcattcctcaaagagactgtccgggacgtgtttgagtctcaaggaatccacttgcctcaccgtggccaccggcacagcgacgacggggatgatggtgatgaggagccacgctacatcgacgcagcagatgcccatgtcaaaaaccgatcgctacctctctcgacattgatcgagatgctcaaggagaagactgggaaggatgacattgatgtaggctcaatccggctgacgcttttcaacctcttcggagatgacgccagtcccaaggtcaagaagtttatgaaggtcatgctgaacaagctccagcagggccagcacggcggcgtcatgggcttcatgggcgccctggcacaggaattcctgaaagccaagctggaaggacagcaagaccagctcgagccagccatgaaccaagaggtgcacagcgaggaggaggtgtacgccgggacgacggctagggtgccaagcaacggcgtcctgatcagtgggtgccagaccgatcagacctctgccgacgcgaccacaccgaagggcgtctcctacggcgcgctcagcaacgccatccagaccatcctcgcggagcacgggacggtgacgaacaaggagctggtgctgaaagcgcgcaagatgctgtccaagcaggggtacactcagcagcctggcctttactgcagcgatgagcacgctagtgtggctttcatatgctgaagcgttggttatgtactgcaatctttgtacatttttactgtctatggagtgttgtgggctgctggctacgctttca

SEQ ID NO: 26153 - DNA, 555 bp, Setaria italica
  Peptide Sequence Number=SeqID_92127
aaccaaaggtaacaaaagaaaagtttaaataagaaaggtacaatagactagaaacaaagactaccaagacaaatgctgacaagctccagcagggccagcacggcggcgtcatggtcttcatgggcgccctggcacaggaattcctgaaagccaagctggaaggacagcaagaccagctcgagccagccatgaaccaagaggtgcacagcgaggaggaggtgtacgccgggacgacggctagggtgccaagcaacggcgtcctgatcagtgggtgccagaccgatcagacctctgccgacgcgaccacaccgaagggcgtctcctacggcgcgctcagcaacgccatccagaccatcctcgcggagcacgggacggtgacgaacaaggagctggtgctgaaagcgcgcgaggtgctgtctaagcaagggtacactcagcagcctggcctttacgcagcgatgagcacgtgtggcactagacaagtagaatagaagacaatagttacaatagtaggacttacaataaataagaactaagaaagaaacaaataagtaa

SEQ ID NO: 26154 - DNA, 1628 bp, Setaria italica
  Peptide Sequence Number=SeqID_92128
ccatcttcctcgaacgccccgcgccgcgcctcgcctcgcctcatctcatctcatcgcgccgccgcgtcgcctcgccccaccgtcgccggcggccgatcggcgcgccaccggatccggaaaaggggaacgatgggggagaagcgcgcggtgttggtggggatcaactacccgggcaccaaggcggagctcaagggctgccacaacgacgtcgcccgcatgcgccgctgcctcgtcgaccgcttcggcttcgacgagtccggcatccgcgtcctcgtcgacgacggctccggggggccgcagcccacgggggccaacatccggcgggagctcgcgcgcctcgtcggggacgcgcggcccggggacctgctcttcttccactacagcgggcacggcacgcggctgcccgccgagaccgggcagcacgacgacaccggctacgacgagtgcatcgtgccctccgacatgaacctcatcacagatcaggattttagggagcttgtgcagaaggttcctgatggctgcctatttaccatcgtctctgactcatgccacagtggtggtctattggacagtgctaaggagcagataggtaatagtaccaggcagaataagacccagtcccgcgaacctgaagagcgacctgattctggttctggtagcagcttccggtcatttctcaaggaaactgttcgtgatgcgtttgaatctgagggaatccgcatccctcatagccgccatagccacagccaccatggaggtgacgatcaggatgaggcttatggacagtcaagtggtgatggtcgtataaaaaaccgctccctaccactctcgacactgatagaaatgctgaaggaacaaactggaaaggaagacatcgatgtaggttcaatcaggatgacactgttcaacatctttggcgacgatgcaagcccaaagatcaagaagttcatgaaagtcatgctcggaaagttccatcagggccagtcaggtgagcatggtggtggtggtgtcatgggcatggtcggtgcccttgctcaggagttcctgaaggctaagcttgaaggcaatgaggaggaagctttcaagccagcgttagagcaagaggttcacagtgttgatgaggtgtatgctgggactaaggcctgggcacccaacaatggcattctgatcagtgggtgtcaaaccaaccaaacatctgccgatgcaaccacagcgcagggtgtctcatttggtgctctcagcaatgctatacagaccattcttgcagacaagcacggggaggtcacaaacaaggatctagtgatgaaagcacgtgaggtgctgtctaagcaagggtacactcagcagcctgggctttactgcagtgatgagcatgttcatgtggctttcatatgctgagacatgttttttttccccctcctttttcgttgagctgtgcacgagaggttgaagctttccatgtttcccttgttgttaatattgcttgaggatatgattgaatgttggactgtgtctatactgaaataactatgagaaaggttctatatacgaataatatgtatacttgtaccgtgaatgcaatcaacctgtaagcttcaaataatatgtatcggtttatctaaaaaaaa

SEQ ID NO: 26155 - DNA, 237 bp, Setaria italica
  Peptide Sequence Number=SeqID_92129
gcggagaagcgatgcaggaggaggaggcgggtgaggcggcccaagagggtggcgtctgtggcggcgtcggccggaatgggcgccgaggtggagtggatgccgcggcggagaaagtacagcggtcggaggcgggggcagcatctctggttcatacggccggcgagacaagtggggcgtgcctcttaggaggcgtggcggcggcggcgaatgggaaagcttaagaagcagatggagacg

SEQ ID NO: 26156 - DNA, 255 bp, Setaria italica
  Peptide Sequence Number=SeqID_92130
ccacacagtttggggaatcaggatacaatgtcacatgaatctaaggtattgttatctaactaataaatttgtctaatatgttattacaggtcaatagaaagagtgctgtcgaatgtatgtggtgttccataaagaccagttcaggggtaaaacacacagatcacaaaactgaaactgtacaggatagcctgaagcttgttaaggtacaatgctatcgcaggtttaatcttgcactcacaggcctctggttatacg

SEQ ID NO: 26157 - DNA, 857 bp, Setaria italica
  Peptide Sequence Number=SeqID_92131
ctttggtaaactaaattgttcaaattccattggcattgagttttgtacactaaagttataagtatgaaagtgcagtgttggaacttataaaataaggtttttaagggcaatgaagataggtcttaatgtcaactctcatagtgcttgccactttgcctcaacttactcttactcacctagtggatgtgtttatagttgttgacggcatatgctactgttccgacaaaaataaggccatacaaatttttaacgtttctaagaaaaacatatttataatgtagaaatctaacacatcaagttattttatcatgtcaaccccaagtgctgaacttcaagtatatgcagttcaaatctatgacactgaaccttcaagttcagtatacgcaaaatctggtgcactgtggaaacagtgtttcaatcagtccactgggatatcaaaatccatcaacaggatctcaaaagatgcatccacaataaaacagaacagttgaccttttaatgaaaaactaaattctcaaccagaagaatagtagtctgcatgctatcccttcactctaacaacctatcccattaacttgttatgtttgcatagcccaaaataaaactccctgcctcctaaaagcaacttttctggttaaattttgctcctgttatgtagatgtgtgacagtcatatgataagccgtacagaacagtgacatataaaaactggccagaaaataatccatgctgtcatcaaaagagctagaaaatagatggaccaaacctcaaacaaagtaaggtccattcccccagtgatattccatacgatgcctgtagctctttcaattccaatatctagcagtggcgattgaatgg

SEQ ID NO: 26158 - DNA, 1448 bp, Setaria italica
  Peptide Sequence Number=SeqID_92132
aagggcgaagcctggacaatcaaactcgtgggaagcgagaggggcctcttcgtcggaggaattcggggatctccaccatgctgccttcgccagaggatgggcgtcggccattctcgccttggatctgctggccaccctttgaggtgcgaccttctggttcatcctgccgtttgaatccagtagcaatcaaggttatgctcacttgaccactcagtgaagggtctatgacagcaccaaatatcagattagcatttggatcaacaaggtcgtagattatttcagcagctgcatttacctcaaacaaagtaaggtccattcccccagtgatattccatacgatgcctgtagctctttcaattccaatatctagcagtggcgattgaatggcattaagagcagcatctcttgctcttgactttcctgtagcagtccctatacccatcaaagatgaccctgcattttgcatgatggcacgcacatcagcaaagtcaacattaaccaatccaggaaccgtaatgatatcagatatgccacgaatgccttgtcgaagaatgtcatcagccaaattaaatgcttctgttacaggagtatttggagaaacagcagataacagcttgtcatttgggatgacaatcagggtgtccacactatttcgcaaagctgctattccttcctgagcttgaactgcccgccgcctcccctcaaatgagaaaggcgtagtgacaataccgacagtaagtatacccatggacttggcaattccagcaattacaggagcacctccagttccagtccctccacccattccagccgtcacaaaaaccatgtcagcaccataaagtgcttcctgtatggattcactgctctccttcgctgcattcatcccaatatcagggtttccccccgcacccagacctcgagtcagctcctgcccaatctgcaacctattgtggggaagcacaggagacattcttatcgcctgcacatcagtgttcacgatccaaaactcaacaccattcatagagctttcaatcattctgttgacagcatttgaacctccacctccaactccaacaaccttgatcttggcctcattataatcactccggtctggtggcactcccagcccctctaacgggcttccatcagaagcacctttcaatgggtccacgacctcaacattcttcttaccacggagcagagacacctctggatggaggtcaaggaacgagtctttcttctggaaagagttggcactgcgggggcttgcacagcacctgaagtgacagtgacccaaagttcgagtacttctgacaaatgccctaccagatgtatccttgcagcttggaacttcacttccccaactagaagatggtggactgagctgtgtgaagcatggtaactgtgtagccatcttaataagttaatgggcaggcaatcaatgtact

SEQ ID NO: 26159 - DNA, 459 bp, Setaria italica
  Peptide Sequence Number=SeqID_92133
tgagaggagtaaagatattgagagacattattctggcagtagggatttagttattgagaatggtggaggaactgaaaggttttattctgctggggatgtgactacagggagggttagagatacagataggctttactctaggggtacacttgagcctgacttggtgccatgtacacagtcgaagtttcttggcgattcttccccagccttgcttgctaaggaccatccatacaggatgcacactgaacctgtctatgagccaagcaacagatacattatggatggccttggcaggtcatctcatgactcactagggcatggaagtggtcatcgtcataagttatcaggaagtccattagagcatggcagtgctcatggtgatagaaactattactggatattgcaaggcagtcacacctaagcgtgcaataagagctgcatccatggagtatgatgcac

SEQ ID NO: 26160 - DNA, 221 bp, Setaria italica
  Peptide Sequence Number=SeqID_92134
tctgacattctcgcatggctcgaccagcgcagtcgccattggaaacctgtgctaccagcagcaatggtgcagagagtccggtgcccgtgtcaccacacggccagcctcagtgtggctgcagcttcctctgcgggctcggtggccaaccaaaccagcaccaatctgaatttcaagtatttcagtcttccatagttgatacccgaattggtgactgaaaaatt

SEQ ID NO: 26161 - DNA, 601 bp, Setaria italica
  Peptide Sequence Number=SeqID_92135
tagcacaggcgtggacgatccggcggttagccactaaccgcgcgcggatcagatcagagatagcaaaccccaaataaaacaacacggcaatacaatcacagacacaacacaacagtggcgagcagagcaacggatgaccaccaccaccaaaggcggcgtacgatctcatcacatcgttggaatccaataattcgatcccggccggtgcggctgctggctccgtccgatcgttcatctctagcacgccatcctgatggcgcagctggacctgatcttggcggcgcacttggcgaagaagggcacggagttgtacttgcgccagtagttgcagaggcagcccatgttggcgttcctcatcgggcggcagcacgcgttcttgttgcggtcgtcggagcagtaggacaggcacgcgtccctcgtgctctcgccgacgccgcagtcctgggccgccgcacccgccaccagcagcatcgccaccacggccaccaccagctgctgcttcctcccggccgccatcggtgtggagttgcgtggaacgtgcagtgatcagcaaagcacaggctgggctcggcagttctcggcggggctcttgcgatctctc

SEQ ID NO: 26162 - DNA, 432 bp, Setaria italica
  Peptide Sequence Number=SeqID_92136
aagaaacgaaacgacgacgactcttctccctcggagacgacggcgaggcggcagagccacaccaccgcacaggcagatcgcacaaggagcagcagagcacagaggcagctagcgtcgtcaatggcgggcaacggcaaggcggcggcggggggcgtggtggtgccggagatcaagtacaccaagctcttcatcaacggcgagttcgtcgacgccgtctccggcaagacgttcgagacccgggacccgcggaccggcgacgtgctggcccacgtcgccgaggccggcaaggctgacgtggacctcgccgtcaaggccgcccgggacgcattcgagcatggcaagtggccccgcatgtcaggctacgagcgtggccggatcatgaacaagctggcggacctggtggaccagcacacggaggagctggcggcgctg

SEQ ID NO: 26163 - DNA, 519 bp, Setaria italica
  Peptide Sequence Number=SeqID_92137
cactagtcaagtacaaccattgtccactgccagggaaaacatctggcacaggtggattgctggatgctatctcttcacaccatccttctttgagaacaggcgcaagtttgcagtttgccggcgccattcatttatcggtacagcagggaatccaccatagtcaccgggcttctgaatatcctttgtcaccgagctatttgctgcaagccgaacctttgatacaatggagacatggtcccggattgccaccctaccacccaacgtaacatagtcccgcagcgtggcagaaccagcaatccctacttgcccacatatcatgcagcactttccaatgaccacattgtgacctatctggactagattatcaatcttggtatgatcaccaatcattgtctctctccaactgcctctatcaacgcatgtgtttgcacctatttctacatggtccccgattcttgcatacagcatctgtggtttcttcttaacctgtccaatacctacgtaccaacaaaaaaacca

SEQ ID NO: 26164 - DNA, 542 bp, Setaria italica
  Peptide Sequence Number=SeqID_92138
aaaaaggactttagggaaagaagacaataccaataggaaacaagactaaccaaaagccagaagcaacaaaaagtatctggagttccttttggccccaaaacagttgattttctccaagatctccagcaggatcaaggaacatgtatatcatcacgtgataaagatcagctttagagcccgtgcaccatttgatgagaatcaggagtgctaagtaaccaaaaaggctattcagaaaaaatcatctgtggtatgaattgataccttatgtcaagggcatttccatgaaaccgcgcatcaaaataacttaacacaatccccaggttcatctgggcaacacccattagtatagacatcttcatcttcaacgaatttagaaagggtagctcagaccgacttccacgccaacttgggtccaccccaaaaggatagggatcacggactttgatgagaccagcagtatgtgcatcactaaagcacacaggttaggtagttagtatttttattaaagaattaaaactattttggttactattggtcttact

SEQ ID NO: 26165 - DNA, 3138 bp, Setaria italica
  Peptide Sequence Number=SeqID_92139
aaggcagggatttcgatcatccagcaaccagcaaaacagaataacaattaacaataactgagcttaggcaggatttaaacgattttattattcctccatcattctagaaacttcagagaacttataattgtctcattaacacttaaagacatcaaatatctgtcatgccttcagcatcggcacaagaatggccaaaaaattgtcttttccatttataagtaggcgggggcaaatctacatttctatgttttttgttagcaactataatctgcatctctgttggaggaactgtacgatgaacctgccctctacaatactgccgtaaacttacaaaacctcctcccgatgctgtggcaatctcaacgacgactgcacgcatgcccagggaagaagtccggcggtctgacaaaacgctgtgtatcggggaaacccatctcgcccacaaagttccattaccgtgctccaaaaatttgtaagaaacgaattgtctctttacgtgctgaatttcacatgcatcagtcctcgtcgtctgctagcagagcaaatgaaaatggcttgaacttgtagccatccccatggtagaacttgttcataaactcaacccagtgcagacgcaatgcatgcaggaaggcactcaatgtttccatcatgagcaatatgaaggcagtagcaaaagcaaaaactacaagtcccaccaacttgacgataagactatcatacccccaggcaagtagcagcagcttctcatagaaaactgttgacagctctgaatgtgccaagctcagggcccaaagtcgaagataagatgcagtatttgaaactgcaccaagtacaaactcaatggaatgtatcatttgatggacaaaaacttcactgaagttgaaatcatcatgacgtgctcgggctgaatcaggttcagaatctggatccatttcagatgtccctaggaaacggtaggtatgcccttgaaatctctctttgtgaagtttcttcaaaataaaaggctttgggaagagcatccatggaacagctaccaaagccagaagcaacaaaagtatctggagttccttttggccccaaaacagttgattttctccaagatctccagcaggatcaaggaacatgtatatcatcacgtgataaagatcagctttagagcccgtgcaccatttgatgagaatcaggagtgctaagtaaccaaaaaggctattcagaaaaatcatctgtggtatgaattgataccttatgtcaagggcatttccatgaaaccgcgcatcaaaataacttaacacaatccccaggttcatctgggcaacacccattagtatagacatcttcatcttcaacgaatttagaaagggtagctcagaccgacttccacgccaacttgggtccaccccaaaaggatagggatcacggactttgatgagaccagcagtatgtgcatcactgcagcttttttctcggcattcatacgcagatttgccaaatatatgaaacggaactgagaagaactcattgtatataaggccacagtatattgagaatattgccatcagaagaatgacatatcgtccaccaaatgccatctccataaagctgccaagcttctgtgaggagagtttcttctcacgaagtataagaaccaaagctcctagtaacagacatatcccatgaccccaatctccaaacataacagcaaaaaggaatgggaatgtcacaacagaatatacagctggattagcttcttgatatcgagcaacaccatatgcatcaacaatttcctggaaagcgttggtaaatttatcagttcggaaatatgtaggtggtgattccatagtgtccatctcatgaaatattattccaacttgtgaattgctgtgaagtgttgcacgctgcaaacaatccttgatctgagatttagcaaatataggacaccatccttctccaacaaggcatttctttgtcacatcaaagtttaacatgttcagcgtgtcatatacagctttctcctttttaaccatgattgtccacctccacaattgtgatcctactgactcaagagctttgtttctgtgctggattccagcatccaaagtaacttccaggtcagagaggcgtgctgatacctcattgaaaatctgtctctgcttcatcatctcctcaggaacagggtagcaacttgctccaaatgaatcacaaatctttagtatctttgcttttgcttgttccccagaaaagaaaactacaaaacagttttctctacctcttcaccagatatgggatcagttacaggttcccctgcaggcgcctgattgaataacatatttcctcttgtagctcggaaaagcatccgttcaaaagccagtgccttagactttaatattatcccactaacaaacctcaccccagaatttccagaagatccttgatgcactccctgttcgagcaaataggcatttccctcatccacttccctgtcatatatgttttcatctagctcccgctcagctgaagctgcatggttgtgagaagaagcaaggatgccacctgccttggtcaagacaagcttgaattcaagaagttcattgtatgtctgttgtaacttgtcactgttggtattcatctcaagcagttcatgctcatgctcacccaatcttgcctctagctcctccagatcaatatcaggttcaagtgcaggtcgaactgaagatcttacacctgccttgttgatctgatcactgaaaaatcttagtttacgtgacatttctgcacatctctttacctggttgacaaatatacgctggaaaggactcttatcctcgttcaagtccttgaactggaggagaccgagctcgccgaggtaggtgacggcgacgcgcgagctctcggcggggatgatgagctgcacgaagcacatcttctcggaccgcaggtggtccatcgggggcagccgatcgaacacccccatcccgctcgcccgccggagcggagcgcgccctcccggagcttccagaaggcgccgcgagcgcgaggaggacgacgacgcggggcggtggtcgggtggcgcctcagatctgagggggtcggcctaattctgttctccactctattctacgagtgcgcaactgttttttt

SEQ ID NO: 26166 - DNA, 487 bp, Setaria italica
  Peptide Sequence Number=SeqID_92140
agaaagagcgatcgccttagatgctatgagaatctaggatttgtgatggctgtggatttgttcattagttagtggatgtagctcatcactaaatataaatggcagttctaggaaagtgagttatgctttgcccgttttgcagatacttagaggggtcaatcgactagcgctgtgctataactgtcagttcaatttaactacttgttatgttgattgattttgtgttagttaataccatcagaccggtcgtggaatatcgggctgttgtttgatttggatctattagaaggctaattttggatagccttggttcagtgggcagaccttttttatttttttgcaaaaagtgggcagacatgttagataatgcgtagtgaccaaaacttctcaaaacagaagttgtaatctagttctacttgttaatacagccaaaagctaattttccacacaaatatgccaatcgttattggttgtttatttctgcagc

SEQ ID NO: 26167 - DNA, 260 bp, Setaria italica
  Peptide Sequence Number=SeqID_92141
ggcgaaccggcagcgagccaagcagccatgctcgcccgccgcggctgacgcgaggcgggcctcccgagacgccgtccccccaccgccgacgacatggatccggcgtccgaggagctcgagcgccgcagccgctacctcagctcgctcatccggcgcaccaagctcagcgccgcccccgcccccctccacttcccgagccagagcctgagcctgaggcgccggcaccgaaaccggagcccgagccgcagaccgcggtacgg

SEQ ID NO: 26168 - DNA, 264 bp, Setaria italica
  Peptide Sequence Number=SeqID_92142
acaagaacctgcatacacaagttgcaaattccgtcattcaagtcttaagaatacatacgtaaacttaataggtcttctatcgtgctacctcaaattgcaaatatgactacttctagaatcctcatcttagttcaaaatttaaagagtcctactattttgagacattttgttatgttcttcttcatattttgattaaatgctagcccttaataagtggcctctcttctccccagtccctgcgataagagctgagagaaaacaggt

SEQ ID NO: 26169 - DNA, 521 bp, Setaria italica
  Peptide Sequence Number=SeqID_92143
gctcccacccgcggcgcgccgcacccccaccccgcaaaaccctaaccctagattgcgagaggacatggccagcaagttcgggctcgccggcggcatcccggagcgccgggtgcggccgatctgggacgccgtcgactcgcgccagtacaaggccgcgctcaagctctgcaccgcgctcctcgccaagcaccccacatccccctacgcgctcgccttgaaggctcttattttggaaagaatgggaaagcctgatgaagcattgagtgtgtccctgaatgccaaggagctgttgtattctgacaacatttttcattttgatgatctcacgcttagtactctacagatagtatttcaaagacttgaccgattggatcttgctacttcgtgctatgagtatgcctgtacaaagtacccaagtaacttggaattaatgatgggcctttttaattgctatgttagagagtactcatatgtgaagcaacagcagacagctctcaaaatgtacaaaactgtaggagaag

SEQ ID NO: 26170 - DNA, 341 bp, Setaria italica
  Peptide Sequence Number=SeqID_92144
cacatgataattcacataaggcacactaaaatccaatctccccagcacaattccgaggagtctcaaccgcttaacgaagtttcagaacaaccgccagcaaacattaacagtaaaaaaggaattcatggtattcccctctgaatccaaacaagttcacgagactcttgttggggaatagcgctgagatcgccgctcagacaacccaacggtcaagcaacaatttccaaccctggcacagattcgcatcaagcgctcaaagagacgaacacccgagatgaaggaaagaacatacctagcggagcaaacagaaccaaagagaagtagagaacaactcgtgcaag

SEQ ID NO: 26171 - DNA, 967 bp, Setaria italica
  misc_feature (853)..(967): n is a, c, g, or t
  Peptide Sequence Number=SeqID_92145
tcttctcgcgtgagtcaagtgcaggcatgcggcaaccggcagagagcggcgggtcgggaatcgaatcctccaggatttgtaggtcgcccggtgcctcccatggttgcctgcgctagagggcaccaaatcaagttggcgattcctcaccggtggtgggaggtcctgagaggagacagcggccccccacggccgcgcctccgcccccggcctccgctcacaactcaaccatcggccgcctcggctctcacctccgctcactccttcctcctctgagcagactgagcagccccgccaagattcttgaagctactaaagaaagaacaggttcctagcagctgatcagagaggctccgcggtgaggcatggcggcagcgacctggcagttcctttacagaaaataaagaggcaagcaaggagctgtcagtcagcttcttagtattggaaatttccaagtcaattatcttcctcctccactctaatttcaagttgtccgctctaaagatctgaacatcgaatttgaaggcctgtgatttatttacaacatgtaggtctccctgaagagtgtcaaccttcagaaattcgagcaacacaggccactcgccatcagtcatcagatttggacgatgcgtggtctactggtctacctggtggctattttgttatggatataaccatcaactgatgcctattttgatgttcgagttaccagtgagctgctgttatgttccttgtaagcttgagtgtaatattttttccgccttacatttctgtgttgaattttgctcgagacagcagcgtgcattggtgtggttttgttgttaaatttccaccattttttgaattgttcaaatcnnnnnnnnnnnnnnnnnnnnnnnnnnnnnnnnnnnnnnnnnnnnnnnnnnnnnnnnnnnnnnnnnnnnnnnnnnnnnnnnnnnnnnnnnnnnnnnnnnnnnnnnnnnnnnnnnnn

SEQ ID NO: 26172 - DNA, 826 bp, Setaria italica
  Peptide Sequence Number=SeqID_92146
agcgctcgagtgaatcgaggaagcgacgggtgctggtccctcacctgggatgggatgatgccgacgcaggggaggtcggggagggcagagcgtcgggaaaatctgcgccggagccagcggcagcggcggccggagacctcatcgcggttcgccggaggggaaccgaagcaggggatgtcctacaaaaaaaaaaagcagcagggaaagtggaatattccccaacgagacaaatgctctctctgaggtcttcttcttcttctttttctttttttttgttttgttttgtgagatctctctgaggtcttctgaacctgttacgaggaacaaagttcgggcccgacgctatttggagcccatgggccgaatactttgaagcaaaacgacttgattctatttcctctctcgaaaatcaacgttttgttatgctaccattaaattgattttgttggtgagaaattatatgttgatagattatttgtttttctattgagttcatctatgtctatagtttacaatgctgtgccaaatagttgatttaaaaatttgcaaaacatattttatttattgcattaattctaaacacatcggctatctaggtcagctcttgttacgaggtggcatagctacttattatctgtgcctatgagctgtatattggagtttgaattttaacatatttataaaattattaagttttcatatgaactcaatgaacacattttatataaaaatattatgttccaacatgatattttatataaaatattatgttccaactgttcttaaatttactttaagtaattaaattactaaaagtttttaagta

SEQ ID NO: 26173 - DNA, 1306 bp, Setaria italica
  misc_feature (1264)..(1306): n is a, c, g, or t
  Peptide Sequence Number=SeqID_92147
caaaatccaattgtttatgaccttatgtcagaaatggccttccatcatagacaagttgatcttcaggtttgggttgagacatatccaacaagaagatatgggaaaccagtgaagggactgcaagatgcttggtggattttataccaaactctatataactgcactgatggtaaaaatgacaaaaatcgggatgtgatagtggccttcccagatgttgaaccttttgttattaagacacaagggttgtacatgagttctggaaaacaatattctacaataccaccgaagaattacgagaagggcacctccaatgatgcatatgaccatcctcatctatggtacaataccagtgtcgttgtacatgccctggagctttttcttcaatacggagatgaagtatctgacagcaataccttcaggtatgaccttgtggatttaactcgtcaagttctggctaaatatgccaacgatatctttataaagatcatcaaaagctacaaatcaaacagcacgaatcaaatgatcaccctgtgtcagcatttcctcggcctcgtgaatgaccttgacacactacttggctctcatgagggatttctgcttgggccttggttacaaaatgccaagggccttgcacaagaccgagaacaagagatacagtatgaatggaatgctagaacgcaaattacaatgtggttcgacaacactgaaacaaaagcaagtttattgcgcgactacgcaaataagtactggagcggcctgctgcgagactactacggaccaagggcagccatctacttcaagcacctgttactgagcatggagaagaatgctcctttctcgcttgaggaatggaggcgggaatggatcagcctcaccaacaactggcagagcgataggaaggtgtttgcaaccacagccacaggagacgctctaaatatatcacggtcgctttacatgaagtacttacgcaacgctgatctacttgagctagaaggtacattctcccctgggaagtctgcaagcttctaagtaccaggtgtgcggtggtgatgatggattatgatgcactcagaagttcagattcgcaattagctttttttttccttcgtgtatttgcttcgatgaacatttcaaccctgattgaggattgagccacacatctctaatttaccatcgttagattctgacccaacgtctcaagtttgctcacttgctctaccagcatctcagagaggcaaacattgaggaccaatcagatcggcannnnnnnnnnnnnnnnnnnnnnnnnnnnnnnnnnnnnnnnnnn

SEQ ID NO: 26174 - DNA, 552 bp, Setaria italica
  Peptide Sequence Number=SeqID_92148
agtgttgatgcaaggttggttgtttacctatgatcctttctgggaaccccccacaaatgaaggcactactgcattcggttccagttggcagaatgattgtccttgatctttatgctgaagttaaaccagtgtggataaattctgatcagttctatggtgtcccctacatctggtgcatgctccataatttcgctgcagattttgaaatgtatggtgttttggatgctttggcttcagggcccattgatgctcgactaagtgataactctacaatggttggagttggtatgtctatggaaggtattgagcaaaatccaattgtttatgaccttatgtcagaaatggccttccatcatagacaagttgatcttcaggtttgggttgagacatatccaacaagaagatatgggaaaccagtgaagggactgcaagatgcttggcgtcttttagataggactctatataaccgcactgatggaaccttacttaattaaacttaacgtcgacctagtagtaggtaaaagttaaaagtacgaaaaactaaaacggtac

SEQ ID NO: 26175 - DNA, 573 bp, Setaria italica
  Peptide Sequence Number=SeqID_92149
ctccctgatattcatcctgatgagcagaacataccgagagcttaccacagtgaaagactggcagttgcttttggccttatcagcacgtctccttgtactcccttgcggatcactcaaagccatcgtttgtgtcgtgactgtcacaagataatcaagtttttgacaaaagttaccaagagggaaattgttgtaagggatggtagcagattccatcacttcaaactgggaacctgctcttgcggcgactactggtaattggctaatcactcaagatattctgaagccaattctttactggaaataactttgattaatggggagaaagcagtttggccggtcatgaattcatgatgcttctgttttctatttctctgctacatgtgagttcagagttctatagtacttcaagattttgaaggagtaatctacaagcttaattcgcattgatgtgtccatttgcccctttcttttccccttcccctttaactgtcggcagaacttttgtttatcttggtaagcaccatctgtatgcctttatctctgtagaaaagctggctgttgtgatctaccatg

SEQ ID NO: 26176 - DNA, 546 bp, Setaria italica
  misc_feature (26)..(26): n is a, c, g, or t
  Peptide Sequence Number=SeqID_92150
acttagccggtggaactgacttcacntctggtgcaaggatcatccatccgacatccgcaattctgcagtgttgccagtctcacaaaaatcaaatggacataaacctaacttgttaaatctcttttgagcttgcaaccgaggacagacaattgtttagacaaccctacaaatattcaaaaggagaagatgcgggatagattagactcagaccaccaaacttctcaagatggtacattccatggcctagaaagagatatgaaggactcggagaccaagtttccactccttgcagcttgagaatcactgtcatgtggctccaatgtgcatttggtataagatggtccaatgccggttagcttttccctatgtcgggcccaggtgacaagatataaaccagagatgataagaaacccgccgaaaatacttcccaggtaaattggcttcccaggaaaagcatcgacagtaaagcagagagaactggttgaagagggatgtacagggccaccatagcagggcccaggagtttgttggaccatgttaatagga

SEQ ID NO: 26177 - DNA, 573 bp, Setaria italica
  Peptide Sequence Number=SeqID_92151
agagcagatgccattactccagcaataataacaaacaagcagcaaactcagattgagtcaaactccaatcgcctttatcatttgttgcaaaaactcctgaaatgaccattaaaacagctccccaaaagtacgagtatgcagtcagtgacagacttgaaggatacttcaccaaaattggagcctgcaaagcaaggtaagtagccatacagaggcagttccctatcaagcacaacactccaatgtgccacttttccagaccaaatgccatgaacagagatactagagatccagcaggctcgggctgtgacatgtcagctaggaccccatgactatgaacatcaagctcaagctcactgctaccatacacagctgggcctctgtacagcaccatgagaacagcgccgagcacacagacgattgtgccacctatcttggctcggccctcgtttgagaccaagctcaccgtttcagtccccatgatgagggccaagatgaaggtgaaggcgggaattgacggctgaatggcggcggcgtaggtgggttggtgtagctgaggccaagcaagacagcagc

SEQ ID NO: 26178 - DNA, 1077 bp, Setaria italica
  Peptide Sequence Number=SeqID_92152
tttgtaacatgagaagcaccgtcgagcgactctgatgcacattttacataagagactccaatgccagtcatcttttctctgtgtcgcgcccaggtcacaaggtataaaccagagataattagaagccctccaataatacttccaaggtaaaattgggcttcccagaaaaatcatagataatagagcagagaccactggctgaagagggttataaagtgccaccatagcagggcccagaattttgttggaccatgtcaatagcacataattaagagcagatgccattactccctgtaataagggaagaaatatggagttttagtagcagaagtgttggcatgcatcaatcaactacttaatttatggcctacataggcaaatgcaaactgcaaccagggtctcctccctacacagcaacagcgtgatgcagaatctcaaattcatagtcacatacatgggatcctatttcaagcatatacaaccaagtactaacatatatgaatatgatagcttatgtatataatggtgtaaatgtacataatggtgaaagagtgttacatgcaaaatgacacactaggaacatacaatgacagtaaataattgaaagcttacagcatatacaacagcagcaaactcagattgagtcaaactccaatcgcctttatcatttgttgcaaaaactcctgaaatgaccattaaaacagctccaaaaaagtacgagtatgcagtcagtgacagacttgaaggatacttcaccaaaattggagcctgaaatgttggcatacaaacacaataaaataaataaataagagagctttcaatgaaacaaatataaacatactgaaaaagtgaaggcaagatacaaaaggcaaagtcaaatgcaggtatgtggcttaatccaagacagttagagagattatatccttttgtaaagactagtttgaactactacagcaaggtatgatttctctgccatgataacatctataacagctatctaaatctcaggccaaattcaatattaaatgctctgaatctctgatgaccagctacacagacaatagtaggatgtgctct

SEQ ID NO: 26179 - DNA, 619 bp, Setaria italica
  Peptide Sequence Number=SeqID_92153
tacctagtacaactgttctgcttacagccaaagtgtcaaacaactaaaagcaatatcccactaagtactctgtctcccattttctaactgccaagtattcgtccaagaatttcttctgaaaagatttgtatgcatagcatccatgttctaataagacagtactatacttgcaatttgcaaatactatacaaaatctcatactccctccgttccaaattgtaggttgttttgacttttctagatacatagatattattatacatctaaacatacattgtatctaagtgtatagtaaaaactatacacttaaaaaagataaaacgatctacaatttggaacgaagggagtatgtgttaccaatttatacatactattgctttcacttagccggtggaactgacttcacatctggtgcaaggatcatccatccgacatccgcaattctgcagtgttgccagtctcacaaaaatcaaatggacataaacctaacttgttaaatctcttttgagcttgcaaccgaggacagacaattgtttagacaaccctacaaatattcttcaacaattcactcattgtaatgcatgtttctgtatctactattctcagtaagaggggtacc

SEQ ID NO: 26180 - DNA, 201 bp, Setaria italica
  Peptide Sequence Number=SeqID_92154
ctggagcgtcgggatggacaggatgttcgacggcagcgcggaccggagctggttgtgcgagaggtcgatgaaggagagcgaagtcgagagcgccaggtcgtctgggatctccccggacagctcgttgccggcgagctcgagacgctgcagccgcgggagccgcccgagccccgcgggcaccgtgccgttgagccggttgtt

SEQ ID NO: 26181 - DNA, 350 bp, Setaria italica
  Peptide Sequence Number=SeqID_92155
aggacgacggcgaggccgagcatccacggcggggcgagggaggagcccgtgtccgccggcaagaggctctgcatcacgttggatcgcacctggttgccgaacgcccagtagccggcgacggccggggagtagaaggcgagcacgaacaccgaataggacagcaccagcgccctggtcatcttccctcccgccggcggcgccagcgtggcctggatctccggcaggatgctgtttccgaagacggaggtgaggatggagacggagaggaacgcggtgaacgtcttctccgacctggacgtgctcagcgagtagtccttcgccggagcatccctcgacaagcctgcgcagat

SEQ ID NO: 26182 - DNA, 453 bp, Setaria italica
  Peptide Sequence Number=SeqID_92156
tggagggtgttctgcaagaaggggtgcaacgcggacggcgacacctgggaacaatgcataggaaaatgtactgaaatctgctacaaggatccagtgttggaagatcggcagtggagtgcttacattgatcgatctccagggcaggatagttactctttggagtgcttcaatgcttgtgtgtctggctgtggattcaggtttgaggtcccaacagagaaggttgaagagatcaagcccaacaggccatccaagccgtcgccacctcctgaagtgaagcgaactacgagtccaccagattccactgtggggagccgtgaagacgtgccatgcacatcggcgtagtttcacacgcctccaaattttgtaaaaccgatgcagttcttcttgccctgttcttcctgacccgtcctcttctcgttctgaagaacgtacgggaaaattatcatagctagt

SEQ ID NO: 26183 - DNA, 285 bp, Setaria italica
  Peptide Sequence Number=SeqID_92157
ggggcgggcggccatgagccaccaccaggcaaagctgtggaccgcacctcctcactcctcactcggccagctccgcccttcgccaaatctatccgatctgtgcactgtgcagcaatctctcttcagcgcacgaggagcttgtgacttgtgagcatgtatgcgcgacgcaacaaatctggaaagaaggacgcatctgtctgttatatgaaggctcctctaccgtatgccattgaagagaatcatggtggttgcttctttgacgatgacgacgatcttgcagaagtt

SEQ ID NO: 26184 - DNA, 336 bp, Setaria italica
  Peptide Sequence Number=SeqID_92158
gatccgtagacgcatgcgatgcacctgcacgcagccggcgcggtgcacctccagtatttcatgccccggcaccagccgcatcaggaagccaccgacctacaggtgcaggattcctcctcggccgtgtgcaggcgcagcttgtcgtcgtccacttcgccggcgggcgccgccatgtgggagtatcatcatcaccaggcggcgcatgcggcggccttgcaggctgcctcctcgtcggcgtcttctctattcccctcgtggagctcatcatacgccgggactacggcggcgctcctcggctccgccggctcggccttcgccaccgacgcctcgtcctcg

SEQ ID NO: 26185 - DNA, 336 bp, Setaria italica
  Peptide Sequence Number=SeqID_92159
acaaagtgttgatgaccatggcgatcgagcgtcagaaatgctgcggatttgctctggaatacagagacagtgtccccgttacctcggaagagctcgaacgcgtcgggcttctcccggtgtcccgaagagaaggagatctcggcgttggtgctctgcaggagattctggtcgagaacaaccacgtggtgggtttcagaatcggccctgtgatcgatgaagttgaggtccctcggcacggaggagaaggcgtagagcaggtcgtcctgcgtcacgagcgggtagtccgcggcgcccagcgtgacgagccagtcccagtcggcgccgaccctgagcagg

SEQ ID NO: 26186 - DNA, 1378 bp, Setaria italica
  Peptide Sequence Number=SeqID_92160
ttcaggatgctgagggagggatccgatagtgaaaagccagttgcagctagggaaatttggttgctggcaaagactgggaagcagaaccgggcattcatcgccgagttgggtgcgatcccattgctatgcaggttgctgttgtcgtcggattggatggcacaggagaacgcggtgactgcgctgctcaatctgtcgatctatgagccgaacaagatgcggattatggaacaagagggttgccttcggcttatcgtcagtgtgttgaagaatgggtggactacggaggccaaggagaatgctgcagcaacgctcttcagtttatccgtggtccatgattacaagaagaagatcatgaatgagccaggggccgtagaggagcttgcctctatgctgaccagagggacaccaagggggaagaaagatgcagtgatggcactcttcaacctctcaacacatccagaaagctcaggtcggatgcttgagtcatctgcagttgttgctttaatcgagtcactaagaaatgacaccgtgtcagaggaagctgctggcgctttggctttgctgatgaaacagcccaccattgtgcatcttgttgggagttccgaaactgtgatcactagccttgttggattaatgaggcgaggaactccaaagggcaaggaaaatgcagtatcagctttatacgagatatgccgtagaggtggatcaacattggcacagcgtgtggcaaggatacctggattgaacacagtaatacagaacatcacactcacaggaacaaagcgtgccaagaagaaagcaagcttgattgtcaaaatgtgccagagaagccaaatgccatcggcattggggctaggaagtaccttgacagtggttgatcattcattggtagggaacagcacattgaggcgtgctgcaagctttggcagtggggagttgtcaaaccctgtgtcaatttcagtgcccgtgccctagatggaaaaagtttccattacagagcccacataattgtcacatctgggtgagttttgtccccaaaattctttcatttcatgctcaaatgaaggtatacaaatttaatccaaagaatcaaatatatcagatgtgcctgtgtgtatttggttgtgaataactgtgcagatatagatttacaggtagaattccagcttgatgtttccttggcaagcttggaaattatttatttttttgtttcagttttaaaaacaccgaatatgtatgctacttgttgtaaactgttcacataattagtagtttactttgaggcaacattggaaagaaatgatatatcatttcaccgatggacttgtaatagaacagaggatgaattatcgcaaacgtatcttgaacataataaaaa

SEQ ID NO: 26187 - DNA, 421 bp, Setaria italica
  Peptide Sequence Number=SeqID_92161
catggctttacactcagcaagcctaaacaatctgatcctattaccgtgaaggagaaatttattcatgccaagtatgctgaaaaggattttgtgcggaagcataatgtggatgagattcagctagcacaactgatgtgggataatgtaagttcaaacaacaaaaagggggtgtacagtctgattgtggggtcaaatgccgatgtaaatttttcttacggacataatcatccaattcgtctatacgggcacttgtgctggcaggagaaatagagtccccagaagaatccttctcaagcggattgcgatcaaaacatctagaacttccatttgatggtgaagctggttgctcttgtaggaggagcgcttttcccagagtcaaagccgaattgaatgatgtatgtccgtaagaaaaatttacatt

SEQ ID NO: 26188 - DNA, 3198 bp, Setaria italica
  Peptide Sequence Number=SeqID_92162
ttttttttttctagtcttaccctcagctcaccaatctaattcttgcatgaattacgacgacacatcatcgctatatgtacaactgtcacaacaacgggcagacacttcccaatgtacaaacttacaccgcaacatctgcaaacaaaaccaaacagcttgcaaactgcatccacgatgaacaggtcaccttcactctaaccgcgaccaaaaccgcagatggccctagaaagctataacttcctcttgacacaaactgagagtatcggcgaggtatacttggcgccatgccacccaccggtactggagacttgactacctacatgatttatctactcgggtcctctaacaaaacaaggatctcttcatcgtctatggctccgccatccattgcatactgtaatgctgttctatcatctctgtccgtggcttgagaatcagcccccctggaaagcagcagcctggcgtacatgggtctgcctttcatgatgcagtgatgaagtggtgttcgccctcttgaatctgtagagtttacattggcgccgtactgcaagagtagctcaaccatgcccaggtccgcaacgcggcatgctagatgaagcaaagacaacccttcgacataatcatccaattcgtctatacgggcacttgtgctggcaggagaaatagagtccccagaagaatccttctcaagcggattgcgatcaaaacatctagaacttccatttgatggtgaagctggttgctcttgtaggaggagcgcttttcccagagtcaaagccgaattgaatgatgtatgtccgtaagaaaaatttacatcggcatttgaccccacaatcagactgtacaccccctttttgttgtttgaacttacattatcccacatcagttgtgctagctgaatctcatccacattatgcttccgcacaaaatccttttcagcatacttggcatgaataaatttctccttcacggtaataggatcagattgtttaggcttgctgagtgtaaagccatgcaatgtgttttctaattcatcagcccttgaaatatcaccatggtcagcgcagcttgacgaaggtaacattccttcccagacagtattggcaaacgtgttgcctaatgactgaaagagattgattacagatagctcccaaaccctgacatcaagcgtcagggatcttaccttagatatatgcacacccatatttctgtgtaccccagaacactctatgcataaaagaattccaaggttcagggatgcccaatcaggctctgcagcaccacagtcagcacagttaccattgccagccactttcctaagcaagtcaattggcttatcaggcttcatcatgcttgttcggtgatgctgtgtacccctggcagaatgatcgaaataaccacttcctgagttcttttccagcatgcaatcttcacttattgaatgttcaagttctgttgagctactgaaagaactgctttcgctggcagttcgatgatggctgctgcccttagggctcagcagaagacgccgttcaggggactgggagctcagcaaagaagcgatgacgccagtaattttttcaatccaatccatctgatccattgcactctctgcctgcaatgtatagttctttgtgggagaaattattctgaagcagaaccgcaagtctgattggtctgcatcaactttaatggtcgatgttagcaagtttacagtatggcgtgcaacagatttctcatcatgcacgcctccatggtaatgagatgaaaaccatctgctgagcaacccagaaccatgttcggagggagtgctagttctttgattagaataaccgctagatggcctactgttttgcttgcgataatagtataacattcctcgactgtcgagtacaaagaacctccttttccagtcacctctcaaatttgaagatctcttagaaagatagccttgtcgaatagtctgaaccttgccctttgaagctgattgcatcactgcctcaatcatcttatgagaacttctaccaattgcttgtattccatcaccattaggggaatcgttcattccatttggtgaccaccgactttcccgatcaatttgtcgtttgaactcttgcattctctcaacaagagcagcctgctcatagttagacctttctcttgattgctgtgcataagcaagaacttggttgatatatggttccatctgatgtaggagttcatatccttgtttgaaataacgaagatgcgcgtccattgtcccactaacagcctccaaaaattcaaacctcttcttagcctcgatatttgaaagcgaagtcaccagattgaaacgagcttgttcaaatgaagatctggcactgtggagctcgtcctctacagcagttgctacgtcagtccttgtacctttcttcaaggataaatacttctcacgagcctggtcataaagaaggctagccttgtcaaaacgtttcctagcatccttcatttcatgtaaatcaatgtccacaaactggagcagcttgtcatttagcatatgctcaacctgggagcgcaatacttctttgtatgttccaatttctctcaaggcaattgtaaatttggtcataacaggccctccaaatgcaacactgattggatcattatgaccccctccaaaagtttcaagtgaacttgcgaacgcaatatctccatcatatgcttcccctagtccttccgtgtatttccggcaacctttgtgaaacttgaaacatctttctcttagcaattcagcaccttcttcaagtgattgcatctgcttcctgaacatgggcgagtcatcgagcctgctgataaacatggctgcctccgccagcccgccttccgccgccgcagccacttattctccccccactgccgcactacctccacatcgacccccgcgcagccgcggcgtcggaaagactcgctcgccggagaccccgctccgcagccaccgggaccacaaccaccgccacctccgcttcacggagaaccgccactccacctccggcctcagcgcgacacgcttggagcgcgacccacggccgtaaccctccggcgccgctgggaccgaaaccctaggcggcggccggaatcggcgaaatggcggcgattcgcgtggggggcgcgcggagagagaggaatcgaatggctcggcgagagtgggggaggggacac

SEQ ID NO: 26189 - DNA, 298 bp, Setaria italica
  Peptide Sequence Number=SeqID_92163
ttttctgctttaaggggcctcaatacagtttcaatggcaaagaagcacccagcaactgctgcattgaagcctgaagctattccagcagcagcaccagcagcaacaagggcaatccgtctttcccggttattctccatcatttctgagcatgcattagcgcacgacttgccaatatccacactaggaccttcaggccccaacgaacaaccagtccctagagtaacagcagcctggacagcctttacggttgggaagatggctccaagaaagttgattccttgcctctgccctgatttca

SEQ ID NO: 26190 - DNA, 408 bp, Setaria italica
  Peptide Sequence Number=SeqID_92164
agttaacctttataaagatcaagaaaaggacagaagaggaaaccaaaatcaagatcatctgatcttgatttttggcgacctctatgttctagcaattaaaattgcaagggggaaaaaagcaatcagaccctcaagtcctccttgccatccagctccagctccaagaggtggcaggaatggctggccttgcaggtctggtagaccatgctggtgatgaccgtgtcgaggacacagatcatggcgtggatgtaggcgacgaggagcccctcgcagagcatcccagcggtcaccttgccggtgagcgtgtacggccgcatcaccctgagctggaacagagcctcgacggcggcggcggcgaggctggccggcagggacgccgcgacggcggtggcggcgtcgccggcgcgg

SEQ ID NO: 26191 - DNA, 684 bp, Setaria italica
  misc_feature (598)..(684): n is a, c, g, or t
  Peptide Sequence Number=SeqID_92165
gtggcgaccgcgaagggagtggtcgtcgacgaggccgtggcggcgcgcgtgcgcgaccggtacaggaggcggcagcaggggttcaaggtggtggtggacacacatgtcggcgtccgcgtcggggcgctgcgcaccggcatggtgccggtcaggctgctctgcgacggcggcgcgatggcgccgcgaggcgggtccggcggggacgtggtggggcccatgagcaagtgccaggtgtatctgttcagagtaagatggtttagcttgaactgaaggcgcatccggggcacaagggctgctagctgcttagaggccatcgagcttataccataggcgcataagctgcggatgccgtaaattatccgcatgtttcgccgacaagatggcagtaattggtttgcaccgaacttttattggttctgaatatgaaatggatggcctgaagactctgaactttctaaaaacatgtagtgatgagagttaaagaaaccaagtttgtaactgtatattacactccccagctcccaattcttttgattgtgtggtgtatacatagcaggaatgaaatgaacgatgggtgtgtgtgtttcttagtaaaacnnnnnnnnnnnnnnnnnnnnnnnnnnnnnnnnnnnnnnnnnnnnnnnnnnnnnnnnnnnnnnnnnnnnnnnnnnnnnnnnnnnnnnn

SEQ ID NO: 26192 - DNA, 307 bp, Setaria italica
  Peptide Sequence Number=SeqID_92166
tactatagtacccatgatccataatctagcttatataatctaggtggattataatctcaaacaaacagggcctaagtgtactagatatgataatgagactatgtttctccaattttccccccaggaatttactacacactgatgcaacaaaaacacacatatagttctggaatgcataatggcagacctgcagaggtacatccgtacatacaagtatgtaaatgaggacaacaaaatgcattgttcaaacgcatgttacattcctgctctctggaaaatatagtgacagattgtgccgaacatattt

SEQ ID NO: 26193 - DNA, 257 bp, Setaria italica
  Peptide Sequence Number=SeqID_92167
ctccccttgctctcgttaccgtcgccgcccgcgcccttgcgcttgccgccgcccttccggaagaaccacggccacgcgagccacgacagcctgagcctgagccgccgccgccgcttcctcttcgccggcgcgcccgcgggcttggacgagctggcgccccagaagcagaacggcaggcaggagcaccgttgcctgctggaatcgtcgaagacgccgccgccgccgcctgctccagcccagccctcgtcgagcacagg

SEQ ID NO: 26194 - DNA, 602 bp, Setaria italica
  Peptide Sequence Number=SeqID_92168
attatggccatgcgcctgctgtcattgagctctgcatgcaagttggtgcaagagtacccccgaaataccattgcatgatgaagacacacggcttagcaccacctgttcgatgagaccagatgtcttataaagttgattgcctagttagatttatatttggtggtagacaggaactgtatagatcggacaccaaaatatttttatttgtgaaggatttcaagggtgcagaagattgctctggtagaagccatcagttaacagtaatggccaaataagcagatacaccattttgaagttctcaactctcgagtgtatcagaattcagaaggttcgtactaaacaaaactactgatttgaagatcctcagacaataagggaaaattgtttgtgggttgtaaaatattagaagagatcacttcgttgcccttcatttgtgcagtttttcacgcttctctagaatggaggtagagctttaggactagcctgctgtctgttcttcagttactcaactcagctactgtaacatcagtgttttcattgttatctttattttgcaaagagtattaccttgattggtcatgtcaccacagtgctgttacctt

SEQ ID NO: 26195 - DNA, 150 bp, Setaria italica
  Peptide Sequence Number=SeqID_92169
caacacctacaacatcacggggtacaagccgttcggggccaactcgacggccatctcgttcaagaccgcggaactcgccgccgacgagagcgccggggaggtgcggctctacgggaagctgcagctggcacccgggaccgaggtggtgaa

SEQ ID NO: 26196 - DNA, 794 bp, Setaria italica
  Peptide Sequence Number=SeqID_92170
gagagggctactgttctgtttgagtcaatgccagttcgagatgtgttttcatattgttcactgatgcaaggtcattgtctccatggttcagctaataacgctgttgaacttttctcccagatgcttttggagggcctttcccctgataatgctgtgtttacagttgttttaacagcttgcagtcatactggtctagtagaagaaggaaagaagttctttgatatgatgaagaatgtgtacttgattgtgccatctggtgagcattatgcttgccttgtcagtcttcttggacgttgtgggagactaaaagaggcatatgagcttataatgtcgatgcctgggaaacctcatcctggagcatggggtgcactgctgggtggatgcaagcttcacggtaacattgagcttggaaaaatcgcagcaaagaagctttttgaaattgaaccgtataatgctggaaattatgtctccctttcaaatatgtatgcaaacattgacaggtggggagatgtttcagtaattaggaatgagatgactgaaaagaggataacaaaaattgcaggtcgtactattgttttgcagtgaggcagtgtcaaccagaatgttatatttattttgtctcatgttactggccccattggaaacctgagtaggctgtgaaggaagaaaggagacctcatgacggttatgaaatgaatggaaaacaagatatcattactcaagttaagatgcatatggtggaagttcagcatatgttgacataggcaacatgctgatcagcaggctgttatgtt

SEQ ID NO: 26197 - DNA, 617 bp, Setaria italica
  Peptide Sequence Number=SeqID_92171
tcattggctgtcaattaattgtcatatatattgagtcagtaaatttgcagatttcatacttcactgccgctgataccattgcttttaaaagttatcatatatgcttagaaaaaatcagtgcatggtactaactattttcaaaagttaagattgctgcatgtttacataagcatagctgttgttctggcagtatttgattcatctacgaatcactgtctttgtgtttttattcgtttttgttttgatgtatgacctaatttagtgcagattacagattggcttcttactctcatgttataatatatattctagatttctagtcatatgtcattacacgttattagtaggtgttgcaccctgatttgttttttgttcttgcaactaggaagccaataaaatgggggcaactaatcatggtttctggtactctatcacaactttgtaacctcccaattcgcctattgtaattgttgcatggtaatgcatctattttgcaattcaggaatgaactgtgttagaagaactgcaccttagccataatggaatggaatgccaaagatggaagtatttttctaccttgcagaaccttcgttgttttggatgtttcatctagcaag

SEQ ID NO: 26198 - DNA, 266 bp, Setaria italica
  Peptide Sequence Number=SeqID_92172
aattattgaaaaatagtggtggtctgccactagcaacaatttgcatagctagtattctagtaagccaatcggacaactcagagctatggctgcatgtcaatgaatgcttatctagctttataagaaagaatcttacttcagaaggcatgctcagcgaaatagtagggatgagctacaatagtctttcggaccatttgaagacatgcctactatatcttagtatgtaccctgaggggtacacattcttgaagaccgatttggtgaag

SEQ ID NO: 26199 - DNA, 1216 bp, Setaria italica
  Peptide Sequence Number=SeqID_92173
aattcacctttttgcactatatgccagaaacacagcccatctccatcacatttggcagtaaacatagtttaaagctgtaacacagcttcacaaaagaccaccacaatcacctgcatctactgatactctacatttactgattccctacatctactgaacaagggccggacgcaaaatgcagtcttgtaagtgaacttacaacaccattaacccactgttcttcacaaaagacagccacttggaccaggatcacaaaagcaaacagaagttgattctcataggggatccggtgttcatgtctggttggaccgggatcgcagcctgcttgcaacacagtcagggcttcgttcatacttcctcttccttgcgggcttagaagatggagtgacacacccagcatccttattgacctgaacgtcctgagaatcagatgtcaccacagactcgctctttctatcatccttgtagtcatcagagttcctcttaacttggaggcaggtcgttttgctctccttagctttgctgcttgtttctccatcctccaggctctccttggcagctgtagcatcctgatcagaaatgcacgaggtttctgatttgtcagagagcagcttgttcgaggagtcagctgcgcttgaatcctctgagttagctgatgctcgctgagttgcgatcagatagtgcgccacagatttgtacccaagtctgacagccttcttatatgcacagccagtagggaaccatcctttcttagttctacatatactgcaattacaaatgccacggcaaactggacacatccagttgggattcttcttagcttctagcacattctcaccatacctcatgtacaaacaatctccacagaactgcccttggacaatttggcatttacagcagcttgtgtgatgaccaagagttttctgtcggcactgatgacaggtttggcctctcacttgatcatagatgcgcttaccatccttgccataaccatccacaaagagagtccaaggagtgttacatgtacccagaagcttctcatgctcttctgtgtaaatttcttccttggctccaacctctagtaataactcagttcttccaccttcagcatctttctccttcttcggctgaacttcacagtagctgactggttccacgctcttcaacctgagcgacctccgcgccggcggcggcggcgtcagcttcacccttcggt

SEQ ID NO: 26200 - DNA, 421 bp, Setaria italica
  Peptide Sequence Number=SeqID_92174
cctttcaagcaatagtgtgaggttgctcttctaacaaattttgaccactttctgtggcctgatttgataggggtttgcattataggaatcaggaggtctgttgatatgctctgaatattatcctaatataaagagctactaataagagctatgagatgttttgcaattacacctaatcgtgtacgaatgagtggctttagtagagggtccatgcttaggaatttaatttatagattagcaaaattcttttaatgttcattctactgacaaaattacaactgtcaatactagaaaagtatattattcagtatttgttgaaggattggcagcccaatcatgcctttgcataactcttcctcttttatttcttcgcagggcttgggtaactctttgttgaaagaatctctcctgtacatgtaat

SEQ ID NO: 26201 - DNA, 236 bp, Setaria italica
  Peptide Sequence Number=SeqID_92175
ctctcttactcagctcaaagctcgagctggccgacagcaagtggcacaccggcactgctgctgcgggggcgatggcgacggcggcgacggcgacggccggggacagtgacagggatttgtaggcgctggacggggagctcaattcgcgcgtgcatggcgataggtatggcagtggccagtggggcgcagtgaaaaggtggttagttagttgagggcagtgatggccattccattag

SEQ ID NO: 26202 - DNA, 564 bp, Setaria italica
  Peptide Sequence Number=SeqID_92176
agggttcaaggagtaccggctcggggacgtactccagctggctcaggcggagggtggaggacggacgcacgtggggaaggatcaggagctgccttacggaggccggcgtgtgccggagcctgcagagcaaccggacattcgacgagttcgtcaacgacaacctctcgccgctgcaatctggatgctgcaagcccccaactgaatgcaacttcgcatacctgaacgagacctactggaccaagccctctggccccagcaactcttccaaccctgactgcgacacctggtcgaacgaccagtctgagctctgctacggctgccagtcttgcaaggccggcgtcctgggtaacctcaagaacagctggaagaagattgccatcatcaatgcggcgttcatcgttctcctcatcgtcgtctactcccttgggtgctgcgtgcttcggaacaaccggcggcacaagtacactctagttgggaagtaggcatatatcttcagaagatgcgtgccatgtatatgtgtgtgttctcatgttcccaccgtaagctgtttctgaaccttttata

SEQ ID NO: 26203 - DNA, 867 bp, Setaria italica
  Peptide Sequence Number=SeqID_92177
tttttctttgttctgtccagatagcatccatcctatttgcagttcgcacattggtacatatgcgttcaccaaatgaactgcttgtgaatatggccccaagtataatgccagctctgcgagtaatgtcttctgttaaatctttatcacatgctgagaagaagtgcaatagttccccagaaggttttgaaggaaggggagttattgtagtccgaagccacttggcagttgtcatggctgtgctcacaggagtaataggagccatctttgagttgccgaagctgttgcctttaggtgataaacaaaaacgtggaggagacattggacttgggcttgttattgattttgcaggtgaggccataacatcatactttctctttgtgcctggtaaattaatggctccacctgacagacttccactgccaagcaaactgtcctcatcattagcaaacatgcgctcatctagctctccttttgagttaattgcattctcatattccttttccaggattagcagacttgatttcaacaagtttccctgaagcaaatccttaaaaactgtcaagccttctggatcaataaaagataaattatcctgttgacattctgaagcagagcatggcttatttttaagaatatccattatgacagtgtttgtcttctccaatgctttgctcaactcgtcttctgaggtatgatatttttctacacagagaagcaataagattgactcccctatctgacttcttaacaaagtaggatgaatcatttatgttgaagctccttagccgcacaggaacatgaatgataagtacagccaacacagaaaccagtccattcgtggatgtcacaagatccttgaatctgctg

SEQ ID NO: 26204 - DNA, 928 bp, Setaria italica
  Peptide Sequence Number=SeqID_92178
ccgcggcggaagccatcggagcggcgacgcccccgcgcggcaaggcaactctcgagcgcgaaccgggcaacgaggcacgagccacgaagaggtgagttgatgggcacggcgaacgaaggtggcggtggcgggaccgacggcaagtcgacctcaggttggcgggcggaggatgccatcgcgggcaaccgcagggcgctccaggccctccgggagctcgtgacgtacccctacctctacgctcgagagtcccgcctgctcggcctcaagtggccgagaggtttgctgctccacggcccccctggcaccggaaagacaagcctggttcgagctattgttcgagaatgcaatgcgcacctgataatggtcagcccatattctgtacacaaagctcatgtgggagagggagaaaagttcctgcgtgaagctttttctgaagcatattctcatgcttcacggggtaaaccagctattatattcatcgacgaaattgatgccatatgtccatgccgcaataataggagagagcaagaggcccgcatcgttggtcagcttcttactctgatggatggaaacaagaaatcgtctaagatgcttcctcacatagctgttgttgcatcgactaacagggtgaacgccattgatccagcattgagaagaggaggacgttttgaatcagaggtagaggttactgttcctacggttgaagaacggctgcagattcttaagctttatgccaagaacctacatcttgatgaaaaggttgatcttcaaatcgttgctgcattctgcaatggttatgttggtgctgatttagaagctttatgtcgagaagctgccaagcttgcatatcatagaatgttggacaggggtgagaaagtacttaaactactaatggaggactgggagtctgctagatctatggtgggac

SEQ ID NO: 26205 - DNA, 220 bp, Setaria italica
  Peptide Sequence Number=SeqID_92179
caatctcgcaataatacacactatactccgctcaattatacaccctgtcgtgccgcgccgcttgctgctacccaagccaagatggatatggtaggtggcagcgcccagagcgccgtggactcgctcctcggccggctctcgtcggtgttcgtggaggaggcgcagctgctgcgcggcgtgcatgacgacatgcagttcatcaagcgcgagatggagagca

SEQ ID NO: 26206 - DNA, 242 bp, Setaria italica
  Peptide Sequence Number=SeqID_92180
cccgtgcatccccattgtcccttccacgccatttgtgcagagggggcagctctgagcgctctgcgcatcggggactggggcttctcgaaggcctaaaagcgatcccagaaagagaggagcgggtggtagtaccaccgcgcggccattcctgcacgagacagcagagcagtgtcggtaggtgttcgctcgctgctggtctttccctggttgcgccgccgtgctctgctcttcacgtgcgcgcg

SEQ ID NO: 26207 - DNA, 404 bp, Setaria italica
  Peptide Sequence Number=SeqID_92181
cgtctgtaatctgaatttgtacacatcagcagagagacaaagctcatttcccaaggtccagcaatggcagctgctccggtcgccacggtgccgcgcatgaagctgggctcgcagggcctggaggtctcggcgcagggcctgggctgcatgggcatgacagcctactacggcccgcccaagcccgagacggacatgatcgcgctcatccgccacgccgtcgccgcgggcgtcaccctcctcgacaccgccgacagctacggcccgcacagcaacgagatcctcctcggcaaggcgctgcagggaggcttgagggagaaggtggacctggccaccaagttcggcgtctccttcgccgacggcgaccgcgagcccgacttccgcggcgacccggcgtacgtgcgggc

SEQ ID NO: 26208 - DNA, 330 bp, Setaria italica
  Peptide Sequence Number=SeqID_92182
tgtgatatgtctagtttcaccatcataaaaaatagacccctctggtttgtggggacaggtgatacagttgatttcctttaattcgctgtagcatatttctgcggtctcctttaacaacttgataatcttgctaaagaattcatcatttgtgttcttcataatatgaggaatagctccctgatgaattgacgaattttttaattataacctgtcataaacagaacaaatgttgcaggatctcctgttagcattctgaagcttctcagtgaatgaaaaaccttggtttctttcagaatacatttttggtcacaaattgctatccagccaaat

SEQ ID NO: 26209 - DNA, 1072 bp, Setaria italica
  Peptide Sequence Number=SeqID_92183
ttatttccacgtgggtgctgcactggtgcccggatcaattgacctgtgactgatgcctctggcaaaaggacttgaccctttcaagtccttgcttcagttttggtggttccgaagcaaaggtgatgcgcaaccagttttccattcctaaggcagtcccaggcaacaccatgactgattcctccttcgccaactttctacagaaatctatgtcgtcactaatgtctgacaactgtgatatgtctagtttcaccatcataaaaaatgacccctctggtttgtggggacaggtgatacagttgatttcctttatttcgctgtagcatatttctgcggtctcctttaacaacttgataatcttgctaaagaattcatcatttgtgttcttcataatatgaggaatagctcccagaacaaatgttgcaggatctcctgttagcattctgaagcttctcagtgaatgagaaaccttggtttctttcagaatacattttgggtcacaaattgctatccagccaaatctccagccaggtacagcccatctctttgatatagctccaagagtgagtattggaacagtctccccaaaaacacccattggcacaaaaggagtgctaccatagacaaggttcccatagacctcatctgagatgactaacataccgagcttgtttgctgtatctgcaatcttggacaaatgctcatagttatacacagagccacaagggttattgggattaataatcagtattgcaacagtattctcatctgcaagagcttcaacagcttccaagtcaacttcccaacctctctccggaacaagatcataatggcgtacttccatgttatgaatcacagcgtgcgcttcatgtttttggggtaaccaggccttgggagcaatatattgacacctggttggccaaaacagacatcacagtctcgattgcttgggtgcatccagaagtgagcagaacatcatcaggggaaagcttgtaagggagaccacaggataggtactctgcaacagctcggcaagctgagaattttgtgtcgcgggattgggttagtccgttct

SEQ ID NO: 26210 - DNA, 319 bp, Setaria italica
  Peptide Sequence Number=SeqID_92184
tatccctgatgattttttttgatttaatttcaccgagatctgcatttcaaaagaagctcaagctttctcaagaaaacaaagaaaatttggatcaaattactgatcagggagaaaatgaaggcaatgcaaagcattctgcagggattcttactgagagcagtgtcgacaaccaaaatactcctaagcatgctccaaattatgaaagtcagaggctaaataccagcacaaaggctttgtccaactctaaagacataatattttctagatcaaaaccatctgaacttcttgtagataaatctgcacccttcattgatgcaga

SEQ ID NO: 26211 - DNA, 461 bp, Setaria italica
  Peptide Sequence Number=SeqID_92185
agcacctggctgagggaatatacatagtgattatgggaattccaatggactgatgaggggatgtgcagtcagcagcaagcaacgattgtggctagaaaactggtatgagcagcaacataacaggaagattgaaagccaatgaatgcaatttcaaccaacccacatccagaaaaaaaaaggaatgtaacagctaacgaggacgtagagtactttggcctcaagcacttcctatcttttccaataaggagactcatttggatggctgaatagattggcaaatctttcgagtatatactgatatttcagagttcggacagtttcgaagcctcattaaatctgtgaatatatatggtagactacctattccaaatcagctgccccgaagtaacaggattaaaaccggtgtatatctgcaactgatagcttccttgcttagttgccatgtgccctgaggtgctcaa

SEQ ID NO: 26212 - DNA, 437 bp, Setaria italica
  Peptide Sequence Number=SeqID_92186
aagagttaatacgacaatgagataatagttactgtgaacaaataactgctaccacaataaagtaaaaagaaaaaaagggagacataaataagtatttttgtgttgtggactatcagtttgacacctaataatctatgctcctcagcatctcggtattaacgcattgtggggttgtaagagcagcgattttagactgcttgacaaatgtgatggtcaagaaacagaagcaacgactagagcacccctccttgattctagacatacatagaaataattaatttgggctaatagcagattacagaaacaacaggaatatcaaaatgtttcaatacagtgctgttcagccattgagactgctaggtactgctaagaaaactattctcaattggtcctaagatagccttctgcaattacaggccaagccaaaagaaggttgt

SEQ ID NO: 26213 - DNA, 359 bp, Setaria italica
  Peptide Sequence Number=SeqID_92187
acaatgagaatttcattcaattatcagaaagtaatatgctagtagtagcatcagtctctgtcccctctcccattatggtaaatagcaaaggtatttacttcgatataataaatacgtaagcaaaataactgagtgaaaggtaaaaaaaacagcaatttgatagtgcaatacagttagagaaggaaaaaaggtaacagaagaacaggaccgtacaatactcttaaatgatggaacccagcgtaagtgttgcgcccaatcaacagtacaaatgatcattgttataaactttttttacaaatgatagttcgtctacaatctactaggaactaaccaataaagaaaagccaggccaaaatgat

SEQ ID NO: 26214 - DNA, 342 bp, Setaria italica
  Peptide Sequence Number=SeqID_92188
aaggtaaaaagggaaggggtaagtcactcttcggtcatgcagcacatgcttattttctagtacctttctcattcatcaactgagcttcaaccttcatatcaccatgatgctttgaaagggaaaacaagaagctacactatgcgtgcaatgctgtatctccttcacataatgttgaactatggggtggaactgaaagaaacacttgaaagtggggtttcaacagttcctttattgccatggcaggagattatacctcaactttttgcacgcttgagttcccacccagagaagatagtaagggaacttttggagagtatattgctgaagctaggaaaactttct

SEQ ID NO: 26215 - DNA, 332 bp, Setaria italica
  Peptide Sequence Number=SeqID_92189
tctggtgactgcaacactgcagctgatggagacgaataacagggagaacaacagaaggaaaaaattagcttcaagaaaagcgaagctctagctagctgctgtacaccggcacggcgaggattcgaccgacgccggccgggcgcgtgcgtgcatgggagggggagcgtacgccgtcgtcgcctcgcctctcaacccaagtagtctacttctctcctccgccccgaccgttcacatccatgcatggagcacacgactgcctaggcaccattatatcgggcttcttccctacgacgactcctccgggatgctggccagcgccgggcgccacgcgg

SEQ ID NO: 26216 - DNA, 845 bp, Setaria italica
  Peptide Sequence Number=SeqID_92190
gtccttctccccccgcccggcaagctctatgagtactcctccaccagcatagaaggtacatatgaacgatatcagcgatttgcgggaacaggaagaaatgtgaatgcaggagaccgaaataacaacgatagccaggatgctgctgcttcagacttgcaaaccaggcttaaggagatcgcaacatggtctgaacaaaacaatgctaacgagtcagatgccaacgaactagagaaactggagaaactgctgacaaatgctttgagggataccacaaccaaaaagatgttgacgaaacaaaataatggtggtgctggtggaagtacaagcagccagaacagcagtggacctaggagacaggattaaggagtggctcccagcaaatcagcacagagcaaaggcgccctgacttctgtgctactggcaaatgaaatggggtgtgcgtctgttgctaccagcatctcctactatcgctgggtagctgagatatgttgaggtcgctcgctgctggcaaggtgtgccgggaagggaatttcaataacaggattcgcaaatggttgcggccttgccaaacctgaccttatgttgtaccatgcgattcctagaattgtgcttgccgagtgatttttttactggttgtgggcttatgtaaccttgcgatgtttgcttggatctgtcaaaataatagacaagtagaaccctaactaaaaaaaaaaaaaacacttaagtggctttgttttctgtcactattgcacttgatttagaaaagggtcactccattagttcagtatgttcgaaaatgacatgacgcagctgttattttggctttgtgcttttcatttcattct

SEQ ID NO: 26217 - DNA, 488 bp, Setaria italica
  Peptide Sequence Number=SeqID_92191
agggcacactgcaagctagcacgcaggtggatcactagagcacggacatggcgtggcaaaaggctaaaagttagatagctggtacctcgcttactgctcgtatggatgtggtccgaacataagctagcactacgggtttgtgcaggttcagctaggacttcatgttcgcaggcaggaagcaaggtgtcagcaagggttggctgggttctcggctcaaggcagcggcaacaacaagatggccaacgacgaactgcaggaacgcggggcctcggcaaaactaggtccgcggcaaggcgatggctgggcggcgtgtcggcatgcgcggagtcacgagcaaggcgaagcagttcggctggccaaggggtgtgcacgtgcgtggcaacgtggtgtcccacggccgcgacgtgcctgtagcatgcgcgcgggcgttcggctacgcgagtccgcggcggcgcacagctgctagagctcagcggcaacgaagggag

SEQ ID NO: 26218 - DNA, 636 bp, Setaria italica
  Peptide Sequence Number=SeqID_92192
gccgtacgggtggcggaagccgaaactgccgtgcgggggctcccaccgcgcaaggttggcctgcgagtcctcggacgccttggagttgagcacgcacctgtacccctccgtcgcattggaggacgacggccgcttgtcgccgctcgcctcctcctccgcggcgtcggcgaggaagtagccctcgacgatggcctcgagggcgcccgcgaggctctccatgttgcgcgctgtggcgcggtgcagctcctggccggcccacacggggcagatgaggacgcagatggcgaagcagatggagacgccgatggagatggtgcacacccgctgctgcgccaacgccaccagcgcgcccacgcggtaccccgacaccgccaccaggctgtaggtgagaatgaagatggtgacgccgtagtcgaaccgcgccttcaccgtcgggatgaagcgcgagaacgtcgccatcgcggcaagcagaaagacggagccactgcggatgaacggctcgaacttgtcgccggacttgctggcgatccagtgcacgccaagcgcgatcacggcggcgctggccgtggcgatggctcggttgaaccccttgtacacgcagccaccgacggtgtactcgaagacgacgacgaccgg

SEQ ID NO: 26219 - DNA, 806 bp, Setaria italica
  Peptide Sequence Number=SeqID_92193
cgccggcgcatcgatccgatcagcttcagctcatggtggctgctgctgctgctggacgacggcggcggcggcgcggcgagcggccagaggcgggagaaggtggaggagacggccatgccggccatgttgagccccttgctgccgccccagtccggcacgggcacccaccgccactcccggcgcgagcggtcgtacgacagccacaccaggtcccacgcgccccggcagttggagatgagcaccagccggaccacgccctcccgctccgccagcagccccgtcatcaccgcgtacggcttccggaacccctccaccagctcgccgggcacgctcgccaccagctcccagtcgccgccgacggccccgaacccgtacagctccacgcccgtcaccaccttcacccgtgtccggctcatcgggtcgtcgaccgccaccgaccgcaccacggccgcgctcccatcgccgtacacgtgcagccggtccccgtgccccgccgccgcggcagcgttcgggaaccgggggcggaagaagaccgggcggtcgccgtccgcgcccgggccggagtacaccatcacgcagtccggcccgacgtgcgctgcgcagaggaaggtgccgtcgggggccgccggcgcagccccctcggccaggacagcctccgattgctgccacgtgtcggtctccgaccggtactcgaagaggaatggcgtgttgttcaccagctcagcaaacagaaaccttgcccggttcgatccccagggatcggcgacgagcttgaggccgaagcggcgccaggaggaggtgccgcg

SEQ ID NO: 26220 - DNA, 630 bp, Setaria italica
  Peptide Sequence Number=SeqID_92194
aaggttcatatcaacttgattttctcaatctccccccttcgatgagtgtgttgaaaccattcaagcacaaagaaatggtttgagaggcaaaagtcaaaaatctcatccaagtgatcgaaagctaagtaaaaactaagatcaaagtcacttgagatgagaacaaccataaaagccaagttgtgaaaccaattaggcaaagctcccattcaagtgatcgaaagccatgtaaacgctatgattaaagtcactcggcatgagaagcatcacaaagaccaaatcaacttggaaaagtctcagttcccaaagacatgggcaacggctcgacacaaccgagacaaagaacacatgatctctcaagaagaggcagaaagggctcaacaccaatcatgtgaagatcgaaaacacaggatccctcaagaagaggcagaaatagctcaaaaccaatcatgtgacgatcgaaaactcaaaccaaatgccagctcctcaagaagaggtaaaaagctcaacacgaccgacaaaagagcaaaagagagcacaaaactagcacaaagcttagaagctccccctgaacacatgcactccccctgaaaacatgccacaatgaaatgcatgcacaaaaagcaaaaagaa

SEQ ID NO: 26221 - DNA, 849 bp, Setaria italica
  misc_feature (1)..(81): n is a, c, g, or t
  Peptide Sequence Number=SeqID_92195
nnnnnnnnnnnnnnnnnnnnnnnnnnnnnnnnnnnnnnnnnnnnnnnnnnnnnnnnnnnnnnnnnnnnnnnnnnnnnnnnnttttttttttttttttttcttaacactgcagcagctatcatggtattccaaaagctagatgcaggatacaactacaccacaaggttcggtttctccaagcagggtgcttgggcgatgtcagatgatctaggcagtttactgaaattagcagcgccgacacagatggctcctgcgtcgttggatccatgatacctgatacaaatctcgcattgcaatggcattggtatcatggcttctgagttctgtcctaggagagcaccctgggtaccttgtctaacagtccatgaaccgccacctgtttcacgtccttggacgttcccttctcctttgggcctttattccttttgatagcgaatctggaagcactgatattagcagcactcttcagatagctctttgcacaggagttggaatcgctgctgtgattggcagattgttgcttgcatccctcttcttgtgatcttggggggcttatggttgttcgggcaacataggatgctgctctgccctcttcgttgtcggagtcctgattatggcaatcttctgatgaacagactctctcccttggcaaagatgtaggttgcctccgtagtggagtactcgcgactcctcttctgtagttttcctcaagatgagcaaactgtcgctggaagcgatccaaccccacttgggtataggaagtgaatctgctctccaccttcaatgtactcctgaagcatctgtgggtggtactccaaaatctcccgatatatcatttctcttacatca

SEQ ID NO: 26222 - DNA, 282 bp, Setaria italica
  Peptide Sequence Number=SeqID_92196
tgcgacgacgcggaatcctcctcctcgacacccgcgggcggccgccgcgtcgtcagcctggccatcatgcgggacgccaacatccgcggccccgtgcccggcgccgccatcgcccgcctcaccgccctccaagagcttctgcgccgccacgtgcccggcgtgtcgggcaccatcccccgggccctcacccgcctctccgccctcatggacctcaccatctcccgcaccggcgtgtcgggccaggtcccggcgttcctcggcgacctccgcgcgctcaggtcg

SEQ ID NO: 26223 - DNA, 1351 bp, Setaria italica
  Peptide Sequence Number=SeqID_92197
aaccaaagttatgagcgcttcatcaaataaccacacagaaaatgttgacatttctgggaagacactatccagagaatcagatgggccgctagagcttgtaagtgtactgaagaaggttccatttgtatctgattaattacctgctgctatgtttctttgagaagaactatctgaactatgaagattcagcaaatatctgaagaaagatctctgaaaatatacttatttgagatgacaaacaggttatagaggatgaagaactaacctttggaggtgagggtcagcttactggttcttcttggaaaggtgggtttaccttggcaaatgaaagtctctctgggcaaattggaaacacagacgatggaaatagaaaatgtacaatacagaagttccgtcagtttgaaagcttctatgcaaagcttactgctatagcaagagagtattttcttcctccagaaatagctagatttggtcttataaccgaaagatcattgttgccatcactggatgtttctaatgaaggcaacccagagacgtggttcgtcatcattcactatctgggatgcacagcttgttctgttattgtgaaagatggggatgacctgggaagtctagtgcagtcccaccataatctgggcattaaggaggttggtgctgatgaaagtagtgccgaggctatcttcccttcaaacagaccctcggtaattctattcattgatagattatcccactcttcaaaagtcagggatgaaagcaaattcatcaacaagttactaagacagtatgtccaaactaactatccatttcatgtcagtactggagttctaagtagtggtacctccaaaacacgctcaaaaacagtcacttctttgaggaatgcaggtatttcaggtgcccattctgaaacaggaaggctgagtgcttgggcctctaagcttatggcacttggtgacaaaatgtcagttatggtggttaatgatggagataatattttgtacagaagttctagccatggtagtggtggtaatcctttatatgacgttttgactaagttgctacacaaaacaagaccagggcataggtcaaagaaaacaaggataagtttagttacaaaagacgttggcctaaatatgctgtcagatgattctaaaatccaggcagtcgagtctctatcagtcgaagggagtgaatacaaaaggactgacaattcagttgccactgcagataattctaatgatgatattactgaagtttctgtggatgaaaacactgcagaagaaactgaatatattgatgatgggcaagcaccaagtatacttgagaaaactccggcaacttaccctaatgaaca

SEQ ID NO: 26224 - DNA, 1042 bp, Setaria italica
  Peptide Sequence Number=SeqID_92198
ccggaccagcacgttcgccctcggaggtggcggcgcctcggcggcggcgtggacgcggctggtcagctccggggtggaggacgagttggtggtgttcgcgtcgggaggaggaggaggatgtgcgggcgcgggaccttcaggtctgccgcagggccactttttggaggcctgcttcctctgccggaagcccctcgccagcaaccgcgacatcttcatgtacagaggtgacatcccattctgcaccgaggagtgcaggagggagcagatggaaatggacgaggagatggagcggaaggagaacagcaaccccaagaaggtggcggctagggcgccatcccacgcgggcgtggagtccccgcctaggcctccgaaggcccgggcagggtcaatcctcgccggctaacaccacaaaaggaagctcagaaacgagctcgttgtgttatgattcccctccccaaaaccaaaagatcagatccccctcttaccaccaggaactaccgcttacagttacctataagggtttgtgttttttgtttaaaccccttgcgcctctggtaggtggcgctgtgaccctttcactgtcaatgcctgccggcctacctgtatcgctgatgatgtatagagatggaaggagaggaggagagtgctgtgctggtgtttaggactgcaggctgcagctctagctttgtgctgctgctgcttgctgtgttcgtttgtatgggtgttctggtcttcgttttgggggattttgtgaaattctctatgtggtagtagttggtgatggtgttaggcttaaggttttcctaatgctgatgaaaacatatggctatagaagaaatagacatatgaatggacccttgggagtccatgactttactcctgtgtcatcgtgcttttatttcttcagagatcctgtgactggcaacgagtcacaagaggacggtccagctaacttgtgatcgtctttgttcgtgtgaattgttaagttgctattgctgtgaaaatggttaataagtggcatgactagtgcgactgagtcgga

SEQ ID NO: 26225 - DNA, 408 bp, Setaria italica
  Peptide Sequence Number=SeqID_92199
gttaagatggtgtgtcattttttggtatagtttgctggaggcaatggaatatgcatatagcacatggaggagaatctggatcaacagatcaaggaggattacattgcttgaaagagcatgctgtttttgtatgaattgatattatccaagggctcgatcagcaagcgccaaccgaaagcgttgatgatggggttgtacaggaacaatgtgtgcttgtagagggatgaaattgaggctagcggacacttctctgaacactttacctgatggtgtgatgtactccttgaaaccactctggattagtcagtctagcaccttggtgctgccacatctgatactgttgcattgctggtccctgcactgtccaggctcacttctgatcaagatgggcaagtgcttattcctttg

SEQ ID NO: 26226 - DNA, 466 bp, Setaria italica
  Peptide Sequence Number=SeqID_92200
ccgccgccatgaaccctccactgccgcctaaccacctcatcctccccctcaacttccaccaccaccaccactacggaagaggcgaaaagccaggacctttcctccctcctctcctcatcctccgacccctccgccgccggcgccgccaagaagaagcggtcgggcggcagcagcggtgcgtcgagcatcccgtcgggggtgcggctggagggcatctccaagtcctacaagggcgtcaccgtgctcaaggacgtgtcctgggaggtgcagcgcggcgagaaggtgggcctcgtcggcgtgaacggcgccggcaagacgacgcagctccgcataatcgcggggctcgaggagcccgacggcggcaccgtcgtcaaggccaaggagaacatgaagatcgccttcctcagccaggagttcgaggtctccgcctcccgcaccgtcagggaggagttcttcagacgaaccc

SEQ ID NO: 26227 - DNA, 1016 bp, Setaria italica
  Peptide Sequence Number=SeqID_92201
aaagttaactaacttaaagaactaagaaaggaaccctttagaaagacaaccaaccaataataggcatgtgcaggagactctagatgatcgaccaaacttgactacttcatcttgtatttgtgaagcaagctcacgagtaggggctaaaaccaacactgtaggacccaacatcggattgttttggcatctcctcaaatgtataaaagccggaattaggtaccccagtgtctttccagaccctgtcttggcaatagctactatgtcccggttttgcagtgcaacaggccatgtttgagcttgaattggagtgggatttgaaaagccagctgcgtggatctctctcaggatctctggagggaatccagtagcctcaaaagtcataaatggagcaggaacattctcacccatagcagtgacttcatggtgctgacggtatgcatcagctgaaggtatgcctgtgaaatctgggggagcaaacattgttgatggcggtctcatagaagctccaatcggcaatggaccatgattatgtggatttggcactggatgtggaggtgccatgttataaccaccaaaattgtctggccgaggataaggcgggccatttcgcatgccctgcaggggattttgtgaaggcgggatagcagcaagctttggctgctgctggagagcatttgctccatcaaaccttccataggagtgaggatcatccctttcaaagtgaccatcactattacccatctcgaaacccatcggaggacgaactggtgatggaccaacatgatttggaactgcatggctgctaaccggttgttgccggtagttcgtatccactgcaccttgatgcatttgagcaggtgagttcataaaacccatgttattagtctcggccggagatgatccaccatgaagatgctttgcaggatacaatggcccaccgactccaggtacatttggctgattaacagctcctggatgttgatgactagaaggtaactgctggtttgaaataggag

SEQ ID NO: 26228 - DNA, 1329 bp, Setaria italica
  Peptide Sequence Number=SeqID_92202
aaacgaccaccaccataaccaccccagcgactcattccagtagcctggtttcttggacctccagtagcacctcgtgcagccatgtccagcagctgtggaggaacatgctggttagcaccttccaagagtttcaccaaatcaccagcatgtttccaatcttgttcagagatgaatgtgtatgagactccagttgccccagctcttcctgtacgccctatacgatgcacatagtcctctatcccagttggaaagtcataattgattaccactctgatatctttgatatcaagtccacgagcagcaacatctgtggctaccaatattggagccctgccagttcgaaactgattgagaacattatctctttcagcctgtgatttatcaccatgaatgcttacagcattaaaactgcgaccaatgccacgagcaagttggtcacacattttcttagttgagcagaatatgatgatttttgaacccctttcttgatctctcaggatctgctctaggcgtcgctgcttgtccataggtggaaccacctccacatactgagtgattgatttgttggcaacaagttcatcaatgctgccaatgttgacctggacaggatctctgagtaaatcccctgctatttttgtaacctccttgggccatgtggcagtatacatcagagtctgtctagcaggaggaatctcatccacaatcttccgtatctgtggctcaaaacccatgtcaagcatacggtcagcctcatcaagcacaagtaatgaaacctgatggaggctaatcttcttcatctccagaatatcattaagacgtcctggtgttgctaccacaatatctgctccacgctcaagttctcttagctgaggaccctttgaagcaccaccatataggcatgtgcaggagactctagatgatcgaccaaacttgactacttcatcttgtatttgtgaagcaagctcacgagtaggggctaaaaccaacactgtaggacccaacatcggattgttttggcatctcctcaaatgtataaaagccggaattaggtaccccagtgtctttccagaccctgtcttggcaatagctactatgtcccggttttgcagtgcaacaggccatgtttgagcttgaattggagtgggatttgaaaagccagctgcgtggatttaagcaactcatggcatgaagaagaggctctttgttgattcagtggcagagacaagaagcaggaagcctcagccagattttataatctgaaagaacatcaaatcctcccaatacttgtcagcagaaatagccacaagtatttcactacagtgcccagaa

SEQ ID NO: 26229 - DNA, 376 bp, Setaria italica
  Peptide Sequence Number=SeqID_92203
cgccgccgaacccgtcttcgcttccgcgggggccttcgcggcggatggcgtccagtcgcctgggcgtgcgtcgcccgccaatatggaggatgccggtggcgcggcgtcggggcacgccgcgcgaccgccgcttgccggctcccgcagcggcttccgccgcctcggcctccgcggcatgaagcagcgcctcctcgtcgtcgccaaccgcctccccgtgtctgccaaccgccgcggcgaggaccaatggtcgctggagatcagcgccggtggcctcgtgagcgccctcctcggcgtgaaggacgtcgacgcgaaatggatcggctgggcgggcgtcaacgttcctgacgaggttggccagcgagccctcaccagagca

SEQ ID NO: 26230 - DNA, 246 bp, Setaria italica
  Peptide Sequence Number=SeqID_92204
agttcactaagcttggtagtagctcacaaatggctagaacaaagttcgcagcacttggcttcattgtcctcctcagcattggcctctccaatgctgctagggtttctcgatatgtgagtgctgggggtggaggtggtggtggaggaggtggtgggtctggggatggttcgggatcaggatatggatctggttctggttctgggtatggccaggcaggcggatcttcgtgggggatcatatgctagg

SEQ ID NO: 26231 - DNA, 338 bp, Setaria italica
  Peptide Sequence Number=SeqID_92205
tcggcatcgccgcgctccacggtccggtgcatgtacggagcggcgcggcgcgccggcgtgtacacggcggtgaccgctggcgtggtcatgaaggtggtgatgagtgccatgagcacgaggatggcgaacgcctcctcgttgagcaccctgcggtcgcggccgatgttgaggacgatgagctccacgagccccttggtgttcatcagcagcccgagcgcgagcgcctcgcgcggcggcacgcgcatgagctgcgacgccaccaccgtgccgccgatcttgccggcgcaggacgtcgtgatcacgagcgcgaggaagccccacgacgtggccacccgaga

SEQ ID NO: 26232 - DNA, 449 bp, Setaria italica
  Peptide Sequence Number=SeqID_92206
agccaccactggcgctggaggaggtggcggcggggcggcggcggcaggtagagaagggggttcatggctctgcccctgggagagggcctgggcgcgcgcctgcgctatcgcgacctcctcctcggactccgcgaggagggcaatgggggcgccaacgggcgcggtcccgccggccgggacgaggacggccgcgacgatcccgtcgtggaacgtctcgacgtccatgtcggccttgtcggactcgacgaccaccacggggtcgcccttggcgacgcggtccccctggcggcagtccaggagacgatcttcccctccgtcatcgtagagctcagcgccggcatgaatatctcccgcaccttcgcccgcaccacggccatcctccgccgccggcctggcgccccagcagcagcaaggcgcgcgcgccccgggatggcgtggagggagagggg

SEQ ID NO: 26233 - DNA, 286 bp, Setaria italica
  Peptide Sequence Number=SeqID_92207
agatcatttgccacatacaaatgggcagcgccgtggtactgtacacatggatggtccgcggccacctccaccccatggttcagttcgccggccgcttggccggccacggcgcccccgtcaccgtggccatcgccgacgtcccatcgtccggcgactcccttaagaccgtcgcgcgcctctctgactcctacccatccgtctccttccacctgctcccgccggcaaccgcccgttccagcgacgaggccgaccccgacgccgaccccttcatcacgctcatcgccga

SEQ ID NO: 26234 - DNA, 791 bp, Setaria italica
  Peptide Sequence Number=SeqID_92208
cgtagtacacaaataaaggcaactaacattgccatgtatgctaagaagaaaaaatagactgtgtttggaacgaaatccatatatcttgtcggcagcagaaaaggaactagagaaatagctactagcacagccgctgaaggcatcgctttccaaatcttcggtgaccaattctttgacccatgcacggccactgagctcacatcgagttttcggttcccgaacgtttccaactcattggtgatctttgagtacgtgaaaaagggggagccgtccgacaagtaaccgtataccttgccgatgccactgatggctggccaatctttgccaccgggaaccaagcttcgaagcagttcctctctgccaacgacggcaagtgtttctggagcggagccgtgctttcccagccaatctggaaggcttttcagttctccatcctcgatgcgtaggtgcttcacatgtcccagcccacttacatcttgcaatcctgagcaatcgacgactgtcaaggcctcaagtgatggcagattagagatgcaagaaagcctcttgctgtattggacgaacaagtttttgaggttgctaacgctatggatcgcctcgatgctgtcagcagagacgacgcgcatgcttgtgagcagcgtggagcacctgaggcaagaggggagggatctcagctttgggcatctctccacatggaaattcaccagggaaggcaggtcaccagtttcaaatccttcccatgactcgaggctccccatgtcatccagatgcagctgctctagcttcggaaa

SEQ ID NO: 26235 - DNA, 295 bp, Setaria italica
  Peptide Sequence Number=SeqID_92209
ccccagagcacaggtttgcattgcttacaaggataagatatgcccgtgctttcaattctgcacgaacttgtaggctgtatagtcgcataagccttctttcttttcattgttctggtgcaatccagtgatgctcatgacgaactcacgtctttctttacaaatgagccagagtacataaacgagttaatcaggcttgtcaggtctgaagattttgttcctggacccatccgcgcactggctatgctagcgctgggagcacagctagcagcatatgcgtcatctcatgagcgcgcta

SEQ ID NO: 26236 - DNA, 268 bp, Setaria italica
  Peptide Sequence Number=SeqID_92210
tcagcatttgatgaatcagatggtgcagatggtagttccttgatcaatttctcaaccttggagacgacgtgcgaggtgtcgagcagcagctcgagaagctctcgcgcggcggtggccgcagcccgctgctcgagccccgcccggagcgcggcgagcgcggccgacgctccggcgcggaacccggcgaccttgtccctgaggtcggcgagcggcgccctcatccgcgccgcggcggcgtcgacgcccttgaggcgcgcgctgaggccga

SEQ ID NO: 26237 - DNA, 285 bp, Setaria italica
  Peptide Sequence Number=SeqID_92211
caggtaaataatatggttaagccttatggtttagatataatttttggagtccgtgaattgcaatatttgcgcctttcagctccgattacgagaacaacttcatggttaaggctgccctgtcagctgacctctgtttcaagcagtcacagttaaaaatatcatctgcagaggttgcctcttcagtaataggtgcctcgcttgccttttttcagggattcggtaatgttggctcctgggcagctcaactgatcactgaagctggtggcaaggtgattgctatcagtg

SEQ ID NO: 26238 - DNA, 303 bp, Setaria italica
  Peptide Sequence Number=SeqID_92212
tgattacacaagccggtaacaatatttatttcaatgggtggaataacatactattcaactaaacatcgaaaaaggaggatcaatcacacccatgaagtccccaatgtcattatcaccaagaggatgcttgttttattcgaaagcttaaaatacagactgcaggagcacgcaagctctaatttaccacaaccaccagtaaacatgggtgtctacttggtaaattcaagagcgtaaatgttgcagaagatgtaggttgactggaagccaccggtaaagcctgcatccctggcaagcttggcgtac

SEQ ID NO: 26239 - DNA, 712 bp, Setaria italica
  Peptide Sequence Number=SeqID_92213
ttttacacgaaaacgtacctgacatccatacattctaccgcatatgtacatcttgtttcatgagattgttagcatccctattcattccaccaggagcgatcactctcattggatccttttcttttctttccttggcatactttacatgcccgtcgttcctgtgtcatcaattgctaacaatctttggactcttgtagtacctcagtaacagggaccaacaaacgacactgacagacgaagccgccattgcagcgccggcaacccacggcggcaggcggaacccggtggacgggaacagcacccctgcggcgatcggtatgccaatgacgttgtagccgagcgcccagacatagttcatccgtatgcggaagaaggttttcctggacaggtcgatggcagtgatcacatcctccaggttgctcttcatgaggacaatgtcggcggcttcgatggcgacatctgttcctgcgccgatcgcgagaccaacgtcagctgacacgagtgctggggagtcgttgattccatcgccaaccattgccacggttcttccagacagctgaagttccttcaccatctcagccttctgctctggtttcgcttcggcaatgatcttttcaatcccaacctctttgccgatagcgttagctgtcccccagttgtctccagtcaccattatactctcgacattcatggactcgaggtatgatatcta

SEQ ID NO: 26240 - DNA, 661 bp, Setaria italica
  Peptide Sequence Number=SeqID_92214
ctgccgggtggacgcgcaacgtcgactacggccagtggctcgccggcaagaccttccacgccggcgacatgctcgtgttcaagtacaactcgacgttccacgacgtggcgtgggtgagcaagggcgggtaccgccactgcatcgtgtcgcccaaggaccgcgcccccgtgtaccgcagtggctacgacaccgtccggctgcctgccggcacgcactacttcatctgcggcgtgccggaccactgccaagccggcatgaagctcgccgtcaaggtctactgaccgagaccaacgaccaggcggctccggggccggccgggtgctctccaccgaccaccggcctgtgacgttgttggtatggtggtcgccgtcgtgtcgttgcacgttcgtgtgcaacgttctctctttgtgtaggtcgcgtgttgttggagttgcgtgggttcaattggcacgtactccatgtaacatgcctgcgatgagtaaaccctgatgcccttaatgttaatcaacaagcctggatcatggacgtacgttatctcaaggctaagttatcgatggtggagtcacgtggagagcaaaagaaagatgtcacaccgcagcgtgtatcgtgccagacgccatccttggaagttgactttgagctctacaaatggtcgaacaag

SEQ ID NO: 26241 - DNA, 1266 bp, Setaria italica
  Peptide Sequence Number=SeqID_92215
cctctggaggttgtgtgtccatctggttattctagcctacagcaatgaaaccatatcatactgcctttgacagtgtctattacatttctgtagatgaccttgattttcttttctttttgcagtagattattttatttccgtgcagtagtgaaagtttgaatggtgggccttgcagtagtagtagtagtgaatgtttgtgatcatgctagaatgtgatcaatgcggggcaacaattatttgatagaatcgcgatttggtttgtaacatgcgagtgtatgtgagtctttttgggctaggcggcgtgaagttaagagatcaaaatggtgcaataaatgagcaattgttattgtgcttactatggcaaacaacacacatgcttctaattagcatatttaagttcaacattgattcggaacatggtgagagggacacgatggttcgtgtgattcgagtaatagatagatagaagtatgcctcattagttctgttcacttggaaacaatatatgagcagggatgttctgcagagagcgagccagagaaactgattctcctatcttgaggaacatgaatgaggcaaattgttatcctgtacagactcttgttttcgtttaggtgctttgcttatctgcttgatttgtttttgatgagtttttttcatacaggttttccttctgctttttccgttttgggtgctgacagattgccatattagttactataatttgcatatattctcaacataaatgttttagataagagaagttgactctgttatgacttcaagttgtctactgtaaagagagaaaaaagctcctttcagattagtgatttaacactaacaacgtcagttatatgcatttactaatcactaatctaactgcatttactaatcactaattctaactgctaactttttctacatcttgtgcttgcaattgcaatgttggagcagaaattttacgtgtttccacactattggagaacgcatcccttttaaatcaaagtggccttgaacatggtagtccactaacaacgggaggattatattcaaatggagcagctactgacatgaatgggtggacatcagcgtttcaatcagaaagttcaccagcttatagctggcttggaggttcccaaggcagctcctctggactgattgtcaagaaacaatgaaggttgatatccctgtagacaaatatccaacatacaatttcgttggtcgcatccttggtcctagaggaaattccttgaagcgagtggaggc

SEQ ID NO: 26242 - DNA, 458 bp, Setaria italica
  Peptide Sequence Number=SeqID_92216
ctaaactaaatgacctaaacgttttggtacggaataagtatattgttgctatcttttgaaccttacattaacaacaggacagctaaagtataacccatgtgctcaagaatagatgtatcatcactctttcaccataatcctataaatgtatgaattctgttgtttttcacttactgtattagctactatctttcccatttccaacgatctttagttagaaggttgtaagcttctgatataatcaacttgtgaccattgcagagttcaccagcttatagctggcttggaggttcccaaggcagctcctctggactgattgtcaggtaaacaatgaaggttgatatccctgtagacaaatatccaacatacaatttcgttggtcgcatccttggtcctagaggaaattcctttgaagcgtagttggtaggtctaaattactagtacttgtccgtcgtatt

SEQ ID NO: 26243 - DNA, 534 bp, Setaria italica
  Peptide Sequence Number=SeqID_92217
gatggcctactcgccctcgccgtccacaccccgcatccccgcgcatcgccggcctccgcgcgccatccgccgccgttgccgagcaggagaagtaccttgccgaactgctcgcggagaggcacaagctgggccccttcatcccagtgatcccgcatagcgtacggctgctgaatcaagagttcaccagcttatagctggcttggaggttcccaaggcagctcctctggactgattgtcaagaaaacaatgaaggttgatatccctgtagacaaatatccaacatacaatttcgttggtcgcatccttggtcctagaggaattccttgaagcgagtggaggcaaatacagactgccgcgtgctaataagaggcaggggcagcattaaagatccagctcgggaggaaatgatgcgagggaagccaggatatgagcatctgaatgaacccctccatatattggttgaggcagagctgcctgttgaaaatttaatttagaacgacttacgaccttactaatagacaaagacccgtagaa

SEQ ID NO: 26244 - DNA, 1397 bp, Setaria italica
  misc_feature (1372)..(1397): n is a, c, g, or t
  Peptide Sequence Number=SeqID_92218
cagcggcggaagagatgtcgtcggggcggtacatggcctactcgccctcgccgtccaccaccccgcactccccgcgcatcgccggcctccgcgcgccatccgccgccgttgccgagcaggagaagtaccttgccgaactgctcgcggagaggcacaagctgggccccttcatcccagtgatcccgcatagcgtacggctgctgaatcaagaaattttacgtgtttccacactattggagaacgcatcccttttaaatcaaagtggccttgaacatggtagtccactaacaacgggaggattatattcaaatggagcagctactgacatgaatgggtggacatcagcgtttcaatcagaaagttcaccagcttatagctggcttggaggttcccaaggcagctcctctggactgattgtcaagaaaacaatgaaggttgatatccctgtagacaaatatccaacatacaatttcgttggtcgcatccttggtcctagaggaaattccttgaagcgagtggaggcaaatacagactgccgcgtgctaataagaggcaggggcagcattaaagatccagctcgggaggaaatgatgcgagggaagccaggatatgagcatctgaatgaacccctccatatattggttgaggcagagctgcctgttgaaattattgacgctcgcctcatgcaagcccgtgagatccttgaagacctgttgaagcctgtggatgaatcgcatgacttcttcaagaagcagcagctgcgggagcttgctatgctcaatggcaccctccgtgaggaaggaatgcagaggtctggttcagcatctcctttcaacaacagccttggaatgaagagagccaagacaagggggtaatgatgcaaatatcctgaagggagaatcaaatcatctgttctgagaccaatcctgagtacgaatatggggttgccttgctggctatcggcccaatacggtctcgcgccaccagcatcggggcggcccgtacctgataaatacatatatctggagttttgtttcctgctaccggggagctttggttatcgcgacatagggtgttgcgctatatattgggttgtgcagggttttgtagcaatgtggtttgtgttctgctcatttggagcttgtgaactgatgaatggagctttggaatgctctgtgcttgtatttatttgtcttttggagactgactgtaagtcgtgttttgtgcgtaactgtacgagataagcatggtggcttgcgatatttcttaatttggatctgctttgcggatccggaataaaggctgcattcttcagcagcgttgaactgttgaaaactaaaaaaaaaaaaaaaaaaactaacgtaaagaacannnnnnnnnnnnnnnnnnnnnnnnnn

SEQ ID NO: 26245 - DNA, 241 bp, Setaria italica
  Peptide Sequence Number=SeqID_92219
tgtttttgtatttattgcatataacagtacatgaaccatccgatctggaaaggataacaccaccacaagtcaccctttggttttgaacctagctggacttgcaattggatggtcatcggttaaaacggaggcgaaaggaagacacgctagggagagccctcgttgcttgcgtcgtcttcggtctcgtggcctgcccatctgattatggagtagaggaactccttgaggttcaccttcccgt

SEQ ID NO: 26246 - DNA, 210 bp, Setaria italica
  Peptide Sequence Number=SeqID_92220
cgacgggactttattgtcggtggcaattggaagctacatggagcactatgcaaccaactttacacagtagtgcatgaagttttggatgccattactgcccttgagactacaaaaccaagatgcagttctcgactcctggcattgagttccttgagcatagctgttgaaaaagccaagaatttgctacagtattgctcagagtgcagcaaa

SEQ ID NO: 26247 - DNA, 589 bp, Setaria italica
  Peptide Sequence Number=SeqID_92221
gagcgtgaagggctacgatgtgatcgcggacatcaaggcggagctggagcggcggtgccccggcgtggtgtcctgctccgacatccagatcctcgccaccagggacgccgtcgcgcttgccggcggcgccgcctacgcggtgcgcacggggcggagagaccgccgccggtcgcaggcctccgacgtcaagctcccggcgcccgagtacacggcgcagcagacgacggcgtactacgggcggctggggctgagcgcgttcgacacggtgctgctgctgggcgcgcacaccgtcggcgccacgcgctgcagcgtcatcaagagcaggctctacgggtacggcggccggcccggcgcgacggaccccggcatggacccggcctacgcgtccatctacaagaagtacgtgtgccccaacatgccgtcgtcggacaacaacgtggtgttcctggacgaccagtggagcgcgctcaaggtggacaaccactactacaagaacatccagctccgccgggggatgctcccctgcgaccagaacctgtacaacgacggctccacgaggtggatcgtggacctgctcgccaacaacgac

SEQ ID NO: 26248 - DNA, 346 bp, Setaria italica
  Peptide Sequence Number=SeqID_92222
cgtgacgcgaagtccactgcgccccccagactgatgccaacaaacccacctgctcggtgctgctgattccctgaccggactcccaggccccagcggagcccctccgtctccatggccatggacgaggcagccgaggggagcaggctgctgttgcaagaagagggtggaggtggagatcaagagccgctcctccttccacaggatgctggtcttatcacaggtgatggatctgttgatatcggagggcgtcctgcaccaaagcacacaacaggcaactggagagcatgcttttctattctagggaatgagttttgcgagagactggcttactatggaattgcaaaaa

SEQ ID NO: 26249 - DNA, 706 bp, Setaria italica
  Peptide Sequence Number=SeqID_92223
ttactttacggttacggttttaccggttaccgttacggtaagccgcggaggagcccggcgaggcggtgatccgagggcgatcggaggcgggcgcgagcggacgccggcgaggtgtgcccggcgtgctaattccggggaattcggaggcggggcgcgagtcgacgccggcgaagatttgtgttgggggacaagccatgagcagcgcaaccaccggttgttaaccacgcaacccctgttgtgaattgcaagcaaccgaagcgaggcgcaagaaatggtgttccagaagaggtcgtcgtcggagatggagtcgtgcggtggaggccaaatcgcggagatgccgcgcgttcccaaatccgcgaggggcaagagatcggcccggaagaaggaggcccagagcccggaccagatgacgatgtccgcattcgaccttctcgcgacggtggccgggaagctgcttgatgagggcgagggttcgctcgggaacacgagcgccggtgccccggccttgaatgcgtgcgtgaagcaggagcagtgtgatgaggaaatggagcatttcaagcatgatgtgacggatcaggatagttgtaatgagagtgcaattctccccacattgtgtttcagctggtgaatcatgctcggaatgacgatccaaaggcgaagtttgaagcccaggacaaggaatcctccatgatcagctgtaccaatg

SEQ ID NO: 26250 - DNA, 1640 bp, Setaria italica
  Peptide Sequence Number=SeqID_92224
ctttaaattctagcaagccagtcagggcaaagcactaggcagtaaaaggtattacattacactgtttgatcaccctctcatgttgcccctactttcaacaacacatctaagtcaacaccatgattcattcttgatacgggcgaaaccataagagcagaaaaataatgaaagaaagaaaagaaaagaaaaggtagcaggactggatcaccattaccatgcttcatcaccaacctctagattctagcaacactcctacatgacaacacatcccttggtgttctcatcactgaacatggtctccacatccccattgctggccgggtaacccgcgctgccaggatggggatggtagtagtagttgtaagggttgtagtagccagtgtaggggctgatctggggagaggagtggtacatcatctgcggctgctgctggggctgatgcatcatcatcatgttgctgttcagacccctcaaattgttcatcatcgctgctgtggccgcagggtgatgatggtacccctgcatgctcgccatgagattgttgctctgctgctgctggaggtggtgctgttgctgaagacctccatagccggcagcagcataggacgggtggttgaagcctgtgtagccttggaagccaggagcagcattgcctgctcccaggccatggctcaggcccaacatgccagacatggcaccagtgttcctctgggcaccattggccatcttggcgtttgccgccgccgccatgttgatcacattcgcattcttctggttctgaacgccggcacccatcttggcatttgctgctgccatgttaatcacattcgcattcttctggttctggtggtgattagctccggcacctccggtgacattacctcctttcttgccagtgttgtggttattgttggcagcagcattgttgccgttcttattctggttctggtggtggttattgctgtggaaccccagctggctcatcttgtccccaaggtagcggagctcctcctcatagtcatcgtcaaactcatcatcctcgtcatcatacatgtcatcatcctcggagtcaagctcagggagctggtgcttgttgttgtgctggctcttgaacgccttgaggccctgcatgaggcttccaacccctccttgcttgccctggtccttctggccgccattgttgttcttgttgttgtggcagtccttccccggattggcaccttgcttctgctgctgttggtgctgctggtggttctgctggtgctgctgctgcttctgctggttgttgcccttgtggccctggttgccgccgccgcccttctgctgcgtccacagctccgcgtgcttgccgcccctggtgagcttccggatcaaggtctccgcgtccacgtcccccgtcaccgagaccttgtggttgtccacatcgatggccaccgagtacacgccttcaatcttctggagcagcttcttaaccttgtgcttgcacccgtcgcagtgtatgttcaccctcagcacatggttctggatcttgaccagcttgaactcctcatctttggtcattctgccggcggggcactgtgagcaggtcgccgcaacgaacgagacgggagacaccgcttggtggtgggggaagaggagag

SEQ ID NO: 26251 - DNA, 276 bp, Setaria italica
  Peptide Sequence Number=SeqID_92225
gcccgcttatatcattttttctataaaaaagacatgaatggctcggctagatgaaataaccgagccagaacagaaaaaaagtaagaacaggtagaaatcaaaaaatcttagttaagaggggtcatgtaaagaacaggttccaaatcacgatcaattcccttttcaaagcctgctgcagcagctcgggctctccctgcatgccacaaatggcccaacaaaaaagagaatcctagaacaaaatgggaatcgctaaccaacttctaggagagacattaa

SEQ ID NO: 26252 - DNA, 198 bp, Setaria italica
  Peptide Sequence Number=SeqID_92226
ccgtcagccggttgggccgtccttgcgcagcgttttgaccggagatttgaggatcgggcaggcacttgcgcagggcagagaagaactcgatgctctcgccgttggccacctccctcccgccgccgtggcgcaggaggagacgggccgcggccgacgtgaagcctgacgatggtttcctcgtcgtccttgggtgcggat

SEQ ID NO: 26253 - DNA, 809 bp, Setaria italica
  Peptide Sequence Number=SeqID_92227
gcccccccagcattttcaattttctgttgaagttctgaagcctgatctttaagtttgctcgaacactttgtgagtctatttagttcaacttgctcactagatatgatgccatccagctcattcattctgcgaacctcatcagctttgggttgtgaagcagctttcagggaatctagtcgcttttcattgtaaatgtactgtgcattcatactctcaacctccttcttagcttttgcaagttccatttcaagacgggatttagcttcttccatggaccgatagtgtttttggcagcattcatttttcacgcaacctgttgagttcgtcaactaggttgttaagttcattctcagctttctaatagcctcttctgaaatgcaacctctgatagctgttcccatcatgccacgttgtaccctgttacccccaccactcatggtacctgacttctcaaaaagttcaccacccagggtaacaacccgacggaactccttgggtgcactatatgcaattcgcgaagcctggtcaagatcgtttgcaacaacagtattccccaagacatggaagaaagctaacttcagcttctcatctttaacctttaccagatcaaagaggcgtggaactccttcaggtgtttttactttctctttaattttatggagaaggtgtgtttgtttttccaggatcaaacaagttacggtttcctcacggttccttctacgtagtaactcaatacaagcttgggccgaatttattgtttcaacaacaatatagttaagcccagctgtagctgctgttgatatggccac

SEQ ID NO: 26254 - DNA, 275 bp, Setaria italica
  Peptide Sequence Number=SeqID_92228
gagggaggtcggcgcggattcccctggcggcggcccacccccgcacggtcgggcggaggcgggcgccccgcatcccgagcagggcggcggcggggcggcatttagcgacgccaatacagccgcggccgtggaggcgcgcgcccgcgcaggagtacgccatgctcatgctcggtcccgctcgccgccgcgccgcgctcctccgggagagggtatggaggcggaggtggatcgaagagattccggcggggaattggatggattcgggtgggaaatag

SEQ ID NO: 26255 - DNA, 495 bp, Setaria italica
  Peptide Sequence Number=SeqID_92229
ggggaaccgaagccggagatggaggtcggccgctactgccgcgatcccgcccaagggtttgcttttaatatttaaaattggcactttttagttttggtgggcaccataaatgatcaatatggggacatctgatagattccttggagtgctaaatgctgcaccgggtttgtcccaaatcatttaagagcttggcaggcgacaggcgtagcaacgggaatctactcctcaccattcagaaatcacatggaatctacgatgcaagaaacatctttgagaaccgagaaaattgtttagaaagtgaaaagattgttacaacaatgtgctttgggtgttaaggacaactatttctgctagtaaacatgactacaagaagacaataagacgataagttggcatcccagcataacccagataagaagtttgacaacaaacagaaatgtttcatcaaactgctcttggttatgagaactcagtgattgtgatgagcatgtggtg

SEQ ID NO: 26256 - DNA, 322 bp, Setaria italica
  Peptide Sequence Number=SeqID_92230
cgaccgccgccgccgccaccgagctcgacacggtcgccgcggggcggcggatgtcgtacggcggcggcaaggcgtcgcccggggggcggcggacgttcctgccgtaccggcaggacctcgtggggctgttcgccaacgcccgttctgagccccgacgcgccgaaccgtcgcagccgtggaggacccgttccaaacagtgagattcaagtttgaatctgggatttgaaatttcagacgatttgacctggtgatcccctgcaaaccttctttgtgaagaccagttttagcaatttagcatacgtgtggggttaaagcggccaag

SEQ ID NO: 26257 - DNA, 249 bp, Setaria italica
  Peptide Sequence Number=SeqID_92231
tggcagtcaagtcttgcgtagcgatgctgatacctttggcactcttgcttcttgcgggcagctcctcagtagtggctcagctggaactcgactactacagcaagacatgcccaaacgtcgaggcgatcgtccgcgaggagatgcaaaagataatctccgccgcaccaagcctcgccggtccactcctaaggcttcatttccatgactgctttgtcaggggttgtgacgcctcggtcttgctcaactcca

SEQ ID NO: 26258 - DNA, 854 bp, Setaria italica
  Peptide Sequence Number=SeqID_92232
cgtttcagaaatggaacgtgctgaaagggaatcgaaatgtcgagaagaagttcgagcaattttatatatgctgttaagagatgaagtaccatcagagaggaattctccattctcagcttctgggagctttccgctaccttgctaatctcgcttcggagggatgcgttttctgcggtcagtagctctactttcctagccagttcctcagtctcagcctgaaatgatagcaaaaccaacatgatcgattgatcattatgttatgtaagaggtttttgaattgagcaataaatgaagaactctacaaactgaatatggttgttttccactcaagggacgtgccaagaaacttttctgaatttagaaatagtttttgaaagcattaacagcatgcatgacacggctgtcttgtttacctgcttcctcagccttgaacgtctagcagactccctatttgactgcttcctcctttcacgcttcgattccttgtcatccttagcttgccattcggttgactgcgcaccactaaatctgaaatcactaccagtactcacacatggtttgattgccgtatctgtaatgcgcacgttggacaaagttgctaatcttccaggttgtcctgttttatcattaggcgctgaagctccacatgtttcagagcacctgatgtagtcctatcatccaagctccttttcttgggtgttccactcatcttatggttgtttctatcactggatccttctaggctgtaatccccacttgttttttcactgttaccactgccactcgacacagcagttccatcaatttccttcagtttcttattcgaactgttgtccatgctggtggtttaccaa

SEQ ID NO: 26259 - DNA, 286 bp, Setaria italica
  Peptide Sequence Number=SeqID_92233
gccggcggtggactcgacctccccgccgcacctccgcaggagggacgacgccaggcccctcctccgcagcaccgacctcgcgcacggcaacatatcggaggcgctcccccgagcgtgatccggcccgcgcgcgggaaagggggaaccctagattcggggagccgcggcgaggggcgtcgccggagaacgcgccctggagggagggccggaggagagtgaggaaggattgattggagaggcgtggggaaacggagagctttggttgcgggaggaggccggatttggg

SEQ ID NO: 26260 - DNA, 261 bp, Setaria italica
  Peptide Sequence Number=SeqID_92234
acatatttaccgtagtatcatatggtcaaatcatggactaattaggttaatagattcgtctcgcgaattacgcttcatttacgcaattgattttgtaattaatatatattcaatacttctaattaatatcaaaacacgaatgtgacggggactacatgtctccaaaacggggccttactgtgtgtgtcggcttattcaagtgtgcatgtctgaaggtcaattcacagttttttaaaaacagtaggaagctgattcagctag

SEQ ID NO: 26261 - DNA, 1178 bp, Setaria italica
  Peptide Sequence Number=SeqID_92235
tacggtgccgcgccaattacaaggcgctccaggtacaggaaggagattgaagcccttggcaacaccttggttgatcggctgagaaacggatccgagcattacatcgcgcttcacttgaggtacgagaaggacatgctggcgttcacagggtgcaaccacaacctgacgctgcacgaggcggcggagctgacggacatgcggctcaaggtgcggcactggaaggagaaggacatcaacagcgaggagaagcggctgcaaggcgggtgccccatgaccccccgcgaggccgccgtcttcctcaaggccatgggctaccctgccaccacgaagatctacatcgtggccggcgagatctacggcgcgcacagcttggacgctctcaaggccgagtaccccaacatctacacgcactacagcctcgcgacggtggaggagctggagccgctggagctctaccagaacaggctcgccgccgtggactacatcgtggccctgcagagcgacgtgttcgtgtacacgtacgacgggaacatggccagagccgtgcaggggcacaggagattcgaagggttcagaaaaaccataaaccctgacaggctgaagtttgtggagctcattgacaagcttgatgaaggctccatgacctggggagagtttcagactgcagtgaggaagcaccatgagaacagactcggaggtccgtatgacagattacgtggtgaaagtccaaggcaggaggaatacttctattcgaacccaatccccgggtgcctctgcaaaaaggttcagaggagcagatgatatagatttttctccagtggaaatgattcagtcttcaaatatactggcagattcagcagctgcaagtctgcaacacccgcggatgatggttggtgagtgaagcttcctccgcatggcagggatcacccgatacagggagagctagcaaaccgccagagaccagcagttttgattatttttcctaggctgacaacagatgcagctgaagcctcaagaaggcaggggccaagaagaggagtgcattgccaaagaatgttcagtccgagggaagatgagaggagcaggatgtacctgaaaacttaatgtataatcagttaacaggataaatctgaatgaaatgcaaatcatagaacgtaaaaaaaaaaaaaaacaaaact

SEQ ID NO: 26262 - DNA, 182 bp, Setaria italica
  Peptide Sequence Number=SeqID_92236
caagtgcttgcatgataatgatttgcgtagaaaggtaacgagccacaaacatcagaaaagggtggtgtgagtctcttagcatgcttgtaacaaagcaacactgaactgacgccgaatttcgggttgtgttctttttttattattaaagctctaaatcaccaaatttcatagcatattaacgt

SEQ ID NO: 26263 - DNA, 381 bp, Setaria italica
  Peptide Sequence Number=SeqID_92237
ggtcgccgcaggaggtgccggggaagatgtcgcacatgcagaagctgaggcagtatgcgcagaagacgaggcacttgtttgggcattcctttgggcacccgacgtagcaggccgggccgccctcgtcagagcaggacacctggtagttgcgcttgtgcccgaacgtcttgggggccagcatcacgaacctggagttgggtgggggcttccgccctcccttcggcggtatccccgccgccgacgccacgccggcaagcagcgccgccgccagcaccacaacaagaagagccatgccgccgcgcctcgccgccatcatcacttacttacctatagttggccggccggcgagaggtggtgaagcgaagctaagctttgcggtgg

SEQ ID NO: 26264 - DNA, 2379 bp, Setaria italica
  Peptide Sequence Number=SeqID_92238
tttttttttttttaactataaacagatcaacattgtttcacattactaaagttatcactacagctaaaatttggacaaggatacagctaatccagtaatccatcttacaaccaagacatagcaatcctgaagatacaaggcaaaggatatacagaacatgaacaacacaaaatggtacagatgtttcaaccaatggcatatcctagagcttgctaattgttggtcggtagtgcagaaagctgaaaagatacagagcaatacactttcagactgacctgattattcaagttacaacaactcctacatttttttggtatctgacacgcacctactcatcacataagttcaactagtttgccacaataagctcatcttcaggatccgcattttgaggttgcatggtcaattcatcatcagctgcgctgaaatgatatttctctccaacagctctcagaagctggtaaacttcaaacattgtaggtctttccttcggagaagaaagcacacaagagcacgcaaccttcatgcattgaagcagctcagcatcattgtccttcccaatcaaggacttgtcaaccgcatcctgaagtatagagttgtttgataggtaagttatccaatccaccaaactgcctttgaagttctctggggcatttgacacatgtgttggctcttcaccagtgacgagttcaagtaagatgactccaaaactatagacatcccctttaggggtggccacaagggtgcgtgtatactcaggagctacataccccaaatcaccaaactcaccattgacaaatgtgctcaggtgggtatcaatgggattcatgagccttgccaacccaaaatcagagatcttaggctcatagtcatcatcaagcaatatgcacttcgaactaatgttcctatgaagaatccgggggttgcaactgtgatgaagccatgccaatcccctagcagttccaatggcaatttttagcctcagtgaccattctaaagcctttttctcactgcttcgttggtgtaaatgatcgtaaagagaacctttgggcatgtacttatacaccaagagtctctcattcttggcaatgcagtatcccaaaagaggcactaagttacgttgtctaacacttcctagcgttgacatctcagatgtgaattggttctctgaatgctgagtgtcctgcaacctcttgatagcaaggaatgaaccatctggaagtgttgctctgtacatggttcctgatcgaccagttccaataatgttctcctttgtaaaatcccctgttgctttcataagatcattcaacttcatctttgaaaccgatttctcaaacatagataccttcactccctttgctcccttaatagtctttgcccacttattttcttctacatcctttcccttcttattcgcaggcatttttcgtacaagaatgaataaaataacagcaactattattaaagttataactgcaccaccaacagcagaaccaacaattacccctgtacgactgcttgaagttgcagtgcaatcattgctcagaggcttcccacaaaggtcttgatttgcgaaattggaggatggaaatttgctcaaagatgaaggaatctgccctgacaactgattgtcagcaacattaaactggtttaggcgactaagagcagcaagctgacctgggagcattccagtcaatttattatgctgtaagttgacagcattgagatacgtacagttagctagcgcctctggtatgtctcctgagaagctattatatgacagatcaaggcttgtaatgtactgcagccgcttcgagatatcagcagggatcgtgccggaaaggctgttgctcgagagatccagtgaagtcatgctgctacaattctcaagtccatcagggaacccgcccttaagacccatgctgccaaggtgaagagaaagaaccttgttttcattgggattccagcagtccacgcctctaaatccacatatggatccctcagtatggttgttgaatgtccagtctaacttgttgctgggatcaatcgatgctttcaccctcttcagacattcgatgtcacttactgcaccatagcaaatctgacataggatagaacagaggagtactgggagaagagcagcccagaaacgcccaacagccatcttgatgttgtctacttcccgaatgctttcaccatccagagttacttagtcacaaagcataacgattgctcagtgcccagagggatgagatgagtagcatcagcaagaaaacctctgcgttccgccgcgcgccgcgcctctccgctgccgaatcctacctcaactaagatgctctcgcacccgccgagccgagcggagccccgccgtcgatctcg

SEQ ID NO: 26265 - DNA, 1079 bp, Setaria italica
  Peptide Sequence Number=SeqID_92239
gtggctggccaagtacggcgcgctcctgcgcgggctgtcgcaccacgcgccgctcgaccttgccaaggccgccgccgccggggaggtgcactgtttcggccacgccgtggtcggcctgcgcgcgcaccgggagctcatgatcgagcgggagcgcagcccggacggggtcgggatgccggatttcacgcggttcctccggcgcgcgctctcgctgccccgggacgcgccgacgagccccggcggcgccaccggatgcaagccccgcctgctcatcgtctcccgccgtggcactcggctgattctgaacaccgaagccgttgtccgcacggcggaggaggtcggcttcgaggccgtagtgagcgagctggacgtggccgacgacgacgtcgggcgggtggggcggctgatcaactcgttcgacgcgatggtgggcgtgcacggcgcggacctgaccaacatggtgttcctgccgacgggcgcggcgatggtgcagatcgtgccgtggggcgggctgcagtggatcgcgcggatggacttcggcgatccggcggaggcgatggggctcaggtacatccagtacgagatcgctgtccacgagagcagtctcaaggataagtacccgagagaccacgagatcttcaccaacccgactgcgttgcacaagaagggcttcaagttcttgaggaacacgttcttgaaaagccaggacatcatcgtcgacgtcgaccgcttcagggcggtgctgctccaggcgctcgagaacctctcgcagtaattcgcaaaagaagaagctctcgcagtaggaagtagttgcgtgcgcaactagttgcatgcatgcgtgcgcacatgtgtagatggatatctgtatttttcacacaaaaggtgactgtaagaatggtaataggcgacaaggaatccaacaaaaggcaaaggtcgacgatttacactgcacatacgtaaaaacaatatatagagagagatcgactgtgttataatttttactactcatacgttcattaagtatttgtagcataatatatccatttctttagaaaactaaaaaaaaaaaaaaaaaaaac

SEQ ID NO: 26266 - DNA, 2035 bp, Setaria italica
  Peptide Sequence Number=SeqID_92240
gaatgagcccaaaaaattattccagacaactttgtctgagcatagaggtactagagacagtcaatcaagactgaacgaaattccagatagatttgggagatgtgtggtggcttgccattggccatagttaccatggcaggtctcacagcatccaaacccttgttgaaccagaacgactggttggatctttgcaactctttgtttccagagccagaaagatgccgtaaaccagaggattttatgaggataatcaattactgctacaatgacatgcctagtgatatcaagatttgctctttgtatttaagcatatttcctaaaggccgcaaagttagtaggaaacggctgatcagaagatggatagcggaaggttttgttagggagaagcaaggtttgagcgttgaggatgttgcagagacatgctttaatcagctgattgaaaggaagataatgcggcctgtagagcacagcagcaatgggagggtgaaaagttgccaggtccatgacatggtacttgaatacatcatttccaaggcagccgaagaggatttcatcactgtagttggtagccactggtccatgccaacacgtagcaacaaagttcgtaggctttccctccacaacagtgaccccaggcgtacaaagagcgtcgataggatgaacatgtcccatgttcggtccctgactgtgttcgggagcataggaacaaaactagacaagttcaaatcactcaaaactgaactggtccaagtactagatctcgaaggctgcacaggtttgagggagagccatgtcaaggtctcagacatatgccaaatgattcaactcaagtatctaagcctgcggagaacagatattaaagaacttcccccaaaagtttccaagctcaggaacttagagactctagatgtaagggagacagaggttgatcagctgccggtaactataggacagcttgaacggataaataacatacttggtggagataagagaacacggaaaacactgaaagttcctaaagagctcaagggaacaatgaaaaccttacgcatactgtcagggattgagatagtggagggatcaacaactgcatcagacatcggttactttactgggctgaggaagttggcaatttacaggatccacaagagtgatgagatatttagagatttgctctcctctatccagtacctcagtggttattctctccaaactcttgtaattgatgacaagtcatctgaatttttcgaaaccctggactcaatgtcatcctatccaacagatctgagagctcttgagctgtctggcaagttgcttaaactgccaaagtggctcaatggtctcgaggagctcgtcaagttaactctttcagggacagctctccggacagataacttacttctccttagaaatctaagtttactgttttccctcaccttttcgatcagcaagaaccatgatcctgaaatagcagccattctcgagaaaaacaagtctggttcaggtggggagatctttgtcccagctggaggattcagaaagctcaaactgcttcgcatatttgttcctcttcttccatcgctcaactttgcaaagaatgctacaccacagctagaaaagcttgaactgcgtttcaaaatgttggaaggtcttcatggcctggatgaacttggaatgctccatgatgtgctcttaacagttgatacccaagcaaatgagatgacaaaatcgagagttgagtatttgaaaaaggagaaaaccccttcatcgaagtacaccctcattgtgaacaagtatcatgattgattattggatctcatcccaagcatattatgttctgtcaccaaggcatttgcaagctcaccatttatgtaacgtgagtttcatttttagttgagatctttttcttagtgttcctaaattctttgatcaattagagaattggtgctgttacttgtaacagtcaaatttgtgcgttgtgtccttgtgaaaaaaaaactcctatgtatgtttggaataactgtcaaggtcattt

SEQ ID NO: 26267 - DNA, 700 bp, Setaria italica
  Peptide Sequence Number=SeqID_92241
gagaggctcggcactgcctacgacgccgcggaggccgccgcggtggcagcgctagccgcggcctgcgtcggcgagaatcccagcctccggccgtccatggccgacgtggtgcggaccctggagcagggcgcgcagggatccatctccgccgtcgggaggagatcggacggccacgggaaggtgtgagtcacgaggggcgaagtcgtcgcgccctacgaggcgctcagatctggcattctggctttgccgagttgttaacttgcggcggtgaagtgcgtgcggcacaaacgtggcgcccggctactggttgctaggagaacaaagcgttattagtgggcgagcatatcaaaaaacgatccaaaaaaaggggaaagaaaagcgttgatttaaggggaaaggtttggaggagataaaaaggcaagggttcgtgtgctaatgggggaatttccatcgtattacgccaaagcggcatccatttgggagagatggaaaaagaatggatcgtacatcgcgcgattccaagattttgttgattcttgatttcttctgttacctttgtaaaagtacattggggtgctcttgacttatttgcctcttgctgttccaatttctccgcgctgtttgtacctatagttcagctagatttcatctgcattgggtttaataaagagcttggtctgtgtgtagaaaaaaaaaaaaa

SEQ ID NO: 26268 - DNA, 133 bp, Setaria italica
  Peptide Sequence Number=SeqID_92242
taacctatatcctgatcctttctgcctttccatgtccctgaattctgaatttctcatcatataactaacagtcctgtacagttaccgatctagaacaactgaaacgccgagaagatgcaatgcatgtgttcct

SEQ ID NO: 26269 - DNA, 243 bp, Setaria italica
  Peptide Sequence Number=SeqID_92243
cacaaatcgcttccagcagtgtggacatatggtccagaagaccattacaaagtcagatggtggcatgtgttcagccacatcactttttcttgcacgagtcccatctgctagccatgtagtttcctttgacatttcttggggatcacactgtcttttgatgtcatatcgagatcgcttcacatgatcacacaatatcgtatgagcttctgaaaccaacttgaaagcagcttgagcaccaggaag

SEQ ID NO: 26270 - DNA, 479 bp, Setaria italica
  Peptide Sequence Number=SeqID_92244
ttgaagtcccaatgtaatttatgagccaatttgaccagcaggcttgttaggaaggcgtccattaacagaaggattatatgaaacatccaatggaactgatggtcgaacgaattcagcaggcagaggtccactgaagttgttttcacctacatatatatactccgagttcttatatggaagcaatagtcttattgcgcctgataagttgtttgatctcaaatccaggtactttagcttgggcaaggttgggagagtattaggaagctgagttgtgagcccacattttctcagagataatgttgaaaggtttgcccaatttgctatgaaatcaaaagaagaatgctttccctcaagatcaccaagcatcctgtaaacaaatcccaatcagagttggcagtaaatgctgcatatcgatatgaaaaatcagattgaaggcttctactgaatgatgacaatgtcttctcagtttttacttacta

SEQ ID NO: 26271 - DNA, 701 bp, Setaria italica
  Peptide Sequence Number=SeqID_92245
tttcatgtgaaggcaattcagggttgttagatctgtcaattgttccgcttgtatcaattgaagtcccaatgtaatttatgagccaattttgaccagcaggcttgttaggaaggcgtccattaacagaaggattatatgaaacatccaatggaactgatggtcgaacgaattcagcaggcagaggtccactgaagttgttttcacctacatatatatactccgagttcttatatggaagcaatagtcttattgcgcctgataagttgtttgatctcaaatccaggtactttagcttgggcaaggttgggagagtattaggaagctgagttgtgagcccacattttctcagagataatgttgaaaggtttgcccaatttgctatgaaatcaaaagaagaatgctttccctcaagatcaccaagcatcaggtgttctaggttgatcaaattagagaaaaaatttggaataggtccttgaagtttcatcccgtatattctcaagtctgtgaggttggttaaattctgaataaattccggaatagacccttggatgtaattatcaaacatccacagggactgtagattcctcaaaagcgacagttcacgaggaaaagatccattgagatggttattattgaagtgccatgtttccagtttggaaagattgccaacgcctgggggtattgaaccactcaagttgttg

SEQ ID NO: 26272 - DNA, 275 bp, Setaria italica
  Peptide Sequence Number=SeqID_92246
gggagatctccgggatggcgaggcggccggtggcggcgtcggcgacgacgacggtgtaggacggcggtgtgggcgggaagaaggcgaagcgcgcggcgatggtggacgtcacgccgcccatgtctctccccccggcgagtcaaggggagcggttggtcctggtcagctgcagcgccgccgcctcgtggcgcgcggaggcatgcgacgcgatgcgagcagggtttggatcggagggttcggtggtggtctgcgagcggagagagagagagagagag

SEQ ID NO: 26273 - DNA, 2218 bp, Setaria italica
  Peptide Sequence Number=SeqID_92247
ctccttacttccccttgttgttttgctgtaaagtttgagcttgttcctgctactgatgaatcatcaatataattttttgacggtatgaatcatcaatatttgttctctctcactttatttcgactgccaaatccctaatcaaatttgatttgacagatcaaagcatcatgatagcaatagagttacaaactgtgaaggagaaggacctgctgcaacaaccgtatcgctttagagcctaacaacgggatggagcactaaaactccaaaaacccaacagctcaggcatggtagttttgctctttttgctcttcatcaagggccaccaacagaacggcaagttatgtgtcttcgcgcttcagcatattttacttaacaggctccagcactgggaacagcttctccaactttgcatttgatagaaccttgttggggtccagctccatgcgtgccttgttatatgcatcgacagggaaacgcttcctcagcctggcctggagctcagctagttcgtctctgtccttcggaacctcaatttttgcccagtgttcatatgcagaataatcatcccagagagtttgcgccaggctcctgtaattgaagaactcctccgtaatttccttcctttggcgagcatctgatgttggcaagtacattataataccgacccatgaaaacacatcttcttcagagcttgatgcggggctcattggactcttgctgcgggcagtccaacgctgctcaattggtgcaggtgcgggtatatcttccttttcaatcaactgcagcaacttctctatataatccagatcctttgtacttggctttgctagggttcctgtggggaagcagttttcagaaacccactgctgcccaccacaatcaaagcccagtatttcatcgctccagcccatgcgatacccttcagactttttccaatactcagcttctgctttattgactttcaccacatgatctttatccagtggatcaagggcaagcagcttatctctcagttcagtaaatgaaagcgtatctatttccgggtcattactttctgtttcagttctatattttttcagtgactcccgatagaggttacgaacatgctgtaaagcttcatcctttccatattttgaggtcaactttggggttttccactttgagggaggattacatcggacaacaacaactgtgtcagtatatggaatccacaagtacttaatatgtttgttctcagagagccacttcttgtggtttttcttgacttcatctgcattggaaacaaatgtatgttccacaagctggtgcctttctacacattgaagagtaacttctgcgacaacacctaggccaccaagtccacagcgagcaagataaaataactcaggatccttctccctcgataactctatggtgcctttggcaggggtaaccagtttcatgctaatgacttgctcgtcaacaggaggcaatctggcaccagtgccatgggcaccaacctgaatgaagcctccgacctgctgctccctaatggacgcgaaattctgcagcgtgagtccatgttcccggagcgcgtcaactagctctgcaacacgaatccccgcctgcaccgtgacggtcttcttcttcacgtcgacgtcgagcaccttgtccatgagcccgagactgaccattccggcccgggagagaccgatcccattgggggacagcccggagccaagcggcctgagcttgcggcgctccttgtgggcggtggcgagcgcgtcctcgagggccgggagggagtccggctggaggaggacgcgggtgtggacctcgtgggtggcgctccagttggagacggcgtggaggtcctcggggagcggtgcgtacttgaaagggacggccttcttgtggagcgcgtcggcgggtaaggggaaggagtagtaggtggcggcgccgcagccgaggaggagaagcgcgtagccggcgtacttgcggaggtcggcgtcggaggagacgggggagggagcggaggaaagggcgcagaggagcgggaggtggtggtgggaggaggggctactgccgcggcggaggaggaggcgggagaggaggaggtgccgcatcgtgctcgtcccgttggggtggcgttggggtggacgggcggcgccggcaggggcgcaggggagcggccaccgcaccagatcgcgatgggttttgcagcactagtgcgactgag

SEQ ID NO: 26274 - DNA, 779 bp, Setaria italica
  Peptide Sequence Number=SeqID_92248
aggaccttttcacaactttcgaagcacctacgtgtctggttttttcttcagtgggtttgaagagctaccgagttcaattgtcaatttgaggcacctaaaggtacctggacctacaatggacaaaaaactcaaatacctgccaaataatttatgtaaattggtaaatctacaaacagttaatctcggtaggtgcaaccaactgttggagataccaagagatgtgcatggacttgtcaaccttacatggtttgccctgacctcaaagcagaaatatttgctgaaagatgggttttgcggttggtcttccttgacatttctacagttaagctactgtcctaggttaacgtctttaacaaatggattcggcagcctcactgcccttctagagttacggatatccaattgtccagagctggcttctcttccctctaccacaaggcatctatctaatctccagaagttatcgattaacaattgtgcagtgttggatttaatggaaccaaggggaggcattgactgggctgaggagtattcgttggctccaacttgctgggcttccaaagttgatgggttttccagagagcttcaaagcagctgcatcctcccttcaatatcttgcaattgtaaactgcaaaggaatggagaagttaccgagtttcatccaagattttagttcccttaggaaaattgtgcttcatagctgcccttcattgagcagcagatgtgctgtgggaaccggtgaggattatcatctcatccgtcatgtcccttccatatta

SEQ ID NO: 26275 - DNA, 347 bp, Setaria italica
  Peptide Sequence Number=SeqID_92249
caacagcgaggacaggagagagggggagagggtgagggtgagggggaaggggagagagagagagacagaggggctagggtttcgtgcctcccccacgcttcacgcatcgaatccgagccggatcggggggcgcggagagtcgccggcgtcccggcggtgcctgggctgtgattcccttgcaatggcatcggaaactgatgagaaagctaagatggagagtttgacatcacctgcagcctttgagagggtggcattcaggatgcatgcgatgatgcatgtagcatttgccttgaggcattctgtgagagtgacccttctgcattgaccagctgcagcatgagttccat

SEQ ID NO: 26276 - DNA, 569 bp, Setaria italica
  Peptide Sequence Number=SeqID_92250
ccatggccgacagcggcgccccttgctggtatctgcgtgtggagtcctcggcctgccgcatcacgtcggcggcgtcgcagctgatgaacaaggccatgttcacctccgggccggagcactcctccaccgccgccaagaacctccgcgccaccatgacaggggtcgtctgccccgagctgtaggcctcgtggaagtcccgtaccgtccagcgcctgaaccccggcgacggatcagcgagcgccgccgccggctccggcaggggagcagtgaggcagacgacggcctcctggacgcgctccggtggcggcaggccgggcttcgtcagcctgacgttctgctccgggatgtcttgccaggtgtgggtggccgtgaacagcggcggctccgggatctcggcgtcggagacgagcttgtagacgaggttgtcgcgtttgaggacggagagcacgatccagccgacgacgggcatctccagcacccaggccagcagcttctccagctgccctgcgacgcgaggagctttgacgttggggctgatgtagtgctcgtcgctgtccgggccgaaggta

SEQ ID NO: 26277 - DNA, 1234 bp, Setaria italica
  Peptide Sequence Number=SeqID_92251
tctaactagtcgctccttccttcgtccgcgccgaccaaggggacgccggcaaaggcgtccccatcggcggcatcgacggcctcagctcagaggcggcgatgttcgacgtggagtacgggcggtggcaggaggagcactaccggctgatgtacgagctgcgggcggcgctgcagcagcacctgccggagggggagctgcagatgtacgtggagagctgcctggcccaccacgacgagatggtgggtatcaaggagagcgccatcaagggcgacgtcttccacctcatctccggcgtctggcggagccccgccgagcgctgcttcctctggctcggcggcttccgcccctccgaggtcatcaagatgctgctgagccacgtggagcccctgacggagcagcagatcgtgggcgtgtacgggctgcagcagtcggcgctggagacggaggaggcgctgagccagggcctggacgcgctctaccagtcgctctccgacaccgtcgtctccgacgcgctcagctgcccctccaacgtcgccaactacatgggccagatggccgccgccatgaacaagctctccaccctcgagggcttcgtccgacaggcagagaaccttcggcagcagacgctgcaccggctgcaccagatcctgacgacgcggcagatggcgcggtcgctgctggcggtgtccgactacttccaccgcctccgcacgctgagctcgctctgggtcacccgccccagggccacgcaggagcagcagcagggccacagctagccagtggcagcggcggcggcggcctcgtcggcgcggcggctgatctgatctggtcaccaccgcaacggccggcggcgcacgcatgcgtccatgcatgcatacatggggcatgcatggacgcatgcaagctgtgttcgttcatcgtcagtatcaaggaactaaaaacaagacccagactttgcaggtagcagtatgtagagcttgctagctagggggagagagtgaggtcgaggaatcaagaatcatcaaccaaaaggatggatgttaatcatcatcttagcgactgtttgttggctgctagtagagctagctgtagctaggtgtgatcgatgggtcggcgagtcgtcggctgctcgtcagtcgacgcggctgattgttgcattgatcttttaatcagttattatatgttatggtcaccggatgcatatattagcttcgtcgactttggagattaggcg

SEQ ID NO: 26278 - DNA, 654 bp, Setaria italica
  Peptide Sequence Number=SeqID_92252
aatccaagcccctctcacattttcctttatttagaaaatacaaaacaagacatttctctggtaatagttccactgcctcctcgtcatgcctaaagttgcatttactccctcgtggacaggaccctgaggatgtaaatttgaaacacaatctacccccatcaccttccccttgcctttgccgcttgacatcataacgccaatattgcgcatcagtgttgtcagctggacgttttggagcttcttcaataggtactgattttgctgaagcggcataaggtgataaagtggcatttggaggcttggcatggatatcagcactggacatggtagatgctggagtaggagaaatcgcatgaataaatttctgcttttctttgtttccgacattagcaagtccaataaagcgggtaacatgtgcagcagaatcattgacatatggttcccttgaataaaagacacatttcgtaccagcaatatgatatcttggcttaatctcggcaaccaattcagcaacaacaggatcaaacccatgaggatccaaaacctgattaggcacactggaagtgtcagccccattcgtcactccagttggccattcgttagtcaagaacagatcaacaattcctgactattctgcaagagcccgcagggcat

SEQ ID NO: 26279 - DNA, 217 bp, Setaria italica
  Peptide Sequence Number=SeqID_92253
tgtgacggtgaagccctcctccacctttgccgtgatggttatgatcagagtgctagccgggaatggcgtgacatttgcgtggatgatgctgaggtggagctcgtcgacctcggtgagcaccctcgcagccacccccttgccatcctcgcagtggatcctcaccatcacgctcttctccaagaaccgggcttctatctccggcaggcggattcctcga

SEQ ID NO: 26280 - DNA, 686 bp, Setaria italica
  misc_feature (585)..(585): n is a, c, g, or t
  misc_feature (667)..(667): n is a, c, g, or t
  Peptide Sequence Number=SeqID_92254
ttcttgagctcatggacgtgaaggatctcaccctggctcatgtcaagtcgcacttgcagatgtacaggaccgtgaagaacaccgaaaggccggcagcttcgtcagatcaagctgatgggttcgagaacgggtcggccggcgagatctgcgacgacaactcgctcgacctgcacggctacggcggcggcggcagcggcaggccggagtcggcggcggccgcggctcggcatggaaggttagctgcctgtaacgatcatgggagcagcaccggtgctcatggtgccctctggaatagctcatcaagggaggactggaccggcttcccaagcgagtccaacactgggagcatgcattctctcaaggagcagatgcagtccaagagccttgagatcctctcggacatgaactcctgcgtgtcggagacaacgtccagcaccagcgagctcaacctcgagttcaccctggggcggccgcagaaccggccaaactgaggtcgatcggaccacctcaccgcaagctctaactggagatcgccgccgtcgtcgtcatcgccgtcgccgacaaggattagctagctagggggcnctttccatgttcatggatcatgtgttaagatggacgcatggtcccaaagagggggcggcatcatctttcactgttaaaaggnggccatggacagggagcag

SEQ ID NO: 26281 - DNA, 233 bp, Setaria italica
  Peptide Sequence Number=SeqID_92255
gttcttatttttctaatatatatctatttaatcatttcatcaagcaaagttcctctgatccctggatcaaccaattgacacagttgagacttctttctgctgtgtggcatgagaatttggtcccacttattggctattgctgtgaaaaggatcagcagatattggtatatccattcatgtccaatggctcactacaggatcgcctctatggtgaggcataccaaaaaggaaaa

SEQ ID NO: 26282 - DNA, 583 bp, Setaria italica
  Peptide Sequence Number=SeqID_92256
tttgtttgttttaacaaacgtgaacgtcgttctccagaaaaagactgctcgtctacaacaaaccccatttttcaagaatgcggtatccataacactacaaaccctgcagtacaacagctgtccctcaaatctatccagactgcaacaggcaacttcaaaagattgataggagagggtgggtttggagcagtttatcgaggtatattaccacatggacaagaagttgcagtaaaagtccgatcaagctcatcaacacagggaacacgtgagtttaacaatgagttgagacttctttctgctgtgtggcatgagaatttggtcccacttattggctattgctgtgaaaaggatcagcagatattggtatatccattcatgtccaatggctcactacaggatcgcctctatggtgaggcatccaaaaggaaagttcttgattggcctaccagattatctgtttgtattggtgcagcaagagggctggtatatctgcacaattttgcagggcgttgtatcatacacagagatattaaatcaagcaacatacttatggatcacagcatgtgtggcaaggtagccgact

SEQ ID NO: 26283 - DNA, 926 bp, Setaria italica
  Peptide Sequence Number=SeqID_92257
gaattcccaatgttcaaataccggcaccaaacctctacggtacaacaatttaacaatcgacttgcatgctgcttacaagtcgcatgacgcaatacaatttaaccaagccctccaatcgttcatagcactcgagaacaacatcatggtaaccggaattcaaacattcggaagtattctgaattcaatagtacatccacatccactgatgtatagttcaaattgaaaggagattccaggagcaatctaattgattgaggcgtcccttgggtacagtagccacgcctttacttcccaaagaatttagagaggcgaactgggccttctgcctcactatcaccgccggtgtgcttggaccttgaccgctgcttcttttccttctttgttctcttcgatcttgaccgtgatctggacttccttgaacctctgtcctcgttgtcactgcttgatggttctgatgacgagtccttctttgttctctttgatctcgaccgtgatctggacttccttgaacctctgtcctcatcatcgctgcttgacgattctgatgatgagctggaactaaactccgaagaacttctttctcctcttcttacttcttttctttgcatccttatcctttctctctttcttggaagaaaatgattttgagtctgacttagagtgatttcttccatgtgctagcttctgagctctttctgcatccaattgagctctgtactctctcatcattttatctttgtcagcctccagctcaccccttttcagttcatcttccttctgcttcttcttgaactcctcccaggtgacggtgtgcgtcttgttgaggctggccaggcgcgccgcatgccactctggagaatgaaatgaaccgtccgtctgcgacggcgttcgggggcgtccgcggcgccgggcgcgccggaggagga

SEQ ID NO: 26284 - DNA, 233 bp, Setaria italica
  Peptide Sequence Number=SeqID_92258
gcttggttgttacattgacagaaacaaggagttgatgcaatcagaggttggacatatggagtgagttgtagcatatttctacactcgtcatcagcttttaatgcataataacagagtgaagcagcagtacactctgagaaacttacgataataacagcttaccatggaggggcatagtgatttgaatcacttatttcctctgatgttgatacgcagttgttgggttgcagggc

SEQ ID NO: 26285 - DNA, 614 bp, Setaria italica
  Peptide Sequence Number=SeqID_92259
gtcaagtgttagtcatgaatgaacctgtttaattcgttagcaattttgattatggcatgggcctgagtttgtataacttcctgactctattctagctcaaatttaacttcatgtttaacttgatttcttactatttggctggctgtgttactagcttattacttcaccctgggagtggggttattgatgtgttactgtatctgagtgttacgcgcggatctctgtctagtgtgatttctttaccttgtatctttgtattaatctctacctgctaatcgtactgtatcttttgcaagtctaatttcccatcatttattgtgcagccaagctggcgcaggccaaagggtattgactcccgtgttaggaggaagttcaagggatgcaccttgatgcccaacattggctacggctctgacaagtccaccaggcactacctccccaacaaattcaaagaagtttgtggtgcacaatgtctctgagctggagttgctcatgatgcacaacaggacctactgcgctgagattgcccacaacgtctcaacaaggaagcgcaaggagatcgttgagcgcgctgctcagctcgacattgtggtcaccaacaagctcgccaggat

SEQ ID NO: 26286 - DNA, 835 bp, Setaria italica
  misc_feature (1)..(1): n is a, c, g, or t
  Peptide Sequence Number=SeqID_92260
nagggcatgagatcattacctagtaccctactgatccagagccagagccaggcacatgtgacaaatgcggcattatcatgcatggcttctgttttttggtgataagatcagcatgagtgccacaccaataatcaaccccagcctgcagcagacagtgccacttccatccttcagaagctgctttctgaagcccagcccttcttttccaacgccaatctcagctcctttactctcttcttattggcatcgaagtcgacgaatcctgatcgagacgctgatcgatactggacgattggtttgttgccaggagggaaccagaactccacatcatctacaaacccaaatattggactctcatattcaacacgaacataatcgtctgttttgtccacgatgcgaggagtgaagttgtccggctttgttttcgtgaccacttcaatgagctctttcatggcctcttctttgcttatgggtttacccctgtggccatccttgggattatagttccatggaggggcatagtgatttgaatcacttatttcctctgatgttgatacgcagttgttggttgcagggcacaaagcaagggatggaggattcttctgaacgccaaggtagcttggtttggtgccactgaagtggaagatggcggcgagcgtggcgagctcactgctcctgagcacaaagtctcttcggccgattcttgtgtgctccctgctcttggtcgccttcaagttaggcggcgaggaagaggaggccgcggcggccttggcgccagaggaggggaccaggaggcagcaggacaccacgtgcgcggccatctgctctgctgggg

SEQ ID NO: 26287 - DNA, 934 bp, Setaria italica
  misc_feature (1)..(35): n is a, c, g, or t
  Peptide Sequence Number=SeqID_92261
nnnnnnnnnnnnnnnnnnnnnnnnnnnnnnnnnnntttttttttttttttttttttgtcttgcaagcccttttttttttccaagtaaatcctcagaacatactacagaatacctcagaaattcataatatgatcagagctagagttacagacttcctgtccaagttccaatccatgcaatacattatttactaacaaatgaaatagggaaacagtcaaataatttttgaacccccaaaaacatggcaccgacagaacagattttgcacacgatgcatctgcacgctcaatattaaacttgaggtttctacccgagatttgagaaaatgtctaaagcacagatgctgaatttagctagtttaactcctttagacccgcttcagttctgaacttcatcagagagcatctggaaactaagcaaacaagcgaggatgttctgtgagctttacagctaacgagcttgaatcatctcaggcaccatagaagcatcgtcggcgacaaactcacacacatgacagtttgaaccagatgcggtcctaaatatagaagctagcaatttatacagcatttcttggatgcacatcacgagacccagtagtctctgaagaggagagaccataaacaccaccaggagtccttcatttcttttcaacatttggcaagcagacagctgcgtccatacccccacagacaggtagctttgtggatccagactttgcaattcccatgcattggatatttgtggtatcacaggcaccttgtcccaacacctgagaactcgtagccccctgcattccaggattgcaatacatctgatcattgcatctgaaatcacaggagttggtcacctgggcgccaccaagaaagcttccctggtcaacactagacaccaaatcgatgttcttgactggcctctggtaagggaaagcaccaat

SEQ ID NO: 26288 - DNA, 672 bp, Setaria italica
  Peptide Sequence Number=SeqID_92262
tcgccgctcttcgtcctcctggcttcgtagtagggttaggttgtgaacttccgaggagcagagatggcggtgccactgctgacgcagaagatcgtgaagaagcgggtcaagcagttcaagagaccccacctcgaccgctacaagtgcctcaagccaagctggcgcaggccaaagggtatcgactcccgtgtccgtaggaagttcaagggatgtaccttaatgcccaacattggttatggttccgacaagaagaccaggcactaccttcccaacaagttcaagaagtttgtagtccacaatgtatctgagttggagttgcttatgatgcacaacaggtcatactgtgctgaaattgctcacaatgtctctacccggaagcgcaaggagattgtggagcgtgctgcgcagcttgacattgtggtcacaaacaagcttgccaggattcgcagccaggaggatgagtagtatgttaggcagattgcagctctggttaatttgtttgtaggaagcagacctgtttgaatatttcgttgttacactggtatattgacgccttaatcagtattgagctcaaccgaggacagctacagttttggatggtatattgacgccttaatcaatattgagctcaactgagcaaggcgccttattttgaaattttaaaaaaaaaaa

SEQ ID NO: 26289 - DNA, 761 bp, Setaria italica
  misc_feature (747)..(761): n is a, c, g, or t
  Peptide Sequence Number=SeqID_92263
cggcggcgggcgctacggcggcggtggtggcggctatggcggcggcggctacggcggcggcggcgcggctacggtggccgtggaggcgccgccgctctcgctcgcaccgtcgcatctccgcagggttcgcaaagatggcggtgccgctgctgacgcagaagatcgtgaagaagcgggtcaagcagttcaagaggccccacctcgaccgctacaagtgcctcaagccaagctggcgcaggcccaagggtatcgactcccgtgtcaggcggaagttcaagggatgcaccttgatgcccaacattggatatggctctgacaagaagaccaggcactacctgcccaacaagttcaagaagtttgtggtgcacaatgtctctgagctagagctgcttatgatgcacaacaggacatactgtgctgaaatcgcacacaacgtgtccacaaagaagcgcaaggagattgtggagcgggctgctcagcttgacattgtcgtcaccaacaagcttgcccgtcttcgcagtcaggaggatgagtaaactgtttcgggtagtagttttggagtggctcggctgtaggagactttctgtgcatcatgaatcagttatcctttctgtttgcttcgtgttttgagtatcgtgaacccacttgctatcagtggcgacttaactgtggcaatgttatgattatcacctaccatatgaatacagcagttttgatataaacttattgttggattgttacaaaaannnnnnnnnnnnnnn

SEQ ID NO: 26290 - DNA, 721 bp, Setaria italica
  Peptide Sequence Number=SeqID_92264
ataagaccctctcctctcctctcacacccgccgcccgccgcctctctcgctcgcaccgtcgcatctccgcagggttcgcaaagatggcggtgccgctgctgacgcagaagatcgtgaagaagcgggtcaagcaattcaagaggccccacctcgaccgctacaagtgcctcaagccaagctggcgcaggcccaagggtattgactcccgcgtcaggcggaagttcaagggatgcaccttgatgcccaacatcggatacggctcggacaagaagaccaggcactacctccccaacaagttcaagaagtttgttgttcacaatgtctctgagctggagctgcttatgatgcacaacaggacctactgcgctgagattgcacacaacgtctccacccgcaagcgtaaggagattgttgagcgtgccgcgcagctggacattgtggtcaccaacaggctggccaggatccgcagccaggaggatgagtgaaatgttcagtagctgcagttgcgttgttcgtagaacagtactgagattggagatacttttccaccatttttatgctcgtgttagacttgttccgtggacgtaatatttgctatgagtgaacttgtgatggcaaatcacatctagttttgactggacatccatgaagtgtggcaaatgactttctcattcttcaggtttgtgagtataaattttgttcgtgagcgtacaaaaaaaaa

SEQ ID NO: 26291 - DNA, 1590 bp, Setaria italica
  misc_feature (1)..(36): n is a, c, g, or t
  Peptide Sequence Number=SeqID_92265
nnnnnnnnnnnnnnnnnnnnnnnnnnnnnnnnnnnnacttttaacgaaatgaaatagtaaaacatttaaataataatcgaatccatgactttgaattacggacatagcaacaaagagacgtgacacctacactacactacactacactttagatttcgcgcacgatgcatctacataagataaggattcacaccaaactttaggtcaagcacagatggcggattttagctagttcaactccttcagatccagttcagttctgaacttcatcagagagcatctgatactagcaaaataaacgatgatgtcctgtcagcttttgagctaacgaacttgaatcgcctcaggcaccatggaagcatcatcggcgacaaactcacacacataacagtttgaaccagatgcggtcctaaatatagaagctagcagtttatacagatgtcttgatgcagaacgccaagacccagtagtctctggaaaggcgaggtcataaacaccaccaggagtgtttatacagcgtttcttggatgcagaacgccaagacccagtagtctctcaaaaggagagaccataccaccatgacccaggagtccttcacttcttttcaacatttggcaaacacccagcaggtactgcgtccatacccccacagacaggtagctttgtggatccagacttcggacttcccatgcattggatattcgcaatatcgcaggcaccttgacccaatacttgagcattcatagccccctgcattccaggattgcaatacatctgatcattgcatctgaaatcacaggagttggtaatctgggcaccaccaaggaagcttccctggtcaacactagacaccaaatcgatgttcttgactggcctctgataagggaaagcaccaatctccccttcaatcctccctctgatatcaacgagaaggcagcgaagcctggctacctccgcctcaagcgcggcgtgattctggagcttcttcatgagctgctggttcaaagccctcaaatggaccacctcttcctccaacgacgccgtgtgagccttcttcttttcccggtacttcctcaccgcggcccggttaccggacgggcgcttcttggaggcgttgttctcggacggcgactccgcggtctcggcggcgtcgggcgaagccgcaacgatcttggtgtggacatggacgcaggtgtgggtgtgcgaatggtcgtggaccggcgggttgcaggtgtgggtgtgggtgcaggcatggtgctcggtatccttcaggatgtcatcaaagtagctgtccatggagcagctgcttgggggatcgttgccgatggccgggcaaaggaaggtgtcagggttcgagaaatcaaggtccccatcgtccattgctgcagctagcagtcgagaacacgcctagcagcgacgggagaagtcaatccaggcaccggagggtctccgccgcgcgccagtccggcggggcgaggagggcggcgggcggcagcaacgacgagagaggtgagtggaagagaggtggagtcgtggggtagggcgtggggggggagggaggacggagttgggatttgggaaggatggatg

SEQ ID NO: 26292 - DNA, 402 bp, Setaria italica
  Peptide Sequence Number=SeqID_92266
taactagtaactaaactatttaattctaattcttcttaattaaagtagttagtcttagggagtcactatgccaaaaagtgatgaccgcaaagtgaaggattatacattgagattgtagacaggggacagaatattagaaactaaacaaagcatcctatagaagccctttaactatcggtcctgtaaatatctaggcattatgcttcctatcaaacaagaaaatggaatgaacatgctgaaggcacactcggagtgaaaattggaaaaacagtaggagaggatcacataagcaataagactttgacagagtagcacatcatgatcggtgcttggtgtggtatctaagatgcaaccaattaaatgcttctacaagcactaaacaggaacctaaaaaaataccat

SEQ ID NO: 26293 - DNA, 678 bp, Setaria italica
  misc_feature (1)..(27): n is a, c, g, or t
  Peptide Sequence Number=SeqID_92267
nnnnnnnnnnnnnnnnnnnnnnnnnnnagttctatgataccttggtttattaatatacttgcaaggagaaatattatgtggcgatcataacaagccatacagtacagtacaggttgagtaccaagatcccacacattaaagctcattaggccagcgtattgactaaagcagtatagtgaactagagagagattaccagactaatctagcgagaacttgatgagcggaaaggccacaggaacgagaacgggttccttctcctttgccgcccactggttctcccactgctgcttgaactacttgagctctggctttggttcgttgatcttgtgcgtgagcagctagctccagtagcagaaccctgtgttggaagctcgtaacggcaaacagggcaggaattatgctgctctagccaaggaactatgcaatcagagtggtacaaatggttgcatggcatctctcttgcttctgatcccaactcaaacttctccttacagacagggcagtgtgagtctccacttagatgcctctgagtgatcttaactgtgggcatagcatcaatcgaggactgtgcggcagggggtggtccacgacgatcattctgagttaattgctcaatgagatcatccaatccaggccctgccgcacagtcctcgattgatgctatgcctctgagtgt

SEQ ID NO: 26294 - DNA, 262 bp, Setaria italica
  Peptide Sequence Number=SeqID_92268
aatattgtattgttgtgctctaggctcaactttctccagaagccttctttctcttctttttccttctctcgttcccatcaggcctatctgaccgcttcgacagctcctgcctgatctccatgagtttcgcttttgcatcacggaaaggtgcatctgatctcattgccaacaattctttcaaatgatccatcgcggcaaggttgaagcctatagtatccttgcattcctttactctgcagtaaagaatatccttcagttctgt

SEQ ID NO: 26295 - DNA, 372 bp, Setaria italica
  Peptide Sequence Number=SeqID_92269
taaaaaaagaactaacaaattaagaaagaaaccaaacaaagaccacacaagggcagaatgtccacccagctgacggacaggtgtttaattacatcaaggaaaagttctaaaagatgagacgacacttgaagagaacaaagttctggagaatgacttcatcattatagcgctgtgcaagagtgtttcctctagttacatccctgaaggaatggagactaaggaatggggtggtattgatcgtgaaaccgatgagaggtgctgccatggaaagcgtccaaggcgccacttatgttgggatggcaagaacactatcttggttgcccgcttagggtaagtcaaaacatgtgtgatttcattgagtggaaggacgac

SEQ ID NO: 26296 - DNA, 290 bp, Setaria italica
  Peptide Sequence Number=SeqID_92270
cgaaggagcccgacccggactacaagacgaccgacccggaaggtacgttacggcaccccgcggggcgccgggtccgccgccgccgcagatgggaccgccctatggtggccctggctatgctccgccgccgtatggtcctggatacgggtacggctacggctctgggcccgggcctgggcctgggcctgaatatggcggcatgggcatgaacggcggcggctatgaaacaggaggctatggcggcatgggcagcggcggctatggacagagctacggtgcatgggtgaggc

SEQ ID NO: 26297 - DNA, 1298 bp, Setaria italica
  Peptide Sequence Number=SeqID_92271
gtaaaatttccttccactccctatttggaattactgcttatgctttttaaaaaatatggctggatcactggctttttcgttcataaggaatggattttttttcacaacataaaatccttagagcgtagatttgggctaaggtcagcaatcaatgagctatgttacttttgcaatgagatcaactcagagtaaccaattagtaacagtaaatacggctatggtaacaagtaacagattagcgtgtgccctttttacttggtttaactttcaaaacaccaagttgaaaagttactgagattttgatgcctaatatatgtgcattcatcctagcttctaaagataaagaaatatttttcacactttctgatgggaaaaatatattaactcaaaggtatttgcagaactcaccctccatttcatcatgtgttactcgaggtttccagtaccgggggagtgaacgcggattgttaacatgctttccagatactgatttgaccactgcgaaaaatcttatggaggccaaagggataaagcagctgcctgtagttaagcgtggtgttggccatagaactgcaggaaagcgcaagccgattgcccttctacattatgattctattggttgctgcttgcgggaggaagtcgagaactggaagaccatatgccaaagaatggcttgttaataacacaactctgatgatatttattcattcgattgtcaagggaggaaactgtgaactgaataccatatgtcagagaaaagaaatgaccccccttttatagcaaatgggcactgaaaaattacagtgccctattataccacagcagtaagtgactacttctagagttctagacatctcagtttaatgcagatatgcatagtaatacaccagcagtttaacttgtatcgtttagatgccactgtaatcttatgggaagctgcacaggcaaagcctgacaaattttgcaaagactccctgttacagccagtgtcttgtggtatccctgcccgtaccaattatttgttcttgttacgggtggactttgtacttcacacgggagaaggatgaggtatgggtgtagagtaagaagacggtacttttcaccctcgtactgctgtaaattgtaagctgcacctgtattacagcttgatcacaccttttttttgtccgtgaactatcatatgctgtagtatggcgacacgagaaactgcttgtgcagtagaatctcgtcgccgctgttgaagctgaaaaaccacattttgtataaatttaaccgtacaatacttagttaacaaaaaa

SEQ ID NO: 26298 - DNA, 235 bp, Setaria italica
  Peptide Sequence Number=SeqID_92272
caatcaccgagctcaagtcctcagctcgcattggtcagcgtcctcgctcgacgcgcttaacttgttgccacgccaccttagcagctagctcgtcagatcacatgggtgtggagatgctcatggcgagggagcacgagcagctgccgcgctcggcgtgccggtaccagcgcctgcgcggcgagctcggtggcggagggggaggaagccggggtggttaggggtagtgtcatggcgg

SEQ ID NO: 26299 - DNA, 1049 bp, Setaria italica
  Peptide Sequence Number=SeqID_92273
gactggatcggccttcccttcggagtccaaggtcttcagcgcctccggcggcggcggaggcaggggcgtagggggcaaggggggcggcggcggcaaggccggtggtgggttcgtgcacctccttgcgccgaccccggagctatggacgctggtgctcagccaccggacccagatcctctacatcgccgacatcagcctcgtcgtcgcctacctcgagctcgtccccgggtgcgtcgttctcgagtccggcacgggcagcggctcgctcaccacctcgctggcgcgtgctgtcgcgccgcacggccgtgtccacacatttgatttccacgagcagagggctgcctcagcaagggaagacttcgagagaaatggccttagcagcctgatcacagtcaatgtgagggatatacaaggggaaggattcccagaggagcatcgtgctgccactgatgctgtcttcctggacttgccccagccttggcttgcaataccttctgttggttcaatgctaaagcaagacggcattctgtgctccttttcaccttgcattgagcaagtacaacgtgcttgcgaagctatgagatcatgttttacagatattagaacctttgaaattcttcttcgcacatatgaagtaagagatggcgctctgaaaagtggtactgccgatgagtctaacatggggcctccgcagaaaagaaaaaggtccacagcatcaggagaaaatgcagaccacgcacagaagaacaactccattttggttaggccttgtagcactgctaaagggcacactggctacttgacatttgcaaggcttcgcgtgtccgatgaccaaactgaatcctgaggtgatgacaagttgataggaaattaccctaactgaatcctgaggtgatgacaacttgatgggaaattacccatccttaacagcacagcagtaaaatgcatgcattggtgaggtgctgtttgtctgcgggatccggtaaatcaatgctgtttgtgatggggtgctgtcggtcaggaagggtaacaaacctacagttaaatgc

SEQ ID NO: 26300 - DNA, 430 bp, Setaria italica
  Peptide Sequence Number=SeqID_92274
gtggatgatgactccgcctctgtcagcagcaccgacttcattgcagccaacacctccttggaagagtatctgaagggaagatggagccggtcctcaagcttcgactgactgatccgtggcagagttacaccttgctagtgtatagatcctttttttttaattaagttacatttttgggccttggatgagagttggcacatgcaatgccctccaccgggaatttcatttgatcatgtatggcttagtttttttttttatgtgggggtctttttacctctctgaagggacccctttttactgtctgaagagacttgtcatacccaggtattctcatccaaagggatgagaaataaaataggaggcaatatgaaattgtgggtttcttcccataaccgaaaaaaactgaactgccaaggcacacagggatagg

SEQ ID NO: 26301 - DNA, 320 bp, Setaria italica
  Peptide Sequence Number=SeqID_92275
cctgcttgtcgagaaacgtcaaacgggtgcagagctctgatggttgtggggagtgtgaacgagctagcaaccatcagagctctgcacctgcttgtcgagaaacgtcaaacgggagattgatggacgcgggcttgttgagtgcattcataaagaagctcgtggcgaggttgtttgtgttagcggaggagaaatacaagctgtacaatgactttaaagaggatattcatttcctgatggaagaacttcctatgatcactactgccattgacgagcagctttcagggagggatgacctcgcattgcattttaagatcaatgag

SEQ ID NO: 26302 - DNA, 746 bp, Setaria italica
  Peptide Sequence Number=SeqID_92276
ctcagtcgtctctttctaaccttgcggactccctgcggcacggcctcagcggtgagctccagcctgcagctgattgcgcgtcaggcagtaaacggcggcatgtgttcacgctactgaatctgtgtgcttgctagctcgttcacactccccacaaccatcagagctctgcacctgcttgtcgagaaacgtcaaacgggagattgatggacgcgggcttgttgagtgcattcataaagaagctcgtggcgaggttgtttgtgttagcggaggagaaatacaagctgtacaatgactttaaagaggatattcatttcctgatggaagaacttcctatgatcactactgccattgacgagcagctttcagggagggatgacctcgcattgcattttaagatcaatgagttgcaccagttggctcaagaaatggaggactgcatagaccacatcatgtaccgcgcgtctaaggaacagcaaccttggtaccatataaaccatacatccgggaacaggataacatcccgtttgcagttagccaaggagatgaagagactcaagagaagattgcaggaagcccaccagcgcaaggagagatacccagtgtcctgtccgtcccataccgagctgcctccatcgtactcggatcgtctcatcgctcaggaagatctggttggcattgatgcgcctctgcttgtaaagtagtctctcttggtggaagtcaagggcaagtggaagcagctgaacgtg

SEQ ID NO: 26303 - DNA, 247 bp, Setaria italica
  Peptide Sequence Number=SeqID_92277
ttccaacgcgaaacctccccactctaaggacgatgatccacaatgaaacacttacattcggggagtactcaaaaaggctagtgaacaagtattaccaggcagcaatgtgaagcattaccacaagaaaagctcctgtatacacattcgtaccatcaaatgggttctagctttggtgcaaactcttctaagaacaacacgagggagtttaataactgctagtacactattgtgagctgcgagtcattcg

SEQ ID NO: 26304 - DNA, 610 bp, Setaria italica
  Peptide Sequence Number=SeqID_92278
acgcgacgcgccaccggggcggcgtgcacgtgacggcgcagcctctccccgtccaaccatctccggccggtgccgcccaaaaaaattcgcccccacacgaatcctagtatccaacggagtcatggtggaggtgggcagcgccgtgcgggcacaacccacctgggctccagccgccgcgcgaggcaggagatcccggggccaggcctccgccgccctcgccatcgcctccgcccccgcggcccgctgggtccggtgccgcgcgatggagcggccgccgaccgtccgcatggtcaccatccccttcgccgacctcaaggagagggacaaggacctgggcgacaagatcgaggaaggcctcgggccccaggggctcggcatcatctccattgccggtgtgcctggtttccccgagctgaggaaaagcctgctgcgcttggcaccaaggattgcaaaccttcctgagtcttcaagttgtttcctcacatcttcagacagcaggtataattttgggtggagtcatggaaggagaaacttgagtccgggaaacttgacacattcaaaggttcctttatgcgaacccatttggatgtccctactatggatgatgcgg

SEQ ID NO: 26305 - DNA, 509 bp, Setaria italica
  Peptide Sequence Number=SeqID_92279
tactaccatcatgcatatgaaattcattttacatgtgatgcttgtgtgaatgaaatgtggagcctttttccttccctgtggcaaaatcaagatttttttatttgacgaatcatatgttatagatatatttcagatcaagattcagtttaaattttgagaattggtgtattttgtctcttatgatagcaaacagacagaagaagttgagtctgtttcatcatggtgtggatggcacaccgatcatggatctctaacaggtgacttgttttctaccctgatagttgaagtatttagttagttttgtgggattatgtgccaaaaaaatgtatgcgagttatcatcaaagaagtgacattttatcatagttaatactcgataatctgactgtaaatgcagggctcacatgtggactgtttacaaaagattctgtggaggtaccgtgtcctgatagtgcagctgggctatacatccggactcgtgataatcaagtcgttaaggtagcttcctga

SEQ ID NO: 26306 - DNA, 1203 bp, Setaria italica
  Peptide Sequence Number=SeqID_92280
ttagttagtaaagtaaaactaaacttttagttaggagacttacaacgaacctaggaagactcagacagcaggtataattttgggtggagtcatgggaaggagaaacttgagtccgggaaacttgacacattcaaaggttccttttatgcgaaccccattttggatgtccctactatggatgatgcggttgtaagtaggtatccatcatattgccgaccaaatatatggccaaccgacagtcttcctgaacttgaaatagcatttaaagctcttggaaagctgatgatggaagttggtttgatgttggctcatcactgcgatcgctatgtaatgcagcaaggagtgggatcatatgatggtgacagtcttgagcagacaattgcccgttcaaggtgtcacaagggccgtctgttgtactattttccgagacagttaagcaaacagacagaagaagttgagtctgtttcatcatggtgtggatggcacaccgatcatggatctctaacagggctcacatgtggactgtttacaaaagattctgtggaggtaccgtgtcctgatagtgcagctgggctatacatccggactcgtgataatcaagtcgttaaggttgtgtttgacgaggatcagctggcttaccaaattggggaaactgctgaaatactatcaagaggttatctatgtgcaaccccacactgtgtgcaggcacccagcagtgaaaatgcttccaatgttgaccgctctacttttgcactgttcatgcaaccagattggaatgagaagctggagtttccaagcgaaatcccctatcaccaagagttgatcccaccaaatgaaacacttacattcggggagtactcaaaaaggctagtgaacaagtattaccaggcagcaatgtgaagcattaccacaagaaaagctcctgtatacacattcgtaccatcaaatgggttctagctttggtgcaaactcttctaaaaaaaaactttggtgcaaactctctgtacaggtatagccaattagcgaataccagagctgcagacgcaaactcgaatgactcgcagctcacaatagtgtactagcagttattaaactccctcgtgttgttcttatttttttattgggactccctcgcgtgttctgatgtaattaatggtgaaattgctagatgaataaacgaagtgtaacaaaaaaaaaaagaat

SEQ ID NO: 26307 - DNA, 1180 bp, Setaria italica
  Peptide Sequence Number=SeqID_92281
gtcatctgctggctacctgctctgctatagacactactcttctcatacctgcacgtaggtagctgcagataagcagcagcgatcgaagatggcgaagcagggtgccgcttccatgctcgcactggcattgcttctgggaacctttgcagccatccctacaggcgtgcagtccatcggcgtgtgctacggcgtgaacggcaacggcctgccgtcggccggcgacgtcgtgcagctctaccagtccaagggcatcaacctcatgcgcatctacttccccgacagcaacgcgctccaggcgctgagcggctccaacatcggcgtcatcatggacgtgcccaacgacaagctcggcagcatcgcctccgaccccaacgccgccgccggctgggtccgggacaacgtccaggccttctctggcgtctccttccgctacatcgccgtcggcaacgaggtcgccggcggggacaccgccaacatcctccccgccatgcggaacatcaacgacgccctcaacaacgccggcctcggcagcatcaaggtgtccacggccgtgcagagcggcgtcacgcaggggttcccgccgtcgcagggcagcttctcggcgggccacatgggccccatcgcgcagttcctgcagagcaccggcgcgccgctcctggccaacgtctacccctacttctcctacgtcgggaaccaggcacagatcgacatcaactacgcgctcttcacctccccaggcaccgtcgtgcaggacggcggcaacgcctaccagaacctcttcgacgcgctcgtcgacaccttctactccgcactcgagaacgcaggggcggggagcgtcggcatcgtcgtgtccgagagcggctggccgtcggcggggggcgacgcggctagcacggacaacgcgcggacctacaaccagaacctcatcaaccatgtcggacagggcacgcccaagcgccccggggcaatcgagacctacatcttcgccatgttcaacgaggaccagaagcccggagccgagacggagaagcatttcggcttgttcaacccggacaaatcgccggtatacgacatcaatttctgagcgacggacggacggattgatgatactacagctacaggaacaagatcataatgagatatgtatagaaaatacatactactacacacatcacaccgc

SEQ ID NO: 26308 - DNA, 413 bp, Setaria italica
  Peptide Sequence Number=SeqID_92282
gccacatcttgaataaaagctgatcagtgcgctcccaacaaggacagaggagtcatatcctactttcactagtaaagcctgaagatgtgcacctccagtaagagttttcatatcagcacaggaactcagtgcagatgccaaaatagatgcatctgaactgatgccccctctcctatgcagctccactatatgcataagcaagtcatcctttgtgaatctagtcatggaagggcatactgagatattgcttgagaccatgtcattgcttttgggccgtgcttgatttgagcttgagttaacaaagtcctcttttctctttcgcataacattccgttttgattgaactcccaggatgtcatacatacagtcattgataaggcgcgatgagatggaatgtcctctcgtcatcatgg

SEQ ID NO: 26309 - DNA, 271 bp, Setaria italica
  Peptide Sequence Number=SeqID_92283
ggcaggaggagccatcaccgtgtccgtgctggccattattatttcttcatccagcggcaatttctggccaccggcgggctatattattcaggtgcgtgcccgcaccgtactggcgtgtcgcgaggtgtttccttgaggcggaatggcggaggagtgcccggtagctggcggcgtcgcggagttctggcttcccgacgagttcctggacgacgacttcttctccgaggaggagaaggccgcggtggccgccaagagcgagagcgacgaggaa

SEQ ID NO: 26310 - DNA, 603 bp, Setaria italica
  Peptide Sequence Number=SeqID_92284
ctaattcggtattgtattactttggctgaaacctaatgcgaaaagtacatttggttgtcttcttccgctcccaacacgggccaccatctcatcaagtcaaagccctcattaatcattagtcaccacattgctccagcatatcaaaggaatatgaacgcaaaactattaaaaatgaaataccaaaatggaagaaaaagaaacagcaaaatgggcaccaattgtgtatagtggcacctaaggctaggttttatgttacaagcctggggacggttccacactgaccaagggaaccgaaaggcagcagctcatttcccatttccaccaaagaagtaacagctcttgcagattgcatctgggggggggactacgggagccaccctgggtacggccaagcaaaacggtgcaggaacatggcaagttgccatctgcagggctcaccctcggtagggccgacatagctttacttgtggagaatacccttcttaggcattttaggcttcctctggacatgattcttttgcctttctagagcctcaacatctgtcctctccttccaattactcttacgcaatttaatagggacggttcccaacatattttcca

SEQ ID NO: 26311 - DNA, 1347 bp, Setaria italica
  Peptide Sequence Number=SeqID_92285
cctatccctgtgtgccttggctagttctctttttaggttttttttgttttttttttctggtctgcagcacaacgcccctcactagctactataagtcatcatattgtttccagaatgcaacatcaacgtacaattgttaagcaaaaagaaacagaaaaatggagcacaacttgtatcaaatagaagttgatgctacgtttcaagtttacaagcattcacttgacccaagtaaacatcctttcatctcgactctcgactagtgaagtaagagaagagcttcctgaagttgcgtcatccatccaagggagcagcacatctgcatggaccataatcggtatggcctgtatagcttcacttgtgaagaatacccttcttgtgcattttaggcttcctctggacatgattcttttgcctttccagagcctcaacatctgtcctctccttccagttactcttacgcaatttaatagggcggttcccaacatactttccattcatttcttttattgctgcagccagatcagtagggtttgaaaagctcacaaatccataacctttagttttgccagtcctcttatctctaacaacccttgccatgttgaaggaggggaaccgtgagaatgctttggagagaacatcgtcattaacttcgtttcctagatctccacagaacagtctataatcattttcgggccactcggtgagggtgggatcctcccaggactgtccggcggcgcggcgcgggatgggcttcttgctggtggaggggtcggagggcctggcgctggcggcggcggtggggtcgaggacgtcgctggtggcgagggcggccttgacgctctgcagcgcctcgggggtgatagtctgcgcgtcccgctggaagagctggtgcgcctggtgcagctgctgctggtactgctggtagctgttggccggcatcggcgggggtggcatctgcggctgcggctggtgctgctgcaggtggaaagggagcgggaagtagctgccccccgccggagccggagccgacgacccaggaggcggcggagggggaggattggaaggcatggaggcgaatcgactcgggagtggctcagccgccgccggcagccccgaccccaagagttagggtttcctctcgacgccgactcgccgcccgtcacgcgccgccgcaccccttcgcctgtgcgccagccgcctggctgccccgcgcaacccgctcgatcctgctgcgaagcaagcggctcggctacagatttggtggagcggaagaattgggggccgatggaacctggggagcagggaactggggatcaggggaagatggatttggatttctactcttcc

SEQ ID NO: 26312 - DNA, 445 bp, Setaria italica
  Peptide Sequence Number=SeqID_92286
ttagttttgtttgagaatttgaagatatatgtggttaaagtgtatccatgcattttgtttatattttcttgggtataattaacactttgtcagtaagatatttcctcaataacaattttagttagataacatgtgattctatctaatttccattcataaagttcttacgtacatgattcactagattggacacttggacagtatggtacttccgcacaactaaagttccttttttggcacatattgacagtaacggtgccaaaaataaaggctgaaccaaatgcactacagtcagtggtataagcctagctagccttttccactctgattttccctggacaatcagaatacaacgaaaagacaaatcatcccatgtcttttactacagtgcgctacgtgaagatatcagagtgacccccagtaggttcatcagccattcctattt

SEQ ID NO: 26313 - DNA, 904 bp, Setaria italica
  Peptide Sequence Number=SeqID_92287
cgaacggtcatgcgttccgtcacgccgctgtcggcacccaggatgatggatctgcctcagttccaaggtgatcacaaggaaagcttgtattggggtacttacagaccaaatgtgtatcttggaattcgttcaagaactcctctgtctctaattgctggattgatgtggattggcttgaaaaatggacaatattttcttcgtcatgtttgccaagattctgatgagctgagcacatatgggtggacagctcacaatggtagggattatggacatcaaatgctagttgatcatggcctactcttgactactagttttctgaaagagaaaggggagggcagtggttatggtggagactgggcagttcgattgggtgctaacagtgagaggtctagtgtaaatgatgctcaaggaagcaccacacacctgtttttctacattgctgacgaaagcggaaagtcgatcactatggcctcacatgtaccttcatcaagaggccctgttcttttggcatctgggtcgcacgatgagattggtgattgggaattgtacttgagatctgaggacgatttggaaattcatagagctggattcaaatcaatgagcatgcataatctgagtgacctagtacaacaggccgttgctactaatgcaatgcaaactgggaaccttaacttgccagacatgactgaagattcatcaaatataatgacctatcaggtttccataaagactcctgctcaaatagacatagtattcttgtcagggtctgcctcaaagaatccaaagattgaagagcggattagcaacctaacaggtcccatgctgagcgcccgtcttgaatcaaaacaaaaggaatttgaagagagatatgatcaaatattcaatgtaaataataagattgact

SEQ ID NO: 26314 - DNA, 239 bp, Setaria italica
  Peptide Sequence Number=SeqID_92288
ccaaggacacacaggtgcgcgtgctcaccattttcatcacctgggctgcactccgcttcctccagtccttgctggacatcggcacgcagttccgccgtgccttcagggatggtcgcatgcttgctgtgcgcatggtgctcaaggtcattgctgcagcagcatgggtccttgcgtttgctgtcctatacaaggggatctgggaccagaggagaagcaatggacagtggtcgtcagctgta

SEQ ID NO: 26315 - DNA, 724 bp, Setaria italica
  misc_feature (21)..(21): n is a, c, g, or t
  Peptide Sequence Number=SeqID_92289
ccggggcggaggacgcggacncgggggcggatgcggatgcgtcggcgtcggaggacgacgacaacgacggcgacgatgcgggtgaaggaggagcacgagaaggaggaggacggcgagctcgtggaaggggagtggatgcctagcatggaggggttcgtgctgtacctggtggacagcaagcttgtcttcgacaccatcgagcgggtcgtcgccgagtccaccgatgtcgcctatgtttacttcaggaaaagtggtttggagcgttcagctagcatttcaaaagatttagagtggttcagagaacaaggggttgaaattccagagccaagtactttaggatcaacctatgcaacttatctgactgaactggctgagagcaacgcccctgcattcctctcccattattacaatatctattttgcacatgtaactggtggtgtggcaataggcaacaagatccgcgataaaattctggatggaagggagctggagttttgcaaatgggacactgatgctgaacttctgctgaaagatgctagggagaagcttaatgagcttagcaagcactggactcggaaggataggaacttgtgcttgaaagaagctgctaaatgcttccagtacctgggaaagatcgtccggttaatcatctcatgagccatcatatctggtggataagcctagtctaatctcactgcatgcattagtggatatagtctagaag

SEQ ID NO: 26316 - DNA, 460 bp, Setaria italica
  Peptide Sequence Number=SeqID_92290
ggtaccggacgacgcgggtctcggcggcgtgagcgcggagcgtgcggagggcggcgcccgtcgcgggcttgtcggcgcggaagacgcggacgacccccttcttgtcgccggcggcgaggagggcgccgtcgcagcggaaggagggggagaagacgaggtcgcccgcgacggagatccggcgcagcgacttgagcgggtcgccggagaagaggtgcagcgaggtggaccacgcggcggcgagggtcggcgaggaggcggtggcggcggcaggggcgaaggtgaggtcggtgacggggaagtcggcgccggagacgagctcggaggagcggaaggcgcgccaataggatccgtccagggaggcgcgcgcggcggcgccccgggaggggaggagcgcctggtgcggcgccgcggggaagaaaggcttggaggtgtcggcggccgccatgattgctacggcggc

SEQ ID NO: 26317 - DNA, 489 bp, Setaria italica
  Peptide Sequence Number=SeqID_92291
tagctgtccataatgaggagcttggtgcatatgctgttcagaagttggtcaagaattctgcagtctttgttgagggtgatatcgagactagagtctacagtgacagtgtcaatgatcaagtgaaaaatataccagagatctgtttgcgacgtgatggcaaaatacgcttgcttcagtcaggggaaggtgatgtcagcaaatcattagaggaattaagggaaggactattctagctgcaatgcaaaggaccgtcggccaacacagcgagttggacaagcgttagatttgctccctgtgccgcaagcgttatgtctcggagtgatgttcttattcttgcagatgcaagaaacctgctctctttcattttgtttcgctttttctgaatttagctgaaaggatcatcttatggacgttgaaataaatatagtgtcatctgatgtaggagtgaacgacatttcagctattacttaatctaaatttgcaggtcct

SEQ ID NO: 26318 - DNA, 607 bp, Setaria italica
  misc_feature (553)..(553): n is a, c, g, or t
  Peptide Sequence Number=SeqID_92292
cggtggacgacgccggggcacgaggagcggcccaaggggtacctcttcaaccgcccgccgccgccgccgggggagtcgcgggagtgggaggactgggagcttccctgctacgtaacctccttcctcaccgtcgtcatactcggcgtcggcctcaacgccaagccggacctcacaatcgagacctgggcgcaccagaaggcgctcgagcgcctccagcagcaggagctggccggtgccggtgccgcgagcgatggagacgccgagtgatccgctggtcagatcatcttggaccctagatttttctgattatctgtttgtgtcggttccaataagactgtctgtactatgatgtatgtcatatgagatccaaaaatggatggacatggccatatatgtagccctgttgatgtttttcactggcaaacttatggtgctgagtctttgctacttgttgcacaactgtggacacgctatacactttgaatgttttgcatctgtattctctgcacgtgcttgttgcagtgaaattgttcatggctaaaataaaaaaaanaaaaaaactaaaaaaagagaactagccaaggacacacaggggggattaagggag

SEQ ID NO: 26319 - DNA, 400 bp, Setaria italica
  Peptide Sequence Number=SeqID_92293
cctatcccctgtgtgccttcctatcccctgttgcgtgtctcagctctctgccggcgagatccagtctctgaagcagcacattcaccaagggatcagaaccaacaccaccggcgtcgaaccgtcgaaaccgccgagcacctacgtcgccatctcctccctggcctggacgtccatcgtccgcgccaagcccgccgtgcgcgacgccgacgacgcctacttcatggtctccgccgactgccgccgccgtctgcgcccccgctcggtgacggcttcttcgggaatgccatcctggcgatcttcgcgcgcgcgagcggagagcccgggcgcggcgagggcgcaatgcaggacgaggtggtgctgcgcgtgacgacgccctgtacgcgcaccccgtctcccgggt

SEQ ID NO: 26320 - DNA, 1033 bp, Setaria italica
  Peptide Sequence Number=SeqID_92294
ctcccgtgcaagggcggcgtcctcgagctcggctccgacgtggccgtccgcgagacccccgaggccctgcgcgccatccagtccgccctcgccgttgcgcccgcaccacgtgaggaatgcatgaggatcttcggcaaggacctctctcccagcagccgaacgccgcggccgctgaccatggggctcagcgtcaccggcgacaattgggctccacagcccggcggccacgccacggcgtccacacccccagacaagacggaagccgcgaagcccaaacctccggagccacccaagagcatagacttcagcaaggcgggaaagccggggcaggccggtggcgaggagcgtaggccgcggaagcgcgggcggaagccggcgaacgggcgggaggagccgctgaaccacgtggaggcggagcggcagcggcgcgagaagctgaaccagcggttctacgccctgcgcgcggtggtccccaagatctccaagatggacaaggcgtccctgctcagcgacgccatcgcctacatccaggagctggtgctccggctccgcggcggcggcggcggcgtcgctccggcggcgcgcgcggagagcccggccgtggaggtgaaggcaatgcaggacgaggtggtgctgcgcgtgacgacgcccctgtacgcgcaccccgtctcccgggtgttccacgccatcagggacgcccagctgagcgtggcggcgtcggacgtggcggtggcggacgacgccgtgacgcacacgctggtgctgcggtcggccgggccagagcagctgaccgcggagacggtgctcgccgccatgtcacgggggatgaccagcgccaccccgtccccgtgaccgcgctagctgtagcccgcaagtcgtaaccgtgcgcgtctcgtgcgtgcaactgccaacctttactgcgttagtgctagcttctcaacttgtgactgcatgccggccacgtagtaaaagcccccagacaacgcagtggccaatggggcacagatttactgttcctttccctagtttttct

SEQ ID NO: 26321 - DNA, 2506 bp, Setaria italica
  Peptide Sequence Number=SeqID_92295
tttacacctcttaattttgagtttaggagctcaagattgtaagatttttggtacctgttcctttcatgaaaggccaaacaaagcccaaaactacacgaaaaatgaccgcaaggatctacactaatcaacttcggtaaattcttgtacaaggacaaaatgctgctcaaaacatgtttacatgtaacaagtacaacatcactgagctcaagcaaacacaatggtgcacaaatgagtgcttccatcttagcagtggaagactattgacgccgtctctttatcctctcaagggcacccagctgctcattctcttgggcaccagagctttcctcctggctctcagcggctctcttgccgagctcgccaaacacagcagctggaacactcttctctgcaatttgtacatccggctcctcgtcgtcgctctcatcgggcagctcaatatcctcattgttaccagcttgttgcctgctgctctcagcctgcgcctctactccagcactgacaaagctcatcatcctgttagcggaggctggggcagtgctttgcgctgcagaaggtgctgtggatggtccaggagctagttgcctttccaaggctgccatctcatcctcaggaacgccagcacgcttcagagtgtcgactgcctcatccaggtttagcctctgatccctctgcatcaagtactccggtagtatgaaatgtgtctgactgcgactagcagccactgtacgtttgatacgaagcatctccctaaaagtgtcttcgttaccatgctggatctcaaagtcattccacttcttccaaaagtcagaattgtttggatcagcatagttggatgcgtgcacatagatagcacgcgagcggtcaatttctccaaggcttctttctagctcagcaaatttcatgcacattgtcagaacatctctgtctgggagcccagattcaattgcttgctcgtatatttgtcttgtccttggaacgccgaacagctcagcagcacgtgctatatagatttcatacatggccattttttcactgttaggaacagcccttacagcttcatcataaacattcatagcacgttttgcaagaccatagtcttcctccagtttggcccattgtaaatataggggcttcttttcatctggaggagcctgttggacagcttcatggaaaagctctcttgctcgttctaacttgcttctcttgtatctctgtacaaactttgtaaggtaggtcacccagatggccttaacatggggatacttgaatattttcacgcccctttcatacactttaaatgcatcttcaaaatacctgtgctcctcaagaagatatgcataattgagtattatctgaggagtagcaattcgtaaatccaatattctctcataaacggcacgggtagagtccaaggttccaaggctctcctccagatcaacgtaaaagctccacagtttcaaagatttgtgtactttcatttggacaggttcgttcccctcagcagcagctcgccgtttaacctcgacagagggctctgctgttgcttgcctcatcagctcaatagccttgtcaaaattgctgtgtcgcagctccatttccgcccattcacaccagatactggctaagtggtcaactgccttataattcacttgagtagcccgtttgaagatatcttcagcactatctagacgactgtgtttctcatacatctttgcaaatgctacccatagagtatggggtttcccaactgctttcattgggtccacggttttcacggcctcaacataggtcgctacttgccttgcaggatccttctcaaaaagtttcaccctcctgtgccactcctccacgttgtgtgggttctgtcgcaacagcacactgctaagaagctctggtctgcgatccaacagccgctcaaaccttgccatcctcaaatcagtatcgtcctcatcattcaaccagaattcctcgaggaatttcttcgatagtttatccatcccatttttcctgcctcctccctcatcctcatcctcagccccttcttcctcggcagcctccagctttgctgcaagcatactctgctcaaactgtgtatatgcctcaaacaccacgctgaactccttcacggtaacaaccgatgaaacaccctcctcaaatacatctctagctttttcgaaaaggcctctcctgacatagtaatcagccagcgaggtccaaagcttgccaacctcgtcggtgaacttccgaatcccaccccgcaggatggcgtccaccttgaggccagcaacctcatcagcatgcttggtgaggatctcgcagagctcgagccagagctggtgcctggtcttccccttgacagagcggaaaccatcatcattgagcacggaagccagtcggtcagcagcctcttgccagcggtttgcagttatgaggaaattgatgaaatcctctgcgtgggaggggtcgaactggaggtagcggcggaacacccggagcgacgtct

SEQ ID NO: 26322 - DNA, 884 bp, Setaria italica
  Peptide Sequence Number=SeqID_92296
tttttttttttttgtaagaaacggtggctagctgggtttattctcagagatccatctggtcgtaggaaaaggaggcggagaaacctccacaggatgcacgaacgcgatccgacgagatcacgcacgcctgcacaattattacatgccgcccggggcacatccgcacagcggcacagggcagcagctgatgaattaattaagccaggggagcttcggcctacagcgcggtggcagcggcctcgacgtcgtccccggcagtagccgccgccgagcgcttctcgtggcacttgtcgacggtcttgtagaggcggtagggcggggcgtcggtggcgagccactgctcgacggtgaagagctgctgtgcgcatcccaggtgcggccccgtggacgtgacctcgacgtagttgcagtaccagccgtggtgcgggccggtgccgtcggaggtgaggttcatggcgcagggcgcggcgcgcatgcagggcccccggccgctgaagatgtcgaggttgccccgctcgtagtagtcgtggccggcgcccatgaggccgccccacccctccaggtccgggatccggatgcccgacccgtcggcgcccaccagcgtcaccccgatcttggagtccgtcccgcccttccagatggaccccgtccgcacgtacaccgtgtacacgcacttgtcctccgggtcccgcgccaccacctccgtgacgacggccgccgccgccgacgcgcacgccacggcgccgaagacgacgaggagcaggcagggggagagcttcgccatggccggcttcgatcgcagcggaggaagcttaggagtgtgctgagctgagagaggtaggtggtggtagaagagacacggtcgtctcaggctcacagcgcag

SEQ ID NO: 26323 - DNA, 301 bp, Setaria italica
  Peptide Sequence Number=SeqID_92297
cagatcatcggacaaaagggctaggcatcttaatgctccacgaactccattgccattgttttggtcagtgattaagtttaagagaaggggaagtaactcaggccagtcttcaggccagtcttgttgcccaatagctgctacagccatgctgatagcagtgcgaatcttcccatgagaatcatccaatgacgtaagcaggagctgccgtatgaccaccttttcagaagcagaaacaacagggggcacgaaattctcttcatcttcttgccaatgctgcttgatgaactgctttagcaagaca

SEQ ID NO: 26324 - DNA, 895 bp, Setaria italica
  Peptide Sequence Number=SeqID_92298
ctaagcttagacatagctaaataaaataactaggaacactgtactaatgtagcatattaatcctactggtttgatcatggtcaacagtatagtccataagaaactgaactaactagaaagaaaaaaaaagacataaattcaactattcagaagccaaaatagacattcaaaggatctataggagtgaagaaccatcaacatactcatctcttacacactatatggattcataactgaagtgatgcctaagtggagacggtgagggtgaatgagagtgggaacgagaccttggagatcttgatagtgatcgtcttgtgaaccttccatccatgtacctaccacttattcttgttctcatgcgcatttcttgcggtgtttttctattctcttcagcataaactattgaaatctcttgaccaccaataacttgatgattcatctcttgcttggccactgcagcatcctcagggtagcggaatttcacgaatccaaaaccacgaagttccctggtgtggaagttccttggaaggtagacatcctttacagggccgaattgctcaaatggaacacggatatcttctggcctgactgtgagggagatgttgcggatgaggagaccggactgcgccgacggccgaccgtagaaacgccggggtccgcctccgccgcccccgcccccacggtagcggtcgcggggtcgtcgtagtgcttgcgcctaggagggctccggctgtaccgcctccgcgggctgtagctccagctcggactccggctgcggtagccggccatcgttcgtcgcggatgctgcgccgcgcctgagacgaggaaccggctttgctagggtttctccggggtttggctcaaggtgttttctgtcgagagtatttttgtatta

SEQ ID NO: 26325 - DNA, 426 bp, Setaria italica
  Peptide Sequence Number=SeqID_92299
ccagacatctgctagcttcgtatactgcagcaaatgcttgctttaggtgtgatcagaaatgatacaaaggagaaaggattgaaaacatctcgtcgtgtctagtggactgggggcataaatggaaattaaaggcattgctattttctgtttcttggataatattgtgggccactccagatatctctggtggatagacaagaagataccctcaaggagtcactatgtagcgtgttgtgttacctcattgaagtgctttagatctatcaagtatcaacttcagacatctgtgtaaagttgtacacggttagctgactctgcaatctttctctctgtggtcactgtatctattcaaaattttatgacagctgctgtgatggaacgtggatcgtgatttctgtttttttattgagacttcatgtaggatag

SEQ ID NO: 26326 - DNA, 536 bp, Setaria italica
  Peptide Sequence Number=SeqID_92300
gccgccgccgctgccattgggtcgtcgtcggagggctccggctgcttgctggcgtagttgtgctgcagctggaggtcggggtggaggtggtggagctggtggacgtagcgcgtcgcggcggtgccgaggtcgaggcctgccatgcttctctgctagctcatgtactgatgtagctagcaagcaaaaatttaaaaactagaaaagcaggggaaaaaaagagagaaaaatactcgaattgcaacagaagtggtgttttgtttttaggttaaaaggaagtgttggaaaaggaagcaatgatttttaaagagggggattgtttatggttctgcctgttttaaaagtttttggatgcagaaagaagcaaacaggaagaaattaaaaaaccaaacaagcgagtgcttgcatggaggagagaacgaacactaacaaggcagcagagagctgtgtgctatgagcaggataggggaaggacggaggagggaggaggagagaaagggaagctatgaaggagaaggtgaggcacaggaggagagatg

SEQ ID NO: 26327 - DNA, 788 bp, Setaria italica
  Peptide Sequence Number=SeqID_92301
ttttcatgtctggtgctctagtttgcaaggtgtaagaaacatagttatattacattgctgctgatatttgagatacacaaaggtttgtacatagacatggagaaaaatcggcgcatcttgtcatggtgactctatagacaggcatgaacacttatcgaaggatatcaacgtattaacatgaccggtagagatgatcagatggactctgctgaatcacctacagcccagctctaatctcccatctgcactgatactggtgtttgtgcatagcttctgaaggtcaatgtagccgatgattgtgtcctcgaacacgacatcttccatcttagcatcattgaaggttgatcctgataaaaccgtattcttgaagattgcccctgtgagatcggccttctcaaaattgacacggtctatcactgcatttgtgaagtcggttcctttgaagcttgcaccaacagcataagctttggacatgacaacttcagacatgtcggctccatcaaactttgcatcggacatcaacgccgcagctagggacttgcctttcagattagttttctcgttcgtgtagtcacagaaccggagatcaaggggcttgtcatacaccccatttgcctgaccaattgtgttccccacgaatgcacgctcacatctatttggctccgttgagagtggtggcaatctctggctcgcggcaatgacggggttggacgcggacgcgacggcccaggccgcgagcaccccgcacgcgaggcggaaacgaaaactttgtccttccggtccgtcgt

SEQ ID NO: 26328 - DNA, 547 bp, Setaria italica
  Peptide Sequence Number=SeqID_92302
gcccgtgaggtccatcacccgcacggcggggagcgcggccagcgccgcggcgcggaacggcccggagaaggagttgttgcgcgccacgacggacaggagcgacggcggcagcaggcccggcgcggcgagcagcgggcccgacagcgcgttgccgctgacgtcgaggtggtagagcgagcgcatcgcggccaggctcggcagggaccccgtgaagccgttgtgctgcagctccagccgcgacagggcgcccaggagcgccagctgcggcggtaccccgccggagaagccgttgcgggagaggtagagctcctggagccccgacgcggcggtgaagagcgacgccggtatcgcgccggagaaggcgttcccggagaggtcgaggatgcggaggctcgcctgcagcgggacccccgacgggagcgcgccgtggaagcggttgccggcgagcgacagcgacgcgaggaacggcagcgaggagaggactaccgcggggagcgcgcccgagtaccccgcgggtcgagcgcgacggccatgacgcggagttggg

SEQ ID NO: 26329 - DNA, 634 bp, Setaria italica
  Peptide Sequence Number=SeqID_92303
tacttaacttggtagtcaagatttggacagtttgtgcacatggggtcaatatcaaaactctcatctgcttctgcatctttgctgccatgatcagcagcactattgtctggatctaatggtgcagttgctgtactggcacttgttccttttggtgatcgtggacaaaaattacccgacaggtacagctcatcattagctattggataaccagtgtgttttagatgcacccttatctggtgagttcgaccagtcacaggtttgcacaagacaatactgtaagtcccatcagtgcaaatcctttggaaccttgtgagtgcttgttttccatttggttctttcccagaaccatcactaacctccacagtactccttccttcccgtgcattgaaatttacattggcatcaacagtttgctcaccatcaggaaataccccaaaaaccttggccacatattctttttgtagcagaccagcttcaatctgttgcctgaaacattcagccctgtcagctattttttgcaaatataaggaggcctgaaaccaaccgatctaaccgatgcaccgtggaacagaaagctgggtttgcaaatagttacaacatcaaacttcattctgaagtattgaaataacaccag

SEQ ID NO: 26330 - DNA, 230 bp, Setaria italica
  Peptide Sequence Number=SeqID_92304
cttcagccctatcttgtgtggcagcgcaatccagttgcccccagtgccgtgctcctcgatgtagttcttaagcattgcgtcctcctccggcgaccatggccccttcttcaccgtcgccttgtcgcagcagggtgctctcccccatctcctctcttcctctgctctctactcctgagcttgggtctctctctgtctacctgtgtgtatgaggtgtgttgtgcgtgatgagc

SEQ ID NO: 26331 - DNA, 437 bp, Setaria italica
  Peptide Sequence Number=SeqID_92305
gattgaaaaaaaaatactagtttattactagtttttgataagatgcacaatccactacaactttgcgttttcatacactctggatcaaaacacaaacactttgcccaccatcaaccagaactttccatttttattccggaacatcatgccttttttatactacatagtaagtactcaaataccaattggcaagtttttatttagggcactaaaaaaatgttagaaacagagcaacctaacagttctttgtacagagagttcagcggtgttaagcaggtccttgattaacatagacgataatagttggcataagattagtattagtgaaatactaactgccaagggagaacttcttagcatcaatgcctgacgacaataaaatagatctccgcatgtgctgaaatctaacgattccccaccatctaaaacctaaagac

SEQ ID NO: 26332 - DNA, 207 bp, Setaria italica
  Peptide Sequence Number=SeqID_92306
aatgagatactggctcgacaagatcaacctcattgaaatgcctaagaagaaaattctttgtaacgcgtccaatacccgagccacaatcaagggcaacgagatgacgcttcgcggtgccgaaccgctcggcgaggagagggcggaggaaggcgtcgctgcccttgacgtccgcgtcgttcacgcacccgtaacctcccaggaccccct

SEQ ID NO: 26333 - DNA, 656 bp, Setaria italica
  Peptide Sequence Number=SeqID_92307
tgcggggtacatttctgttcatatttgacttctttgcattaatgatacgcctctcagctagtgcttcagcttctaactcgtcctcaaaccgtctacgacctggcactcgccgagaaccatattctggctcatcatcctcatctaaagcatcttccaagaaccctggggaaagctgtcgccttggcctggcaggttgtgtgtacttgcggttcaccttttctcttttgcgttgaagaattgaatgggcccgaatattttgacccaaagcctgcataatgaccgtatcagtagaaaggacaaatcagtttgaaaaaacagatcagtaacaaacagactcaagtgacattactcaattgacggtataattgttgtgcctgcatgatgcaactttttcttggggatactaatttgagcatgccacacaaatcatcataacagtagcaacagagtgccaactaacagaactttttagaaccctcatactgcttaagctggtgagacctgaactgatatagaaacttatataagacaaacttcagaaaatgactttgtaattgaatcaataggtttatacatcaggatagtcctgatcttcttaagaaattagtactccatatcaatgtgaggaagtcaagccctagtactaccaacaagag

SEQ ID NO: 26334 - DNA, 1977 bp, Setaria italica
  misc_feature (1)..(19): n is a, c, g, or t
  Peptide Sequence Number=SeqID_92308
nnnnnnnnnnnnnnnnnnnttttcgttcccgtgaattttttacttcatttcttcttcttttatcttgatgataataataacaaaccagcagcgtgccgaataacaacagttaacaacctcctgtttccaggcaacgattctccaacacacacaaaaaagaaagataactgtagcaggtcatacaccaacgttttacaagttttcccctgttcatcatcagtcctcgtcgctgtcgtcgaaaacgacggccttcctgcgatgctgaacagcctgctgcttcctgggtggagagtcgtcgtcgtcctcctcctcctcctcggagaccagctcctcgcgcctgtgcccaccgcctcctgattctctcttccgcttcggtgcctccatttcttcatccgacaaaggtgcttcttcagcatcttcctcgtattcatcctcatcaagctcatcttcccttccacgaattggtgagtgctcaatgtcctcgccatcagtttcatattctgactcctccctctcactctccgagtattcatcaacttgacgtctcggtggacgagcaggagggtacgatgtattgcggggtacatttctgttcatatttgacttctttgcattaatgatacgcctctcagctagtgcttcagcttctaactcgtcctcaaaccgtctacgacctggcactcgccgagaaccatattctggctcatcatcctcatctaaagcatcttccaagaaccctggggaaagctgtcgccttggcctggcaggttgtgtgtacttgcggttcaccttttctcttttgcgttgaagaattgaatgggcccgaatattttgacccaaagccctttcgttttcctgtttcactttctcaggatccttagtctcaaaccatttttgcatcttaacagttttcttattctgagaatcaaccagtgcggttaacaggcgatgtgactttgaagacaaggaagatggcataaatctcattttgtgcaaaagccttccttgtgattgtagaattcccttcccattcctcaaaaacagatgggactggtcatgatgcgcatcatgtacagatatatcaagaacttcattgccaatcagaagctgcatacttccatctttccattttacaaaccgtgcattgctttcataagatgtagtgccatccgggttcctaacggttctccaccgcacaatattgtcctctagccgtatccttttcttagttccagattcatctgtaacaaaaacatcttcttccacatatgtttttggatcaaagggtttcgggtcaatccccataatgtttgataccttgatcacattcattttgtcaggccgagctggtggttgcctaaatggaactaccaagtccagcggtggaccaactggtttctcttttgtgttcagttcgcgattttcatcagattcatagtgcatatcttcatcagccactacatcatctggttgcatgtccttctcatactgcccttcatcctctataggcgatctatgggaatcttcatcaatgtcatggcgtgtacgatatggacctggttcatcttcatcactgtcaccaaacacatcgcgaactacttcctgatctctttcttcctccattggggagcttggtttccttgtttggcgaggttcctcgtcttcttgacctccatcagcatagtaattatcttcggatccctcagattcagaggcaacaactccccttcttctgctagatactgtcctctgctggtagccctcatcttcactgtccattcctcttgcatcaggttccaccctttggtcatcaagttctctttccggagagctctggaccttgtccccatcactttctccttgatcaagatccgcacgatgagcttcaccttcactttcctcttccatcccaacttgtccctcactttcgccttcaccttcccctccattctctgcctcaccatccacttctccccc

SEQ ID NO: 26335 - DNA, 259 bp, Setaria italica
  Peptide Sequence Number=SeqID_92309
ctcccagttgcgagcttagacgacgacggtcagctagctaatccagtttacttccttgctctccgagtgcctccccttctattccaaagcgagcttaagctcaacatcatttccatccttcgtgctcaaagctctctcctctctcactcccccgttccatttacatgttcatcacttggtgagctgaggagaaaaagcagaggcggagaggaaaggcagaggcaggggcgacctcatcgagaacagcaggtctcctacg

SEQ ID NO: 26336 - DNA, 454 bp, Setaria italica
  Peptide Sequence Number=SeqID_92310
agccccaccattgcttccatgccagatgaagatgtttgtggcttcttctcaaggagcactttgaaataggagttatcgaaaacgattggactcccgaatcctttgcctccaattgtgtgtgctccagataaagcaaccatttcctgagtcgaaaaaccctttgtgctgaataatgtttttagggcagctgcatccaatgtctcttcaggaagtttaccagcaggatcagcagtactggaatctaatcgtcctagccttactggaatttcaggcccaccacagagcgcaactgcctcagcaccagccacagcaatcaagtccgcccatgacactttctgtatatcatcgattcctgcttttgcttttcctaatatctttatggatctacttaccccagtattttcaggtctgtcaacttcataaattatagagccattcatgccacctgatttct

SEQ ID NO: 26337 - DNA, 511 bp, Setaria italica
  Peptide Sequence Number=SeqID_92311
cctctgctgtatctgtctccacgtgaaatcctaattcagcagcattttacagtacatcgaaatcctattaagctgctctccacgtggctccactatctacaagcttgatgtatgtatccctgaagtcgtcgaaaaatctagcttggtcctctgcatagatcctgatccatcttaagcactcttcatcttcagtgagtgcccaatccgtgcgcagccccaccattgcttccatgccagatgaagatgtttgtggcttcttctcaaggagcactttgaaataggagttatcgaaaacgattggactcccgaatcctttgcctccaattgtgtgtgctccagataaagcaaccatttcctgagtcgaaaaaccctttgtgctgaataatgtttttagggcagctgcatccaatgtctcttcaggaagtttaccagtactgctgatcctgctggtaaacttcctgaagagacattggatgcagctgccctaaaaacattattcagcaagtttacc

SEQ ID NO: 26338 - DNA, 164 bp, Setaria italica
  Peptide Sequence Number=SeqID_92312
tgctgatcataaatcactatctgagctttcacaaaactatcgatagtatcattaccatccaaagtgaatccaactgtttgaagttcactgtctggtatcaaaccaggtattcgactaaatgtcgggggctgtagggaaggaagactagcaggcaagaaattctg

SEQ ID NO: 26339 - DNA, 791 bp, Setaria italica
  Peptide Sequence Number=SeqID_92313
gagatacaagagttctgagagatcatggaaccagagcacacacctcaagatcctctgtaagaggaggtacccttatcatttgtcccatgccgttattgggtcaatggaaggatgaactggaggcacattcaacgcaaggagctctttctgtttttgtgcactatggtggtgataaaactgataacctcatgctgatggctgagcatgatgttgtgttaacgacttatggtgtcctttcagctgcatacaaagctgatcgcaccagcatcttccacaggatggattggtataggattgtgcttgacgaagctcacacaataaaatctcctaaaactaaaggggcccaagcagcttttggattaaactcacaatgcagatggtgccttacaggcacaccgttgcaaaataatttggaggacctctacagtcttttctgcttcttacatgttgagccatggtgcagtgcaaattggtggcagaaacttattcagaaaccttatgagaatggtgatgatagaggattgaaaattgttagagctattctcaggccactaatgctgaggaggaccaaggaaacaaaaggacaagattggaaagccaatactggtcctccctccagctcatattgaagttgtagaatgtgaacaatctgaacaggaacgtgatttctatgaagcgcttttcaggagatcaaaggttcaatttgacaaatttgtagcacaaggcagtgttcataacaactatgctaatattcttgagctacttctccggctaagacaatgctgcaatca

SEQ ID NO: 26340 - DNA, 341 bp, Setaria italica
  Peptide Sequence Number=SeqID_92314
cctccagattgacatggccatgccctgcatttccatgtgctcgctggcgtaagctgcacagtgaatgacaagccgtgctgtgtgcctctgtttcttctcagagaggaataattacatccaggttttcagtcatttgccatcccttgggatacccaagatgtttgtcttccagacgaagattaaaattcataatttttgaacaaccagctggtatgccctccatatgactttcatcttcaacaagttgttctataaatgttgtctcctgaaagccctccctgaccgtgtccagcagccggatgtagttccacgcctggtgcgccctcttgtcggcatcccag

SEQ ID NO: 26341 - DNA, 659 bp, Setaria italica
  Peptide Sequence Number=SeqID_92315
aaaagaaagacaattaggggaggaaataaatgtgaagatggggcttgcttttgataaacaagatattgactactatacacatctcttcagagacgatattaaacgcaatccaactactgtggaactttttgatattgcacaatccaatagtgaacatagcagacattggttttttaatggaaagcttgtaatagatggagaaaccatgccaaacactttgttccagttagtgaagagacccttgaaggccaacctcaataactctgtcattggattcaaggataactcgagtgccataaaaggattcccagtaaatcagctacgcccaacaattccaggttccacttcaccattatccattatgatgcgtgagcttgatattttattcacggcagaaacccataattttccatgtgctgttgcaccataccctggagctgagacaggtgcaggtggccgcataagagacacacatgccactggaaagggttcttttgttgttgcttccactgctggttactgtgttggtaatcttcgcattgacaatgcgtacatgccctgggaggacccttcattttcttacccagtgaacctagcctctccattgcgaattcttgttgatgctagtgatggtgcatctgactatgggaacaaggttt

SEQ ID NO: 26342 - DNA, 527 bp, Setaria italica
  Peptide Sequence Number=SeqID_92316
ttatgctattaggcaatgtaactgtagagtaaaacattataagctgttttcttgggaggttgcaatcaaacaagaccttaaggtacagagcaaaagtgatcatgaatttatgtcttcaaggagaaacaagtacacacaccacatataagaagataaatattccatattcagtagtcaaaacgtgataaactatatgtctgcacaagtgatataaatacccataaacttcaaaacaacaaacaataattcagtaagtacaaatttcattcactatgagtgcataagtgcatatactgagtactgtatttcattccatgagcaacaccaaacttggcaatgcacatgtgggatgagagctcttagtattgaacaaactcagggggattccagttcaaatagagatcgaaataacaaactagcataaaatattggatttacaacacaaacaggagtcttttgagacaaaatataagtaaaactagggatatgaataagttacatactcagtttagaaaacaatcatatct

SEQ ID NO: 26343 - DNA, 345 bp, Setaria italica
  misc_feature (310)..(345): n is a, c, g, or t
  Peptide Sequence Number=SeqID_92317
gccctaaatccacacaggagggtaaggatatgggagggtacaatttatctagggtaaggatatgggagggtacaatttatctattgtatatgtattatatgtaacacaaagttaattcattgaatatgggtaggattggggagggtaacgagtggataataataatttggatttgggtgtaaataagagtgagtttgcctgtaccctccccagtggcaggaatacgcccgatttgtagctaccaatttgtatgacgactattttcacgggattcattcctgtatgtagtaataaattcaattgtgtatgnnnnnnnnnnnnnnnnnnnnnnnnnnnnnnnnnnnn

SEQ ID NO: 26344 - DNA, 339 bp, Setaria italica
  Peptide Sequence Number=SeqID_92318
agtctgcagagggacaaggttctagcctctctagctgctttcctccaaatttattattcaattataaactaaattaacctcagaaaacttttggtgaagaaaacaccatgcaggaagacttggagaagagatgatagccggaaggcgcagaatttgggcttccctctcttgccgcacttcaggagatgttcgcccttcttcagatcaacgatggcctggctcgttggcgccgtatccccggcgaggagaggagggcgggctggcggcgccggatgtgcagggaggccgtgccgaggaggagggcggtcgtcgtcggcggtgcagggtgaccgagccgag

SEQ ID NO: 26345 - DNA, 274 bp, Setaria italica
  Peptide Sequence Number=SeqID_92319
ctcgtcctctccgtctccgtcgtcttcctcccctccggcctgccaatgcctcccaaatcctagcccacccgccgcaaaaccctacatccggccgccaccggcatggacccctccggatccgcgtcccgccagggccgcctcctcatctcgccgtcgctttccaccccgaccttctccacccgctccgcctcgcagtccccggccgcgaaccccgcgccgcagcaccaccacgagcgccgcaactccacctcctccccgaagccctcgttccctt

SEQ ID NO: 26346 - DNA, 313 bp, Setaria italica
  Peptide Sequence Number=SeqID_92320
ctcggccagagcgcgggggagagcgccaccgtggggaaggaggagagaggatagaggaagaggcaagagctcagagccgcggctgtccgcgcttttgctgcccgcgggagcgatcccccgccttccgtcggccagcaaggagcaggaattgcggaattggaactggtttcgcataaaccttgggaggaggccacggaatttggaacatgggaggttcggtcgggtgcttgggaggcggctccaagtcggggcaaaatcagaatggtcaggccgtcgcggcctcatctcctcgttcaggtcgtgtattatcagg

SEQ ID NO: 26347 - DNA, 359 bp, Setaria italica
  Peptide Sequence Number=SeqID_92321
gagcggtggaggcagcggcggcggctgctcctttccagggcggcagaacaccacgcagggctcgcaagctcgctgacgcggagctcctccaccgtcccgccgccgtcaatcgccaccactgcacctccgccgtcgatcgccgccgccacacaaccacctccggatcctcaattgcgcggtggtcaccgagcccctacactgcagccgccgagcttctacaccgtgggcgtcgagatcttcaagcgctcctccaccagcccttgtctccgtcgccgattgagccctgaatccgtcgccgagctcctcaattgctcctctccgtgcccctacgtcacctactgttgagttctacaaccccc

SEQ ID NO: 26348 - DNA, 494 bp, Setaria italica
  Peptide Sequence Number=SeqID_92322
acttcagagcacgaaatagtaaacaggaacaagggttcacataagccacacatcaggtcctaaagtccattatttcttttgatagtcagcgcacttttaaaatgcatcctgaccccctcctccagaaccatagctttggttgccaccaccatagccgccgctgccaccatagccgccaccgccaccatagccaccgccgccgccactgtagccaccactgcacctccgccgtcgatcgccgccgccacacaaccacctccggatcctcaattgcgcggtggtcaccgagcccctacactgcagccgccgagcttctacaccgtgggcgtcgagatcttcaagcgctcctccaccagcccttgtctccgtcgccgattgagccctgaatccgtcgccgagctcctcaattgctcctctccgtgcccctacgtcaccactgttgagttctacaacccccagcgaactgctacaggagatcgaggtcagcttgatta

SEQ ID NO: 26349 - DNA, 1082 bp, Setaria italica
  Peptide Sequence Number=SeqID_92323
cgggccgcctggcgatctgaccgcgcgtcgccacagaagcgagagagcaacagcgacagcggagccagcgaggcggggcacggcggaccgggtaaacacgccgggcctcggccgcctactccgccttcccttcgcccccctcttcacccagtcgggcggtcctcggccagagcgcgggggagagcgccaccgtggggaaggaggagagaggatagaggaagaggcaagagctcagagccgcggctgtccgcgcttttgctgcccgcgggagcgatcccccgccttccgtcggccaggttcttgcccaattcttacctggtttggggagccaatatggggtatcgaatccagctatttccgtgtgtttctcaagattcttgctgaacttgttcgagtagtcaaggagcaggaattgcggaattggaactggtttcgcataaaccttgggaggaggccacggaatttggaacatgggaggttcggtcgggtgcttgggaggcggctccaagtcggggcaaaatcagaatggtcaggccgtcgcggcctcatctcctcgttcaggtcgtgtattatcaggagctggaaataatgtgcgagtcttctctctaaatgagttgaagactgccacacgaaattttcacatgatgaattgcattggccgtggaggtttcggagcagtgtataagggaaacctgaaagatggcactcaaattgcaataaagaagcttgcagctgagtcaaaacaaggaattagcgaattcttgacagagattaatgtcatatcaaacgtcaagcacccaaaccttgtcaagctacttggttgctgcgttgaagggaataacagactattggtgtacgagtatgcggagaataacagtttggcaaatgctttgcttggaccaaagagtaaatgtattccattggactggcagaaaagagctgctatctgtattggaactgcttctggccttgcttttcttcatgaggaagcacaaccacgcattgtccaccgtgatatcaaggctagcaacattttacttgataaaaaactgctgcctaaaatcggagattttgggctggcc

SEQ ID NO: 26350 - DNA, 1261 bp, Setaria italica
  misc_feature (1199)..(1261): n is a, c, g, or t
  Peptide Sequence Number=SeqID_92324
ttttttaagtttttattctttttttttatattttgctctttgcgaattactgagaagtattaatgtcatatcaaacgtcaagcacccaaaccttgtcaagctacttggttgctgcgttgaagggaataacagactattggtgtacgagtatgcggagaataacagtttggcaaatgctttgcttggaccaaagagtaaatgtattccattggactggcagaaaagagctgctatctgtattggaactgcttctggccttgcttttcttcatgaggaagcacaaccacgcattgtccaccgtgatatcaaggctagcaacattttacttgataaaaaactgctgcctaaaatcggagattttgggctggccaagctttttcctgatgctatcactcacattagcacacgcgtcgcaggaacaatgggatatttagcaccagagtatgccttattgggacaattaaccaagaaagcagatatatatagttttggggtgcttcttcttgaagtgataagcggtgaaagcagcagcaagtcgacttgggggcctgatatgcatgtccttgtggaatggacatggaagctgcgggaagaaggaagactcttggaaattgttgatccagatctggaaaagtacccagaggagcaaatgcttcgtttcatcaaggtagcactgctgtgtacacaagccacgtcccagcagaggccatccatgaagcaggttgtcaatatgctatctaatcgaatagagatcgatctgcaaaatgtcgttccaccaggtgtgctgaaagaacctcgccagcgtactggtggctttgggggtttgacactagacacatcctcaagccaaagcaccaaatgcaatccagctgaatcttacagcacacagaccaacatgaataccggtcaatttagtacaactgaagtatccccaaggtgatgcgatgaccagcttgcaagcttgtttgccattttcagaggtttctcacaccacccatgagattttattatgcttggtgctgacaaattctcttgatatgaaaggcctgatccactttcatcctgatttagacctacataggatgtgagggccgttgtgaattgctgatgtacaggacctgcaattcacctttttcttttgcagaggaactgtagttcaatttgagaattgcattatgttctttaaaaaaaaaaaaaannnnnnnnnnnnnnnnnnnnnnnnnnnnnnnnnnnnnnnnnnnnnnnnnnnnnnnnnnnnnnn

SEQ ID NO: 26351 - DNA, 1039 bp, Setaria italica
  Peptide Sequence Number=SeqID_92325
cctatcccctgtgttgtcctttggtctagttctctcaaagagtctctgcaagttttcaacaattgataaccgaacacataaaccaatctagatagcattggcaaccaatttttcgataatcaactggtacttctgtacacattgcaatagatagggatctaaagtaatgcgctcaaattttgttctgttcttctcacgagagaagatgcacgcaactttgcactcttcaaaaccaccaccaggcaaaattcggtagcccctgaattgcacctagtgtaatcatttaaccaacttcagagcacgaaatagtaaacaggaacaagggttcacataagccacacatcaggtcctaaagtccattatttctttttgatagtcagcgcactttttaaaatgcatcctgaccccctcctccagaaccatagctttggttgccaccaccatagccgccgctgccaccatagccgccaccgccaccatagccaccgccgccgccactgtagccacctccaccatagccaccaccaccacggttccctgcaggcggcctctcattagcgaagttcacacggacactccgcccatcaagttcctgaccatccatgctactcacagcctccttggcctcatcactgttgctgaaattcacaaagccaaagcctcttgaccttccagtctccctgtctgtgatgatccttgcttcagtaacctctccaaaggtgctaaacgcttgcctcaaagtctgatcatcggtaccccaggaaagaccaccaacgaaaagcttggtggacatcagccgagcagcattaaacaatgcaggagccgaactggcaggggcaccgcttgtcagagcgctgtgccttagaaggctgccgagcttgttgaaggccgccattgaacactaaacctgaagatgggatgggacgaggccggacgaggagaggcggcggaatggggaagaatgaaaggggcggaggcgcggcttggggtttaagaaaggaagaaggcggcggcttagggttttgctttgcgttgttgt

SEQ ID NO: 26352 - DNA, 295 bp, Setaria italica
  Peptide Sequence Number=SeqID_92326
ctaccacctaaggcacatgggacaagaacatcacagtcgtgcactagcaactcagtagaatccataacttgggaccaatgcacagaccatggcatggatgttagatgagtactcgaagttccatggccactcccctgcagttgtcacagggaagccaatagtaagtgaataaataattagtttttacagcaagtaacttcatggaaataaagtctttacacagtacggtaagaattcacatttattattgtaggatcttggtggatcattgggcagggatgcagccacagggcgg

SEQ ID NO: 26353 - DNA, 2666 bp, Setaria italica
  Peptide Sequence Number=SeqID_92327
ttttttttaagtaaatttaagttaagtaattagtttctactagtctactaaaattcttggtaggttatatgtacaatgaaaacagagagttgctgcttacagtcattagtagaaacctatttagcagcacacgaacgcgaaaattacaatcagatactagaatatcttatttatttgaatactggcaaagaacacgcgcgcacgcaccctcttttcttttatatacagaaactcataaaagttgtttccacaggaaaacctacatacatattcagaactagcctaagtttgcaacacttcccagttagtcaagcctcacacagttagtcaagcctcacatgcacagcacccatggcgtaacgatacatcaataagctcccttgctacatcagtgatgatgccacccaatatgttcttctctaaatccttgacaacttcattcttctcgattggcaggtcccgcagacggttccaaccaaagtcccacactgagttagcatcagaatgtgtatgttcaatgtcactgaggagtaccattttcaagttttcagctgtgctattgtcactctgttgatgcagtttcctggggatgttcagagactgaatatcgccgtccaattctctgataagatcactcagagtctgtagtttcaggttagcagtgcgcgtcgtgctaacgtcgaccatcgcctcagttcgtttacctttccttctgattacttcccgtcctacgtctgaaagaacctcgtttcctttgtctaaccacttccctgtgttaacatggatagcactgactggagcatggaatccagttatcgccttggcagtttcaagtaagtagggatccttcagcaacatttccgtaagcaagagttggttctctgtgaatgaatcacatgaaacaacaatcatcttgtgatttttcgaatctgtcaggttatcgggcttcatgatatgatccaaaccatttcttgattgatcatgcacttctgtcatttgttgcagttgttgctcctgcagctctccctcagaaatagtttctagtatctgtgtagtctcactggatgtgtgatcaactctagcatcattttcctcagcaattgaatcagcagtggtctgttcaacagtagtgattggatcattgatttcttcagtgaattgcttttcagattggtctgctgaaatcccactagtactgttgctatctttcatctctaccgtggattgtttgaatacaccatcatcactgggagtgttgtccaacggtttcggagccccagtatcatctacttttgtctcctctgcattcttcagttctgtcattgcaatatattcaaacttctctttcgtacgctttggttcggatctcagtggcctcttgtgttctagattctgactggctgtttcactttttgttcggcgataattttgactggctgtttcactctgtgtcgttcgactataactctgcaccttcttttccatgatgtccatgatgtgtttatctgtcagcttactttgtggttgccttctcattttatctgtcttggcagtctttccattctttccttgagccttgctttcaggagtggcaaggttctccttgttaaacttctcccttgtcctccttggcttcacctcactgtctctctgttttatgcttatggtttgcttctttccgagattttgtttattttcttgaacaatgtctttctcttctgtgactggtttgttctttgcattcttcctaaatctttgaaggaaattcatcttttttcctgcactgatggctgttttttgctggttgctgtcttcagtcagcttcatgtcctgatggactattttgtcatcaactacttggcttagactagctcttctatctgtgccttcctgtttgcttaacacctgtctcatagtttgccttgtttgcttgtcagacatgagatgtgaaaacctattcgacagtacaggttcttcagactttgtcaggctgatgttccactcccttgtctgaaaattcttgctttgtcctttggatggcacccgttctgaagctataatccgtattggtaatgtgccaaccatcgcatttttcgccgtcgcccttcttggcactgcttcaggctttacaaacctctctgtccccttgcgctctgcaaccgccttcgccgatggaaggttctccagccccatcagcttggcaatcagactgggcatcctcacctttgaatcatccttctcaccacttgtagcattgctcttggaattgtttgtgacagcagtaaactgcaaaggtgagctttggtttgatctgtaattctgagacaagctgtgaggaacgatctgcataaaagcatctgatgggctccttgcattgtcagcctgctcggtctctgaatcatcatcaacgatctccaccaaccttgcagaagcagaactcgtcgaatgtggcgtcgagctcttccaattctccttgcccccctccagcagcagaaccttgccttcccctgaggtttccatgtaatccgaggcatcttggagcatcataagcatgctcagggactcctccaagtccatggcgcctctgagcagctgcttcccgatctcaaccgatcctctcctcacgccaccggaggagtacgccatgagaatgtcgttcagcttcg

SEQ ID NO: 26354 - DNA, 690 bp, Setaria italica
  Peptide Sequence Number=SeqID_92328
gtcccggtcgccggcgttcctcacgtcgacgtgcaccgggacggtcaggccctcgcaccgcgcgtgcgccacgcgcacggcgccggcggagcgcgtcgcgttggggaaggacgacgacgcggcggcggcggacgcgtggccaccggtgagctgcacggtgagcttctccggcgcgtgcgccagcgtgtgcgtgaactgggtgtagctgagcccgtggccgaacgggaggatcgtggggcccgtgtagaagcggtaggtccggccggggtacccgctccccgggttggcgcgcatcgccatgttcgtcatcggcgccttccgcaggtagtcctcagggtaccatgtcaccgggagcttcccgcctgggttatggtggccgaagatgacgtcggcgatggcctgcccgccggcctggccggggtaccccacccagaggatggcggcgatcctcggatcgttctgcgcgaaggcgatgtcgatggggccgccggacatgagcacgaggacgacggggcccttggactccttggccacggcggagatgagctccgcctgccggccggggaggagcagggtcgaccggtccagcccctcggcctcgaccttctggtcgagcccggcgacgatgacggtggcgtcggagcggcgcgcggcgtcgacggcggcggcgatgggctgccgggtcccgcg

SEQ ID NO: 26355 - DNA, 2193 bp, Setaria italica
  misc_feature (1)..(23): n is a, c, g, or t
  Peptide Sequence Number=SeqID_92329
nnnnnnnnnnnnnnnnnnnnnnnagttcacttgtgacatgtttagtactcatatatactaagtgccatccaccactcttatgtatatgtacatattccctctgttctgacggtaccaacaaaacaaaatatttacatcaccaggagctacgaaccctgaaagccaaaggacaggtagtctggcatgcctcgcacaacaagcacatctctatgcagcagcggtaacaaacacaactaaatctcgatgggtatcagcagccctcaagcactactaatctaatccctgctggtgttgggcgtcgtggccctgctgtcccaaggagcgtggaccgtggtgggcgagaagggcccgtccttgtgtttgtctccgtccttctccatcgggcactcgccctggatgctcctgagcacctccagcacctccttcatcggcgggcgcatctcgccgttctgctgcaggcagcggaaggccagctccgccaccatcgtcatcatcttcttcgtcgccgggtcggactcgtagcccaggtcgaggtccacgagctgctcgagctggcacttctggatcttgctgatggccatgccggccaggttgatctcgttgcggtgccgggtgatgtccacggcgggcttcgacgagatgagctccaccaggaccaccccgaagctgtacacgtcgctcttgtccgtcagctggtagcactggtggtactctggatccacgtaccctggcgtgccctggggcgcggtggagacgtgcgtgacgtcgagggggaagaggcgggagaggccgaagtcggcgaccttgacgtggaagtctgcgtcgaggaggatgttggtggtcttgacgtcgcggtgcacgacgggcggctcgatggcgtggaggtaggcgagcgccgcggcggactcgatggcgacgttgaggcggagcggccacgagagggcgcgctcgggggcgcgcggcccgtgcaggtggtcggcgaccgtgccgttggcgacgaactcgtacaccaggaggagctcccggctctggctggacgtgcagccgtagaacatgaccaggttcgggtggcgcaggccggacaggatggccgcctcgttatggaactgctccaagcgccggtagctgttgtacagacgcttcaccgccaccacgcgcccatccttgaggtaccctttgtagacggtgccgaagccgccatcaccgagttctctgttctcgtcgaaggaattggtggcctcctcgagctcctcgtaggtgaagaggtgcgttgccgggtcgtcgatgctgccggactccatgtcgccgacccgggaacgcggggtcccgccagagccgctgtacttgaggagcttcgaggatgagttgatcacgttgttcttcctcctcttgcgcataatgaacagaaacgcgccagcaccaagcacggcaagaccagcagcagcagccgaggcacctgcaataactttgagaggagtcttttttgatctgcagcgtgccgccgccgggccgttgtcgcagaaacaggtgaagttcatcccgccgtgcgtgtcgttgcgctggtagccgcaccatccgccggagcgctcgcatccgtcgcactgctgggagtgcgcgttgtacatcaactcgaacccagccttcaccacttcaaaggatccgttcgtcaacggcaagatttcctccttgtgcaagcccagcaccggcgcaaccaccacctcctcgcactcgtgctcgtacgcctcagtacccgtgatcccaccatcgggcaacatgtacgacttcttgccgtcctgttgctggcaccctctcaattccacggcagggaaccaggaaatgctcttcttgcagttgtacaagaaggtgacgttggagtcggattgcgtgagctgaagccaggagttcgtgtagtcgatggtgaggttcacatggaggcgtaagcagccgcctgtgtttgcgtacttgctgatgtcgtcgtcggaaacggcgacggtgtgcgcctggtagtcgatgccgacgactctgtaccggtgggacttgacggggaggatcagcgtggcgttgtcctcgcagaaaaggtcgagtccggggtagccgcagtcggactcggaggagttgagcgagaacgggtagcggacgacctggccggcgcaggtgacgacctcgctgcaagcaggagggagggtcgttcgt

SEQ ID NO: 26356 - DNA, 692 bp, Setaria italica
  Peptide Sequence Number=SeqID_92330
cccgccagcgcgcgccgccacgacgtgcgcgatggtgccccccgcgctggccccggccaggaacacgcgggagaagtcgccgtgctcggcgagccacggctccggcccggtgccgcccgcggcgtgggaggccacccacctgagcgcctcccacgagtcgtcgtaggcggccgggagcgggtgctccggcgcgaggcggtactcgggcgccaccgcgaggacgccggcctccgcgacgagcgcgttgaggtagctgtgcgtgaacgggtcggccgcggagccgaccacgtaggcgccgccgtggtagtagacgacgacggggagcttcttgcccttggggacgccgggcgggaggaagaggcgcgcccagacgcccgtggccgggtcgaggacgacgtccttggacgcgacgcccgtggccgggtcggtgccggccgggagcgggggcatgttcatgaacctctccacgcggccgctcctgtactggcggaccatcgggaagaagtccgcctgcacctccgtgtccgggtccgccgccgccgccatcaccgctcgctcccggcgtcggtgcgagtgcgatgccggccgcgcggcgctttgtagtgggggaggaatccgagatgggtggagcgcgcggaccaaacggttggtgtagtggcgcaggcgcgcagcgaggctcatggggcgagtgg

SEQ ID NO: 26357 - DNA, 724 bp, Setaria italica
  Peptide Sequence Number=SeqID_92331
actaatcttcgcgctcgtctccctcccctccctcctccgctctcagtagcttgctcgtcgccaagaagagccaccagctggctgccatggaccggtccaagtcgtacgcgggcgggcgcatgcagatcgagccctactacggcggaggcgcgcggccggacttccggtcctactcgtacagcgccggcgggggcggcggtatggggatgtcgtcgtactcgtaccagtacgagtacggcggcggcgcggcaggggcggcggcggacggggacctgaagcggagcaagtcgtcgaagcggcggtggctggcgctaggggacccggacatggagcgcaagcggcgggtggcggcgtacaaggcctacgccgtggagggcaaggtgaagggctccttccgcaagagcttcaagtggatcaaggaccgctacctccacctcgtctacggatggtcctgatcgaaacaactcgcttcgatcgcgcatgtctctagttttggctgccttcttcgattctccctctctctgttcatgctttgcttcgatcatggtgagtacgagtgcatatcaacaaacggtataaacctttttcttttcttttgggagctttattggtagatgttgttcttgatgatgccaatgaaccagtcaagtgtctgatgatgatgatgatgatgatgtaaccaaatgaatgggtttgttagtttaacaaaaaaaaaaaaaaaaaa

SEQ ID NO: 26358 - DNA, 252 bp, Setaria italica
  Peptide Sequence Number=SeqID_92332
catggtgccgttcatgtgtgccctcttggcgtctgtgttgagcatgtggttcactaggtgcggcaggccgagccagaacatatgaggcggcggcactgggagcggcgagcgcagcgacttggcagcgcccgcgacggacgccagtgcgtcgccgtagctcgcggcgtccgtgacgtggagcatgtgccagagcccggatccgaggacgagcacgtcggggacgcgcggcgcaaggcgcagatcctcgcggag

SEQ ID NO: 26359 - DNA, 1413 bp, Setaria italica
  misc_feature (1)..(48): n is a, c, g, or t
  Peptide Sequence Number=SeqID_92333
nnnnnnnnnnnnnnnnnnnnnnnnnnnnnnnnnnnnnnnnnnnnnnnntttttttttttttgggttaaaaaaactttcatcgcacgcaccattgatttattaacatgaggctaccagcattacaagttccgactcgctcaaacaagaaatcgaagcattccaaagggaaaaaataaaaggagattattagcgatacttgcagcctctgacacagccaagcacaagatcctcaagcacaacacagcacaggatgataggacgctcaaagaaataagcaccgaacaagatccctcacgagctaaacctctccctgtcatgtggggcattgtagtcgattttggggcccgctgggataatcccgtaggggtttatagacgggtggcttccgtagtagtgcttcctgatgtgctccatgttcaccgtgtttctgatgccagggatctggtagatgtccttggtgtagttgaaaaggtttgggtattccctcaggagcttcttgttgcatttgaagtgaacagcgtaaacctcatcaaatcgtataagggtcacaaacagacgaatatcagcctccgtcagctggttgccacatatatacggttgcttgcctagaatctcctcgcatttgtccagagcctcatataatcttgtcacagcctcgtcatatggcccctgctgcttggcaaagccacacttatacacaccattgtttatcgcgtcgtataccagctcattgatctcgttgatggatgcccggaggtgaactgggtagaggtccagccctgggttcccggcgatgttgttgaactcggtgttgagcatccggataatctcagagctttcgttgttcaccaccgtcttgagctgcttgtcccacaggacggggacggttggcttcccggcgtagttcgggctggcgatctcgtagagctccctgacactcttcgcgccgttgaaggggtccggctcggcgccgggttcctcgtcggcggtggtggggaacacccacccgagatggtcgtcagtctccttggtcctctcaaaaattggcttcacggccgtgacgccgatggcgtggtccaggcccttgagcttgaggaaggcgaggcacctggacgcccaggggcacgcgtaggagacatagaggtggtaccgccccggcacgggggtgaacctggcggaggcgtcgctggacacggagctccggaaggtggacggcgaccggtcgaaggcgccggtgtcggtgacctcgtccagcgccgaccgcgccatctcgacggtggtggtggtggagtagccggcggaggaggtggagaacgtccggacggcgaggaggcggcgggtgaggaggagcgaggaaggggtggcgagagtgggcatgcgagttggtaatcaatggagtgaagtaaagcgatg

SEQ ID NO: 26360 - DNA, 847 bp, Setaria italica
  Peptide Sequence Number=SeqID_92334
tctccagtgtcgagttccacccggacgtggggtcaggaacactcccaccgcctcgtgctgaagcaccgcctcctgcgagcaccaggtagtgagcagcgcacggccctcgacggcagcggcgaactctggaggcagcacggcggcgtcgcccttcaccaggtccggccggatgttccacaagaacgggtagccgctggcggcgagcccccacgcgaactccagcagctgcgagttagtcatcactgtgatgctgccgaagttcacgtacacaatggagcacgacggccggccggcgagccactcgaggagcccatcctgctccttccagaggttggaacccaggccggcgagcggggtaccggcaggtatctcgaggcgctcgcggaggacgagcggtccgacggggtacaccggcgggaggatggcgcgcatggcgtccagcgtggcgccctcgaggtcctcgaaggtgttgaccatgactgcgtcggggagggagagccgctcggactcgcgcatcaggaaattgagcaagatgtcgtctcggtcgacagtgcggatgaagctagggaagtcgcggagctgcacgccgccgcacatgccgcgggcatcgtcgaccacggtggcgaggagaccgccggggacgtcagcgaggtcggcagcgtccccgaacggaacgaggccacggtcgacgaggccgcggtagttccggtagcccatgaagccgcaggcactggcggtccagagcgcggctatgggcacaccgatctcccgggcggcgtcgtagccaaacgacatgacggcgtcgacgacgaggcaggtgaccggcggctgagacacgcaaagggga

SEQ ID NO: 26361 - DNA, 228 bp, Setaria italica
  Peptide Sequence Number=SeqID_92335
gccatgcatgaaaacagcgaggtctcagaggatatgttgcctatacatatcatgcccaggatatgttgcctatacatatcatgcccaatcgctcattttgtagctccatttgtggctcaattaactctctacgtgcttggccttcctgtctgacaaccacacttctggagacacagatggctaataatctgggacggatgcgaaggtgtaccctggtgctcctctcca

SEQ ID NO: 26362 - DNA, 733 bp, Setaria italica
  misc_feature (1)..(31): n is a, c, g, or t
  Peptide Sequence Number=SeqID_92336
nnnnnnnnnnnnnnnnnnnnnnnnnnnnnnngttacggagaaagatgatgatacgtattgctcacaccaagttggaatttccgtacagatcacggcagcatctcgcacacgaacactagctatcagacgaaacgatggggcggatcgcaggttcgcaacaaccccagccgtacggcattctgatccatcatccctcacatgcgcacaagcagagagactaggattgggaggagacgaagatgcggatctgctcgaggaaggtctgcccctgcggccggtccttgcggcggacgtacccgtgcgccacggcgtgcgagtactccgggtaccccttctccccgctgcgccgccacagctcggcggcgtagtcccggtgcgcgtagtaggcgacggcatccacccgcgcgcacccgccctcggccaggtccaccgcgatggggagccgctcgtagtgcccgcgggagacgccctccagctcgtccagccgcgccaggccgcgcggggtcacggcgtagagctccccggccacgcggtggcccccctcccccgggaggttgatgaggaacggcacgcggtagggcccgcacaccagcgggaggcgcggcgccgtcacggcggcgcccacgaaggaggcgtccccgccctgcgatagctcctgcagcagcgggtggttcgagaacccgcgcttcagcgtgccgtacgtgaacaccagcgtacgcttcgccggctgctg

SEQ ID NO: 26363 - DNA, 214 bp, Setaria italica
  Peptide Sequence Number=SeqID_92337
gtaatttcatgcaaaggcttgactacatcttcaacatcgacatggcacaagatgacacggagcctgaaattcttctgcagttcccttatccggtaatacaagtaatctggatgtagaagatggtaccttaagtacaacgcacatgacgattgcccgagcacatagtccggcacgacatcagcgaacgtccacctagcatttctgatgtgcttca

SEQ ID NO: 26364 - DNA, 718 bp, Setaria italica
  Peptide Sequence Number=SeqID_92338
cttcgctttccccagtccactggcaatcctccgccaccctcagccaccggcacatccgctagctcgccgtgccaccccctccctctacctgcggaccaacccgtttttaacttcggcaaccatggaaaccttcccctggcaaccacccacccctaacctttccggccacaaacctgacgcctgaaaattggtccaacttcaggcccctggtactgagaacatagtttctcagcgtgcttaagcatgtgtcgtgcatggcacaatgattagcttgcagggttagcaagtagtactatatatttagtagtggaacataattaaaacatctaaccatttgatctctggacatgttagtggacgatgagcacatgcaactaataataaacatgatgaactataactagtagtgccatgcatataaatattagcatatatgttactgcgcatcataagccttaacactgatctttcgatcgtcgtaaattgtagcaatgaccaaatttaacatgcaaactatccaaaaaattatagcaatgatcaaattctatttcttacacctacaatttatttaccttaattttattgcaatgactaaatattaaaaacatatttactctatttttcccatacctaatattgatcaagatatttatctaatacgaatcgtatataacaagcaaactatccatcaattctagctcaaaaatatgtaataaat

SEQ ID NO: 26365 - DNA, 346 bp, Setaria italica
  Peptide Sequence Number=SeqID_92339
ggcttgtaggtagggttctggtgggaagaggcctggacgcctaggaagattgtgagggcaatgaaagcaagtagatggaggatgaagaacactttggtcacactgcctgtgaacccactgcagcaaccacgactatctgggacctcaatgttgccaaaaggggaataaattgctcttcaatttcaacagccacctggtacgggctcgccgccggcgtcggcgtgcccgtcgacgccccagcaatgccggcgccgccgcctgggaaagccgccgtgatctcgccgccccgcctcgccatctcctctctgtgggtgtctctctctggagtcccgcagctttgctctgc

SEQ ID NO: 26366 - DNA, 454 bp, Setaria italica
  Peptide Sequence Number=SeqID_92340
aagcaaactgttcgttcaaaatatatactacatgacaagcaatctgtgcagcatgttcatggccgaacctttatttgccattctacaccctttcagtttcatcagcgtgaacaatcaaacaaacacgccaacagatacatgtagccacctcttcaccattattgtggttcagcacttcatcagcccacacatacactgtactctactccatcttggaggaaccgactattgcgacctcagctacaatgcaacacttggttttgacaagataaccatttgccgagtccttgaaatcctccagcgaaatgaacttactccatccccaggtacgagcgttcttcgcaaacgggcaccggcctgttcctttattacggtgttcgccagtttcttggtctttgatggacaaggtaaattctacaaggtttgcagtgtcctcggggagatcattggtcct

SEQ ID NO: 26367 - DNA, 902 bp, Setaria italica
  Peptide Sequence Number=SeqID_92341
taatatgatgattattgaaatctggagttccgtaaaacaagcaaaattctttgagctaggcaaacgcctgttcctttattacggtgttcgccagtttcttggtctttgatggacaaggtaaattctacaaggtttgcagtgtcctcggggagatcattggtccttttaagtttcaggtacaaggagaggtggttcccgtcgcgagatggatacatagtgatatgccatttgtatccgccgacttcaaactctggagagtagcccgggttcttcagtgcaaagaagtcatcaatgtcccaagtgtaagttttggcctcgttgaagatgctcgtcttttggacaaacagcgtctctgacgtcgtgtttactttcaaagtggtaactttgacaaactcgacaccaaagacgcagcaattgttgagaaggaatttagaagaccgtttcttcagtttgttaagggaaatcatgcatgagattccggagcttgtgcttgcagtctgaaaactgtggctaacttcatgctctctgtgctttccgaaggactggtcatatatcagcaacttgaaagatgcatctacaatagtgtcagatttcactgagctgttgtccagctcaagcctaagagagacgtactccttgttgtccttgtcccttgggttcagcttcaggtaccagttatggcccatgacctcaaacactcttgagtaggtccagcctgcacccttgtcaaggagtgaggagaatccatcgatgttccacttaaaggtcatcggctggctttgatctccagctggagaagaaggtgctaccttggatccatggccctgtcccagtttagatcggcctcgagatgaagagtttcccatgatggtcctccagacgccagtgcagcctgatattgc

SEQ ID NO: 26368 - DNA, 527 bp, Setaria italica
  Peptide Sequence Number=SeqID_92342
ttcttcccgccggcgcgcgccgcgagctcctcgatctgggccagcgtgagcgagttccccagcgaccgcgcctcgtcggacacctgcgcgtcgaggagcacgcgcgtcggcgtcgccggcccggcgccgttcgtggcggcgctcgacaggtacagctggtcgatggtgccccaccactgcccgacggatggcgtggccgcgcccggcgccgtggtgagcgagaagaggaagtcggagacgatcgacttctgtgccggcgtgaacctgccataccagaggacggacaccgggatgtcgccgctgagcacggtgccgtggtggtacgtgagctggtcgctcgcagggggaatgtacagctccatcagcctcctgctccccacggagagctgcgccaggctcatcagtaccaccgccgctaccagcacacgacacaccattgctgcaattcttcaaactactcgctaattaaaattgggcctggaaacttgtgagtcgtgagctcactgctgctatgtgatcgaccttgt

SEQ ID NO: 26369 - DNA, 375 bp, Setaria italica
  Peptide Sequence Number=SeqID_92343
gacgacgccgacgagactccaccgtcggctgccgccttcttcttccttttgtctttgccgtcgtcatagtggtaaggagagctgggtggcttgggaacgggtggcgggaagcgcctgtcagggtcccggaggcgcggggagtggcggtcgatggcgcggccggaggagacgatgacggaggtggcggccgcggaggagcaggagaggccagcagacaggccctgcagcctctccttcacgtacttgtccttccaccgcagcaaggaagccatggcaccaaccaagatcgagtgtccagcagctagctcgttttcactagtcaggagggaaactaagcagcatgcaacttgatgtagtttttgtttaattggagtt

SEQ ID NO: 26370 - DNA, 469 bp, Setaria italica
  Peptide Sequence Number=SeqID_92344
ccggaggtcggaggaggtgaggttggcatgctgctgtcctgatccgtggcttctgctcgatcctgcaggagctccctgctggaacataagtgagctgaacctttgcctgatcttgccctcgtacttgtataattgggtgtatccgtgtatgtgtatataacactatcttgttgaaactatgctgctgaaactgaaggagcgagtggcaataaatcgtgatgaggaatgtgctatctgctgtctgagagggatttaactcattgagaacggaggaggaggatgggggatggaccaagccgtcggacaagggggtatgtagagatgctcaaactgctgatgagacgaggtctcgtcggcactcggcacgagcaggctcccaggcagctcagggaataacgaggaacagcaagcaacacaggaatcaaggaggtgcaggggaacaaaacgatgggggaaactgaaactgggt

SEQ ID NO: 26371 - DNA, 937 bp, Setaria italica
  Peptide Sequence Number=SeqID_92345
accaggtagacccatcaggatcatacttctcctggaaagcatcagctatggggaaaaatgtatccaatgcaaagacatttcttgagaagaggtacaccgaagatatggagcttgatgatgccatccatacagcaattttgactctgaaagaaggatatgaagggcagatttcttccaacaatattgagattgggataattcgatctgaccgtgaattcagggtcctgagccctgcggagatcaaggatttcctggaagaggtggagtaaagccgctcctcagcaattcgcaggtttcagcgacaagaaaagcaagaactcaagcagccatgccgacatccccctaaagttcacatcttccagatttgtttccaatctttcgaactgatcatcagtggcatatcatagactcgatcgtgcagctaaggcgctaagcttccaggtagagaggtaggtgcgtcgtgcatgcagtaccctgcctgtcgcgctgtccgccacttgcttgcttgggccaacaatactccgtggtgctcccggggccccacgtacaacgtccgtttcaccaccgtcccgatcacagggcagccagcgtaatcaggatgaaaaatccgcgtccagtcgttaggtggtttttgattgaggtcaggcgtgttgaaccctccccaactgtcagtcgggtctgttaggccggagatgtgtggcttgggacgggtggacgcacgctgtcacctgtcggcctcggctccctctctctaagccacctgagatgcacgtctgcctaatggcctggtagtacaccaggtcggctgcgcagatcaggattgcccaacttcgtatggcgaatcaccattttgaccaggagaaaaattgcatggctgacgctatgatcatttgtgtgttgccggtgtttagcgtgttggttttcagagtttctgcaa

SEQ ID NO: 26372 - DNA, 502 bp, Setaria italica
  Peptide Sequence Number=SeqID_92346
cgctcacggctgtcggatccggccagacctcgctcgggatcaaagctgccaatggtgtagtcatcgccactgagaagaaattaccttctatcttagtggatgaaacctctgtaagtataactagttcttgtttcttttattctcttcggctgcattctgtcgccccccacacccacccacagaagtactaaacgattacctgtttgaaaaaactccaggtgcaaaagattcaggcactgacaccaaatattggagttgtctacagtgggatgggtccagatttccgtgttctggtgaggaaaagccgaaagcaagcacaacagtactatcggttgtacaaggaacatatacccgttacacagcttgtacgagagactgctgctgttatgcaggagttcacgcaatcaggtggtgtaagaccatttggagtatcgctgttgattgctggatatgatgacaatggcccatagctgatgctttccaggagaagtatgatcctgag

SEQ ID NO: 26373 - DNA, 425 bp, Setaria italica
  Peptide Sequence Number=SeqID_92347
taatttacgtaaactaaaaaccctaatttcttttccccgaagaaaggagaggaaggaggcggccggcgaggtaatcgaccatgggggacagccagtactccttctcactcaccaccttcagcccgtctggtaagctggtgcagatcgagcacgcgctgacggcggtgggctccggccagacctccctcgggatcaaagctgctaatggagttgttattgccactgagaagaaattgccgtctattttagtggatgaaacatcagtgcaaaagattcaagcgttgactccaaatattggagttgtttacagtgggatgggtccagatttccgcgttctattgaggaaaagccggaagcaagcacagcaagtaattaatttggataaggaagtaaaaataaaaaaggaaaaaaaccaaaaataaaaa

SEQ ID NO: 26374 - DNA, 1233 bp, Setaria italica
  Peptide Sequence Number=SeqID_92348
cccactcccgtctcgtcgtcctcttccccttctttttcctcagccgcctcgcacccctgtgcgcagcaaaaaccttgccgcgaatcgccgacgcgaaaccccgatccagaggagccgacgaagtgcgcgagcggcggccatgggtgacagccagtactccttctccctcaccaccttcagcccgtcaggaaagcttgtgcagatcgagcacgcgctcacggctgtcggatccggccagacctcgctcgggatcaaagctgccaatggtgtagtcatcgccactgagaagaaattaccttctatcttagtggatgaaacctctgtgcaaaagattcaggcactgacaccaaatattggagttgtctacagtgggatgggtccagatttccgtgttctggtgaggaaaagccgaaagcaagcacaacagtactatcggttgtacaaggaacatatacccgttacacagcttgtacgagagactgctgctgttatgcaggagttcacgcaatcaggtggtgtaagaccatttggagtatcgctgttgattgctggatatgatgacaatggcccgcagctgtatcaggttgatccctcaggatcatacttctcctggaaagcatcagctatggggaaaaatgtgtccaatgcaaagacgtttcttgaaaagagatacacagaagatatggagcttgatgatgccatccacacagcaattttgactctgaaagaaggatatgaggggcaaatttcctccaacaatattgaaattggaattattcgagctgaccgtgaattcaaagttctaagcccatcagagatcaaggatttcttggaagaggtggagtaaacctggtcatgatttactgtgtcaaacaacgaaagcatcacttataagcagccggcctgaagcttttcttttggttttatttgtcactcactgtaaactgatttgctccagtgtcttgtgatgcttacattggaaccctcgtggatgcatattgtagacaagaaagttaacgtcaggtgggttgatgttgtatttgacctactccctgcggcttatttatgtgatgcacggttcttgtgtaccctatcgatgcaaagggggtttagtttcttgtggtattttgtatttggtatcgttcctgcaagtcaccttagcattgcagatttgcttgtgtgactggatttcgtggttgcaaaaatcaagttcgattagacgctaaaaaaaaa

SEQ ID NO: 26375 - DNA, 402 bp, Setaria italica
  Peptide Sequence Number=SeqID_92349
gggaaaattcgttgcaacacgaaagatatatcacatcctaaagattcatggacagtattttaaagctgtttcttgattagctgcgtacagctatatcttgcagtggtagtactcttgtagagagaagctagcagagatcgagcgcacggctgtccctacaatgtttgcattgcaagggaagcacgcgccaccgtgtcgaacggagcagtgaaagccgacccgctaacacgaagctctaccacgtcgcgccaccgccgccgccgccgccgttccgggcggccccgccgccggctgtcttattatggccgtagagcctgaagaggttgaaggcggacaggaacgcgagcaggacggcggcgacggcggccgcgacggcgctgactactcacactgagtcggaga

SEQ ID NO: 26376 - DNA, 229 bp, Setaria italica
  Peptide Sequence Number=SeqID_92350
gtgcgaaggcacgcggcgcgccggttgctcttgtagtccgttccggaacagagattttgtttcattacatcatggattgcatacatgctgcagcaaagatgtgcttgctacttcagtctgccatcactgatggaagtgcagagaaagcagaaggtgaaaaaaaagcgagaaaagagaaggcgccagcggtgacacaaagcttaaccagatagtgtgtgtgggagtatga

SEQ ID NO: 26377 - DNA, 847 bp, Setaria italica
  Peptide Sequence Number=SeqID_92351
ccttcgggtacgaggagctgccgtacgtcggcggcgccgcgccgcggaccaacgtggtggggcgggtgttcaccgccaacgagtcgccgcccgaccagaagatccccttccaccacgagatggcccaggttccaacatttccgtcgaaattgttcttcttctgtgaagtagaaccaaagagtggcggggaaacaccaatagtattgagccattatgtctacaaaaggatgaaagaaaaatttccagagtttgtggagaaattggagaaggatgggctgatatatacaagggtcttaggagagggtgatgatccatcttctccaatcggtcgtggatggcaatcaacatttctcaccaaagataaagctgtcgctgaagaaagggctgcccagctcggcatgaagctggaatggactgacgacggcgtcaaaacgaataatgggcccgataccggcagtgaagtgggacgagagccggggcaggaagatctggttcaacagcatggtagccgcctacaccgggtggaaggacgcccggaacgaccccgtcaaggccgtgaccttcggcgacggctcgcccttgcccgccgacgtgatcgccgagtgcggcaagatcctggaggaggagtgcgtcgccgtcccgtggcagcacggcgacatcctcctcatcgacaactgggccgtgctgcactcccgccggtcgttcgagcccccgcggcgcgtccttgcttcgctctgtaaatgatctgtagaagtgcagcgtgtatatgatgtatgtcgatttgcaggtgctctgaactgggaataatttcatgcgatgggaatgagaagccttgtaatgcaacaac

SEQ ID NO: 26378 - DNA, 832 bp, Setaria italica
  Peptide Sequence Number=SeqID_92352
agaaggcccctgaagactcagtttcatccctgtctgtgtgttccatgccttgtaccaatcaaagtaaccctcaatataagatcgccaatatatagtacaaaataaatgtgtttgttcccactagaatccaggaaatcagaatatcacctcaacggactttggaatcccaatgaatacccatgggccattacttatcatgcagccaaccttgcctcccatcttgatgacatcaacacactattgcagaaacattaagaacaaaaagacaatatggtaacagattagatttttttaccccttttgctttctacatgaagtctcttttcctcctcttctcaatctagaattatgcccatgattctttatctatttgttctcctttgttttttctttttttctcactactaatttttcttacaaaaaaaatcatgaacatccgttgataagacaactgtaatcttggagtcccttccaaatcagccaacagcttattagccaagtgccaactagacagatgacctcccaaactgatcctgggtacactgataactgaagtaggcaacgagcctctaataacaatgatcccagccaacaagtaaataacctctatgtgcagagaacatccaatctgaactgtcaccgtgcagagaacaatccaatctgaactgacatacgcatgtaccaccaaaactaatcaggagatatccagtggaaattggtgacacattcagcgcattgatcgccatcagcaaccgggataacattcagtgcattgattgccatcagcaatcagcagaaatcctgaatccccaatcgatggtccaggcaaccg

SEQ ID NO: 26379 - DNA, 173 bp, Setaria italica
  Peptide Sequence Number=SeqID_92353
agtaggtcggcgccgccgacgtgctgatgcagatgtcggagaggtgcgcgttcttgagcgggtcggccttggcctcgtacgtggtgaagatgaccggctggaggaacttgacgtcgaacgccggcacgacgacgttggtcaccgtgtccgcgaccctcacgtcgtgggtgagg

SEQ ID NO: 26380 - DNA, 238 bp, Setaria italica
  Peptide Sequence Number=SeqID_92354
cgtggttggactaggtatatcaagtagaatgtgccagttgcaaatccgaggcaaaatataaggtcccaatgcacaacaggcggcaggtcaaggtacatgccagatgccctgcctgccctgtttccacacgagcagcattgctttagtgacaacatccagaacggggtggatggacagcagtttgaacttccaaagagtgctgtcctcatgctgaagaatgaggaattgggacaagcta

SEQ ID NO: 26381 - DNA, 421 bp, Setaria italica
  Peptide Sequence Number=SeqID_92355
gggaggatgaggttgaggaaggcttgctttcattcccttcccatctttccatctcactgctcaagttagagatctgcaactgtaagaaactgtttctgcatccagaggatggaggaatagggcacctcacatccctccagtcattacaaatacagggatgtgacgagttattgtcatggtggtccatggaagaagcgattgtccacaggcctttccctacattcctcagaaagcttattattagataagtatcgagcttgaaggcaatgtatttactgtcaaatctcagatgtcttacccatctagaaatagttgactgtaataatctgaacattgatgggtttgatcctctcctcgctcaatgcctcactaaaactttgtgtttgtcaaccatcacgattgattctcctcagtaacagct

SEQ ID NO: 26382 - DNA, 250 bp, Setaria italica
  Peptide Sequence Number=SeqID_92356
tcacgaacttggagtagagcagctccaccttgtccaccgcctcggagacgaagagcgagtacaccaggtcgcagatggcctgcgagtccttcacggtgggcacgccgctcacctccgaggcggtggacaaggtggagctgctctactccaagttcgtgtccctggtgcgctccgaccccatcatccagacgctgctgcccatgtccccccaagggggagatctgcgacgtcaacggcgtgtgcgtggacg

SEQ ID NO: 26383 - DNA, 221 bp, Setaria italica
  Peptide Sequence Number=SeqID_92357
cgagtccttcacggtgggcacgccgctcacctccagctcccgctccagcgggatgtaggggcggcgtgcccaccgtgaaggactcgcaggccatctgcgacctggtgtactcgctcttcgtctccgaggcggtggacaaggtggagctgctctactccaagttcgtgtccctggtgcgctccgaccccatcatccagacgctgctgcccatctcccccttg

SEQ ID NO: 26384 - DNA, 1752 bp, Setaria italica
  Peptide Sequence Number=SeqID_92358
aagctgccgcagaggccgcgctcgccggtgaggaccacgagggccactttcttgacggggcgggtgcgggtgagcggcaggtcgatgtcctccgccaccgccgccgctggtgttgatccccgtcgccgcggatccaccaccagccagccatgtcgtgctcccacctctccaccgcgtggtcctcctcggcggctcgccagcagcgcctcctccacccggcggcgctcctccgccccgcgctccggcggcagcggcctcgtggtgcggtgctccctccgcgagctccgcagccgcatcgactccgtccgcaacacgcagaagatcaccgaggccatgaagctcgtggccgccgccaaggtccggcgcgcgcaggaggccgtcgtctcctcccgccccttctcggaggcgctcgtggaggtcctctacaacatgaaccaggagatccagacggaggacatcgacctgccgctcacccgcacccgccccgtcaagaaagtggccctcgtggtcctcaccggcgagcgcggcctcctgcggcagcttcaacaacaacgtgctcaagaaggcgggacacccgcatcgacgagctcaagcagctgggcctcgaatacaccgtcatcagcgtggggaagaaggggcaacgcctacttccagcgccgccccctacactcccgcctggagcgggaggctggaggtgagcggcgtgcccaccgtgaaggactcgcaggccatctgcgacctggtgtactcgctcttcgtctccgaggcggtggacaaggtggagctgctctactccaagttcgtgtccctggtgcgctccgaccccatcatccagacgctgctgcccatgtccccccaagggggagatctgcgacgtcaacggacgtagtagcgtggacgccacggaggacgagctgttccgcctcaccaccaaggaggggaaggctcaccgtggagcgcgagaaggtgaagatcgagacgcagcccttctcccccgtggtgcagttcgagcacggaccccgtgcagatcctcgacgcgctgctcccgctctacctcaacagccagatcctccgcgccctgccaggagtcgctcgccagcgagctcgccgcccggatgagcgccatgagcagcgccaccgacaacgccatcgagctccgcaagaacctctccatcgcctacaaccgccagcgccaggccaagatcaccggggagatcctcgagatcgtcgccggcgccgacgccctcgctggctcagcttgagccgtcctccttatactaaaactgagccgagctgagccggtggtggcgttctttcttggtgcggtgctcctgctatatataattctttctctcgccttcttgctgttcagtctgtctgtaattcctgatagcacaaacacaaagggagttctgtattccatgctcgtcgtcgcgagatacacaagaatttcaattcagagatgccaaatgtataacccgagtatctttatcttgcaaatcctgcactgtctcctgtccgatttgtgcgtatttacgaccgggttgtacgagatatgtgcaacggccagcaagcttcgatgctttagcttcattgggcacgcccagtttcgctgtgccgactctgcagtaggattgctccatccagcacttcatctccacttcctctatcaagttcattggattctacttccttcgttcctaaattgttacccttattctaagtttctatttggttatttctttaaaaaaa

SEQ ID NO: 26385 - DNA, 219 bp, Setaria italica
  Peptide Sequence Number=SeqID_92359
cgtgaagctcttcaacgctgtcgccgtcgaggacctcatagtcaagcagggccgcgtcggcggcgtggtcaccaactgggcgctggtgtccatgaaccacgacacgcagtcgtgcatggaccccaacgtgatggaggccaagatcgtggtgagctcctgcggccacgacgggccgttcggggccaccggcggtgttcatgtcgagggccttcatcccgg

SEQ ID NO: 26386 - DNA, 987 bp, Setaria italica
  Peptide Sequence Number=SeqID_92360
cgagctcggcgtcgcgtacgacgaggccgaggactacgtggtggtcagtcacgccgcgctcttcacctccaccgtcatgagccgcctccctgggccgcggcccaacgtgaagctcttcaacgccgtcgccgccgaggacctcatcgtcaagcagggccgcgtcgccggggtggtcaccaactgggcgctcgtcgccatgaaccacggcacccagtcgtgcatggaccccaacgtgatggaggccaaggtggtggtcagctcctgcggccacgacgggccgttcggggccaccggcgtcaagaggctccaggacatcggcatgatcagcgccgtgcccgggatgaaggccctcgacatgaacaccgccgaggacgccatcgtccgcctcacgcgcgaggtcgtgcccggcatgatcgtcaccggcatgaaggtcgccgagatcgacggcgccccgagaatgggcccgacgttcggcgccatgatgatctccgggcagaaggcggcgcacctggcgctgaaggcgcttggaaggcccaacgccatcgacgggaccacccagacggcgtcgcaggcgtggcgcgaggagctcgtgatggcgtccaaggacgacgaggtcgtggacgcgtgagcaggggaaggcgttggaaacagggggtgcgcgtcgggtggagcgatctggaagtttgtgcatttctttgggactacgtatgtggcttgctgagttgttgaactctcttttggttagcagcagtgtctcgctagtgtcgtgttcgtactccgtaggtcatgccatgctaccgtgtgcggtgtctcgtgggagcaccactctaggggcccttctggcagcgacgaataaagagaggaaaggggaaaaaatggttaaggttgagggtctgtttggatccatgagttatgggtgaaagtgataaaatttgcacctttatgtattagccatccaaatagagcgctaaactttagtaccaaaaa

SEQ ID NO: 26387 - DNA, 1136 bp, Setaria italica
  misc_feature (1123)..(1123): n is a, c, g, or t
  Peptide Sequence Number=SeqID_92361
tttttttttttttttttttttcttcaatttctcttttattcattcgatgctgccagaagggccccacagagtggtggccccacgagacagagcacacggtggcacggcatggcagttggcagtgctatgaaacaggggatgcgcgtcgggtggagctcttcaacgctgtcgccgtcgaggacctcatcgtcaagcagggccgcgtcggcggcgtggtcaccaactgggcgctggtgtccatgaaccacgacacgcagtcgtgcatggaccccaaccgtgatggaggccaagatcgtggtgagctcctgcggccacgacgggccgttcggggccaccggcgtcaagaggctgcaggacatcggcatgatcagcgccgtgcccgggatgaaggccctcgacatgaacaccgccgaggacgagatcgtccgcctcacgcgtgaggtcgtgccaggcatgatcgtcaccggcatggaggtcgccgagatcgacggcgccccgagaatggtgagaatcgaaggatggatttcttggtaatcttatctttctcctggttcttggaatgagtggctgatgaacatctccgaatctgttgcgattgcagggcccgacgttcggcgccatgatgatctccgggcagaaggcggcgcacctggcgctgaaggcgctgggcaggcccaacgccatcgacgggacggcccagacggtgccgcaggtgtggcgcgaggagttcgtgatagcgtccaaggacgacgaggtcgtggacgcgtgagcaggggaaggcgttggaaacaggggatgcgcgtcgggtggagcgatttgagggatttcagcgtttctttgggacctttgccctgttgaatttagctttgcctcgctagtgtcgtgtttcatagcactgccaactgccatgccgtgccaccgtgtgctctgtctcgtggggccaccactctgtggggcccttctggcagcatcgaatgaataaaagagaaattgagaaaatggaataaattgtcaatttccatgttggtgtggtacgtgattgatttgttgcgtactttggcttctttgtttattactaaaatcattacgctgtgattgatttagaaaaaaaaaaaaaaaaaanaaaaaaaaaaaaa

SEQ ID NO: 26388 - DNA, 1536 bp, Setaria italica
  Peptide Sequence Number=SeqID_92362
cggagaagagctggccgccgagccaggcgccgccgccgggggagacggactgctcgacgatggcgatgctgatggaggggtccttggagagctcgtacgcgcaggagagccccgcggagccggcgccgacgatgacgacgtcggtgtcggcgtaggtgataatgtcggtcatgtaccggcgggtcattctcgcgggagacgatggccaccaccgcgtcaaccctcctcaagtcctccttcgccggcgcccggctcccgtccgccccgcgcgcgccgtcctccgtcgtcgtggccgccccgcgcgccggccccatctgcgcctccatctcctccaccccctccaacccgccctacgacctcacgtccttccggttcagccccatcaaggagtccatcgtctcccgcgagatgacccgccggtacatgaccgacatgatcacctacgccgacaccgacgtcgtcatcgtcggcgccggctccgcggggctctcctgcgcgtacgagctctccaaggacccctccatcagcatcgccatcgtcgagcagtccgtctcccccggccggcggcgcctggctcggcggccagctcttctccgccatggtggtgcgcaagccggcgcacctcttcctcgacgagctcggcatcgcgtacgacgaggccgaggactacgtggtcatcaagcacgccgcgctcttcacctccaccgtcatgagccgcctcctcgcgcgccccaacgtgaagctcttcaacgctgtcgccgtcgaggacctcatcgtcaagcagggccgcgtcggcggcgttggtcaccaactgggcgctggtgtccatgaaccacgacacgcagtcgtgcatggaccccaacgtgatggaggccaagatcgtggtgagctcctgcggccacgacgggccggttcgggggccaccggcgtcaagaggctgcaggacatcggcatgatcagcgccgtgcccgggatgaaggccctcgacatgaacaccgccgaggacgagatcgtccgcctcacgcgtgaggtcgtgccaggcatgatcgtcaccggcatggaggtcgccgagatcgacggcgcccccgagaatgggccccgacgttcggcgccatgatgatctccgggcagaaggcggcgcacctggcgctgaaggcgctgggcaggcccaacgccatcgacgggacggcccagacggtgccgcaggtgtggcgcgaggagttcgtgatagcgtccaaggacgacgaggtcgtggacgcgtgagcaggggaaggcgttggaaacaggggatgcgcgtcgggtggagcgatttgagggatttcagcgtttctttgggacctttgccctgttgaatttagctttgcctcgctagtgtcgtgtttcatagcactgccaactgccatgccgtgccaccgtgtgctctgtctcgtggggccaccactctgtggggcccttctggcagcatcgaatgaataaaagagaaattgagaaaatggaataaattgtcaatttccatagttaaaaaaaaaaaaaaaa

SEQ ID NO: 26389 - DNA, 377 bp, Setaria italica
  Peptide Sequence Number=SeqID_92363
ttagttgcctcaagatctcaaaaagaaagctattaatctgcagattgcaaatatagtgtgttccagcattcaacctcttcaatgttatgctgtaattgtgggttcatcacaaccagcaagtgctgatgaaatattctgcttccttttcagtattgatgcaatgatttatgggcattctattttgtgccactcccatggcagggtctggttgacggcacgttaggctctgatgagagccttcagattgttcggcgttacattgacaagggatttagagcaatcgagaaacttctggaagggtgtgacagtaaatatgctactggagatgaaatccaattggcggatgtgttcttgcaccgcagatccatcgccggtgt

SEQ ID NO: 26390 - DNA, 838 bp, Setaria italica
  misc_feature (809)..(838): n is a, c, g, or t
  Peptide Sequence Number=SeqID_92364
ccctagcaatcatattgtatcttgaagacaagtatcctcaacaccctcttttgcctcaagatctcaaaaagaaagctattaatctgcagattgcaaatatagtgtgttccagcattcaacctcttcaatgttatgctgtaattggtctggttgacggcacgttaggctctgatgagagccttcagattgttcggcgttacattgacaagggatttagagcaatcgagaaacttctggaagggtgtgacagtaaatatgctactggagatgaaatccaattggcggatgtgtttcttgcaccgcagatccatgccggtgtgacgcgcttccaaattgatatgtcaaagtatcctcttctggagagattctacaaagcctacatggagatccccgcagttcaggtcgctgttcctgaaaagcagccagatgcaccatcaccctagatatgaggacttggaagaaatgccaagatgcatgcagcaatgtggaaaataataggcgtgcgctcccggtaaccatggattatgcaagagcagcctgctctggtgccacgcaagagaataagtgtgcacatttggcctctcagtgagaatgatcatgtctcagttaattatttgcatgatgtgtacgcttgatgagcagcaacatatgtgcctttgtcttgagcaacatgtgtcagtagctagaatgtatagcatggccatctacatatatggaatgtattattgaccttccttgacttggagaattctaccttctggaaattaaaaaaaaaaaaaaaacaatgctgtgaataaacaacggagggnnnnnnnnnnnnnnnnnnnnnnnnnnnnnn

SEQ ID NO: 26391 - DNA, 356 bp, Setaria italica
  Peptide Sequence Number=SeqID_92365
cttggaacccagatgaggccaaaacacatttgtctgctagttgggcgatcttggagtggtcgcgggacaggatgctgtatccgacggagaggcgggtgtcgtcggcgaccacgcagtagtcggcgccggcgacggccacgcacgtgccgccgttgttctcgtacgggtcgaacctggccatctgcctccgctccgagattcactcggggtctggtctctgagttctgatgccgatttgccgagggcggttgggggtggaagggggaggctggctttgcttaaaggcaggggagctccggcacgccgcgggagtcgagttcttctccgtatcttcttcttgtgctgcaagaagagaa

SEQ ID NO: 26392 - DNA, 655 bp, Setaria italica
  misc_feature (44)..(44): n is a, c, g, or t
  Peptide Sequence Number=SeqID_92366
aagagctgcatccatgagtatgatgcacatgatgaacatgccanaagggatccataaatgatgcatatgctgcaccagagaacttacgcgtgaatgcctcactgaattcaaggcacatatcagctgcaccatctttgagaggcatcagggatgaaaggattaaccaccatttgaggctaccccataggactgaagagtttgagagagtttttgatgccatgaatcgagacatggagcacttaaataagcattcttatgacagtgatgcttccatacagtacccaacagcaactagcggtaatgatcgctactcccactcccctgaaatccaagcccattggaattgcgaggcgaccagctcgtcatcatgagtctgcttcatttgagaacttaagtgaccaagaagcttcccctctggtttctaggaaaagatacagaagtcccgcatatttgtatcatgatgtgtatcatgctgatgatgggtttgcaggatgtgagcactatgatgacgatatggatgcatatgtcctacccccaccaagagtgtcaggatatgacatggttgatgatgatgatgaatatcatctaccagctaactgcaattgtttctcaaggcttgctttgccacatagaaaacaagtggggaatggactga

SEQ ID NO: 26393 - DNA, 580 bp, Setaria italica
  Peptide Sequence Number=SeqID_92367
cagcgtacatgcccacgcctctacctgcagcgcacactagtcatactacacggccggcgctgcagaaaccacacactagcgagttaaaagccagccggcttcagtaagcggcggcgatggcgaaggtcgccgcggaggcaacggggcggcaggcggcgtccttcgtgctcggctgcgtcgccgcgctcaccgtcgtcctgctcctgcagcgccgccccgaggacctcatcacccgacccgtggcgccggtgcaattcttccggggggagatcatcgtcatcatcctcatcaggccgtgacggcacttgttcttgttcttccccatcgtcaacaccgacaggtcctccgccggtgatcgttgcagctgatcatcagtctgacgccacaaagcagcctggagctgctggtgctgccactgatgctaccgccgatgatctaagccgccttccggccagtcctgcccatcggcaacaacaagagggccgcgacgccgaggaggacgaggacgcggagttccgtgggcttgccgccgtggtggcgcgcgcggcgacggcggacgaccggacggtgatcatcacgt

SEQ ID NO: 26394 - DNA, 817 bp, Setaria italica
  Peptide Sequence Number=SeqID_92368
tgttttattattgtcttgtcttcttgtatttgtcttcttgcttaaactaacctattatggatacgaagtaattacctaaactgggttactgcaaaagtggtgccgacttaacaatgcaattaaaaccacaagaaacttttcactgggttgctggcccatggatgatgtgctcctctccatgtgatggtggtattcgatatcgtgatgttgcttgttatggaagtctggatgataacactatcaaacactaccctgtggatgatgctagctgttcagcagatgaaatgcctgcaaaacaggagggatgtaatcagcaaagctgtggtgatcccgagacgacacaggcaatgaatcccaagagaagtggaatgtctggttggttagtagcattgattgttttcctaggtcttggtgcaattggtggcattgcatttaccagctacacttactacaggaggagagcctctgggtcgagtggtttcgtgtatgtcatgatggaagcttattattgagagttttattattgagagttgaggggaccggttgcctggaagtctgcaagcaatcggaactcgagactgtagaaaatcaatggaattggagacagccagtttgttcattcttcattctttggcgtgcagtttttgtcgtcagaaatgcctttcaatcctgtattcctcttccggtcttcccgctgattcacgtgcagccgagttgactatcctgggtgaagcggccggtgagtatacttgccaaggctgggaatctgtcaggaagaatgtttgattcgctgtcaataaaaaaaaaaaaaaaacaa

SEQ ID NO: 26395 - DNA, 312 bp, Setaria italica
  Peptide Sequence Number=SeqID_92369
ggccggtgcggtcgaggatggagatcaccttgcggaacttggagacggcctggtcggcgatctcgccgaacggctgctgctgatgctgaagctgctgagctgccttttgcggcgcggcggcctgggaggacagggacgagaccaggagctccaggctgcggaggccggccgccgccgcctcctggatggcgagctggtcgttggcgcggcgcggggcgtagcagcccatgaggtccacggccatggcagccggtgcttcgccggtggactggccgcgcagatcttggcttggggctcgcagggagattgggg

SEQ ID NO: 26396 - DNA, 726 bp, Setaria italica
  Peptide Sequence Number=SeqID_92370
attagttaccctagaacgaacaagggttcttgcttccaccatcgaagttttggcgcgctttggccagcttaaagtggagtctgcattggagcaatgcgtccccacggcaagccgtgccattctggaagccatgtcaagtgggttcatcagggcagggaaagtagaccttacacgcaaactcctggaacttgcaaggatcaataacaggacgctgcacccaagcatctatgtgaagctgatgctggaagccatccggactcctgaaggctatgggcttgccatggcattggttgatgagcttggtgagaggtcagatttggagcttcgcccgcaggactgcacgtctgtcatgaaagtctgcataaaactccggcggtacacggccgtggagagcctttttagctggttcagggaatctggtgggagccccactgtggttatgtacacaacggtgatccacagccgctgccgtgatggaatgcaccgcgaggccctgtccctggcatgggaaatggaacaggccggttgtctgcttgacctgccagcctaccgggtcattgtcaagctgtgtgtggcattgcgtgacccagagagggctctccggtacttgttgaggatggaggaggctgggtttgttccaaccagcgacatgtacaacggtctgatcgaaggttatgcggcggaggggaggctggccaggtgccggcagctgatcagagagtccga

SEQ ID NO: 26397 - DNA, 1167 bp, Setaria italica
  Peptide Sequence Number=SeqID_92371
ttttttttttttttttttttagtagaaacaatctctgtatttcagatggtatcttccgcgttttaacttcaagatgaacaatgaaacaacctaccatctcatatcaggtcaaatttacaaagtgcaacgggaaagcagagattttgggttgaataaaagcataccataatacatgactactcaatgacaagaaatatgacgaaatttcagcctttggtgtccaaattacaaaaaagatttacactccctggggcagatgcatgactgtgaggatgggaatccaaacaatgggtaaaaccttcaggggaggaattcatcacctcatccatttcaatcgatagggattctctagtcagtcttctgtattcttttatccctgataggcagcgggacaggtttctgagccacgtgtggatgttctgcccctttgtaaaccttgaggtgtgtaaatagtcttcttcccagcctgcccttgggaagcatgccacgcactgcatgttcgatgattctctccggaatccttttctgaagttggtcgaaagtttcttctttcatccctccaggccgtccagagtgcctcctatagagcttctgcgaccgctttttaccagaaacagcaaccttctctgcattgaccacaataacaaaagcacccatgtccacactgggagtgtatgtgggttcattctttcccctgatatgtactgcaatggtggatgctagcctgcctagaatcttgtctgctgcatcaacaacataccatgtcttctccgtggttacatgatctgcagccttgggataccatgtagtattccatatgtcggggccgcagagttcgtcgccttcgaacatgaagcgctgctcgcggggcacgagcgctgcgagcggctgcctcttctgcttgtcgctctgctcgcaccgcacggccagtcccgccggggcggcacgccgcgtcacggacctggccaggcggcggtggtggtggcggggggcgaaggaggaggagaggaacgcggaggcggcgacggccgtggccattgcggcgcccctgagctagagcggcaacagtcggaggcggaggcggaggcggagggtgggtcgggttcagtgggacgcagccatttctagcttcgagggaggcgagatggggagcgcggagtggataag

SEQ ID NO: 26398 - DNA, 696 bp, Setaria italica
  Peptide Sequence Number=SeqID_92372
gcgcgggctcacgatgcgcgccctcgacctgttcgacgaaatgatccgctcgggcgtcgcccccgactcgtggagctacaacgcgctcatgcactgcctgttccggtccggccacccggaggacgcctaccgggtgttcgccgatatggcggagaagggcgtcacgccgagtgccacgacttacaacacgatgctcgacgggctgttcaggactggccacgcgacgaacgcgtacaggatgttcaggtacctgcagagggggggtctccccattggcattgtcacttacaacacaatgatcaacgggctgtgcaagtcaggcaaggtgggctatgcccgcatggtccttaaggagctggggagtaccgagcatgctccgaatgctgtcacatacacgacggttatgaagtgctgctttaggtacggcaggtttgatcagggtttggagacctttttgtccctgcttgaaggagggtacatttcagatgccttcccgtacacgacggtgatcagtgcgcttgtcaagaagggccggatgcaggaagccaatacctattgtgagctcatgatacaaagcggttccactattgacaatgtgtgctacaacaccctgatccacctgcgatgccaggaagggaagctggacgatgcgtttgagctgttgaacatgatggaagaaggtggtctggagagtga

SEQ ID NO: 26399 - DNA, 822 bp, Setaria italica
  Peptide Sequence Number=SeqID_92373
gggaaaactaatcgtacatgacaggagtccttgactattgctggtttagttgcaagggaagtccatgaactaaacttttgcagtatgaaatacatttcttcagcgtcttcttatagttgcatctccactggacggctagttcccatctttccagagatctcagaaattgaaccgggagttgactgttatcagaacaatcaagcttcaatcgatgatggaaatggaggaacacagcaaactcctgctcaaaacctgactgcttgacatctgttctgcagttggtactgttctgtattttgcgtaagaagacaagcagactttcatcgaattcaacagtagtaggtaattgttgtaaagttccttcgcatttgctgattaaccatttcataatctccacctcattttcagtcgaaaggattgatccagagtaaatctgatgactgacagcctttctacggtttgtgggagttgcccacagccttaatgcacacaacagtgcaaatgaggggtgtccatttgtatgaatatatagagaatcttttggccaagttccgattgagtaaatatccacatctaattggatgaaagttttctcattagggttctcactcaaaagaaaaccatagtgttcaagaagttccaagtttgtgtatgtcccgtaaccaaggaggacctgctctccctttttataattttttctggcatacaaacaataggcattagaatcttcatacccgccatctgttaatctctcaacttcagctatatcttcttcctcaaatgaagcatcatcaggagcagcatagttaaacagatcaccca

SEQ ID NO: 26400 - DNA, 147 bp, Setaria italica
  Peptide Sequence Number=SeqID_92374
gggaacgcaggcatctcaggccctctgattccagatctgggaggactgcagaacctccagtacctcgagttgtatgacaacagcctgaacggtacaataccagcaacattgggaaacctgactaaactcatcagcttggatctttat

SEQ ID NO: 26401 - DNA, 555 bp, Setaria italica
  misc_feature (1)..(21): n is a, c, g, or t
  Peptide Sequence Number=SeqID_92375
nnnnnnnnnnnnnnnnnnnnnttttttttttttttttttatcgtgaaaggcggaacaaggctttgtgtgtatataagatgcccctgcggccctgcgcagttcgtagggtgccttttcactggctgatgccaatgcagacgctaagatgcatgtagacataattttaaccccgcaagaaaactgggatggctcgtggtacatggatgaacgacataacttgcaatggtctagcgcttttatttctaccccacagtacccgcaatttagtgatttaagctctactacaattctgaagcctgtatagttcttatggcgacctgaatgcttccccagcatagcgcacattgccaagctcctcttcaattcgcagaagctgattgtattttgccagtctctcactgcggcatggagcaccggttttaatctgcccactagctaagccaacagccaggtcagcgatgaaattatcttctgtttcaccgcttctgtggctgaccatcacaccccagccagcagcttttgaatcaagagcagcttgaattgattcagtgacag

SEQ ID NO: 26402 - DNA, 594 bp, Setaria italica
  Peptide Sequence Number=SeqID_92376
tactttactaaattacttaccgtacttaggtaaattgaaaggttgcaagcaaagcgatggcagcaatgaataagcaaatggaaccggtgaaacagataaaggtcatgaaagaattccagaagcaatcaactcagttggacatgacgcttgaaatgatgtccgatgccattgatgaaacgctcgacaaagatgaggcggaggaggaaaccgaagagcttacaaaccaggtccttgatgagattggcgtcgatgtggcttctcagctttcttcggctcctaaaggtcgcattggagcaactaacaagaaagttgacaacagccaagcacgaaatgctgcggctcctgcaagaaacgtggcggcaccaccagaatcctccgctgaagtggacgatctggagaggcgattggcatctctccgccgcatctgagtccgagctgctcaaggaggagcttgtaatagtagtcattcatcctatatatgtaaagttgtttagtgatgacatggttgtctgcctatgttgtagggaaatatcaaactgcacatgatacgattgaacctacctagtcttttctttcttctgaggactgtctgca

SEQ ID NO: 26403 - DNA, 800 bp, Setaria italica
  misc_feature (785)..(785): n is a, c, g, or t
  Peptide Sequence Number=SeqID_92377
aaaaaggaaataagtaaacaaaataaaacaaaagaaccgactagacgctggcagggatcgcatacagcactatgaggaggaacatgaacaccaggggaaacttggcagtcaggtgaaccaggaatgaaagcgacttgcgcagcgaagcttggaccctctcagagttcagaagaggtatcccatggttggcatgatttgcattggatgtgtcagcctgtggtgggagggaccgtctagtggggtttgagtaacctgcatttccatttgctctgctgctgcttgggagcaatggagtatgttgctcagtataaataccagagcgtgatcgtgcacgctcaccattcatgccctcaaccatccaaaggagaaagtagttcttgcgtgggaatatgaggttccctttgtaaaatatgcggagtgacaggaggttgcaccagggacagcagatgaagaacggtagctggattggcaccgttggaactttgatgacagcccattgaaggcctaggatgcagttcttgcacatggtgtggccacaccaaagcacataaggtacgttctccactatgttgaaagactcccaacatattgggcattccaggccttcttccctgcttgtgcatgaggatgcctcgtcatcagaacaagcagcactggaagaggcacaatttggaggactcctcttccccagcccagacgtccaagcatttgatgcaaaaccccaatttcagtaagctaccttaaagacctgatttcacttgcataagaatttcacttgggggttnacctgtttcagcaag

SEQ ID NO: 26404 - DNA, 449 bp, Setaria italica
  Peptide Sequence Number=SeqID_92378
ttctacccctcggcggccggcgacctcgcggtctacctccaggttccggacttgtggcgccgcgcggcgccatcctcgctcaaggacatgggcaaggcgccgctggacttcgccggcgtgccgccggtccgcgccctcgacatgcctgacaccatgcaggattgggacatagatgtgtgcagggtacggctgcagcagatcgcccggatgccggaagcgacaggcatcctggtgaacagcttcgagtgcctggagccgagggcactagaagcgctgcggggaggccactgcctgcccggccgctcgacgccgaaaatctactgcgtcgggccactggtcgactgtggcggcgctgaggaaaacggcgagaggcacgcgtgcctcgagtggatggaccggcagccgaagcggagcgtggtgttcctctgcttcggaagcatgggcgcctt

SEQ ID NO: 26405 - DNA, 352 bp, Setaria italica
  Peptide Sequence Number=SeqID_92379
cttgcattaggcaacgggtgcgtgcacaacaaacctagtttgagcacgaggatagcctcctccaagtcgaattttcccatgagccgtggatccaccgcctcgaggatcgacccaccgcggtggtgctcaagcacccaatcaaccagcacaacacggttatcatgctcgccacgctcgatcggccttcgtccacaggccacttctaggaggaacacgccgaatgcgaacacatcggtcaatggcgtcgccttcccggtgcgcacaagctccggcgcaaggtatcccatggtgccaaccacatgggttgtctgagcatcggtcccatggtcatacaatctcgctaggccgaaat

SEQ ID NO: 26406 - DNA, 565 bp, Setaria italica
  Peptide Sequence Number=SeqID_92380
atttaatgacaaagttcatgactggcaagcagtttgggcatatgcccttggacctgaaccagagttggtactctctctaaggatggcattggatgataaccatgattccgtagttttgagttgtgctaaagtaattaatgttatgctgagctttgagttcaacgaatcatattttgaatcttctgagagagtagtagatcatgggaaagatatctgcacagctcctgtgtttcgtagcaaacctgatctagatggaggctttcttgaaggaggtttttggaaatataacacaaaaccatcaaatatactcccacaatacggtgataatgatgaggatgaaggtgatgagaagcataccattcaggatgacgtcgttgtgtctggacaagatgttgctgcaggttttattaggatgggaatacttccacgaatatgtttccttttggagatggacccacctcctgttctggaagattatcttgtttccattcttgtggcactagctaggcactccccacagtctgctaatgcaatcttgaattgtccaaggcttatccaaagtgtt

SEQ ID NO: 26407 - DNA, 256 bp, Setaria italica
  Peptide Sequence Number=SeqID_92381
ttctacacggcctgttgctgctcctgaagctgttgacatgtggaggaagaacttaatccaagggtacagaagtgttttatccttttcgtgtaatgtatctagctggctggtgaggcggagaggcttaattgattggaaattagactttcaaaggtacatcatgttcgggggacatgctttttacagtttctcatggttttttttcctgctatttttcatggtgcctgtgctgccggtaacgtgtttatgtgaaatc

SEQ ID NO: 26408 - DNA, 276 bp, Setaria italica
  Peptide Sequence Number=SeqID_92382
ccgccgcttctgctcccgcgccaccgctcccgctgccacgcctccgacgaccgcttatgtgcccgcgcgcgctgcaacatcctggcattcctaggcccgcacgcgctcagatccgtcttcaacctccgccccggtcgcagtcgatggagacgaagcagcaaccgcctgcaccgtgcttctccgtaacaaatcggccggcgacggggcagcaggctgcgagcgcgttggcgagcgcggcctggagttgatcgatgaggcgggtggtggggaagggag

SEQ ID NO: 26409 - DNA, 271 bp, Setaria italica
  Peptide Sequence Number=SeqID_92383
acgagtgcgtattagttagtgatgaataattatagtatatcacaaaacgtttctaacgttccatgtcatatcctttctgtctacttcttatttctcttgtatgttcacgttcaaattgattatctacacccttcatatccaattcgtttttaataagtcctctaaatgccttaaattgctctttaaagacttttttcgtctgttgaatataaacctttatattcatctgtaaatctcttatatgagcctttaaagtgcctatttcagtatg

SEQ ID NO: 26410 - DNA, 400 bp, Setaria italica
  Peptide Sequence Number=SeqID_92384
cgatgaggatcagtacaactgtgacacctccgatcttttcgcaatctcaacatccaattcgtttccaggaggcttggactagtagccattgctgcatgctgatgcagtaagaagtttgctaagctaaggatcgtgcattccatgaactgcatatgcaggtttcttatggcgaaaaggtgggttcaaccgttgtttcagtagggccgtgagcagagtccgacctgctgcttggttccgttcggcttgaacaacttcatcagtgtgctgcaggtctggttcaaccaagttagtactccctccattctcttataaatgacgttttagacaagtgttaccttcagcagcaagggggtataggttcctcatggctgaaatggtgggctcagcagttgttcaggag

SEQ ID NO: 26411 - DNA, 252 bp, Setaria italica
  Peptide Sequence Number=SeqID_92385
ctctaatatcaactaatgtcactcttgtaagttcaaatccagctcctgtcacgcacatttcacagtcaagtgcaagaattttatgtggagaagaacctgaaggagctgaaacagtagggacaaaacctgataaattgaaagaatagccattgtcttctaagtctttctctgaaagtgtgtaatatgtaacaggaaacggtatgtccccaagatcatccagacttgattatttttccttctccgtccggttta

SEQ ID NO: 26412 - DNA, 509 bp, Setaria italica
  Peptide Sequence Number=SeqID_92386
gagctcggcgcgcgctgccgcgagcccccaaaggccgggaagctgcagatgcagagcgacctcgacgcgctcgccgggaagctggacctcaacctccgggactgcgctcttcttgtcaagactggtgtgctgtccgacgcgacggtcccggtggctcaggctgaggcggcagcgacggcgggcgcgcagacggacgtgcgtgagctgcttgccaggcttcaaattgggcacgcggaggcgaagcaccgggcggtggacgggctgcttgatgctctgcgcgagaacgaggagagcgtgctgtcggcgctcggccgtggcaacgtggccgcgctggtgcagctgctcacggcgacggcacccaaggtcagggagaaggctgcgactgttctctgcttgctcgccgagtctggcacctgtgagggcttgctcgtgtcagaaggcgcgctgccgccgctcatccggctggccgagtccggcagcgtagtcggccgggagaaggccgtcatcac

SEQ ID NO: 26413 - DNA, 360 bp, Setaria italica
  Peptide Sequence Number=SeqID_92387
taatctcgcacggtgccatcgggtacctgaagaagctctccgacatggacgtcgccggcgccaggaagctgctcgagaggctggagcgcggcagcctgcgcagcctgttcagtagggactagcatagcagctgtaaaaagtattaactaaagcttcgctcgctgcttatatgatgatacgtaccatgaaattttcctttttgatgtaacatgtaaaaatcaagtgcagtttcacataccgtcgatgaaatggtgctgtgcaggagtttgtgttaactgaatatattgagctgtagcagggtgatggctcgagttaggagcttcacgctctgaataaaatgatgagcaacattgttccgtt

SEQ ID NO: 26414 - DNA, 983 bp, Setaria italica
  Peptide Sequence Number=SeqID_92388
aacctagacggacgcgccgtcgtgtccgagggcggcctgcgcagcctgctcgcctacatcgacgggccgctgccacaggaatccgtcgtgtccgcgctccgcaacctcgtcgccaccgtctcgccggacaccctggtgtcgctgtgcgtgctaccgcgcctcgtccacgcactccgcgacggctccgttggcgcgcagcaggcagccgcggcggccatctgcaaggtctccagctccacggacatgaagcggctggtgggcgagcacgggtgcatcccgctgctggtgcggctgctggaggccaagtcgaacggcgcccgagaggcggcggcccaggcggtggcgagcctgatggggtaccctcccaacgcccgggacatcaagaaggacgagaagagcgtgcccaacctggtgcaactgctggagccgagcccccacaacacggcgaagaagtacgccatctcctgcctgctggcgctgtcggcgagcaagcggtgcaagaagctgatgatctcgcacggcgccatcgggtacctgaagaagctctcggagaaggacgtcgccggcgccaagaagctgcttgagaagctggagcgcggcaggctgcgcagcctcttcagcaggaagtaacatgatctccgggtgatctgaagcagctagtagcgaagcgttcctttcctttttgccgtaaacctgtataaaaatcccgtcctgtttcatagcctcaatgaagtgaagtgcggcagagcggtgaagggagggggagagagtagtcgggttcatgtgaagtgaacatatcgcggttgtaatttcgctggctaatgtgtgcgtcaggcagttcgttcgttcgttagttcctaaccatggttgcagtcgcttcgggtaggctaataaaatttcttcaggcaagatcattttgcacagttttcttatgcttttgcttgtcatctgtggaatcttgctgctgtttcgttctgcaaaaa

SEQ ID NO: 26415 - DNA, 813 bp, Setaria italica
  Peptide Sequence Number=SeqID_92389
taaggaacaaacgtaggaccgacgactaggtagacaagactagactacaacggacggccacgcaacccaaggtcagggagaaggctgcgactgttctctgcttgctcgccgagtctggcacctgtgagggcttgctcgtgtcagaaggcgcgctgccgccgctcatccggctggccgagtccggcagcgtagtcggccgggagaaggccgtcatcacgctgcagcggctgtccatgtcgcccgacattgcccgtgccatcgtcggccacagcggcgtccgtccgctcatcgacgtctgccagactggggactccatctcacagtctgccgcggccggagcgctcaagaacatctctgcggtgccggaggtccggcaggcgctggctgaggaaggcgtggtgcgggtcatgatcaacctgctcgactccggcgtggtgcctggctccaaggagtacgccgcggagtgcctgcagaacctgacgtcaagcaacgacaacctgcggcgcgccgtcgtgtccgagggcggcctgcgcagcctgctcgcctacatcgacgggccgctgccacaggaatcccccgtggccgcgctccgcaacctcgtcgccaccgtctcgccggacaccctggtgtcgctgtgcgtgctaccgcgcctcgtccacgcactccgcgacggctccgttggcgcgcagcaggcagccgcggcggccatctgcaaggtctccagcagttgcaccaggttgggcacgctcttctcgtccttcttgatgtcccgggcgttgggagggtaccccatcaggctcgccacccctacct

SEQ ID NO: 26416 - DNA, 665 bp, Setaria italica
  misc_feature (448)..(448): n is a, c, g, or t
  Peptide Sequence Number=SeqID_92390
tctgttgaatttcatcggaaaatttctctatctgttcttcaccagcacaatacttggagtagctactgggttgcttagcgcgtacgttatcaagaagctttgttttgcaaggcattcaactgatagagaagtttctatcatgatgctcatggcatacctttcatacatgctgtcaatgcttttggacctgagtggcattcttaccgtcttcttctgtggaatagtaatgtcacattacacttggcataatgtgacagaaagctctagggttaccactaagcatacttttgcaactttatcattcattgcagaaatttttctctttctctatgttgggatggatgcattggacattgacaactggaaaattaagactaagtaagacaagtacctaaaagaaaccaaattaagaactttaaaagtaagaacaaattaattgttttcttgngaaaaatgagagtgccattttgctaatttgtatgccatcatttgattcaggtttttggttttctgactaagccgctgcttactctcctcatcccaccaaggactggcccgaacacgtcatctctgctctcaagccagtcaattctggacccactcctcactagcatgatggggtctgatttcgatgtaggccagatctcctcccctcagtacaacct

SEQ ID NO: 26417 - DNA, 2162 bp, Setaria italica
  Peptide Sequence Number=SeqID_92391
cgggactccaccactccccctccccctcttccccgccccgcggaatctcccaccgaacccacgcgaaaccggcgtccagatcttctcccccgcggttcagatccccggacccagccggcgcctcgtgaaagtctgcagcagcgacgaggttgcttggagctgtggatccgctgaggtggcggcatggggctggatttgggagctatcctcaaaaccggcggcctcgcggtctcggaccgcaccgcgatcgtttcgatcaacatcttcattgcgctgctctgcagctgcattgtcatcgggcacctgctggaagggaaccgatgggtgaacgagtccatcactgcgcttgtcatgggtctgctcactggaggtgtgattctgctcgctactaatgggacaaattcacgcatccttgtgttcagcgaggacctttttttcatctatttgcttccgccgataatcttcaatgctgggtttcaagtaaagaagaaacaattcttccgcaactttatgacaattattttgtttggtgctgttgggactctgatttcctttgtaataatcactcttggtgctattggattgttcaagaaacttgatgttggtccactcgagcttggggattatcttgcaattggtgctattttctctgcaacagattctgtttgcaccttacaggtgcttaaccaggatgaaacacccctactctatagtctagtttttggtgaaggtgttgttaatgatgcgacatctgttgttctcttcaatgcaattgaaaaccttgatatgggtcattttgatgcttttgttctgttgaatttcatcggaaaatttctctatctgttcttcaccagcacaatacttggagtagctactgggttgcttagcgcgtacgttatcaagaagctttgttttgcaaggcattcaactgatagagaagtttctatcatgatgctcatggcatacctttcatacatgctgtcaatgcttttggacctgagtggcattcttaccgtcttcttctgtggaatagtaatgtcacattacacttggcataatgtgacagaaagctctagggttaccactaagcatacttttgcaactttatcattcattgcagaaatttttctctttctctatgttgggatggatgcattggacattgaaaagtggaaattagctagtagcagtcctaaagaaccaattgctttaagtgcaattatattgggcttggttatggttggaagagcggcatttgtgttccctttgtctttcctatccaacctaagtaaaaaggaggcacgtccgaagatctccttcaagcaacaagtaatcatctggtgggcgggtctaatgagaggagcagtatcaattgcacttgcctataacaagtttacagcatctggtcatactgcggtgcgagttaatgctatcatgatcaccagtacagtcattgttgttctcttcagcacaatggtttttggttttctgactaagccgctgcttactctcctcatcccaccaaggactggcccgaacacgtcatctctgctctcaagccagtcaattctggacccactcctcactagcatgatggggtctgatttcgatgtaggccagatctcctcccctcagtacaacctgcagtttattctcaccgcgccaactcgctccgtccatcgcctatggcgcaagtttgacgatcggttcatgcgcccaatgttcgggggcgaggtttcgttccatttgtgcccggatcgccagtggagccgagcgaccctgattctcatctgggcactgtgactgagacagatcatagttgagttagaggagcagaagacgtagacaattttctgtaaatgttcaggcagataccactctattttgttctctgaaccagttggtgtaaattgtggtttcttgtgcagatagtttctgtacctgtagagctacataaggttttgtaaatttctgggagccagtcctcactgtagattagtacaattcatctgtaaatttaatattgttcaaagagaataatcgcatgctggcatattgacatgctctcagataattgtaatggacctgcacaatttctcccttgtatcccctcctgaatggagttttttcttgaagcaagaactcctcattgagaatgtttg

SEQ ID NO: 26418 - DNA, 371 bp, Setaria italica
  misc_feature (5)..(5): n is a, c, g, or t
  Peptide Sequence Number=SeqID_92392
gaccntaaaaaagctaccagtattctataaacagagagactacttgttctttccagcatggacctatggacttgcaaccatactattaaagattcccttttcattcctggattcatttatgtggacaactgttacatattatgttatgggttttgcacctgctgctggaaggttcttcagccagtttctagcatactttttaacacaccagatggctgttgccatgtttcggttgctaggtgcaattttgaagacaatggttgtggccaatacatttggcatgttttcgctgcttattgttttcttgttcggagggtttctcatccccagacaggacattaaaccatggtggatttgggcctactgggtat

SEQ ID NO: 26419 - DNA, 471 bp, Setaria italica
  Peptide Sequence Number=SeqID_92393
cgatgacagtaatatcgtcgtggaaatgcctgcgaaccccttaccgatcgtcttcagatgtgagtatgtcatctcacgttttcgcgatgcttcaaggagagctgctttaatgagtcgtctcgcacttccctcagcacgttgatgtttttgaacaatgtcaacagcctcctggttagtcaaatgttcccacagaccatctattgatctcgacaactgaaagatgcctttcaccctccagacattatgcttgaaaacaacaatatccggatcatcaggatgctcagcaatgagttccttcctggctttgtcatagttgacattgtgctccgctgacagcggcaccgcgagaacctcctcagtgacgtgccagaccttcccaagaaaagctcgggagtccccaaggttggcgatgaagagagtcctctggtgcacgacgccaacaaggcagcatgaccccactgtggcaaggct

SEQ ID NO: 26420 - DNA, 2612 bp, Setaria italica
  Peptide Sequence Number=SeqID_92394
tttttttttttttttaagctagggaggagggaggaagatgtccccttctccaagtttcagtagttcatacccaaaatattcagttcagtgttcatcgatacaagactggagattatgtgctcacagccaaacactgcccagtgggccaacacaaactaaacttgtttacgccaacatcacacacgaatacgcctattacatattgcgcttcacactcctgacagtgcatgcgttacatgttgggttgtgtatttttcgcagcaatgtcggttatgaaagcatctcatcagcgtttcctggtgctagaaattgagcatccatggatgaactagataatggcccattactgccattatctaagggacatcttatggaaaggggctgtactgcatggctgaaaaataggacgatgacagtaatatcgtcgtggaaatgcctgcgaacccccttaccgatcgtcttcagatgtgagtatgtcatctcacgttttcgcgatgcttcaaggagagctgctttaatgagtcgtctcgcacttccctcagcacgttgatgtttttgaacaatgtcaacagcctcctggttagtcaaatgttcccacagaccatctgaggcaaatatgacgaaacggtcacatggttgaagactatgagataagatagatgggctggcactcaataaaggtttgctgaatggtgtacgaagcctgaattttgtagtgagtggctccatgttatatcgcgggtctttcaagaatgcgtcacctattgatctcgacaactgaaagatgcctttcaccctccagacattatgcttgaaaacaacaatatccggatcatcaggatgctcagcaatgagttccttcctggctttgtcatagttgacattgtgctccgctgacagcggcaccgcgagaacctcctcagtgacgtgccagaccttcccaagaacagctcgggagtccccaaggttggcgatgaagagagtcctctggtgcacgacgccaacaaggcagcatgaccccactgtggcaaggcttggcttggtctcccattggcgtgacacgagcgtgatgaatccctgctctgtggccagaaatgcctccctgattgcatcagctgtcacgccctgcaggccggaagaggtctcttggaggttggggaggaggtggtcacgtatgaagtaggcggcctcagggccaccgtgaccatcgaagatgccggcaaaggtgccaaaaggcaggcctgactcaaccaagcactgatcctccatgaagtggttggcctgcatggcagcgaccgagaagtcgccgtcttggcaccgcgcaagatcgtgacaccagaggaggtcatcctgtgctttacggccaccagatttggctttcaaggtgggcaacctctcgagtgtcccaccagtttgcggaccaggatattcagtgtcggatgggtcatcctctaggatcttgtcttcaagagtcatgtgttcttgctctttaccgtcgtccctgtggtcgacagtcaaggcaccctctgcgtcagcagcacctgaattcgtgtatagcttcacttgcgtgctatgtaagttgtcctcgtctgcaagtgatcttttcacatcatcaatcttattcagttcatcaacaatctctgctatagtaggccttttcactcggtcggactccacacatcttaatgctatttcgatgcatgtcttaatctcatgcgatgtatgtgatgacattgtaacctgaagccttttcccccagtttccttgtacaagatcaataaattcttggtgagacatatctccacatttcaagtaacccccacgtcctgccattacttgtatgattataacgcccaaactgaatacgtcaaacttttgtgtgatttggtatctgttgatgtactccggtggcatgtatccaggcgttcctatgattactttcgtggtacaggtttgtgttgaatcaaagagtcttgacaagccaaaatctcctatttttggcaccatattcttatccagcattatatttgcaggttttaagtctagatggtagatagggtctttggatccattatgaagataatgtaaaccctcacaaactcctctaattattttgtaacgtttgtgccaaccaagtccgcaggattcatcagaaagaagcttttcaagggttccaccctgcaagtattcaaaacagagagctcgttcttccactcctgcgtaaacatattgtccatcgtactccacaactttatgagctatttcatagcagtagccaactaagcggactatattttgatgttggagtctcataaggttagtacactcatttgtaaattgcttatcatcatcaagtcctggatgcttattataaagcttcttcacagcaacctcttccccattgtcgagtactcccttgtaaaccactccataacctccataaccaattatgcgatccttggaaaacttatttgtaatttgttctaacaaatggaatgtgaaatcccttggcatcacacttgtatgttgtggatcgttctccatgatattctcaaactcctacaaggctggctgcagcatcccatctataatagaaatccagaactgcatgc

SEQ ID NO: 26421 - DNA, 1520 bp, Setaria italica
  misc_feature (38)..(38): n is a, c, g, or t
  Peptide Sequence Number=SeqID_92395
cctttggtctagttcttctttttagttttttttttttntttttttttttttgtgagctcatttttttatctctttctaaatatttgatttacatcgcttcttctcctgtattaatacaagcccggcagtttacctgctggtctgttaaaagaaatataattctaacaacaaagctcctgtagatcatgaagttagtgggatgtgttgtatactagcagtagcagcatcacaaagatgttcattttgggtgagtcaaattgaccgtggtgttacaatttcctaaaaatcggtagaaatatcctcttcaacatgaatgggccaagaatatcagattcttttgctctgtcacagctcatggtttcctaatagtcttgcggtgccagcatcagcctgggcagattcttcagaaccgtaaatggcatcgacctgatcaggtttctcaccatcatctgccgattcaaagagatcaaacctgtcatcaccgcatccgtggaaaagttcaatctgatccaattctgactgaatcatagactgcatacgcgcacgatccctgtctcgagggtaagtgcgatacatgaacgtgtatatggagctgcaaatcaccatcggtatggaaatggccgtgtacagcgccttggccagcgacgcggcgttctcccggtcttgttcagggctgctccctttgtcgtccggtttgaaaccatagaggtgctgagataacaagccgacgacaggaggcgcaaatgaagctagaatagactcgaaagtcctgtccagagcataaatgctcgttctttgtttctcgggcacaatctctgcgaaaatcgggcagtttgtagcagctccattccaggagatgatgagtcccatgatgaacaaaacgagtccatgggctacaccactggatctggatggatcatccggcagtcccagcagaagaacagcagctagtggaatagcagagccagcacttatctgcgacaggatgatcctcccagcgttcggataccgctgagcaaggaaatcccccatctttccaccaagaaggccgccaatggaggtggcaaccgcgaagattgttgtgaacatggcggtctcctcatggctgaacccgatgagctcaagccacatggacaagaaggacagggctgaccacgggaacgagccgctgacaccctgggcaacgaagacctggaatgttgggatctgaattatagacttggcctcgatgagcagctcccttgcttcatccaatgcagactttttgctgattggtgtggcatgtaacccggcatgtttgcagggaaatggggatccacggcgaagagccacacgagaatgcctacgacaacgctgacaattgcgacgagatggaaggcaatgcgccatccggcaatccccaggaatgtggtttgtgccagcatcaaggcaaagaatcccccaaatatggagcctatgctgctggtcagctgcagccagccaaaagctgctccacggttgtcgtcgtccgtggagtcggc

SEQ ID NO: 26422 - DNA, 270 bp, Setaria italica
  Peptide Sequence Number=SeqID_92396
ggagcagggagggatcggagaacaagaatttggggatcgaagagcatgaggagggacagtttaggagaagtcaattccacgtttctttcctttatttactcacgtacgccacctacttgggctgtacccattccggacccatgaatctcctgttgggccgtctcacgtgaggttgccttctcggctggcccatcagtagtaccgcaggagcagggaccttcggtagaagtagcagcagcagctagcaggcggtaccaggtcgagcgggtc

SEQ ID NO: 26423 - DNA, 334 bp, Setaria italica
  Peptide Sequence Number=SeqID_92397
accaggaagatcttgctgccgctgctgccgagccggagcagctccccggcgccgtagagagcctccctgagacggcggagagcggcctccgatgccacaggcagcggcgtgggcgcctccttggcctcctccagcatgggcacgagcagccggatccgccgcgacaggttgcagaactgccgccggtacgagttcctgaagtcggagattgccgcgatctcgcccaccagctcgaccaaccgctccaccacctccccctcctcctcctccgccccctccaccttcgcctccctctccgccgcctccgagctcgagggcggcagcggagaggctg

SEQ ID NO: 26424 - DNA, 553 bp, Setaria italica
  Peptide Sequence Number=SeqID_92398
acaaaccaatagaataccaaggtacaataggcaaatagttcaaaagaagctgcagcttgactccgacagcgacttcctggacggcttctcaatcaattcttcgacgatagatgaatcagcagagaaatcaacatgatggtacctattccttgcagattttgattctctggagggatagaacagcagctagctcaatcattttagctcccagtagcaaaaggtagtctccttcaatttagtaggaaaagttttagtttcgattctgtgtcactgtaaatagcacacaaacgcgcgagcagggagaaaagggtaggataaaactgcagaagagctgtcttctttctgttggaggacatcggcgtgtattttggaatcaaattccccagtgtttcggcatcaatcttgttggggatgtgattcagatcctgcttttctgcacctgcttatgttcagtccttttccttgtctgcacctcaactttcatgtatgaatgccataattgtcttgcagcttggtgcagcagtatttcaattttaaaaaaaaaaaaaaaaaa

SEQ ID NO: 26425 - DNA, 1627 bp, Setaria italica
  Peptide Sequence Number=SeqID_92399
gcatcaaaagtcaggttccatcctgccgggatcgaattttggctataataacagcttcaattcggtgggagtttttttttccagacagaatgcaggattgggagaagcatcgagctatgtacagagtttcttctagctctaccaacacagctgcgactgaggctgaaagaatgagcgagccgaggcacgagaacccccaaggttacacaaaaaaagaaaacctcacaggatcgtgcggccgttggtcttcctcttggcgtcctcccatggcgccggcacctgcgccgaagaccccacgtccagctctcctccaaccatcaatgccgggaggccaccgttggtcgtggagccgcccatggtccctccgatgccaagaccaaggaagtccagcgtagcaggcttgggaccgaacagtggtgatggtcccatcatcaggtccggcaaccctgcatttccactttcgtatgcgaggccaaggccaaggcccccggatagcattgccctggactccctctccatttgctgactagtccggtggtgccgctccatcacctccatttgctgactgctcctgttgtgcggccaccgttgcgtgcttgactccatctccatttgctgatgactccggtggcgctccatgtccatttgctggtcgctccggtggtggtgccaccgctgcgaactcgactccatctccctttgttgatgattccggtggcgctccatctccatttgctgcgtactccggtggtgccacggctgcgaactggactccatctccatctgctgacgattccgatgacgctccatctccatttgctgatgactccggtggtgccacggttgcgaactggactccatctccctctgctgatgattccgatgacgctccatttgttgattactccggtggtgccatggttgcatgctgttttcagcaaaccttccttgaggtagctgcttcgatggaggcgatgacgaggaggaagaggcaagcccaaactctttcaggaacgatgagcttgattgcgaagctccaacttcagcagccttctgcaggagcgcggtcgcggacatgtgcggtgctggaggtggagcgaaggtgcctggattgcttgcgcttgtctgtgggaacagagaggagggcgcaccaatcgcaaggcagaggaaggtgggatcgacaccgatgagatcacgtagagacctgctctgggaagtggtgcttgttgtggctgacgcgaacagaccggcgaaagtgttggttgttgtagatggcgcgatggaattggaaacactgccgccggcaccacaggtggtgctgctcccatcggtaccaatggcctctgagggtgatgggaggaagcaaggaagcattggagtgtccttgtccagcagattggagacctcaagttcagcttccttgtattgatcagcttccttgaagcatgtatcagcttcatcctccaatttggctgtcacagttgtctcagcaaccacctctggctcatccacatttggcaccaccgccacaactggccgctgctccagtggaaatcgaagtggcgagggaaagagctgtggttccttgggcaatggaggtggggacggacggcgcggcggctccttg

SEQ ID NO: 26426 - DNA, 199 bp, Setaria italica
  Peptide Sequence Number=SeqID_92400
ccggacaccttcctccacctccgcctcctccacgagctcgacctcagcaacaaccgcctcgtggggcccttcccggaggtggtcctcacgctgccgtcgctcaggtacctcgacctcaggttcaacgagttcgaggggcccatcccgccggcgctcttcgaccgccggctcgacgccatcttcatcaacaacaaccgcc

SEQ ID NO: 26427 - DNA, 578 bp, Setaria italica
  Peptide Sequence Number=SeqID_92401
ggggccgggaaaacctagagggagtagagcttcctgagattcatgggcgagatgtacttgctgtctccgtcgacgatgtacttggcgagcaggacgttggccgcctcgctggggtggtaggggtcccagaacacgtgcttgtcccgtgcgtcgcacatgctcgtcgtcggcccgcacggcaccatcccgtcgtacgacccgccgttgccgcagcacgccacgctcgccgtctcaaacccgtagttggggtagttggtgatgagctccatgacgaggtcgtagacgttggcgaggcagaacctggcgccggggaggttgccgttgagctcgatcagaagctccctcagccggccgttgtactgagccgccagctggttgggcagcttcacgcactcgtcctcccccacccggttgatcgtcttctggtacgggatgcaccccagcgggcccacgttcgccaccacgaacttccgggcgtccagagtgtacagcctcgtgagctggtctcggaggtggaagatgaggtcgttgacgaagccgtcgggcgactcggagatccgcgtgccggtggagaggac

SEQ ID NO: 26428 - DNA, 363 bp, Setaria italica
  Peptide Sequence Number=SeqID_92402
aatatctatgaacttagaaaagccaaaacgaacgtataatttgggacggagggagtaggtaattaaaccaatggttctttgcattttcgtttacaaacatataatcttctgtataaggaaatagtagataaattaccatctccaaatatcaaaaaggcttggagctaaagatatctactttgtggtacggcttaactttcttttgctggtcacctttttacctaactttatatggatgaatttgtacaccttttttattgtctctaggatgtacaaagtgctagcaaaaccaatattagaagaaatgtttattatttatatattagaagtgcaaaattacaaacagcataaagaaaaaatgga

SEQ ID NO: 26429 - DNA, 578 bp, Setaria italica
  Peptide Sequence Number=SeqID_92403
aatgatgcaacatgtgattacaaaccgcaaggattcatagcaacgagagcatttgtacagaacacgagcaacagtgcaggacgatgaagcgagcacttctccgggaaaacagggtagatgaatgaaggaaagcttaagcctaatagcacacggtgtcgtcgaagctccagagccccacgccctcgttgcccagcgacagcgacgcgtcgccgccgaacaggccgtccagagactcgtacgcgccgccgttgaagaagctgaaatggtcgccgaacatgaaagcgtccaacagcatgtcggcggattcctcggacgccgccggtggaggcgccatttcctcctcctcgggttcctggggttccgtcccggcccgcttgctgggtctgccgagctcaacgtggaagccagcagcaggccacgtcgcgccgtcgtcggtcgcggacatgccctgccacgagaagtccggcagggtgctgcagccgctggcgtcggagacactgtcgctggtctccgcctcgctcttgactgacggcgcgtgcgccgcgtcaggaacatcgtctccgtcgacgaggtcgacg

SEQ ID NO: 26430 - DNA, 1092 bp, Setaria italica
  Peptide Sequence Number=SeqID_92404
ttttttttttagtctggcggaaattttgacatgccgcaagaacaaacactgcagatttaatggttgtataggtgacagaaaggttttgagacaagcgaaaatatgtatatgtaacactgagccctcttatgttgggaagcaaatgtcaacggatgaagtctaaaaatcatgtaggcatagcaaaaaaacatgttttccatcgtaagctagtacctaaacttcggatggagtctttgcatcaattgacagtgcgtgcaagccagtcttaagctcatcctgcaggagatcatacacagccctgtgcctcttgagcaagctcttcccctcaaattccttcgacaccaccctcacattgaaatgtgtctccccattgctaccagccaccccagcatggcccttgtggaggtgcgatatgtcctcaatctccaactccacgggcgacagcgcgcgctccagactctcccttatcctctctttcctcccaccccccaaagaagaaccattcccttcaacaaaattatctggaacttccaccaattgttcctcctcattaggcatatctgccaccgatttctcctcctcttgcacaccgaacgcggcaaattcggaccctttgttctccatgccattggcacgtggttctgcaacctcttggactgattgttggcccgtcgtcgagtcaccgccggtgtctccggcgatctcaagggccttgagcttcatgaggttgagcatgttgagcagaccactgttcctggagggcgagaggctctgccttatccccaacagctcaatgaactccacgggcaccttggccacatccgccgcgggcgcaccggagagcccgagcacgagcagcgcggccaggcccttggtgagctgcgcgtcggagtcggcgtggaacctgacgctgcggccgccgccgtcgccctcctccggctctgcgtggtaacagacctgggagacgcaccccccggacgcggttggaatcggtcttgagcgccgggtccatgggcggcagccgcgaggcgtaggcgaggagctgcttgtaccgggtgcgcgcgtcggggacggactggaagaggtccgact

SEQ ID NO: 26431 - DNA, 315 bp, Setaria italica
  Peptide Sequence Number=SeqID_92405
taaacctacggaaatgtccaaattccaaataaaaaaatagagagtaaaggatatatttaccctgaaacggatatctttgtatctttttttctttttgttatttctaactcatatttatgagataataaaatatgacaaaagctataccaaaaataggttcacgtaagaaagtgcgtattggtttgcgtaggaatgcccgttttagtttacggaagagtgcacgtagaataacaaaaggggttattcatgttcaagccagtttcaacaataccattataaccgttacagacccacaaggtcgggtggttttctggt

SEQ ID NO: 26432 - DNA, 473 bp, Setaria italica
  Peptide Sequence Number=SeqID_92406
gcggtggagaacagcgacggcgacgacgagtagcgcaaggcattcatctgtttggtgctctcctgttgttgttgttgctgctgctgctgctgctgctcgtcgaatgccaggcggaggccggtggacacgagcgccgtcgcggcgggggacggcgacgacgagactctgttctggctctggaactgcgccatgttggcgaacgacgtcgactgctgcggctggagtgtgaacagattgacgtactcctccttggccgccgccggaggcggcgccatggcctccctcggccgcttcctccgattcccactcgctccaccgctggcgaagtagactgccgccggcgagactccggcgagctgcggcggccggggcatgtccatctccttcctctccggctcgcctctgtcgtggaagaggagattggacgggtactgcgcctgtactgccattgttaaggaggtggggaggagagg

SEQ ID NO: 26433 - DNA, 1279 bp, Setaria italica
  Peptide Sequence Number=SeqID_92407
gtacggcgtggccggctatgccattgcggcgctgaggagaaggtttcaggtcgtcgacgtgtccagcaactacttggatggagctttgaacgggtccgatggagtagtgattaccacgacgaattgcttccacggcgtgccgggtcagcgcagccgtgtggattgcgaggagttttacaggaagcagggcgtgaaccttgttgatgctccagctccctcgccgttgccgtcggcttcgcctctgccacagccatcaccggaggtgaagaggaagaagcagggtatctccaaaaatgtactcattggagtccttgtagctgcgggagcattgatggttctgtttttggctgtattgctgttctgcttggtgaagatgagcagcaggggaagaagcagagggaggggagtggagataaacgaggaaggtactggcacacgctctgcgcgtaggagggacagcagtgtgaatccagtggcgtcatctccatcagcagtttctccaagagccaatggtggacctaaaaaggatgtgtctgccattgccggtgatttcagctatgaggaattggtagatgccactgggggtttcggtgacgacaagctcatcaagcatgggcattcaggagatatctatcacggtgtcttggagaatggctcacatgtcattgttaagaaggtcggttcaaagggtatcaacaagcatgctagtgaattggacttctattcgaggtactcccatgacaggattgttccgctactcgggtatttgagcaaggatgatgaggaattcctggcttacaagtatatgccaaagggagacttgaccgatgcattgcacaagaaacctgtagacactgcagatggcttgccctcgctggattggataactagactgaagattgcgactggtgtggctgaggcaatgtgcttccttcatgacgagtgtagcccaccattagttcacagagatatccaagcaagcagtgtccttcttgatgataaatacgaagtgcgacttgggagtatgagtgacatatgcgcccagcaaagtgggggaagccagaatgtcttctctcggatattgagatcgtcaaagtctctcgacaagcacacatcaggtccaccggccacttgctcctacgacgtcctctgcttcggcaaggtgctgctggagctggtgaccggcaacttcggcatcagcgggtcgaacgacgccgcctcggaggaatggctggcgaacactcttaaccagatcaacggcggcgacaaggcgagcgtc

SEQ ID NO: 26434 - DNA, 313 bp, Setaria italica
  misc_feature (1)..(25): n is a, c, g, or t
  Peptide Sequence Number=SeqID_92408
nnnnnnnnnnnnnnnnnnnnnnnnnagcagtggcatttgtttttcttttctttttctcggttacacaagcaccaccaggtacacatcacactcgcaacatcacacctactaggcacacatgacacgtgctcatcacatctagcaagtcatgtaacatgtgcagcacacgttttcaacaccgatgaacacactcgttcttgtgcgcgcgcttgtgtaaatatatgggtattttgccaaagtggcaatgattttggtccattttagatgatcaatgaaacaggatggatggttcttgatatgaaggagttaggta

SEQ ID NO: 26435 - DNA, 316 bp, Setaria italica
  Peptide Sequence Number=SeqID_92409
acgagcgaggataactcgttgatgtagtgggtgctggcgctgcttgtgccggcacctggccatatttctgcagggtagctgctgctggtgccgttgattagctcctgcgaggccgatgcgacggagaggaactcttgaaggatgtcaacctcgttggggttgctgcggagtatgtttgtctttgtgtcgaggctgacatcttgcggaaagtcctccacctccaggggaggcaaggagagtctgtgctgcagccttgcacactcgagtgcaacatcgaccttgggacgggagacacgagaagctggaacgaacccgg

SEQ ID NO: 26436 - DNA, 615 bp, Setaria italica
  Peptide Sequence Number=SeqID_92410
tggctctggatgattccttgacgtacttcgagatggagaggctctccatcttggaggagctcaagacactggaggagaggctcttcacattggaagacgacgatgtcaccgccaatgccgctgctggccattcctccggtgatatggacttgtcggccgatgtgcttcattcacctgaggacatcctcaccggtgacaaggcaagatgcagaggcaggacttctatcagtagagggaagagtcttctgcctctattcgatgcagtcggcaatgagacttgtgatcaaatgccatctgcaagagtaggagaggcagatcaagctgatgattcggcgacaaagccggcatccgtgcttgccaaggagcaggagaggctggcaatcatagaggaggttgatcatgtgtatgagcgattgcaagcgctggaggcggacaaggaattcctgaggcactgcatcaaatccctcaagaaaggagacaagggcatggacctacttcaggagatcttgcagcatcttcgggatctccgtaatgtggaacttcatgttaagaatgctggtgatgccatagctgcaaattcagtgtagcaagttcatctatacgtgtgattagact

SEQ ID NO: 26437 - DNA, 297 bp, Setaria italica
  Peptide Sequence Number=SeqID_92411
accggtagcaggacctcaaggagaaccagcaggaccaggagggcaccaggagcaacgaaattgaagctgaatcaagagcatggtgggcaccaagagcaacgaaattgaagctgaacaacgaaatgaacatgggcatacttttctcaacaattgtgttctttttctctgtgtttgtgaagtgttagtatctgttacttcatttgttttttgggcaagtcgcttcattcaacttgtctgtcttggacatgtaattttctaaaataatttgcaaaagctgttatggtaaaaaaaaaaaaa

SEQ ID NO: 26438 - DNA, 315 bp, Setaria italica
  Peptide Sequence Number=SeqID_92412
tttttttttaaaaatgatattaggcgcttctctgctgctaaaagaatcatcagccagggtattcactatattatcagtgcatgaataaaaatggaaaactttccacagctcgtattgtgttgttccatgtagcttcaaactagctaccatctagtttactcaatttcacaacatatggcaactaattgttgcgtcaatcagccattgtgactatagcaatttgcgtagtatcatgcgcctaatgatgaaggggaaaaactgaaccttccaatgttccaccctgtacagaaatagagaagctatgcactggactag

SEQ ID NO: 26439 - DNA, 506 bp, Setaria italica
  Peptide Sequence Number=SeqID_92413
cagagcaaccacaatcagtacagacatcccagcaacccactccggaaggttgtgatcaccgcaatacagataagacacagttggtctatcaacaagcagatggtatatcaggggcagtggagaataccagctctttatctgaaaatgtagtatcagctggtgtttaccatactgccccacttaccaaaccgaaagatatgactatactgagcaattcagtggatctgaatcactgtatagaaacttctaatagcagtaattgtctgaactccattagtttggcacgtcgtaaggtgccctgtcaaaacttcaacgatgtgaactctcatctagacagcgacgatggcttaagtcctgatgttgagtgtcttggagaaagaaaccatatgctatcacaagcatcatatgctcctagtttgacagccaaggcaatatctggtgataggggtccattgtcacaaccttccagttcttgtgcttctgctaggagcagaagcacattgacg

SEQ ID NO: 26440 - DNA, 249 bp, Setaria italica
  Peptide Sequence Number=SeqID_92414
cgggcctcgcgcggctcccgggccgccaggccgtcgcggatctcgccaagatcgcctcctcgctgctgcccccggagggcggcgacgcggactgggcggagtccgccgtgggggtcaccgaggaggtggtcgccttcgcgcgggacgccgctctgaggcacgagctctggctcgacttccccctcctccccgacgacgccgactccgacgatttcgacatgactgatgcgcagcaggaccacgcgctgg

SEQ ID NO: 26441 - DNA, 290 bp, Setaria italica
  misc_feature (282)..(282): n is a, c, g, or t
  Peptide Sequence Number=SeqID_92415
cgctcgtgctcaccgccgggctcgcggaggtcgccgccggcgccatttccatggggctcggagggtaagcctgcggcctgcctcgatccttcatgtttcccatgcgtgctccatctcgaaagttcgcatctctccattatttgcctcgtcagcaatccgacatgcataacagacgctgagctcacgttggcttctcttgcctttgtttcttccccaaaaaggtcgatgcattgcagcaactgagctaccggtttcaatttagaatcccctgctcaaaagggnattgctgg

SEQ ID NO: 26442 - DNA, 414 bp, Setaria italica
  Peptide Sequence Number=SeqID_92416
tcagcccctcctcactgctcactgaatcttctgacagcgcagacagaggccccacatagtgaggtttttccactgccagtctgtccgtaggcaaatatcgagctgttgaaacccgataagcaatttcaacaagtggcagcccaacaaggttaaatatatcctcctgcgtggagaccgcgtcggcgacggcatcgaacgtgaagtcctgcccgtggatcgcgaccgagttgaccgccgtcttgcgcatgcaggcctccggcccccgcccatcctcgcctgcctcctcgtcgtcgacccggcacggcggccgtatcctcacaaccacctggacgccggagtcgggcgcgggcgcggcggcgtcgtgcggcagggtcgccgcggacgagacgtcgagcttcctcttgagcgggttcg

SEQ ID NO: 26443 - DNA, 503 bp, Setaria italica
  Peptide Sequence Number=SeqID_92417
atcttgtttactacatgctccagtaccggtctccgattcggcgaagacgatcaaggtggtggcgaggggtcggcggcgatggcgacggcgacggcggcgcggcacgacgacgtggagtcgcagcatgaggagcacgacgatgccagcagccacgagcagcaagcgcagcggcctctgctggagaagcgctcgttggcggacgacggcggcggcatgagcccgatccagcgggccatcagccagacgtaccagagcacggcgcacctggccacactgcttcccacgggcaccgtgctggcgttccagctgctgtccccgatcgtcacggaccagggccactgcgtccgcgccaaccgtgccatggcgggtgcgctcctggcgctctgcgcgctctcctgcttcgtgctcagcttcacggacagcttccgggacgccaccggcgccgtccggtacgggttcgccacgctccgcggctctggtcatcgacggcggcgcgccgctgg

SEQ ID NO: 26444 - DNA, 187 bp, Setaria italica
  Peptide Sequence Number=SeqID_92418
aggttgtattactggaagaatacacgaaaagttttgtcatgtggctgagaaggcagctccatacagttgttttcactgacatgtttattgactcaacacagtacaactgattaccggaccatgcaaactaacatggacaacaacctgtagacttgacacgccattcttacacattttcgaacggtaa

SEQ ID NO: 26445 - DNA, 422 bp, Setaria italica
  misc_feature (8)..(8): n is a, c, g, or t
  Peptide Sequence Number=SeqID_92419
tgcggcgngggccccgccgccgagccccggccgcccgggccgtcccgttcgtccgtcctcctcccctgcagggaaagcccttcgcctcctccacgccgtacgcgcagtcgcagcagctgcagcttggcctcgacaagctcgggaagatcaggccgtgcccgtccaccaacccggggtgcgtgtccacgaacgcgctgggatcttccggctccttcgcctccccgctggtcatcccggaatcatccgccggggacaaggccgttgcctcgttgcggcaagccatagagaagacacagagcaatgtggacttcaaggtcgaccaagaccaccccttacggtcactacattgaggcggagatggacggcggcgtaggccgggacgtgatggagtttctggtgaagaaagacgccggcgtggtggc

SEQ ID NO: 26446 - DNA, 423 bp, Setaria italica
  Peptide Sequence Number=SeqID_92420
atcactttttaatcatcttgcttagaaggaaagcactgaataaaactgtccagcagctccttgttgtttttggagggaaggggaaaaatacttttggtgcggttggggggaaaaaatatctggagaggaatctttcggtgtcatgggaagcgaatattcgggcgcggggtaagcacgtaattagcaagcaacaagagggcgctttttatatcctgtggcccggtgggcccaccccccgcggaactcaaatcccgggctggaaaccacaccctaaacccacccccacaaatccgcatccgaaaagtccaaaacaaagaacaatatcccacccactcaacggcccaaagcagcctcgcaccagtagggtattttcctcgaaaaacaaaggaaaaagggcaagctaatcgaggtgagaaaaaaaat

SEQ ID NO: 26447 - DNA, 1246 bp, Setaria italica
  misc_feature (1207)..(1246): n is a, c, g, or t
  Peptide Sequence Number=SeqID_92421
tgtggatgcactaaggaccttgcgggagctgaaactccttcgccatctccgccatgagaatgtcattgctttgaaggacataatgatgccagcacacaggaggagctttaaggatgtgtacttggtctatgagctcatggatactgatttgcaccagataatcaaatcacctcaggggctttccaatgatcactgccagtattttctttttcagttgctccgaggactgaaatatctccattcagcagaaatactccacagagacctaaaacctggaaacctgctggtgaatgccaactgtgatctgaagatatgtgattttggccttgcgcgtacaaacagcagtaaaggccagtttatgactgaatacgtcgtcacccgctggtacagagctcctgagttgctcctctgctgtgacaactatgggacatccatagatgtttggtctgttgggtgcatctttgctgagctccttggccgcaagccaatatttccaggaaccgagtgcctaaaccagctcaagctcatagtgaatgttctcggcaccatgagtgagtctgacctagagttcatcgacaacccgaaagctcggagatacatcaagtcccttccctacactcctggtgttcccctggcaactatgtacccgcatgcgcaccccctcgccattgatctactgcagaagatgctcatcttcgaccccaccaagaggatcagcgtcaccgaggctcttgagcacccttacatgtcccctctgtacgatccaagcgcgaaccctcctgcccaggtgcccatcgatctcgacatagacgaaaacatcagctcggagatgatcagagaaatgatgtggcaggagatgctccactaccaccccgaagtcgtcacggcagtaagcatgtcatgatctcctactgtcccaggacctcggcaggctcaccctttttttgataaaagcctactgcgatttagccgactacggcgcctagcttttgtagcacctttaatgtgtgtttgatgcttggcttgtgtaaatacgaagatgcgcccaataggaggcgtatggatagcttttatcatcatggaccattacttggtgtatgcatcggtcgactgttgtgtgatgttgtatgagttcatgaagctctgttaaagtgagctcagtaatcctatgagtacttagttcaagttaacaaagttaaaaaaaaannnnnnnnnnnnnnnnnnnnnnnnnnnnnnnnnnnnnnnn

SEQ ID NO: 26448 - DNA, 505 bp, Setaria italica
  Peptide Sequence Number=SeqID_92422
caaatacctcacaatggatggagagcttgaactgcctgaattcaaccctcgggaacgggtgaagcagcagatttcagtcccatttctctgggaggtgaaacctggcgcgcccaaaagggactgggtcatttccaagccagtggcatcagagtctgcatgcccatccccgaccccgacaaagcttgttgtgagcgtgccattccagtgggaagaaaagcctgggaagcctatacaagaagcatctcccttccacgtgctgcctgatcatggtggctttgtagcatcttcccgctcactgaacccttttgcggtcgagagcgaggaggaatactcgcttggttttgatctggaagcatttggttttccagacaacaacgacgcttctggtgctgcagcagcagcatgggttgatggctcctccggccgtcgtgacgcttggttctcgttttcagagtcagaagattacagccactccagtggtgatacttcagcccaggaccaggta

SEQ ID NO: 26449 - DNA, 506 bp, Setaria italica
  Peptide Sequence Number=SeqID_92423
gtggttaaggacttgtcttggggcgcgtcctcggcggctggttctggttgtgcttgctcgtcggagtttatagtggcggcggcggcgttgctctgacgctctgcctcctccggcgctgcgtctgtctcgacgtcgtcgtcgttcctatcccctccgatcaccgcgtcgctaacccctgaagagaagggttctgcggctgccatgccgttgctctgctcggcactctgctgcaggtggccgtgtctccctccctgctgtcgcggccggacccggacgtcgcctgttcgggcgtcgaggacgacggcgacgtcgtggcgggaggagcggaggaggacgaggaagaagaggaagccgccgacggcaacggacaccagcctgctccccaccggcctgtcgccgcctccgccgccgcctttgatgaccgccggcccgcggccgcccatcgcagccatctatagcttcttcaattcttctccgacgaagatccgagcgtgcgtcgtccactg

SEQ ID NO: 26450 - DNA, 593 bp, Setaria italica
  misc_feature (569)..(569): n is a, c, g, or t
  Peptide Sequence Number=SeqID_92424
ttttttttttgttcttaaaagtcatcaatagaacaaatttttgaacacaatcagtaacagatatgtcattttaatcactttggatcacaaagtacaacattcaaacaattcgtcacatctgaaaaaaaaatcgatgctgtagaggagaggggagaagcacaccgcatacaagtaaacaaagagcaacttacttgtaaagttgcaatctcttacaccctcgacggcctcctctctcaaagactagatagtatacagatgcctcagtcgccgctgggagcgcgttattctgtaaccaagagctctactcgtctccgacgatctcgaactctcgctcgcggaggtgggcgatgaaccgtacgggcttgtcctggccgtccagattgagctcgaactccaccttgaaggggagattagccgtgacccgcttgcccttccacacgccgacgtactgcttgactacgccctccatgccgcgcaggtccagtcccggcgccttggcaacgtggtggacgcggacaggcgccgtgacgcgcacgcgcttcccgaccttgggcgcggccgcggcctgntcggcggccacgtcaggcgacgag

SEQ ID NO: 26451 - DNA, 575 bp, Setaria italica
  Peptide Sequence Number=SeqID_92425
cttcagttgggtctttttccatctggtccttgagccttctttccctgtgtgccagtagtaaatcttgtcagtcatttttcttcctgtaacactgatatccttggcattaagcacaatgcacatgtctccgttttccacatgtggtgcatacgttggcttatccttgccttgaagcgcaacagcaatttgggatgccaatcgtccaagcacctgacccttcgcatcaaatacacgccaccgcaacccatctaaattgattcttctcaaacctgcaagtgctttcttcaggttgccagtgaaggcaggcgatgttgtagccatgccaactctctgtagtggaacagtggtcggatgcagaggcagttagaaagagatgtggaggatggcttccatcacggactcacgtgaacctccgtccctttccccttctttcctttctctagggtttcagggcctagacaggcctcacagaaaaatattgcttggtcaggccagcatttctcggccgcctgcggtgacggtggtggcagtggacgcggcggcgggtcgtcctggcgagcgcgaggggatggagt

SEQ ID NO: 26452 - DNA, 444 bp, Setaria italica
  Peptide Sequence Number=SeqID_92426
ctcagataaaagcaactgacagcctcgagacaagttttgagttacatgctgtaacaaatacaaagaaattctgaatgtttctttgactagttacttctagtgtccattcggctcgacatgctacatgtcatggaaacaaagatactccgagcatcatctggtagatctgcaacatgcaaatacacatctgaatgtgcctatgcagtagcctcagctttggtattcttagcatcttcttcctccttggttctgtttgcctgcttcttttttttgggctcttattaatgcacgccttgcacgagggcgcatctcgcgtacttgccggggcggcatcacaaaaggttcaagagcgcggtcatggaatggatgctcatttccagaaaatatcctcagcttgcgatccctgtcatcacgcaatctgttgcgaggaagcatgcgcaggac

SEQ ID NO: 26453 - DNA, 938 bp, Setaria italica
  Peptide Sequence Number=SeqID_92427
ttttttagaaacaattgaacaaagcagaggacgatcttattcactcagacagtgcagctgagacaaggtttgagttaaatggtcttaaaatacaaaagggattcagaattagttttgctagttcccaggttctagtgcatatattcgactcaacactacatgtcaaagaaactaggggcactccgaaaacggaatctggaaagatttgcagtgtgcaaatacacatcagaatgcacctatgcagtgatctcggcattcttcgtaccttcttcctcctttgctctgattgcctgctctttcttctgggcccttatcagtgcacgccttgcgcgggggcgcatctcacgtacttgccgtggtggcatcacaaaaggctcaatagggcgatcatggaatggatgctcatttccagaaaatattctcagtttgcggtccctgtcatcacgcaatctgttgcggggaagcatgcgcaggacagctttgcgaatcacttcagttgggtctttctccatctggtccttgagcctcctttccttaagatggccaatataccctgtatgccagtagtaaatcttatcagtcattttccttcctgtaacactgatatcctttgcattaagcacaatgcacatgtctccgttttccacatgtggtgcatacgttggcttatccttgccctgtagcacaacagctatttgggatgccaaccgtccaagcacctgaccctttgcatcaaacacacgccagcgcagaccatctaaattgattctccttaaacctgcaagtgctttcttcaggttaccggtgaacgccggcgccgtagccatgtcaggtggacgccggaagaggaggaggatgcggcggcggcggcggaagaagggatcaggcgtcgtcgcgtgctctgtgtccgtgaggcggcgcggcggcgctcctctggg

SEQ ID NO: 26454 - DNA, 282 bp, Setaria italica
  Peptide Sequence Number=SeqID_92428
ggtagtttgtcctatttggttgtcgcactcgccattggccgtgatggctcgttggctcggcaagcacccgacgggcaacatgtcgagaagggccagcctccgtgctccaagctcgtacaactcctgcacatgaacttgttgatcttgagaggcttgatatgcttgaggtaaacggcgaccatgccggcgatgaactctggcgcctggctctggggcacaccgttgtcgaaggcgtcgaagtcgttgccgccggtgctgatgaggaacagggaccgggtcagc

SEQ ID NO: 26455 - DNA, 1386 bp, Setaria italica
  Peptide Sequence Number=SeqID_92429
tctccgactcagtcgcactagttctcttcagttataacttgtctttattccttttggaaagatggacgaattaagattttgtttggtctagcatttgccgattctctgtagaattgttggctacatgcattctcaaaggtataggctatgatattcttgtttatttcattatcaaaaaataacaccattatgtggaggagtagggagcttccaccatggacaacggttcttgcatcagctgtgcaaggttgataggctcagcatccctcgtcggaccgtagaagaaggcgaggacagcccagcggtaagcagcctgtgtcccgtgcaccatgtcccaaaaaaggtactcgtcgcggttcgcacagaggttggagatcaccgtgcatggcacctcgccgttgaacttgccgctgccacaacaccctctcttcacctcatgaaatccggccagcgccgggttggcgatcatgtcggtgtaggtgttgtacaagctggcgatggagtacttcaagcttggcatggaggtcacaacggctttcgcaatctcggtccggaggagggcattgaacatctgtgacatggagttgccattggtgtcgcactcgccattggccgtgatggctcgttggctcggcaagcacccgacgggcaacatgtcgagaagggccagcctccgtgctccaagctcgtacaactccttgatatgcttgaggtaaacggcgaccatgccggcgatgaactctggcgcctggctctggggcacaccgttgtcgaaggcgtcgaagtcgttgccgccggtgctgatgaggaacagggaccgggtcagcaggtcgtccagcgtctcccgatccaccaggccagttcgaatgatcgttgccttggtctctgcgaacatctggacttgtttgctcagggggatgaccgatccgttcccagtgatgtccaggatgccagatccaccagatgcatagttggcaccacctcggcctcgtaggagatcgaagcttaataacggtgtcagtgagaggtaagcgggtgggctcatcttgaatcccaggtgctgtgctgtgatgtcggcgaggttgtagccgttggtgaagcgcccggtccgccggaggacggtgcgcgggaggtcgacgccgttcgggggcacggccctgggcgccggcggcggcaggaagtcgttgttgccggcgtccaccagcgagtcgccgaacacgtacaccgccgggaccaccgggcggccatggccgatgccggtgctctgggcggcgccgaacacgtcatcgccggtcgccgacgagcagagcaccgccgcggcggctgccagcaccagcagagcgccggcggcgacggccatcgcggagccagcagctggggtcgtcg

SEQ ID NO: 26456 - DNA, 218 bp, Setaria italica
  Peptide Sequence Number=SeqID_92430
ctcatgtttcagagactcaatttgctgaggcaggcccttctgcagcttgtactccgcctggagcaactcgccgagcttgccgatgacgctgcccaccgccccagccacaagatccatgcctagctagctcttgagttgaaaaaacacctcgctgattcagctcctccaatgtgtgcttcagatcttacttctggttcagctcttcgattgagttgaag

SEQ ID NO: 26457 - DNA, 1039 bp, Setaria italica
  Peptide Sequence Number=SeqID_92431
tccttaagtcttgtctacggacagaagatgttttcctttattcaggcatcatttatcgggaaaaagaatgtcttcttttcactacaactgacagttgaacgcaaaagcagaattctgccttgactccgtatgtgcatattctgtgttgtgcctgcagtcttgccacttccagctcaaatgtacattggatgggcaccaagaagcacattggtacaaaacttcatgtgaagtaaaaaagcgccatctgtcagtcattttcctctgaagaacatagacatatcttttccagaacgactggccagtcctccccgagttgttgagggtttagctgcatagccaccttaaaatcatttatagagatcaagtggttacttttgatctcatttgtggctcctgatggcccgctgcttgattgcatgtgaacatggtttggcagcaagacaccattaatttgctttccgtaagcttgttgcttgtatgatggcgtccctttccttgcatccctttgaacactacctcctattaactgaacagatgacctaatcaggtttttcatgtacttatccagagcacaattcagaagctctgcactatccattgtgacaccagctaagcccagtgtttctgctgttttctccatccgtctgtgcagcaactcagtgttggacagctcaccatgctcaaaactgctgttaaagcgaacgtcacttgcaccaattggtggctgtggaaattttcttgcaccacccacacttgctgaacaaaacggaattccaattggagctcgtacaggacttttcaatatttctgcagaatgctctgctgtgctgctcatacttcttctctgcaagagcagattctgctccatgcgtggatgcttcgccaatggctccgcaggttcacattgttgaaaatgcactgatctcttcaactcgtgtggacttagagcaccattctccagagatccagaaacagcatgagcaacctggttgtgattgacagcagccgtcgccctacaatttggacccatgttattcat

SEQ ID NO: 26458 - DNA, 308 bp, Setaria italica
  Peptide Sequence Number=SeqID_92432
tagtactaagttgcagttcactgcagaatcaacatattatattgcatcaggtatcaggtgaattgtgaaaaataaaaactagttcatattctacttgccttttacgcattaaagaccatccattatttgtccctatcttgatatgcatcaataaagattcaaaacacgatgaaatatcaaagaaccatgttgcagcctaatcaagacaaatatctgtcttgcactaaaagtattccttacttcctctctgtgcaggatggaatctcaggtgctcaaagtggacaccaattctgcagcattagaatttg

SEQ ID NO: 26459 - DNA, 538 bp, Setaria italica
  Peptide Sequence Number=SeqID_92433
tcctcagtcctctacttcagaggtcagagaatatgggatgctattatcactgacctactacagaagggactagcgaaagctgttaatgtactgctctcaggttgttcagcaggaggcctagctacattcttccactgcgacagcctcaaggagcgtcttggaggagctaccacggtgaaattcctgagtgatgcgggatttttccttgatctgtaacattggaggcctagcaaaacaaaaattcattatagctacctgtttattggagcaaatatgtaaaagaactctgatgtccatttttttccaggaatgatatttctggcatcaacaatataaggcaattctttagcagcctagtctccgtgcagggagttcagaagaatttgaacaaagattgccagaattcaacagactatccatacctgtgtttttttccgcaatatgcacttccatacattagtaccccatatttcatcttgaattcagcttatgacgtgtatcagttccatcacattttcgtgccaccttcatctgatcc

SEQ ID NO: 26460 - DNA, 985 bp, Setaria italica
  Peptide Sequence Number=SeqID_92434
aaggaaattttaaccttaagaaataactaagtaaacaattaggaaggacctaagacaaaacaaaaattacaattaataagctacctgtttattggagcaaatatgtaaaagaactctgatgtccatttttttccaggaatgatatttctggcatcaacaatataaggcaattctttagcagcctagtctccgtgcagggagttcagaagaatttgaacaaagattgccagaattcaacagactatccatacctgtgtttttttccgcaatatgcacttccatacattagaaccccatatttcatcttgaattcagcttatgacgtgtatcagttccatcacattttcgtgccaccttcatctgatcctaggggacagtggagccgctgtaagatggatcctggtgcatgcagcacatcccaaattgcaaccctccaaggactgagaaatgcaatgttgacatctctgaaacagattgaaggcgaaccagaggcagggatgttcataaactcttgctttgcacattgccagagtgagctgcaagacacatggtttgcaccagattccccaatgatacatgataggaaaattgcagaggtgataggcgattggtactttgaaagagatgctgccaaggagattgactgtgcctatccttgtgattcaacttgtcacaaccttataccatctgatcaggaattgaggatgtattagaagtttgcagatgattatgctcacttctgatcatactaaacaacgttacaaagatggaatctcaggtgctcaaagtggacaccaattctgcagcattagaatttgtcgacaaatgattatttacatgtgtatattgctcattgcattacaattcatttgacaagaatgaataaaattcattcgccataccagtttactagtcaatgatacacgggctgtagcatgacgtgtggccctgatttctccaccaaaaaaacatacgtcactgaaga

SEQ ID NO: 26461 - DNA, 574 bp, Setaria italica
  Peptide Sequence Number=SeqID_92435
tctccagtcactgcaatgccattctcacaaatcatagcactctctccctccaaacagttcacgttgacagttctccacaataagttagttgtgaccgcaaaggcaccacctagtgtgcgatgagaaactttcaggaacagatcctctcccccaaattgaaccaagggcatatgtatgtcatgtgctgacaaagattccaagaaattgagctggaggttgttcatagttaagctcacagccgtatcacttggcaatttattctcaaatttctcagccgaggattcgctcaccccagacttgttacctttgctgacttttgaaatactctctgcaacttgaccaaagtaagtatagacacctaggacgaaaaacaattgttcaactgaggtattggacgtaaactgttggaaagcaacaccaatccttacaacaccctcggggggtggcacatccaacaaaggactaccatctgcggtaaccatagctgcctcaaatcggatgtcatctagttcaatacatttccacaaatttgcagaggagtccctagctgctctctgtccatttgaagcgctag

SEQ ID NO: 26462 - DNA, 289 bp, Setaria italica
  Peptide Sequence Number=SeqID_92436
gttgcagtgtcatactgtcagcccccaaaatcgatactacaaaggtacaacagactgccctagccctaatggctacctcgcaggtcccagcaacatgctggcggggcctaccgacctaaaccaaaacacacgaggggaggccacacacatatccaccagatgctcattcacttggcaattgtcatggctcattcctcaagctcctcctccagctcttgtttaggctcctccatctcttgtttgggctcctcctcatcctcctccatctcttttttaggaggctcctcat

SEQ ID NO: 26463 - DNA, 319 bp, Setaria italica
  Peptide Sequence Number=SeqID_92437
actctctcagtgtacctttggacacggtacatgttcatctcatcttcttcatcaatttcatcctcatatgggtcatcatcagtctggtcagtcataggcacatcaccaccagaatagccacgctgagaccttcctggtgaactaggagtggcaccatcaccatcatcatcacttcttggtgttcttggtccactaggtggtctaaaactagtcctgtgccttttaggacgcctaaaattcatatcctcatctgtatcctgatcatggagcatccttggcaatttccggtcagctgctggaccagtcctcacatcccttg

SEQ ID NO: 26464 - DNA, 311 bp, Setaria italica
  Peptide Sequence Number=SeqID_92438
gaatgtttctcaatcaattcctgagaagttccactggaaaatagaggtttgctttcatcggaacgcctctatgggtttatgccaatgcgaggcgggtgaatggcaaggttttcaagatggcttgtggacagcagtatattctccatatggaaacaaatatgttgatgtgaaattggctgataagaaatctgctaggttcactctttccattcaggaagaatttcagaaatggcgcttggcttgccttggttttgggattttatattgctattcctgtctcctactgttagcaaatgggcaccattttacta

SEQ ID NO: 26465 - DNA, 702 bp, Setaria italica
  Peptide Sequence Number=SeqID_92439
caccaagcagctcggcaagttcacagacctaagaaccagcgtaattgttggtggtgatagcatggagagtcagtttgaggagctgtcagagtgtcctgatatcataattgccacgccaggcaggctcatgcaccatttgaatgatgtcaaggacatgactcttcgttcagtggaatatgttgtgtttgatgaagcggattccttgtttagcatggggtttgcggaacatttgcatgatattctgaagaagttaagtgatacacgacaaacgttgctctttagtgccactttgccaagcgcccttgcagacttcgcgaaagctggtctgcgtgatccgcaggtggtgaggctcgatttggacaaaaagatcagtcctgatctcaaccttgtcttcttcacactgcgccaggaagaaaagcttgctgccttactgtatttggtcagggagcgcatcagctctgaggagcagacaatgatttttgttcaaccaagcatcatgtagagttcttgaacattttgttcagagaagagggtttagaaccttccttatcctacggtgctatggatcaagaggctcgtatgattcatatttcaaaattcagggcaaggaagactatgctacttattgtgacagatgttgctgcaaggggcttggatattccactgctggataatgtagtgaactgggacttccctgcaaag

SEQ ID NO: 26466 - DNA, 574 bp, Setaria italica
  Peptide Sequence Number=SeqID_92440
ctgcattcttttcagtcagactgtcagggtaatccagcaggggacttacgaatactcctgaagctcccaaagccaaagccttgaacacgtcagtgccacggcggatgccaccgtcaaggaacacgggaacacgcccctttgcttctcttacaacctcttctaggcagcagatggttgccggaagatagtcaagctggcgtcccccgtggttggacatgataatacccgcaacaccgcattcgatagcaattcgagcatcttcagctgttatgactcctttcaccaagataggtaacgaggtgatcgtctgtagccacttgatatccttccaagaaagagagctgtcaatctggctagtgacatatgcagcaaggccagaaacattcttctgaaatatcacaaaaacagctcttgtgaaaataaattgaaatgaaatatatttatctgaatttcaaccccatgcgattagagcagctcagtttttcataaaaccttgtccaagttgctgaggtccagtccttcaaagcacttcaataccacattttcaggcaatgagaatctagtgacataaaga

SEQ ID NO: 26467 - DNA, 583 bp, Setaria italica
  Peptide Sequence Number=SeqID_92441
tgaagacctgttcctgacatcagcttccctgcgaccaagccgtggggcatcaacagtgatggcaattgccttatagccagcattttcagcccttctgacgagttgttgcacaaagttcctgtccttgaatacagaaagctgaaagaaacggagtcctggtccactcgagttaacttcttcgatactataagatgaccatgaagacaacatcataatagttcctgctgcagctgtagctcgggcagaagcaacctctccttctgggtgggccagtttgtgcaaagcagtgggagccaccataataggcatggaaatgttgtagcctaaaacactcatggacatgttgatgcaggacacatcaatcagtacccttggtcgaaacaaaattctggagaatgcctccctattctccttgagtgtccgctggtcttctgcacctgcagcatagaagtcataaaccatcttcgacagcttctgctttgcaagctcctcatagtcagagacattcgtgatcagcgccatctccctgcggtaggagtccaagcctgtgtagcagtgaggaccgactaatcagcagaggtgc

SEQ ID NO: 26468 - DNA, 1248 bp, Setaria italica
  misc_feature (1)..(47): n is a, c, g, or t
  Peptide Sequence Number=SeqID_92442
nnnnnnnnnnnnnnnnnnnnnnnnnnnnnnnnnnnnnnnnnnnnnnnttttttttttttgttatacagaagctcgagtgcaacgaaattaggaaaacggatatacaagtcaccagtcacaaactcacgagttaacaacaagaatggaatcacccacattgttaagcatgcacgcacgaatctctcaggaacacaagaacacaggttgcctgtgctgacgctactgaatcgctgaacccgtttacgacaggggcgttcaggtccaacacttcaacacgagagtgcgagactacagccgagagcgacggatcctgtcaccctcggtgctgacgtggtcgcgggtgatctccttcagcgacgtgcagccgctcagcgccatggcgatctcgagctcgtccttcagcatctgcagcgccttcctcacgccggcctcgccgtccactgcgagggcgaacagcacgggccttccaatgaatactcctgaagctcccaaagccaaagccttgaacacgtcagtgccacggcggatgccaccgtcaaggaacacgggaacacgcccctttgcttctcttacaacctcttctaggcagcagatggttgccggaagatagtcaagctggcgtcccccgtggttggacatgataatacccgcaacaccgcattcgatagcaattcgagcatcttcagctgttatgactcctttcaccaagataggtaacgaggtgatcgtctgtagccacttgatatccttccaagaaagagagctgtcaatctggctagtgacatatgcagcaaggccagaaacattcttcttgtccaagttgctgaggtccagtccttcaaagcacttcaataccacattttcaggcaatgagaatctgttcctgacatcagcttccctgcgaccaagccgtggggcatcaacagtgatggcaattgccttatagccagcattttcagcccttctgacgagttgttgcacaaagttcctgtccttgaatacagaaagctgaaagaaacggagtcctggtccactcgagttaacttcttcgatactataagatgaccatgaagacaacatctgaaaatgtaatcactaaaggaattaacatgtgagtcatcatttagccaatacaaaggtgcaatcttccaaaccataatagttcctgctgcagctgtagctcgggcagaagcaacctctccttctgggtgggccagtttgtgcaaagcagtgggagccaccattaat

SEQ ID NO: 26469 - DNA, 495 bp, Setaria italica
  misc_feature (1)..(79): n is a, c, g, or t
  Peptide Sequence Number=SeqID_92443
nnnnnnnnnnnnnnnnnnnnnnnnnnnnnnnnnnnnnnnnnnnnnnnnnnnnnnnnnnnnnnnnnnnnnnnnnnnnnnnggttttcgctactcatcagttccaacctttgagatgctcaattgctaatacatttggacaaagcgtgtgcagatctgaaaacaacatggttacaactgcagagaatcaaatccaaatacaaccaatatttacatcagatgtttttcccgtatccacctaaaactcatagagcaaggtaaaagttctccagaataacgtaactaccctgtttctaagcattcagtgtatgccaagagcctggaatctccttactaaggcaagattagcaccgttcctcctctgccagtcctccgtgctctccttcctgtgctcaaacttgttcaacacttcgtcgttgccgtccagaatgctcactatcttcctcatgctcggccgcgctgccgggtctgagcgggtgcacgcgatgccaagcttag

SEQ ID NO: 26470 - DNA, 932 bp, Setaria italica
  misc_feature (43)..(43): n is a, c, g, or t
  Peptide Sequence Number=SeqID_92444
ccctccgttgtcgtgtctcagtttttgtttttttttttttttntttttttttttttttttttgggggttcacaaacaacaacacaattttgatcaatttatgagtgcatgtcctcacaacacatagttaaaattaacagcagagacactcgactgatcaagaattaacacaatcaacaagtacggtcccatacaggtcaacaccaaaaacatcagagagagatcacaacaatggcacaagagagaagaacaagtgaacgacagagagtgagagagagacaaagagatgctacttgcttgttgttgtacatgtccatgatgtcgtcgcgcgcgtgcacttgccaaattggacctcaccggccggactggatccgtcaagagaacggcggcctaccgacaccgccgcccggggcgccaggccatccgccgttcccatccatcggcattggcggcatccccatcggcaggttgaagaacggaagcccgccggctgccgccgccgccgcgtggtcaccgccgaacggcacgccgggctggtcgctccccggcggtgccggaggggggcacctcttcaccttcctcgagcggcagcctctcgtaggcgacgttgctgaacgacgccgccacgacgaccacaggccccgcggcgatgagcgcgccggccacgctgccgccgacgacctgcccctgcccccctgccaggaacgccgctaggctggtggcgcccggcggcgctggcggcgggaggaaggatcccgcgagggagagtatctcgaacctgccgtggagcgtggcgaccgccggcgaggccggcccggtctgggacgactgcggctggcgcagcgtgacgttggcaacggtcccggccgccgagagcacgcagacgccgcgctgccggcggcgtgcgtaggcggtgagcgcctcgaagacgtc

SEQ ID NO: 26471 - DNA, 716 bp, Setaria italica
  Peptide Sequence Number=SeqID_92445
cttgctcccgctgttactattacacattgattaagggcgcagcgccaacagagttcataccctaacttcaactaggtttcgcgttccggtcagttccagatagaagtgctccttatagtaaggtgtgcatcagagataacaggaggctagcgttcagaagtactttggacgccgggacagtcttttcaggctcaccctctcctggcttcgatcatgatcgtattcaacaaggaatacacatctgcaccccctaatatcatgctgcttccgctgaacttcaagaacatgagcgtcgaaatgcaatgcctcatcgtttccctccctgaagcagaggacaaggtctccttcgacaatggatttgcactgggaggcctccacaggaatggaacgctggcggatgcacttcttcacattcacccactcatcctcatcagccccaaaaccctcgaatctcacccggacttctacttcacccgccctgttcctcctgtgtgccaagaaaatggcaatgtcataccatgcagaatcctttgcagacttcgcctcaaactccagctcttcaagttcgggaattttatctctagtttctaacggaaaaacagcagaaacctcatcctcgttgtttgaaatactagtatcaagagggaaaggcttttcttcagaagctgcagactttttctcagaaactgattactattttactttcttgtaggtct

SEQ ID NO: 26472 - DNA, 277 bp, Setaria italica
  Peptide Sequence Number=SeqID_92446
gaactgcttctttgtccggagcatgcagcctgagtttttgctgaccagcgacatggagaggccgttgccgtcgctggtgaacctcgcgttctggggttcccatgggatgtcgcaatcgtcccggaagttggcggtggcgaggccggccaccgccgcggcgaccgcgaccaggaggagagccctcgagccctccatcttcttcttgccgaaagacaatgcgagcctgctcctctacttggaaatgttctcaaaccgttgaatggctgcttgtatgctt

SEQ ID NO: 26473 - DNA, 1311 bp, Setaria italica
  Peptide Sequence Number=SeqID_92447
ttttttttttctaaggtagtaaacttggttcacatttaaccaatatataggctctggcagtgttggagggaatggtcctcgaattcactgcggtacaagtcagtaagttttagagggcaagaagatgatacaatggtatcctatagaagtcccctatgaatacatggtacaacaattccaccttgatgcctcacgatgacacaactcagactaacacaatgtattagcctctctaattgatcatcatcccttaattcgcacttcctttgtagagctaaatgataggttagtaacttaaaatggttccccgtcagggcagtgtgccccaattttcttctcagacaacataactgtacccagtcaaggcgacgactgatgagaaaagttaagagtcagccaagttccagtggccttcgtatgtcacctttgaaggaactgatttctcacggtattgcagatctcatctgccacaccagcgttttcaagtaggaatttctcagcttccgccttgccaggcaggaacacgccgttgatccaatacccagacccatccttcacaacaactccgaccgaagaagccatctccagggtctcagattcatggcagatccccttcccaaatctgatgtcgatgccagcttccttcagactagctggagctaatttgttcttgatgatctgcactgataaagcaatgccagtagcctgcataagctggtcttcactatagcgcagttcccttcttgaagtcctcattctgactgcagcatagaatcctaacgcgttaccaccgcaaggcacctccttgtagatcccaggaaacggatttgagctcaactttgttctgacctgattcacaaaaataataagtgattcagagcgacacaaagtgtactgaattttcctaagcgcctgagtcatcaaacgggattgaatgtcttcagaattagtgtatatttcgccttctatttcacatttgggaataagtgctgccacactatccacgactacaacagcaacagatccaccaacaagagtgtttacaatgctcaaagaattctcagcagaatcaggttgggctattaagagcttttcactgtctacaccaatggcttccgcaaatgaagggttaaaggcgttttctgcatcaatataagcacaataacctccattcttttgagcttccttgacaacatgaagtgcaagtgttgtcttcccagatgcctctttccaatatctccaccattctaccctttggtaatcctccaatgccgagagcaagatcaagcttaagagaaccagtagagatga

SEQ ID NO: 26474 - DNA, 409 bp, Setaria italica
  Peptide Sequence Number=SeqID_92448
atgaaattaagcatataaaacttgctcaaccagctctagtggtaagcataacatgttgtaagcaattttgattaacatccatgactcagctgctgttccctccatcagaacaatacagagaaagaaaaggagggaagactgaagttgatattacacaaagatctctaactatatttttgatccaagctagtgtatcaaagcatcactctttcaaagcatcactctttcgatgcgggcatcaaccggagcctttcctcagaagctttacccgacccattctcctctgacaaaagtgcctgcaggtcactcccatttgccaggctgttgaactccactgattttgagggcaattgtccggtattaacgtccgtcttggtctaaagggttctatttagtcctctttctttta

SEQ ID NO: 26475 - DNA, 1265 bp, Setaria italica
  Peptide Sequence Number=SeqID_92449
gatagtcaaacacggtttttatgaaattaagcatataaaacttgctcaaccagctctagtggtaagcataacatgttgtaagcaatttgattaacatccatgactcagctgctgttccctccatcagaacaatacagagaaagaaaaggagggaagactgaagttgatattacacaaagatctctaactatattttgatccaagctagtgtatcaaagcatcactctttcaaagcatcactctttcgatgcgggcatcaaccggagcctttcctcagaagctttacccgacccattctcctctgacaaaagtgcctgcaggtcactcccatttgccaggctgttgaactccactgattttgagggcaatgccggataacgccgctggcaaagggtcattagcctcttgatcgactgaaggtacttgcgagtggtctcatcgttcatgatgtgagcaacactgtttgtgtaaatcttctctcgagcagaacgctcatggataccaaccatagtgactccaataggccatggtgcattcccaatggccagcttgatgtattggtccattgctgctaaataatcacgcttcatgcagcattcaacaataacaagcaatgcttgacggatgtcatcaggaagaaccttcttcctgcagaactcgaacagggggctgagataccgtgcacactgcttgaatgttgcaaccatcgacttccccttggctgtccgcttctccagctccgtcatatcatccagctcctggttccactcgttaagcagcttcttgaagaacaccaaaatcttgtcttcgttgcaaagctcctcaaacttggtcctcatcctcttggaatccttgtctgcatcagcatcgtccccgctgcccttgccatccccgtcatccgcactgtccccagcagcaccaccgtcaccaccatcgcccccgccgacacgcttccccttgcccttggcgtaggtgtccctcccggacttctgccgcttgcgcatctcgatcatgtcgcggaggaagtcgttggtctgcccctcggtcatgtcgaggtcgtcgatgtcgtcgatgacgccggacttgagcacgagcttgaagcgcgcgaggcgggcgtcgtcgtcctccccgaatagcgtgacgggctcgcgcagcacgcggaggcgccgcaccacctcgtgccgcgggaggtcgagctcgtcgatgcggcgctcctcggagagcagcgcctcctcctgcgtggtcttcttcggcgcgagggcggg

SEQ ID NO: 26476 - DNA, 709 bp, Setaria italica
  misc_feature (312)..(312): n is a, c, g, or t
  Peptide Sequence Number=SeqID_92450
ggcttcagctggagatcgtgagggttagcacctatcttcttctttgcttttgtattccctttgcaatagtttgtgctatttttatctgagaggtaatgtcaaagaacgctatacgctctccatgcagtctagaaacaattggagctggaggtcctgacgttgcacatccaagattctcagaagctttgccaacaagtgtcccaaataccaaccctaggcctccagtgttttttgtacgactgggcagacacgagctgttgaactactccttccgaactggcgaagagtttgctcttgaattcatgcaaaacngggcaaacacaacgaagcctttgttccaatcatctctgatgacaggaccatcagcaccagcttcactccttgggggaagaagctaatatttctggagataaaccatcaaagaagctgttgacatttcctccattcagtgaaacaagcagtcaaggatcaaataagaggaacctgcaagagatatataactctggatcaactagaatgaagtttctctgcaactttggtggcagattcctaccaaggccaatagatggcaagctccggtatgttggtggtgagaagcatctgattcagattagccggggagtgtcatggcaaggattgatctatttacagatgaagatgatgagcaccatgtacattttatggtagggagctcatcagatagtattta

SEQ ID NO: 26477 - DNA, 411 bp, Setaria italica
  Peptide Sequence Number=SeqID_92451
aggaacgctccttcagccgttgcactggtacttcttcaggcatcccggcttcggccggtatacgaatccccacgcgccgggcacgaccctatgcaggccgcgctgtcaggtttcaacgctgaccctttaaccatgccggcgaggacacggcggtggaggtgcaggtccacggtgagctccggtgccacggcatcctccagcctcgtcgacagcagctgccgcagcaccgcagcctctccggaccaagactccgggctgccggcgaacgtggccttgatcccgccgccggcgacggggttggcaagcgcgagcaggacgctgaggaacgcgagaagaaagaggcacgccttgctggccatcttctctttctctctagttgttgtgctctgtagggctgtaggctgcagctgc

SEQ ID NO: 26478 - DNA, 261 bp, Setaria italica
  Peptide Sequence Number=SeqID_92452
attgcagcaacgaaacaagcagttgcctaaggggaaaaaagatgaaaaagatactgtagttggcgatgcttaactgttttcatatcaagtggtatgacacgaaagccagaagaaatcaatggagcatcatccggaaaatgttcatcaataggtgcaaacacaagctggaatgaggaacccacagatttctcatctattccagtgcatagctggagaaggtgaatgtcccttgaaagaagagcttcatcatgagtaagggta

SEQ ID NO: 26479 - DNA, 471 bp, Setaria italica
  misc_feature (466)..(466): n is a, c, g, or t
  Peptide Sequence Number=SeqID_92453
ccataagaagctgttcattgccgtcaacttcctgttgacagcctgaagccgagacgactccttgcgctgcttatcgcggcaccttcggttctggaaccaaaccttgatctgcttcggctcaatattggcaagtatggggcactcccgcagcaactgctggcgccgtgaggagcttggcttggggcaatcgatgtagaggcgctcgagaacctcaacttgctctggggtgtagcgcacgtatttccccgagtccatcccatggactttatcaaatccaccactatcactgcttccccctcgcatcgccaccgcggcagccattgttcccttcccgacgcaaaatccagaccacacaaacctcgtccccttccgcttaattagttattagttgtccgctgcccttcacaacacttgagctgccgctcgcacgtgaccttgcagttggcgaagatccctgcagaggaancagac

SEQ ID NO: 26480 - DNA, 333 bp, Setaria italica
  Peptide Sequence Number=SeqID_92454
atggtaactacacttggagcccaaaaaaccaatcatgcacttacagttgaaaagaatttgcgacatatcagaaacgccatagaaagacaattataacttcacttactgatagctctggcaaacccatctagccagtgtgcctgcttcagggaagccagaaagcatcctttgcccagcgtttagaccagattgggagggagatatagccatggaaactctttgcacagcagaaacaacgctacgaacatattggcgggccatagttgcaacgctatcttgaagatgcatctcgtaagggaattgaaaggcgattgtcagcacagatctcaaatt

SEQ ID NO: 26481 - DNA, 755 bp, Setaria italica
  Peptide Sequence Number=SeqID_92455
aggggaataaggaatagtttggattaaaccatgaaccttatctcaaggaaagaaagaaagtactcaactgattttatgtccaacggtataacgcgaaagcctgaagatatcaagggagcatcatcagggaaaagctcatcgattggtgcaaagacaagctggaagcaagatcccattgatttctcctcaattccagtgcaaagctgaagcagatggatatctcttgataaaagaccatcgtcatgtgtcagagcctgcccttcaagacgaacaacttctaagatctgcatgttggggcaaggccacaatctcattacacataataatatatagtgtgggatacaataaaatttgtctttcataactgcaaattccatattatttcatccaaatgctatggtctggttacaaaattacacgaaagctagcctaccaaaatgataacactataccatgaaaggaccacgcaaccaacaatgaccatctatagcaaattagcaatacaaaacagaaaatctgaaatgtttccaatagtgagtaaactgtgaatgaaaacagcacataacaaacatttttccgcagagggaattagggaactgaacatacctcctcattctccactgtgtgagcaagtggcatgatgatctgactcccagaaaatctcatagaccgcaacccaggaagcgaacaagggctcgttttcagcgctgaagccgaatatgcatcgaagttataatctgcccattcagaccgat

SEQ ID NO: 26482 - DNA, 1033 bp, Setaria italica
  Peptide Sequence Number=SeqID_92456
tttttttttttttcgtatgcataaatcagtaacgaaatgcaagcgtctccaagaacacaaacaccagcgtttggccgggagacaaatggaagtgagatcagactctgcataacttccagtttcgtcataaaatacactggattcaagacctagaactagtgcaaccaacataaggcttatcacggctgatgatttccctcgtcgagatcatacaaaaatggatctgctaatcagaccagctcggcatcacacaaaggaccagttcacgaaacagaaagccaggcagtggacgttgctgtcctcgcctagcaccttccacgctacagcttgatcgaatgaaacatggcgacccattcctgacatgcacactcccgacggcaggtacacgtaaccctgttccatcaattttgagatatccgagaacaatgcttttcttccggactcgtcaaagattttgtctagcgtcagatcttgtagggcaacaagggatgtctctaacatgtcaagccctgccttgttggcaaacgtaaacataggtttctccttaaaagagcagcaaagaatagcatctggatgatgccagagcattttcaataatgcctcaccaccttcacctgattgattaagtaattccacgcctagatggtaatgatagctctggcaaacccatctagccagtgtgcctgcttcagggaagccagaaagcatcctttgcccagcgtttagaccagattgggagggagatatagccatggaaactctttgcacagcagaaacaacgctacgaacatattggcgggccatagttgcaacgctatcttggagatgcatctcgtaagggaattgaaaggcaattgtcagcacagatcgtaggttgcagtcatccggagatccatcccctgaggcttgttgcgtggcagtaccacatcaagactagaggccaaatctaatgttctaccagagggtacaccatcctgtgtaagatactgatggttaaatgatacgcatgtggaaacaggagacagattaaact

SEQ ID NO: 26483 - DNA, 1041 bp, Setaria italica
  misc_feature (1041)..(1041): n is a, c, g, or t
  Peptide Sequence Number=SeqID_92457
ggggggataggaatagtttggattaaaccatgaaccttatctcaaggaaagaaagaaagtactcaactgattttatgtccaacggtataacgcgaaagcctgaagatatcaagggagcatcatcagggaaaagctcatcgattggtgcaaagacaagctggaagcaagatcccattgatttctcctcaattccagtgcaaagctgaagcagatggatatctcttgataaaagaccatcgtcatgtgtcagagcctgcccttcaagacgaacaacttctaagatctcctcattctccactgtgtgagcaagtggcatgatgatctgactcccagaaaatctcatagaccgcaacccaggaagcgaacaagggctcgttttcagcgctgaagccgaatatgcatcgaagttataatctgcccattcagaccgatgttccctcaggaaccgaacaagtactgctggtggaacactctgcagtaacatggatgccttggcacatatgatacctccaggagcaccaaaagcacttgcaggattgctactgttcctagtcttttttgagttgcaagcaatgataacatcttctgtgccgtctccacccatgacagaccaaccatcatcattgaaaccacttatagcatcgttaaagcctcgactaagcctctgactaaatgttcgtaggacagctggttgtctccccaagcatatgcaacctctccactagtttcttgagcaatttgtctgatgtgccgtagtgcctttacaacataacagtcagtgtacgatgcagaaattacagataatccatcactccaaatatgtacagtactggtatccaagggcaaaaggataaaccaaagaagggtgtgttttctcaataagtagctcagcaataaatgaaaaatatattgaacttcacataagtcaattccatgagccatcttatctagaaagctaaaaccaacaagaaccttgaaacacaagtgcaccaatgaccatatgtcaacactcctcacatgtatagcatgatcatgactaan

SEQ ID NO: 26484 - DNA, 2699 bp, Setaria italica
  Peptide Sequence Number=SeqID_92458
cttcatgatctagaataataaataactggacggaccctcatttcactggagctcaaacataacagttggacttgcaaggcgatctggtcactccttgccattctgaaccagccttccttacacaagcagcagccagcccttcgccgggttaaattagcggaaatgagtgcaaatttacaagacagcagcatctttacacggctggctttccctcggtctagaactagttaaacatgcattacctagctaacaggcacggtcttaaccgtcctcttctacagagaacgcaaaaatggaggctgctcagtgctcagggcagggcgattggattcgatcacacgaaagaccagttgacgaagcagaaggcgaggcagtgcacattgctgtcctcgccgagaactttccatgcgatggcttgctcgtaggagacatggcggcccattccagataagcacacaccagctggcaggtatgcgtaaccctgttccatcagtttagggatctctgcatgtaatgcctttctaccagcttcatcgaagatcttgtccagtgtgagatcttgtagagcaattagagttgtttctaacatgtcaattcccatctggttgccaaaagtaaacacaggcttttccttgaaagagcagcacaagacagcgtcctgatgatcccagaacattctcaataatgattcccctgcttcatccgagtggctgaccagatccacccccaaatggtactggtagcttttgcaaatccagcgaacaagtgttgcagcttcagggaagccagaaattatcttctgcccagtgctcaagccagaccgcgagggagatatagccatcgatactctttgcacagcagagacaatgcttcgaacatactgacgggccatagctgcaacgctatcttggagatgcatctcgtaagggaactgaaaggcaattgtcagcacagatctcaggttgcagtcatctggagatgcatcccctgaggcttggggtgtggcagtacccacatcaagactagatgccaaatctagcgtcctaccagagggtacaccatctgttttcatatcaagtggtatgacacgaaagccagaagaaatcaatggagcatcatccggaaaatgttcatcaataggtgcaaacacaagctggaatgaggaacccacagatttctcatctattccagtgcatagctggagaaggtgaatgtcccttgaaagaagagcttcatcatgagtaagggattgtccttcaaggcggacaacttcaagaatctcctcgttctccactgtgtgagcaagtggcatgatcatctggcccccagaaaatctcataggtcgcaacccaggaagtgagcacgcactggccttcaatgatgaagccaaataggcatcaatgttgtaatcggcccattcagacctatgttccctcagaaatcgaaccagtacagccggtggaacactctgcagtaacatggatgcctttgcacaaataatgcctccaggggctccaaatgtaatgcccacattgctgttattcctaattttcttagttgaattgcaagcaacgacaacgtcttcaattccatctccacccattatagaccagccatcatcattgaaaccgctaatggcatcattaaagcccctgctcagcctttgactaaaggtccttaggactgcaggttgcctacccaaggcgtacactacttccccacttgtttcttgagcaatttgtctaaggtggcgcagtgccacagtagtcattttctgtgcaactactatagaagactcatacagtggccgaagcacttcaggaacactccatgccttgagatctagatggtccactatatgcacgatcgaaccgccaccttcacatgggcggactaaatacccacttggaagcatctcagctctttcaaattgctgtgcggaggctgcattcggaccacccccggaaccactcaatgatctctcacagaccacaaggctgccatcttccattgttgttgtgtatcgtaacgtccaaaaatcacgtgcagggactaatgtagttggggcatacatctgcatgtagacaagttcaattgtccccccatttccagctggaaacattgtaaacacttcaaggcttcgacaatcacggaaccaagatggacgatctttcaagatctctatgacttttgttggttctagattaaccaaaccacatgcgcgcgcagcaacaccacggcaaccatgagaaatggccacaataccaaccgaatccggaccaggcttcatcccaggcatctggacccaatcaatagctgtccctgtagcctttgagaggaactctgtcagggtctcctcggcaattgaaaggagccctgatgggttacttgcatcccttaggttggcaggtgtagtcacatttgattcacaacttgtgtcattggccaatgaagtattctgcagctgctgccgcatgtgcgcattttcatgaaccaactgagagacctgcttctgaaggcgctcattctcttccataagaagcttgttcattgccgtcaacttcctgttgacagcctgaagccgagacgactccttgcgctgcttatcgcggcaccttcggttctggaaccaaaccttgatctgcttcggcttggtttgtcctaaaagttaaactactaggttctttttcctttgtaaa

SEQ ID NO: 26485 - DNA, 786 bp, Setaria italica
  Peptide Sequence Number=SeqID_92459
gttggcaagtcgacgctgctcaatgcgattgccaagtgctctggcgtagttgggcgacccaccttgacggaggcaccagttccgggaacaacccttgatgtgattaaggtggacggcgttcttggagctcaagcgaagctgttcgacacaccaggacttctccatgggcatcagttgacatccagactgacgagcgaagagatgaagctggttcaagtaagaaaggagatgcggcccaggacctacagaataaagacaggacagtctatacatattggtggattggtacgcctggatgttgaagagttaactgtaggatcaatctacattacagtatgggcatcatcacttctcccacttcacatgggaaagacagaaaatgcagcaactatgataaaagaacactttggcttacaactacagcctcccataggccaggatcgggtaaaggagctcggtaaatgggtgaggaaacagttcaaagtttctgggaacagttgggatacaaactcgaaggatatagccattgccggtcttggttggttcggagttgggcttaaaggagaggcagtgttaggattatggacatatgatggtgttgatgtcatctccaggagctccctagtccatgagagggcttcgatttttgaggaagctggtttcacagtttcacaaattgtctcccaggcagatagcatgacaaataagctgaagggcaccaagaagacaaacaagaaaaaagagagcaagactaaattactttctacccgttctacttagttctta

SEQ ID NO: 26486 - DNA, 518 bp, Setaria italica
  Peptide Sequence Number=SeqID_92460
caacacttcaacaggcagcgcctgtacgatcgataggcttccttgctttcagtagtcgctaatatatgaatcctagtgaatccatggaggccgcagggggtaagaaggactacaaagaccctgccccggcgccgctcgtgaacgccggcgagctgggcaagtggtccctgtaccgcgccgtcatcaccgagttcgtggccacgttgctcttcgtgtacatcacgctggccaccgtgatcgggcacaagcgccagtccgagtcccagccgtgcggcggcgccggcgtgctgggcatcgcgtggtccttcggcggcatgatcttcgtgctcgtctactgcaccgccggcgtctccggcggccacgtcaacccggccgtcaccttcggccttctcctcgcgcgcaaggtctccctggtgcgcgccgcgctctacatcgtcgcgcagtgcctgggcgccatctgcggcgcgggactcgtcagggccttccacggcaccagcagctacctgcgccacggcggc

SEQ ID NO: 26487 - DNA, 664 bp, Setaria italica
  Peptide Sequence Number=SeqID_92461
ggctgatggattgtgcaaaccacagtacgccccgtgttaactgtatttctcactgtacgcatgacaattgctgcagctcgagcgtcaagaccagaagttggctcgtccatgaagatgattgaagggtttgctaccagctccacggcaatcgtcagcctttttctttgttcagttgataacccactcactccagggagacccaccagcgcgttgcgcaacacatcaagctctacaagggccatcacttcctccacaaacatctttttcgtaacgtcgtcaacatcggagggaaggcgcagccacgcagagtaggctatggattcatacacggtaacattcggggaatggatatcagtctgttcgcaatagccactgatccgggcaaaagtttcttgttttttggggtaaccggacagggtaacatctccttcaacagctccgctagttttccttcctgccaggacatccatcaaagtggtctttccagctccactcacaccaactaatgctgtcagaacccctggcctgaaactaccactgatatcggagagcagctgtagacggctttctgtgaatccttgttccttcatttctgcaggcatgtccacataatagtttatatggttgaagcaaagtgaaagaggctggaaaggcaaagtgacgt

SEQ ID NO: 26488 - DNA, 364 bp, Setaria italica
  Peptide Sequence Number=SeqID_92462
gctaggttaataggcaccaacagctaccgtatgaaagggaaaaatgcttcatcacggattgcaatttgttggggcgcatgaagaaaggctacctatgtacagtatttactcagctgttcaactggtaagtgtcccctccagatgtatctgggattgatccaaatatctgagccatcaagctaccgactatgatgaaaatacctccaacaaatcctgtcatgccccatctctcaccaagcattgcccatgcaaaagcagcaccccatactggttcgagaccgtaaattattgcagtttctgtagccgatacatcgcgcatagcagccacctctgcccataaacaaaatgaagttgagaatattcc

SEQ ID NO: 26489 - DNA, 591 bp, Setaria italica
  Peptide Sequence Number=SeqID_92463
ctatgtggagggagtcaacctgttcggcgccccgtacgactttcggtatgcgccggccgctgccggcttgtcgtcggaggtgttctccgacttcagctccagcctgaagctcctcgtcgagcgcgcgagcgaaaggaacgggaacaagccggtcatcctcttgacgcacagcatgggcggcctgttcaccatggtgttcctcgaccggagcccgctggcatggcgcaggaggtacgtcaagcacttggtgatgctctgcctcggcgtcggcggctcgccgttgaacatgtggcccctcgccttcgacacgctcagccctccgtcgttgccgggcaccgtgctgacgtacgggaacaggagcttcgccagcatgttctccctcctgccgtccccgaaggtgtacggcgacacgccgctggtgatcaccggagccaagaactactcggccgacaacatggtcgagtaccttgcggcggttggtctctctgaggaacaggtggcgctctaccaaacaagggcgctgccggtgacactgaacctcagggcgccgctcgtgccgatgacgagtatcaatggcattggtgtgccgac

SEQ ID NO: 26490 - DNA, 368 bp, Setaria italica
  misc_feature (1)..(1): n is a, c, g, or t
  Peptide Sequence Number=SeqID_92464
nggaagaatattactcctatccatcctgcatgccaagtgttcgtatatagtggtaatgataacctttgcttcctgccttgctaatccccaattgtactatgagtttgtcatccactgcacagggttagcaacaaacaccatcaagaaccggtagaaatctctctgttcttagccttggcccttgggtctatcttgtatacaaccagtgaattccagtttcttgcacaaggacctcattatgactcattctggaccagggttttctctgcaacacacccatattaccattgagaagtggctcttcactatttcatttttgcagacaagatgtgtcatcagggtggttttacctactacttttcttcccc

SEQ ID NO: 26491 - DNA, 608 bp, Setaria italica
  Peptide Sequence Number=SeqID_92465
gcccccggttcagtcaactctcctcgcccgacagcacggccgtggaatcagctgaccaagcagagaaaggagagcgcgcaggcggccgcgccgccgcccatggcatcgccaccacggatggccagcgctcgctcccccaagatcccagagtttccagcgggccctgccgggcggccggtgccggcggtggggctcggcacggcatcgttcccgctcgtggaggaagatgtcagggccgccgtcctcgccgcgctggagctcggctaccgccacctcgacaccgcttcgctctaccgctccgagcgggccgtcggcgaggccgtggccgaggcggcgcgccgcggtgtcgtggcgtccagggaggaggtgttcgtgacgaccaaggtgtggtgcacgcagtgccacccggagctcgtgctcccttccctcagggagagtttgcagaaccttcaaatggaatatgtggatttgtacctggtccattggcccatggctgtaaaaccaagcaagccccacttcccaatgaagagggaggacatggtgccgatggacctgggcggcgtctggcaggcaatggaggaatgccgtcgcctgggccttgctaagat

SEQ ID NO: 26492 - DNA, 291 bp, Setaria italica
  Peptide Sequence Number=SeqID_92466
aatggcagaagtccgcttcaggatgcttgaactagatatttgagtgtagaagtagctcactgaatcattcaggcattggttaatgatgacacggtatgtgagctcttcaattttcacaggaaatctaacagcaaatccattcctcataaattttacaacatcttcaaaacttgcattaattggtgccctcgcatgccaactacccaaaggaatcatggacaagtatctgcatgaaggcttgatgtatctaacccaaggagtgattgcagtaatgaaaacataaactaaaga

SEQ ID NO: 26493 - DNA, 624 bp, Setaria italica
  Peptide Sequence Number=SeqID_92467
agcaggactggatggtatctaactaaccacatatcgtcggctccttggagatggtgatgatgctttaccatagccacctgatctcatctccctttctcttttaagctcctggtccaactcttccttccacttctgtattttggaaaagctaaggcttggattgtcttgaatatcatcatggaccttatcctcaagtttattgagttgaggagaagctatttctctcaagacacgactgctctccacactgcttcttgagaagcgcctagcgcaactcctgggacaagcattattcagattaacacaaattggctctattgctgcacctcccaccatcttaattgctcgagggggtaaatggggattggccatgttgcttgctcgggaaacatcactgactctttgagaagctccagcattcactgtgttgtagaattcatataaaggtgtctgtagtttctttagatccatggccttttcatccagaaattcctttatttttgattctgtaaattcatcatcctcttcacagcttccttcacaagggaaagtaaaatcattttcagacatctgtctttctgcaagcttgcctaatccaccaaactcccttgattgactaaatcg

SEQ ID NO: 26494 - DNA, 565 bp, Setaria italica
  Peptide Sequence Number=SeqID_92468
cgcgacgccgactgcttcctcttcgcctcgcccgagtacaactactccatcaccagcccactgagaacgcgctggactggggcttccagaggggtgaactgctgggcaagtaagcccgccgccatcgtctgcgcggggggcaacttcggcggcggcaggtcgagctaccaactgcgccaggtcggggtgttcctggacatccacttcatcaacaagccggagctgttcgtcttcgccttctccgagccggacaagttcttcgacggcgatgggaacctgatccacgccgagaccagggagcggctcaagcaggtgctcctgtccctccaggccttcacgctcaggctccagaggaaggattgaataatccagtctcgggatcacctcgctacagtaataattaatctgcgtttaccttgagcgtctagtaactttgtccttaccaaccgtatatgcatccctggaggctggaaccaaagataaactgaaattaccctccagcttgcgcactgttcgtcatttggtcttgtaccgggattactccccagtttgcctattgttcgat

SEQ ID NO: 26495 - DNA, 428 bp, Setaria italica
  Peptide Sequence Number=SeqID_92469
tcattgtatatctcgaggtaacgacagctgaatcgagtggttgccgtcatggctcctctgcctcaccttggagaacaggtcctttattgcaagcaccattaccccagggttttccattgtcccaagcatggtgtaggtcttgccggcccctgtagctccatagcagaacactgtcccattcctaccttgcaaaacaccctccacaagatctgctgttgaggtgctgtagacttctgcctgcgtcgtcgaatcagggaaggcagagtcgaagcagaaatggcgaccgcgcacgcgcttcagccggaggtagtcgttctcggaggcgtactccgtgaggtacacctccttcttgttgacgatcttgacgcaacttctcgacccagcctccttctccttcctcgacattggtccgtctagtccttctacgt

SEQ ID NO: 26496 - DNA, 564 bp, Setaria italica
  Peptide Sequence Number=SeqID_92470
agaaaaccgggttgcatttcatttatttaaaagttaacaaccacacatatccttacaaaggaatccctgataaaataaaattgcaaccaagtccttgcaaggttctcctggtcatcttcgatgccggcaaccggagccaccacccaacgcgccgcccctggaagagaggtccgccgagcttgaaacttaaagccggttccaacctcgacgtagaagcttccaaagaagccacataaaactttaacgctacatcaattggcgcaccgaacactccgaagcgcacttggatcgttgaaggccaagcaaaccaaaatggccatcggccatatcatcgccgagagaatcaggatctgccgccgcaagcactgccggcgaccctgaagcaaacgacgtcgaaacaaccccaaaaaggagactccaacccgatttctcaaggtgggagtaggcatacctcacggattcatcttcgcaagacgcgtcgccaccgccgcagtcgccggagatgatctagagggacgaaaatacaccggtagccggaggtcgaaagccacccgggacgtaaaa

SEQ ID NO: 26497 - DNA, 603 bp, Setaria italica
  Peptide Sequence Number=SeqID_92471
gctacagagacttgcagtcttgggccatttgcatatcccatggagtatgcaatatctgtttctgatgcacttcacatgccatttctgtgtctgatgctatacaaccaagcatatactctatccatggtgatccaaaataccaataaaggtcctcactcctttagcagggtataagttaaaaaagggtcatcatccctcaagcaagcattccagacaaactaagctgatcatattcatcaattctgtcatctctattcaacactccagtaagattgccaagcatttcatagatgctcagagattccgggtgatgtgtgtcctgtacaacaaataagcttgttttgtttcccacagtgatccaactacatcctggaaattttgccactcctttttctcgcattgcttctctggctaccttagcttcaacccagttaccagatgcagcatgcatgcttgaaaggaacacatatgtggaaatagaagacttacgtaggttaccaaactacaaactgcaactttccctccctcttcatccttgtgcattcgacatgctgcaagatatgtagcccagatcacaccatcagctctgaagggtaaatggtc

SEQ ID NO: 26498 - DNA, 301 bp, Setaria italica
  misc_feature (254)..(254): n is a, c, g, or t
  misc_feature (289)..(289): n is a, c, g, or t
  Peptide Sequence Number=SeqID_92472
tacccactcatggtggtgggatagccacattagtccacaaaactctaaatggcttgctgagaatttagaagaaatggagaagcaagtgaaagaggtgctggggctcattggagaaggagaattctctgcagaaaaggcagaggcgttttaccagcaacaacctctgcttatcactcatgtggagaacttccatcgtatgtatcgtgctcttgctgcacggtatgacaatgtgactggagaactgcgcaaaaatnttccatcatctctgcaatcacatggctctttgggntctctgaatcag

SEQ ID NO: 26499 - DNA, 407 bp, Setaria italica
  misc_feature (83)..(83): n is a, c, g, or t
  Peptide Sequence Number=SeqID_92473
tgcacttcgtaatgggtgtggatgacacatcattttattttcctgtatgacttcacctaatgtgtatactaaacaaaattgancttattttgattattaagttgtgcaattctattggagaagattacaacaaaactagaatgaagaaacattccagaaatttgttgaaattgacatgtgaagttgttaaactgttctgttctgttaaaatattgaaggtaaaaatgatgctgctgaagccttgaattggaggacacgtgtacatgtagtgcttgaagctgcacaaggcctggattatctgcacaaaggttgcaatctgccaatagtgcaccgggatgtgaagaccagcaacattctcatgggtcaaaaactgcaagctaaaataggagattttggactttccaaag

SEQ ID NO: 26500 - DNA, 170 bp, Setaria italica
  Peptide Sequence Number=SeqID_92474
gaagaggctgcggagccgcgggtgacctcgcgcgcaccgggcggcgagggcggaggccctggacagcgcggtggtggcccccgccattatccgggccgcggggcggtcgtacaggtccggcgcccgcgccgcctgccgcagctgagccagcagcttgtccgcgcgcgcct

SEQ ID NO: 26501 - DNA, 386 bp, Setaria italica
  misc_feature (374)..(374): n is a, c, g, or t
  Peptide Sequence Number=SeqID_92475
gctttttggtttcggtcctcctctccctccactccgcctccctcccctcctctctctctctgggctccgacctccagctctcaaccctagcacgcaggttatatccagactccatagcctccccgcccgtcttcttcctccaaccccaacctcggcgaattctcccagcaaccccaaccagatcgatcgatgggtcggtcgctgagctgactccactcactccatgtatggcaattccgcggcaggggcagtactagtacggcgcaccaggcggcctcaagattcatcaagggccaaggggggtagctcgctcgctagctaggtgtccgcccccaccgctgccggagcaggacaagcactagctgatctgggcncagctgcaagta

SEQ ID NO: 26502 - DNA, 517 bp, Setaria italica
  Peptide Sequence Number=SeqID_92476
attgctactaaatcatggcatgggtgtgcatgatacagatagatctcacctgagcaatggcaattgcttctgaaatcaaaatgaagatgaacaggaacatgatgaccaccggatggagaacattcctgtgagtggtgtgcgtgatttgcatggctatgatctgaacagtgagcaaatgcttctacatgatggtgcagagaaacatgcacttgatagttgccatttgacggatgggcaaatgcttttcgatcaatcggcaggtggacaggctatagttcgcaacatgggaaatgggcgaacaattcctttaattaatctggaagatgattatgaagagcagtctgatactaggggatttctttaatacaagtaagccttttttagatctttattttttatcgtagcctcaagggggagacaaaaatccgtcacgtttgaacgtttcactgtgcagaagtgacatcttgcataaacatagcagcagcaaagttttcctcacaatcctcagactttgttg

SEQ ID NO: 26503 - DNA, 1186 bp, Setaria italica
  Peptide Sequence Number=SeqID_92477
gatgcgtgtatgatagaaccgttgggcgaggacaatggctgctctgaagcaagggacgaaatggaggctccaccaccacagagtgaagttgagactagtgttggtgaccttaacagggatgaacaagagctgccagcttggtacagaatttttgacctcagcatcatagaagctccaggtggctgtgaaattcctgagattcctggtgatcctcccgcagatcatgcttctgattctggacctttcttagttggtcagacgcaccagcaaactaacgatgacacttcagaaactcaaggtgaagatgagcatgcaggggataatcgtgtgttgggcgatgggcatgatttgaacaagtatgatctgaacagtgaggctgatgaacatgcgcaggatgatacttcagaaaatgaaggtcaagacgagcatgcgggggataatcgcatgttgaaggatggtcatgatttgaataggtatgatctgaacaatgaggctgttgaagatgcacaggataatcacctgttgggaaatgagagattgctactaaatcatggcatgggtgtgcatgatacagatagatctcacctgagcaatgggcaattgcttctgaatcaaaatgaagatgaacaggaacatgatgaccaccggatggagaacattcctgtgagtggtgagcagctcctgctaagtcatagtgcggacggacatcatgtcaataatcaccaaatggaatcagaggtcatgcttttacctacaggtgtgcgtgatttgcatggctatgatctgaacagtgagcaaatgcttctacatgatggtgcagagaaacatgcacttgatagttgccatttgacggatgggcaaatgcttttcgatcaatcggcaggtggacaggctatagttcgcaacatgggaaatgggcgaacaattcctttaattaatctggaagatgattatgaagagcagtctgatactaggggatttctttaatacaagaggtacgaatgccatccttgtagcctgggagatcccatgtttgtgcagttccctggcgcagctgggccatcctggacctgaaccggagacctctgattctccgcaaccaattgggagagaatcaatagactccttttcaggagcgattcatcgtggactctgaatccattgggagagaacgtagcaggattct

SEQ ID NO: 26504 - DNA, 667 bp, Setaria italica
  Peptide Sequence Number=SeqID_92478
cgcggtgcccgacgccggaacccgccctgtagtcgccaccggcgccgacgccgacgccttgcgatcggaaattgaggcgctcaggctaaagatcgcgcagttggaatctttgctggaggaaaatacaaaaacgttgaacagtaaagctagtattttggaggaggataacaaactcattgaagcaatggaatgtgacatccagcttttaattgatggaccagagagtacaaaggattccaaaagcaaatcatattctgctggcaacattaaatctatggaagatgaggtacaacaactccagcaagaggtcagtaagataaacaaaaattctgacacgatagaatcgttagcacgtgatactgagagaagggtggaaactctgagttcggaggtcaaaaagatagaggatataattgcggagcaatggatccaaattcgacaatttgaacaagcatttgtattaactaagatgatggcatcaaaagttcatgagagaagtaggccattgcagatggttttcaagtggcctggaaaagaaacaattcttaaggcatatcgattccgcaaagcaatccgtcgccaatatattcctgacacagacaggcctgacgtcttcttcttgggtggttccgtttcaagatcaagcatttctattccatatagaaca

SEQ ID NO: 26505 - DNA, 531 bp, Setaria italica
  misc_feature (526)..(526): n is a, c, g, or t
  Peptide Sequence Number=SeqID_92479
taaaacaaaaaacaaaaaactaaccaaaagaacaaaagaagatgaggtacaagtactccagcaagaatgtcagtaagataaactagaacaacgaacgatagaatcgttagcacgtgatactgagagaagggtggaaactctgagttcggaggtcaaaaagatagaggatataattgcggagcaatggatccaaattcgacaatttgaacaagcatttgtattaactaagatgatggcatcaaaagttcatgagagaagtaggccattgcagatggttttcaagtggcctggaaaagaaacaattcttaagtatgctggggatatcgatctcaaagatatttttcttagaggggcatcatatgcatggtcctgtttttctcatacatataaacagtccagtagttttcgacaagaaataaacagatactatcatgaggcatatcgattccgcaaagcaatccgtcgccaatatattcctgacacagacaggcctgacgtcttcttcttgggtggttccgtttcaagntcaag

SEQ ID NO: 26506 - DNA, 347 bp, Setaria italica
  Peptide Sequence Number=SeqID_92480
atggagatccctatcattataggcgagtggtggcagatggacctttttaaggcggactggggcattaagcagcatgtgattgatgcttactacactgcatcgacaataaacggaaagcttggagacatctataactgctctggtgccgtggaagatggatacaagctagatgtggagcctgggaaaacctacctgctacgagtaatcaatgccgcgctcttcgccgagtactacctaaagattgccggccacaagttcacggttgtcgcggcagatgccaactatgttaccccctacaccacagatgtcattgccattgcacctggagaaacggtcgatgtcccttt

SEQ ID NO: 26507 - DNA, 194 bp, Setaria italica
  Peptide Sequence Number=SeqID_92481
accctagttatgatggggacagcagagagggggcaggaccggcatatggtggagataactggcaaagaggttctgatcagtatcctagccctggtgaaggacaaggaaactggcagggtaggcagtaagagcttcaagtgttccactgaagacaagcgctagacctgagatgtagaaatccccacctgtaaaat

SEQ ID NO: 26508 - DNA, 296 bp, Setaria italica
  Peptide Sequence Number=SeqID_92482
caccgatccacagctgcttcaccgctcacggccttcttcattccgacagagcacactaggcatctaataagctaagctagcaagatgtgtggcggtgcgatcctcgccgagctcataccgagcgcgacggccggcggcaagggccggaagcgggcccccgccgcggcggccaaggacgacgacttcgaggccgccttccgggagttcgacgaggactccgacgaagaggtcgtgctggtgacggagcgcaaggcgttcgcgttcggcgccgctgccggggctcggcgcagcaggcg

SEQ ID NO: 26509 - DNA, 567 bp, Setaria italica
  Peptide Sequence Number=SeqID_92483
cgaacgacgaggtggttgtccagagggtgcgcttcagccgggagttcgccgccacgcactgcaaggtgctgtacggccgcggcgcacctgtggcggtgcatcacgaaggcacgcggccttgacgcgcgcgagatcaccaggctctgcgtcgccgtggacgggcgcatgcgcatgctccatccgccggtgccggagggatacaccggcaacgtggtgctctgggcgcggccggccgctgccgccggggatctggtgtccatgccgctccggctcgccgtggagctcatatcccgggaggtggcgcgcgtcgacgacagctactttaggtcgttcatcgacttcgccagctccggggcggtggaggaggagcggctggtgccgtcggcggactcgtcggagacggtgctgagcccggacgtcgaggtggacagcctgctccacgccccgttctacgacctggacttcggcggcggtccgccgttcttcttcatgcccagctacctgtcagttgagggcaccgtgttcattgtccggtctttctccggcgacagaagcatggacgcctac

SEQ ID NO: 26510 - DNA, 295 bp, Setaria italica
  Peptide Sequence Number=SeqID_92484
caaacacaccgacctcggctaggatatccgcaccggcacggcggcgcggcaccgcctcccggagaatcgaagccgagcgggcgggggcgcgatggatcttctgaagcgggaactggagaagaagcggaagtcggcgtcggcggacttcggcgggaagagcttcgtgcggcggtcggagctggagcagaagcagctccagaagcgccgggacgagcagcgccagctcctcgccaaggccagcgcgccggcggcctcctccgattccgccgcgggcacagcgggctccgaccccagc

SEQ ID NO: 26511 - DNA, 347 bp, Setaria italica
  Peptide Sequence Number=SeqID_92485
aacatactgaaaacactggaaaaagaaaataagaaaattaaaggattccgcagctttgggtacggcgtttgattgaggtaaattatccgcaagagtgccaaacaaaagagtcctaaaaagatcatttttgaacctcccaataattattgagagcaagaaaaaaaagcatattctccaacagttctcaatatttagtcttaaaaaaacaaattcctgccatgtcaactagtacttgcagtctaactggtgatttgttttcggggggtactcctgagtcctgaccaacaaagtaactagatctccagtgaacaaacctcactgaactcagtacaaaaaaagacgaattt

SEQ ID NO: 26512 - DNA, 402 bp, Setaria italica
  misc_feature (39)..(39): n is a, c, g, or t
  Peptide Sequence Number=SeqID_92486
tccagatcctatctcattgatttctgagaattattggtncatttttcagttcctcaaatgaaaaagtatctttgcacccttcagttgcggtgcatctccattgtctgtaccaccagctccccatgatgcaaaaggatttgtagttcgctctactgcctccttggctatccttttctgtcgtagagcatatattgctaccagaattaggccaacaataaggacacagcccgcaattgcgattccaattattgcacctttgcccattgaggattttttattgatgggacctggaaagtatgtgcttgctatgaagctgtatggtccaaacgcagttggggctttaaaagtttggttgaccagagcagtactgattcttattaacatcttgtagtcgtatttgta

SEQ ID NO: 26513 - DNA, 498 bp, Setaria italica
  Peptide Sequence Number=SeqID_92487
tcctcgatcgtggtattcacatcggcagatcagaaagaaaaccaaaagaatataagcgagaccaaaggagaagaagagagggctcttcgagctctctaatccgaggcctcctccacgatgctctccagctgcggccgccacacgccgacgcgggcgccgctccgccgtctccggtggccgccgctcgacgcggtcttctcggagagcagctccctcaggtagttgtcctgctccgccgtgtgccggcgctgctcttcttggagtggtggtggtggcggctcggccgcttgctgccgccgctcttcttggagctaccctgcttcttgctcctccggtccgccggcagggtagctgaggggatgaggaagtagatgcggccgcgcttgagctcggagtccggcgacacgatgacgagcttcttggaggcgcagccgggcgcgccggagggggaccacgccgtggtgagcgtgtggttggggttcgcggcgagcacggagg

SEQ ID NO: 26514 - DNA, 533 bp, Setaria italica
  Peptide Sequence Number=SeqID_92488
gctggatgttgatgttcagcatgagggtgagcacctcgaccagccggacttcgtgcagatgctgcgggaggtgcagcggaaccccagcagcctgaacacctacctctctgaccagcgcatggtccaggtgctcaccctcatgctgaacatcaacatccagcacaagagcaatggggcgtctgagccggcgtcagcgcaatcggcccctcagacgccaaagcagcagccggaggcgaaggcaagggagccggagccggaacctgagcccgagccgatggaggtgacagaggaggagaaggagcggaaggagaggaaggcggcggcgcagaaggagaaggaagcgggcaacgccgcttacaagaagaaggatttcgatacggcgatccagcactacacaaaggccatggagcttgacgacgaggacatctcctacatcaccaatcgtgctgctgtttatcttgagatgggaaagtatgacgagtgcattaaggattgtgataaggctgttgagaggggaagggaactacatgctg

SEQ ID NO: 26515 - DNA, 246 bp, Setaria italica
  Peptide Sequence Number=SeqID_92489
gaaacagtagtgtcaaggggacaagcccttgaaatgtttctaatcaagacggcgatccagaggttactgacttccattcgagtcacattcagcttgtgcagtggcaggccaccccaccaagcagacatcagcaacccggcattttgtagggacatgagtagtgcgtaaaatgttccttcgatgccgggggaacaaagcttggagcaaagcacaagaagtggcaaccatttgagtctaccaaccata

SEQ ID NO: 26516 - DNA, 561 bp, Setaria italica
  misc_feature (1)..(10): n is a, c, g, or t
  Peptide Sequence Number=SeqID_92490
nnnnnnnnnnacgcgcaaacttgaatctgccagaaacatgaaaacaaccagccgagtggccattgatttaagtaacatagtaaacaagttcagaattctaccgagcatgaattattgtgaaggttgctcatttaacaagagtgctacaccaatgaccgaaaaaaatcctcaacgaaacatcgcagttcatgaaatccatagactgcaacgaccaaaagttgcagggagagggaaaccaaactgttctgttttccccagctgacctggccccaattttcagctgggaaggaagtacatccctgggagctaagagaaaaaaaaaagggacttgtaaccaatcagggcttgagggccactgcgatcccaaccttcgagctcttctcgatggtcttggtgtcgacctcggctgagatggtcaccagcgacttcggcctccactcgtgctggatcagcgcgctggccttgccggagttgttgaagcgggccttcaagacaagtactaagtaaggggcgtgctgggtaccaaacgtaaagaaactaaagggtaaagaaaccgaaaaa

SEQ ID NO: 26517 - DNA, 297 bp, Setaria italica
  Peptide Sequence Number=SeqID_92491
ttgccatccacaacactggaagtgatgaagaatttggttgctcttaatgcaagcaacaatagtcttatgggaccaatgccatcatctatttgcaacaacgccccatcacttgccatgcttgacatttgtttaaatgaattcagtggtactatttcctcagagtttggcaattgctctatgttaaaagtactcaaggctggtcacaacaaccttacaggggttctacctcatgaactttttaatgctacctcattggagcagctctcttttccaaacaatgacttacaagggattctt

SEQ ID NO: 26518 - DNA, 469 bp, Setaria italica
  Peptide Sequence Number=SeqID_92492
tactgcgaaatgtttcctttttcttttgctataatcctatagttagagatgggggtctctttcgtacccgcctgttaggaacgggtagtgaatggttcttgtcactcgtagaattcttgtcgtgttctagaggagggaagaggaaaggttcaccacgtggtcggatgaaatggactccttggaatgccatgcatgtttaggaaaagtttgtgcttccgtgtcagcatgctttaatctttgtttatgcggtaaaaactggtggagaactgcttaggtttttactgtatactgtaaaggttgctgctgaaatgatagtgatgctgattttacatctcctaataaaatggttaggaaaaagaatctgacttttggttagttttgtcttatgacgatctacaagcaaatccccatgctcaaagcactttttgataggcaacatgcacatgctgctatggggtttctgagggtt

SEQ ID NO: 26519 - DNA, 359 bp, Setaria italica
  Peptide Sequence Number=SeqID_92493
attggagagggctttgggcatttcggtatcgctaatgaggatgtgtacaagttggctgagaatattaaatccaagggtggcaacattactcgtgaacctggtcctgtcaagggaggatccactgttattgcctttgcacaagaccctgatggttaccgttttgcgctcattcagagggctgagacacctgagcctctttgccaagtcatgcttcgtgttggtgaccttgagcgatctatcaagttctatgagaaggcccttgggatgaagctcctagaaaagaaggatgtgcccgattataagtataccattgcaaagttgggctatgctgatgaggacaagactatatactgtctgag

SEQ ID NO: 26520 - DNA, 884 bp, Setaria italica
  misc_feature (877)..(877): n is a, c, g, or t
  Peptide Sequence Number=SeqID_92494
actcgtgaacctggtcctgtcaagggaggatccactgttattgcctttgcacaagaccctgatggttaccgttttgcgctcattcagagggctgagacacctgagcctctttgccaagtcatgcttcgtgttggtgaccttgagcgatctatcaagttctatgagaaggcccttgggatgaagctcctagaaaagaaggatgtgcccgattataagtataccattgcaaagttgggctatgctgatgaggacaagacaactgttctggaactgatatacaactatggtgtcacagaatatagcaagggcaatgcatatgctcaggtacgtttgaaattttttatccacagtatttatctaataaggtcttgccatttctattatcctccttatataagggcaggttgctattggcaccaatgatgtgtacaagagtgccgaggctgttgatcttgcgaccaaagaactagggggcaagattttgcggcagccagggccgctacctgtgatcaacacaaagatcacctcttttgttgacccagatgggtggaaagttctggttgaccacgccgacttcctcaaggaactccagtgaagactggacgcccaggtggcatgctaggatgtagtagtgcttgtccatgatgtaataaacggctgctggtggttcagtttgtccctgccccgatgaaccgaaaataaaattgctgcagaactgtgcttttgctagtgatctttgggattggctgtgtggttatgctgttagtagtatgcaattgctacctgtggcaacctgtattagaatggatcagttcgcctggatcacttcgcctggttgaatggtgtttggttaacaaaaaaaaaaaaaaaaaaaaanaaaaaaa

SEQ ID NO: 26521 - DNA, 500 bp, Setaria italica
  Peptide Sequence Number=SeqID_92495
caaaatgcccaaagccctctccgatgtcatacttgttggctgagaatattaagtccaagggtggcaagattactcgtgaacctggtcctgtcaagggcggatccactgttattgcctttgcacaagaccctgatggttatctgtttgagcttattcagagggctgagacacctgagcctctttgccaagtcatgcttcgtgttggtgaccttgagcgttctatcaagttctatgagaaggcccttgggatgaagctcctaagaaagaaggatgtgcctgattacaagtataccattgccatgttgggctatgctgatgaggacaagacaactgttctggagctgacatacaattatggtcgcacagaatatagcaagggcaatgcatatgctcaggttgctattggcaccaatgatgtgtacaagagtgccgaggctgttgatcttgcgaccaaagaactaggggcaagattttgcggcagccagggccactgccgggga

SEQ ID NO: 26522 - DNA, 1247 bp, Setaria italica
  Peptide Sequence Number=SeqID_92496
taaagtcctaaattaactaacttggtttcttgccttactggttagagagagcttactgctgcggctgtgcgtgctccttgattgaatcgagtcgagcccggtccgaatccccaagccaagggatggcaactgggagcgaagccgcgaaatcagctgaggctgtgcttgagtggaacaaacaggacaacaagaggatgcttcacgctgtttaccgtgtcggggatctggaccgcacaatcaagtactacacggaatgctttgggatgaagctgttgaggaaaagagacgttcctgatgagaagtacaccaacgccttccttgggtttggaccagaggacaccaactttgcacttgaattgacatacaactatggtgttgacaagtatgacattggagagggctttgggcatttcggtatcgctaatgaggatgtgtacaagttggctgagaatattaaatccaagggtggcaacattactcgtgaacctggtcctgtcaagggaggatccactgttattgcctttgcacaagaccctgatggttaccgttttgcgctcattcagagggctgagacacctgagcctctttgccaagtcatgcttcgtgttggtgaccttgagcgatctatcaagttctatgagaaggcccttgggatgaagctcctagaaaagaaggatgtgcccgattataagtataccattgcaaagttgggctatgctgatgaggacaagacaactgttctggaactgatatacaactatggtgtcacagaatatagcaagggcaatgcatatgctcagagtgccgaggctgttgatcttgcgaccaaagaactagggggcaagattttgcggcagccagggccgctacctgtgatcaacacaaagatcacctcttttgttgacccagatgggtggaaagtggttctggttgaccacgccgacttcctcaaggaactccagtgaagactggacgcccaggtggcatgctaggatgtagtagtgcttgtccatgatgtaataaacggctgctggtggttcagtttgtccctgccccgatgaaccgaaataaaattgctgcagaactgtgcttttgctagtgatctttgggattggctgtgtggttatgctagttagtagtatgcaattgctacctgtggcaaacctgtattagaatggatcagttcgcctggatcacttcgcctggttgaatggtgtttggttcactgtgatctgttctggtttaac

SEQ ID NO: 26523 - DNA, 822 bp, Setaria italica
  Peptide Sequence Number=SeqID_92497
ctttgggtcgatttcggtatcgctaatgaggatgtgtacaagttggctgagaatattaaatccaagggtggcaacattactcgtgaacctggtcctgtcaagggaggatccactgttattgcctttgcacaagaccctgatggttaccgttttgcgctcattcagagggctgagacacctgagcctctttgccaagtcatgcttcgtgttggtgaccttgagcgatctatcaagttctatgagaaggcccttgggatgaagctcctagaaaagaaggatgtgcccgattataagtataccattgcaaagttgggctatgctgatgaggacaagacaactgttctggaactgatatacaactatggtgtcacagaatatagcaagggcaatgcatatgctcaggttgctattggcaccaatgatgtgtacaagagtgccgaggctgttgatcttgcgaccaaagaactagggggcaagattttgcggcagccagggccgctacctgtgatcaacacaaagatcacctcttttgttgacccagatgggtggaaagtggttctggttgaccacgccgacttcctcaaggaactccagtgaagactggacgcccaggtggcatgctaggatgtagtagtgcttgtccatgatgtaataaacggctgctggtggttcagtttgtccctgccccgatgaaccgaaaataaaattgctgcagaactgtgcttttgctagtgatctttgggattggctgtgtggttatgctgttagtagtatgcaattgctacctgtggcaacctgtattagaatggatcagttcgcctt

SEQ ID NO: 26524 - DNA, 752 bp, Setaria italica
  Peptide Sequence Number=SeqID_92498
gttctatcaagttctatgagaaggcccttgggatgaagctcctaagaaagaaggaatagtagacctagaattaacaagtataccattgccatgttgggctatgctgatgaggacaagacaactgttctggagctgacatacaattatggtcgcacagaatatagcaagggcaatgcatatgctcaggttgctattggcaccaatgatgtgtacaagagtgccgaggctgttgatcttgcgaccaaagaactagggggcaagattttgcggcagccagggccactgccggggatcaacacaaagattgcctcttttgttgacccagatggctggaaagtggttctggttgacaacgccgacctcctcaaggaactccagtgaagaccagacgcccaggtgccatgctagatgcaattctcatccgtgatgtaataaaatggcagttggtggttgggtttgtaatggcagttggtggttgggtttgttcctgccccgatgaaccaaaaataaaactgctgcagagttgtgtttttgctagtgaggattgggttggctatgtggttgtgcctgttactagtatgcaattgctacctgtagcaacctgcctattacactggataagttcgtgtggttgaatggtgttggttcactttgatatgttctggttgcctgctgatgttttgtcatggatttgctttcataggcgccaggatacgctgttgctgatcttgcgcttattggtaggtaaaaaa

SEQ ID NO: 26525 - DNA, 1353 bp, Setaria italica
  Peptide Sequence Number=SeqID_92499
cctcatgtggaccggagcctgtatataggtgcggcgccttcagtctccactcatctcctcgcaaagtggaagaagccaagacaattggttaggttgagagctcgctgctgcgcctgtgcgtgctccttggtcgaatcgactcgggaccggtctgaatccaatccaagggatggcaactgggagcgaagccgtgaagccagctgaggctgtgcttgagtggaacaaacaggacaacaagaggatgcttcatgctgtttaccgtgtcggggatctggaccgcacgatcaagtactacacggaatgctttgggatgaagctgctgaggaaaagagatgtgcctgatgagaagtacactaacgccttccttgggtttggaccagaggaaaccaactttgcgcttgaattgacttacaactatggcgtcgacaagtatgacatcggagagggctttgggcattttgctatcgctaatgaggatgtgtacaagttggctgagaatattaagtccaagggtggcaagattactcgtgaacctggtcctgtcaagggcggatccactgttattgcctttgcacaagaccctgatggttatctgtttgagcttattcagagggctgagacacctgagcctcttttgccaagtcatgcttcgtgttggtgaccttgagcgttctatcaagttctatgagaaggcccttgggatgaagctccttaagaaagaaggatgtgcctgattacaagtataccattgccatgttgggctatgctgatgaggacaagtactaacttgtttcttggtagtctgacatacaattatggtcgcacagaatatagcaagggctaatgcatatgctcaggttgctattggcaccaatgatgtgtacaagagtgccgaggctgttgatcttgcgaccaaagaactaggggcaagattttgcggcagccagggccactgccggggatcaacacaaagattgcctcttttgttgacccagatggctggaaagtggttctggttgacaacgccgacctcctcaaggaactccagtgaagaccagacgcccaggtgccatgctagatgcaattctcatccgtgatgtaataaaatggcagttggtggttgggtttgtaatggcagttggtggttgggtttgttcctgccccgatgaaccaaaaataaaactgctgcagagttgtgttttgctagtgaggattgggttggctatgtggttgtgcctgttactagtatgcaattgctacctgtagcaacctgcctattacactggataagttcgtgtggttgaatggtgttggttcactttgatatgttctggttgcctgctaaaaaaaaaa

SEQ ID NO: 26526 - DNA, 609 bp, Setaria italica
  Peptide Sequence Number=SeqID_92500
acggagagttggctcaatcgggggactacacaccaactaagctcacaatgctaacgaacacaggagcgctgaacgaggtgatgcagatggacgggtatcttctctgtgaggtgtgcaacgtgaggacagccgatcgtgtcaccatgatgtgccacctcgaagggagcaaacacatatccaagggccagaataagggtcaagcgtccagcaagccaccagaccaggctgcaaaggagggcgtgaaaggcttgtctgtgccagaagctgacacatcagctgttgccactgctgatcctgaaacgctggttctggagttgtatggtgtgtcacacaccgtgcggatgttgcaaggcttcctgctgtgtgagctgtgcaatgtgaaggccccatcgatgaatggaattcggcaccatctgttagggaagaagcacaagaataaggcaaatgctagctctgatgtctctgccaacgtctccacaggtggaaatgcggcagacaaaagtacaactgatggacaatgacacagctgtcatcgctgccatggcagttcaggtggaagcaccattggcgaagtcagtggaagcaaaggttggtgatgatagtgagctg

SEQ ID NO: 26527 - DNA, 195 bp, Setaria italica
  Peptide Sequence Number=SeqID_92501
ttttgcttgcttttccctaaatttggatggaaagaaacaagtaacattgcgatgttgcaatgagttggtgccgatggcaaccttgctatatgtgtagcaatagccagccgctgaatgcttgtttatttggtgacaaacattgcatttcatacctccacggtccacaccacaccacacctgtgactataacctata

SEQ ID NO: 26528 - DNA, 393 bp, Setaria italica
  misc_feature (379)..(379): n is a, c, g, or t
  Peptide Sequence Number=SeqID_92502
gtaaatgagcgtcgctagagcagggattacaagcatgggcagtgcttgaagaggttgcctccagttgaaattccgtcttctcgccctccagaatgcataaacaaacagcagcacctcgaggttgaaggagacgaaggcgaggctccgaccgaagcggcgcgccgcccccgctcgcctcgccaggcgcgaccttacggttgcctccagactccgctgggtgtcgcgagcaggagcatcgttgcggcgccaagccgaggaggctgcgcggaggcgggagtagacggcggagaagaagccgagggagtgatcggccatgactccggccgggggtggcggcgcggcggccagcggggcgtctgtcgaccgtctttttttttcngacggcaaagcaaa

SEQ ID NO: 26529 - DNA, 280 bp, Setaria italica
  Peptide Sequence Number=SeqID_92503
aaggcatgcagtacgatttagcaaatgaatctactacagttcatcttttgatttatgactcttctgtttctttagcttctcaagaacttggtccaggggtgggtctccaggtctgcggaaaatctgatcaccaatcttaaactcgtaggcctcagcttggctcaagataaactctttcagctctagaatgtcatgccctctctccatggtgaacatgagcgtcccaaaatcaacagcaacgaatttggcctctaccgatccggtccgcagcacattgcct

SEQ ID NO: 26530 - DNA, 351 bp, Setaria italica
  Peptide Sequence Number=SeqID_92504
cgtcgacggcgccggcggccgcgagcagcagttccgcctctggttcgaccccaccaccgacttccacacctactccatcgagtggaaccccaagcacatcataatcctcgtcgacggcacgccggtgcgcgcgtacaagaaccacggcgtgccgttcccgacgtggcagcgcatgcggctgcacggcacgctgtggaacgccgacgagtgggcgacgcagggcggccgcgtcaagacggactggacgcgggcgcccttctacgcctactaccggaacctccgcgtgacgccgtgcgtgccgtcgcccggcgtggcgtggtgcggcgacgagccgccggagtcggcgtggtt

SEQ ID NO: 26531 - DNA, 382 bp, Setaria italica
  Peptide Sequence Number=SeqID_92505
taactaaccaaattttcttagactagtttgagttgtgttaatgagtagagtcaagcaacttattaataatcagaggaaacattagcctatagtgtttgtgcactaaaatatcaactgagaagcatataatgcatcataatctgatactgaaagtaaaactatagtatggtagcaatcatactactaatgcagcattccacaattacagccagttaggggacatggatagcaatgtagcatagtaacctaaataacacaataggacgctatcacaattctaaatttttcaagaaagtgaatcaacagctgttgttgacttatatctataactgaataataaatccaaatagagcagcatgacattgatggctatcaattctgt

SEQ ID NO: 26532 - DNA, 516 bp, Setaria italica
  Peptide Sequence Number=SeqID_92506
ctggacgacacgtcgaccttcaccggcgagaagaacgccgggcccaacgccaactcggtgcgcggcttcgaggtcatcgacgccatcaaggcccaggtcgaggctgcctgtaacgccaccgtctcctgcgccgacatcctcgccctcgccgcccgggacgccgtcaacctcctcggcgggccgacgtggacggtctacctcggccgccgcgacgcgctgacggcgagccagagcgacgccaacgccaacctccccggtccgggctccagcctcgcgacgctcgtcgccatgttcgggaacaagggcctctcgccgcgcgacatgacggcgctctccggcgcgcacaccgtcgggcaggcccggtgcgccacgttccgggaccgcatctacaacgacgccaacatcaacgccacgttcgcgtcgctccggcagcagacgtgcccgcaggccgccggcggcgccagcgacgccgcgctggcgcccatcgacgcgcagacccccgaggcgttcgacaac

SEQ ID NO: 26533 - DNA, 406 bp, Setaria italica
  Peptide Sequence Number=SeqID_92507
aaggttgttccgaaaacagttggtattcttatgctctttctccttttccatcatgctcatttattgatcttgatttttaaagatatgtgtgattagttgcacggttgagggtccttgcacgtcagttgtggacttctgacagagcatagtcacatatttccaagttgccctttatgttggttatcatgctacgtgttccaaaagttgggatcatatataagagagctgctgtgaatagtttttaagtacgatccagtagctaacacactttcagttttcatcgtttcattttgatctattgtttttttattgtaatttctttttgggctaagaatgacctcactgtttcacacttccaattatcctgccaaagtgaacttcttagtaatgtatccgaagaaaaatt

SEQ ID NO: 26534 - DNA, 774 bp, Setaria italica
  Peptide Sequence Number=SeqID_92508
aattgtccatgtcttcattgaacaaccaagggcaaatagcaagagaggaataggatggggctagttggccatatatctaatttagacctgtgtcctttgaaggattaatggacaagttatgttgagtttaacctgaaagtatgcaatgtatttatattgtgatatctccttgtgcattttttgtgttcagatttaggaaactaaaggaggaagaatcaaggagaaaagaggttccgggacaagcaaaacaatcagaacagtcaagcaccgaatctaatgttcttgatggagcacaaaattctggttcctcgtctggagacaacaaagatgaacaggtataagatattttggtgcatggtttatttcatcagcagccgtactttgattgttgataaatattatacaggaatctcatgaaaatggatcaatcgtagctaatagcaatggtggacttgaccatagtaggaacgaaaggactctgaatggaacctcagaaaaggaagcagttgatggtcattcctcagtaagcaaacctacatcaccggatgcccccaaactgatggaccaagagaatggaaatgatgtggtatagaggatgcacgttagcgacaagtcgttccactttgatacgttcacagaaattcaaggttcaagtggatttgattcttccatgcgctcttctgaatttacggtacaatttagctgtgagatagtgagcaataatttcacagctacaggagagtcgagtatcacacgaagatccaccaggagagg

SEQ ID NO: 26535 - DNA, 1274 bp, Setaria italica
  Peptide Sequence Number=SeqID_92509
aagcaggttgagtctgcactagcaatgaggtcactgcaacctcaagtgaaggcaattcaagaacgatatgctggcgatcaggaacggatacaattagaaactgctcgtttatacaagttatctggtgttgaccctcttgcaggatgcttgcctaccctagtgacaataccagtttggattggtctatacagagctctctcaaatgtggctaatgagggacttctgactgaaggatttttttggataccttctttggctggtcctacaacaattggtgctcgacaaaatggccagggaatatcctggctttttcctttcacggatggccatccacctcttggctggtcggacactttggcataccttgtcttgccagttcttcttgtcatttcacaatacatatctgctcaagtaatgcagccaccacagagcaatgatcctaaccaacaaggcgctcaagctgtaacaaagttcttgccattgctaattggttattttgctctttctgtaccttctggactaagtctatactggcttactaataatatcctcagcactgcacaacaagtgtggcttcaaaagcttggaggtgcaaaaaatcctgtcaaggaatatattgagaaactttcgagggaagagttgactaatgtccggaagaatgaatctgctgttcagagtgaacctctccctaatcttagtaaaccccagcccagccaagagccgaaaacaactgggccacaacgtggtgaaagatttaggaaactaaaggaggaagaatcaaggagaaaagaggttccgggacaagcaaaacaatcagaacagtcaagcaccgaatctaatgttcttgatggagcacaaaattctggttcctcgtctggagacaacaaagatgaacaggaatctcatgaaaatggatcaatcgtagctaatagcaatggtggacttgaccatagtaggaacgaaaggactctgaatggaacctcagaaaaggaagcagttgatggtcattcctcagtaagcaaacctacatcaccggatgcccccaaactgatggaccaagagaatggaaatgatgtggtatagaggatgcacgttagcgacaagtcgttccactttgatacgttcacagaaattcaaggttcaagtggatttgattcttccatgcgctcttctgaatttacggtacaatttagctgtgagatagtgagcaataatttcacagctacaggagagtcgagtatcacacgaagatccaccaggagaggcaaactatt

SEQ ID NO: 26536 - DNA, 686 bp, Setaria italica
  misc_feature (15)..(15): n is a, c, g, or t
  misc_feature (30)..(30): n is a, c, g, or t
  misc_feature (47)..(47): n is a, c, g, or t
  Peptide Sequence Number=SeqID_92510
gtttttttttttttnttttttttttttttnttttttttttttttttntttttttttttttttttgttgtttcttagtataatcaccatgcattatttcgaaaataattgtcaccaggtataccgccagccaagtatcaacttgcacggtcaaaataaggcgaggatggaagatatacattttacagccaccaccatgcatgatcatccatcccggctggacatcgtagacgtgatgatgaacaaaatcctttcatctacaagctttcacataatctacagcctcaatttctaaaatataaaaaaggagcctagccctagagcgtggttccaaacaatgttgcctctcctggtggatcttcgtgtgatactcgactctcctgtagctgtgaaattattgctcactatctcacagctaaattgtaccgtaaattcagaagagcgcatggaagaatcaaatccacttgaaccttgaatttctgtgaacgtatcaaagtggaacgacttgtcgctaacgtgcatcctctataccacatcatttccattctcttggtccatcagtttgggggcatccggtgatgtaggtttgcttactgaggaatgaccatcaactgcttccttttctgaggttccattcagagtcctttcgttcctactatggtcaagtccaccattgctattagctacg

SEQ ID NO: 26537 - DNA, 277 bp, Setaria italica
  Peptide Sequence Number=SeqID_92511
accgcagactttagttgtttttacgctttggacctcggtagagtaccatattgtaactgacggatcgagggtgcctgctgtacatacacggaggatggccttggatgtaaattcgacgtagagttggtggagttgcgcaaacattttgtggtcgaggtcgagtcgtttcttcgtgtaacttttcgcttgccttgcaagcgatgaactgattaccgaagaaaaggtaacgtgacttgggagcattttactgattgcttgaacgttcattacgtcccca

SEQ ID NO: 26538 - DNA, 813 bp, Setaria italica
  Peptide Sequence Number=SeqID_92512
agtttgtaactttaaccccttaatttctttttcttatttactctttcattcagattatttgttatgcaattacacagcaagcaagcacatacatcctgacagatcccaaagtgtacgcagggagttatgtagcaggcacatacatccttcccttcagattatttggtagctaatgacataatgtagcaagcaagcacatgagtgcaaaaggtaggatacagttacactgatacttgccccggcagagaggtggatggtactcgccggcgattggggggttgaattcagatttcgagttcaggcatcggtgaggcgggcgacgatggggtacttggcctggaacttggtctcccagtcagcgaggacgccgagctccttctcggtgaggccggagaggtcgccggagacgtcggcctcgtccttggacatcttgccgagggcgcggctggcctcgcggccggcgaagatggcgtaggcgccgccgggcccgtagaagctacggccggaggtgacgtcgtagaccttgccgcggatggagacgtagatcggcttggacgggtcggtgccgtcgtacgcccgcagctgcgccgccgtcagctccgtcgccatcgtgctgctcggcgcggtgggggaagccggggagggaaaggggatcgatcgtttgccgctgcgcagcgcggtaggtgtctgtcactctgtcgtagattgttgcgggttgcaagtgaagcggcgaaggaagcggtgggcaccggcggtgtgatgtgagcagtagactgagcagcagctgagcaacaaccaccacccccagaacca

SEQ ID NO: 26539 - DNA, 355 bp, Setaria italica
  Peptide Sequence Number=SeqID_92513
gacgcggactgcgacgtcccccgaccgcgccggaaaggcggctcccaggcgggcgcgagcatggtgcggggacgtgtctcagccagcggtggcttggccagggcgaaccagtccaagtcccacaccctcccggcatcggccgcggtggggaggtggagctcggggttgaggtagttcgcctcgaggtactccttcacgctgctcgggctcccaggcgggtaggccggcggcgggacgaagtcgggaatggcgctggacggttgcggggtagggtcgaggcggaggtggccgccgtggccggagaagctgatgcggaacggcaactcgctcgccggcgaggggtcagggccgtcca

SEQ ID NO: 26540 - DNA, 409 bp, Setaria italica
  Peptide Sequence Number=SeqID_92514
gtccacgcgccgcaccgcgctcaggttccaggagctgagcccgtgggcgtcgttcggccacgtcgccgctaacggcgccatcctcgaggcgttcctggaggcggcggccgccgccgcgtcttcatcctcgtcttcgtcgtcgtcgcagccgccgcggctgcacatcctggacctgagcaacaccttctgcacgcagtggccgaccctgctcgaggcgctggccacgcggtcgtcggatgacacgccgcacctgtccatcaccaccgtggtgcccgccgccgcgccgtcgtccgctgcggcgcagcgcgtgatgcgggagatcgcgcagcgcctcgagaaattcgcgcgcctcatgggcgtgcccttcagcttccgcgccgtgcaccacgcgggggacctcgcggagctc

SEQ ID NO: 26541 - DNA, 503 bp, Setaria italica
  Peptide Sequence Number=SeqID_92515
caactccgaacagacactcgccgccgccgccgccgcgacatcaccagagggcaacaagcgaggaatggcggagcggcaggtggcggagctgggtcccggcgcggcatgctgcggctggaaccactgcggccgacgcctcgcggccggcgccgtcgacggctccgtctccgtctacgattccaacccgtccccctcctccaagtggcaggcccatgagcaggccatcgtgaatgttgtctggcttcctccagagtatggggatgctgtagcttgtgtttgtgctgacgggacactgtctttgtgggaggagggtgctgaagatgatcaacttccaacctggagaaagtgtaaagtctttgagggtggcaattgttgcatactaaatgtacatttcggattacatctgggaagtctgaaaatggttactccatactcagatggccaagtcaagatttatgagctcttggattccttggaattagacaagtggcagcttcaggcag

SEQ ID NO: 26542 - DNA, 352 bp, Setaria italica
  Peptide Sequence Number=SeqID_92516
ttgctctaggtcggtattacatgagccagcggtgaatgtttttatgaagctgtatgggtcaacttactataaggtgcatagtggttactatttttcttatttcataaccttttatcttctctcacatgtgagatttggatcagaagggatatcttgatatgtctgtagcttaatgatcaaattgtttgcggcaggaatagagatctgaatatgcatctctattgtactatgccttgctgcttaaccagtctatcaatactccatgtcgccatacatgtcttttttttctcggatcatgtttggctttgggttttgccttagcattcctcagtgatcttcacctaatctgaga

SEQ ID NO: 26543 - DNA, 545 bp, Setaria italica
  Peptide Sequence Number=SeqID_92517
cttgggtatggtagacttgatcacttgatagcataggtggaaacagcaccgccatcatactgcttgtggacgtgttgttgattgtgcaatgcagaaatgttggagacctttaatttgtaagatggtctgctcaaatatgcaatgaactgaggaaattggaaagaataaacctcattcaatagtaagtaatagttaccttgtagcttatctccattcctttcgttcacagtaaaaaaaaacaagtgcttacggattcaaaagtccgagcacctcgagatcactagaatgtcatagaaaaagtagcaaaggattatttttttaatctcatttgctactaagttgtcgaaagataagtagttggacctttcatcacaggggaaaacatggcaatagcaatatgagtcaaaagtattgggctaaaaaaattcaaaaatccttgcttgccagtaaagtggacgatgtatgctgtgtcccatacacactgtatgctctgtcccatacaatcgaaactccagatggtgataaaaatgcagtgaggaatttcc

SEQ ID NO: 26544 - DNA, 408 bp, Setaria italica
  misc_feature (63)..(63): n is a, c, g, or t
  Peptide Sequence Number=SeqID_92518
aaaaaagttattacttcatcgatcaagtaacaaggctgcagaaggataagcgcattattattnaacccccttctcaagatgagaaggctggaagtacacaatcgcttaagctacacatcagctgcaaaaacaaacacttcttccgcgcacgtctatctcatagggtgcagcacagcttggagtcgatcgatgccaggcagatgcagaacgcttggtaaccagtcagcgggtatctgaagtccattatgtatttggatttcccaactctaccaagctgcaagaccgtctgcctcccgttttcctccaaggtcatctggaagttcttcactgatgtctataccctgtaccccatccttcctgccctctccctgaagtctagttcatagcgctttgtcatatggttgtaga

SEQ ID NO: 26545 - DNA, 1435 bp, Setaria italica
  misc_feature (1367)..(1367): n is a, c, g, or t
  misc_feature (1384)..(1435): n is a, c, g, or t
  Peptide Sequence Number=SeqID_92519
agaactaataaaaactcaaagctcttactagtgagcacctgcaggctgcagtgccagagagagagaggtatggcaacatcagtagagatcatgaaccccagcactgaggttcttgagactgcagccacctcagtgttccagccagggaagcttgcgatcgaggtgattcctgtggatcatgacacaaatccgacaccaccaattccgatcttgattgcctctcccaaggatgcaggaacatacccggtcgccatgctcctgcatggtttctgcctccagaaccatttctataaacaagttctcaaacatattgcctcttttggcttcatcatggttgcaccccagttccatatcagcatattggccaaaggtgacaccgaggacatagccgcagcagctgaagtgacagattggctcgctaaggggctaccatccatcctgcccaaaggcgtcgagccgaacctttccaagctcgctttggccggccacagccgaggtggccacacagcgttctctcttgtcctggggcatggcaagaccaatctcaagttctctgctctcattggtcttgaccctgttgctggcacaggcaagtcttcgcaaatctcacccaagatcctcacctacgagccctcctcttttgacatagcgatgcccgtcttggtcatcggcactgggctgggagaggagaagaagaacatactatttcctccctgcgctcccaaggatgttaaccacagggagttctaccacgagtgcaggccaccttgctactactttgtgaccaaggactatggacatctcgacatgctagatgacgatgctccaaagttcatgacctgcatgtgcaaagacggcaaaaactgcaaggacctgatgaggaggaccgttgctggcatcatggtagcgttcttgaaggctgtgcttaatgaagaagatggtgatcttagagtcataatgaaggaccctaagctcacaccaaccacagtcgaccctgttgagcaccgtctggcatgagcaggaagatcataaatcataaggacttattgagttaaacaagtgtcagttgcttgtttgtttccatgtttccaaaaactaaatgtcacctgttgctgtatgtcctttcctaagtccaaatcataatgaactgaataaaaataatggacagagttacatccgtgcattctgcttaatgataatggcaagcccttaaccccaaatctattggggaaagctatactgggctatgcaaaaaaatgctcgggtgagcagtagacagccccaatctgttattctcctttttgttccaggagttgtgtttgttttgtactctgtactttggtttgttccccttttttaataaaacncgtgctatgcagttctnnnnnnnnnnnnnnnnnnnnnnnnnnnnnnnnnnnnnnnnnnnnnnnnnnnn

SEQ ID NO: 26546 - DNA, 248 bp, Setaria italica
  Peptide Sequence Number=SeqID_92520
aggctgcctcgtctgtcctcgcgctcgcctccgcccgcgcgtgatcagcagtcagcgtaagcatcgccaaggaccagggcgcccagcgctgtgccatgtatgcatccgacatggcatgccccgtctgcgtgtggcgtctggggctctgggctgttccaggccgtgctagctgctccagctcagcacaaattttgtagacttttttcacaaacgagggaaagatgctttctgtcaagttattacgggcg

SEQ ID NO: 26547 - DNA, 297 bp, Setaria italica
  Peptide Sequence Number=SeqID_92521
gcagacgctcgtcgacgcgctcctgaccgtcgacgcgccggacgacggcggcgggtacgcggcgcggcagatggccagcgcggtcggcaagctcgacgacctcgtcagcttcgtggaccaggcggatcatctccggcagcagacgctgcggaacatgaacaagatcctgacgctgccgcaggcggcgcgggggctcctggcgctcgccgactactgccagcagctgcgcgcgctcagctcactctgggcggcgcgcccgcgggagccggcgtaacgtgcgctatgggcgggcgcagg

SEQ ID NO: 26548 - DNA, 398 bp, Setaria italica
  Peptide Sequence Number=SeqID_92522
gcacttagactgtggttcttgatgttgaagagagttgttgcacctaatgagattagttgtagcactttgtttgatggtttcatcaaggcaggtaaaaactgagaaggccttgaacctttggaaggaaaccttagcaaggggattagcaaaaacataactacatttaacacggttatcaacgggttgtgtaagactgggaggatgcttgaagcagaagagcttcttggctggatgaaggaatcgagatgtcctcccgatagtataacttacagaacaatagttagtggttattgtaagacaggtgatatggttggagctattcgcattatgaaggaaatggaaactttaggttttgttccttcaattgaattgttcaattctttgataactggactctt

SEQ ID NO: 26549 - DNA, 1058 bp, Setaria italica
  Peptide Sequence Number=SeqID_92523
acacggagatgccggtcaggccgaaggtgccggtggggagtccgccggtggagaagcggaggaggaagcacgccacggtggagcccagcagctgggcgatccagtacaggatgccgcggaagagggtgatgtgccgccgacgaaggcgccgaaggtcacggcggggttcacgtggccgccggagatgttggcgccgacggacacggcaacgaacagggcgaaggcgtgggcaatagccgcggcgatcaggcccgtgggggtcgagccgcctggggacagcttgcctgcgagaggggagcacggggtgattagtaacacaagtcagatctggccaccaggtgactcgtccaccacgtaacacgctcagatactgacaagcaagtaaaaactgctcaggattttttttcactgccttatgcttgatttgagtggttttatttactactttcactttttacactagcctgtttactaataagtatgtttctttttcgggatgcagaacgtgtcagtagaggattatgctagttcttggcagaagcagcacatggaggctctgcaaagactgaatagaaggtactgattctgcccaggattcctctactgctctactgcatgatcacagggctaaacatgccatttgcactaatcatgtcacctaaaagacttcccttcccctcacttttgacttttttaaaaaagaacttctctgagcttctagtaacaccttgtgctaaacaaaaaaggttctgccaaagaaaaggacctcatcttttcttcatttcagtgatgaactcatcagagaacgaccatgaacttaattttgtgctagtgcatccctgatttaccgtacagactaactaatcagattatctatgttattatgttctagtcagtattgtgcgagtgagtggaagatatcaagatactgagtgaggactagtaagcaagatgaggacgcgtgttgtgaggagggcactcactgaaggccatgccggagccctggccggcgaagacgaagatgagggtggagatgaactcagcgaacgccgccttga

SEQ ID NO: 26550 - DNA, 759 bp, Setaria italica
  misc_feature (1)..(21): n is a, c, g, or t
  Peptide Sequence Number=SeqID_92524
nnnnnnnnnnnnnnnnnnnnnggtttaaccgtccagtgcaaactggttcagtggtacgctcagaattcatcaacgctgacacaaagtggatacacagatactgaatcttgatccagcagggcccccccgtcctgtccgatcgctcgtggccaccgagtcacttgtccctgagcagcaccttgacgtactccttgtactcgacgcggccctcgccgcgggggtcggcctcgcggagcatggcgtcggcctcctcctccgtgagccggtcgccgtggctgaccatcacctgccgcagctgctccgcggggatggacccgctccgggcgtcgtcgaacacgtcgaagcactcctcgagccgccccgcggtcaccctggcgcccgccttgcgctccgccacggccaggaacgccgcgaggtcgatggcgccggcgcccgcggggacgcccgcgtcctccaggaaccgccgcgcctcggcctcgtccacgttctggcccagcgaccgcagcgccgtcacgagctcgcccgtggcgatgcgaccgtcctcgtcggcgtcgaacagggcaaagatttccttgcactcgtcggcctgctccggcgtcagcttccccgccatgctcgccggagctgctttcctcttgcggtggatgctaactgttcgctcgcgagagaagtgcgaacctttctatgattcgatttcgacaggtcaggagggaaagccaaactctccccaattttcgatctggcacgccaactttttct

SEQ ID NO: 26551 - DNA, 321 bp, Setaria italica
  Peptide Sequence Number=SeqID_92525
cgcggaacccttggtatgtctcggatgggtagatgacgccgtccttgtcgcggtcgaagaaggcgacgtgccgctgcagcggcgtgagctcgccgctgtacacgtccgccgtggacgaggaggactggcccttggtggcgtcgtcgtggctcccggtgtctgcagctttgcctgccatggagattgttgcagaggagatcgaggtcgacgacgccgagcaggacagagatagggagttgcagagggacagagagagcaggggaagttggagccttcgcgagggaggaaaggaaaatacggcagggatgcgctggttcgaag

SEQ ID NO: 26552 - DNA, 374 bp, Setaria italica
  Peptide Sequence Number=SeqID_92526
cgacggcggacagcgcaacgccggctccgatggcgcggaacccttggtatgtctcggcggggtagatgacgccgtccttgtcgcggtcgaagaaggcgacgtgcccctgcagcggcgtgagctcgccgccgtacacgcccgccacggacgaggagccctgctccttgacggcgtcgtcgttgatccctggtcgtcccagcacgaagagcagcgcggtggttacgagggcgaaactcgcgccgcgaaggacgtgccgacgagccagggatctttccggccgcggctttcggagcagcggaacggccgccgctccactctcattccccattgcctccctcgctgactctttgtggggagacttgccggggtctgcg

SEQ ID NO: 26553 - DNA, 398 bp, Setaria italica
  Peptide Sequence Number=SeqID_92527
tttttttttttttagtaggctacaacttttttttatctcactgaacataacccacaattacttgcagtttctttacatgaaaggctcttcttacagaaaagatgaattcacaaataaacatacagaaccaatgaaactatggttattataactcaccgatccacacgcacaccataatttacaaattcgtcacaagagtgtttgtgatgttattatcatttctttttcgtaaattccttcttagccttcctctcttgctccaacctttcaaacaagctgccatcatagaccgccctgacagtatccttgtggagaaacccatctttatctttgcacagggaatacagcaccttccactccgtcaagccacccagccatcctttgaagtctttgggttc

SEQ ID NO: 26554 - DNA, 1170 bp, Setaria italica
  misc_feature (1)..(23): n is a, c, g, or t
  Peptide Sequence Number=SeqID_92528
nnnnnnnnnnnnnnnnnnnnnnngggggagtagaacgtaaactgaaaatctatgaagggcaattcacagcttacctaccatgatttacaaaatactttcaataaatttagatgagaggacaggcccttgttacatatataaaagatgaattgacggacataggaatccatcaaactgactaggatataaatttactgatccaacacgccatagtttacaaattcttccacagcttctttctgatgttcttatcatttcttcttagtagactccttggacttcctctccttctccaacctttcaaataggctgccatcatagactgccctgacagtgtccttgtggagaaacccatctttgtctttgcagagagagtagagcaccttccactccgtgaaaccacccagccatcctttgaagtccttaggctccctgtttgcttggagcagctcctgcagctctttgcctgtcagggcatcaggcctagtgtgggcatgcttcttgaagatctcctcaaacttttcaggaacgaaccttccattggcatcgtacacgcctgaatcgcttccgtgcttgcccttgtggatgttcttcacgtaaatggggagcttgaaggctggagccttgtcgttctccggtatcgtcttgggtccaaggccgccgttgatgaagacggcgctgacggcggacagcgccacgccggcgccgatcgcgcggaacccttggtatgtctcggatgggtagatgacgccgtccttgtcccggtcgaagaaggcgacgtgccgctgcagcggcgtgagctcgccgctgtacacgtccgccatggaggaacccttgctgctcccggtgtctgcaggttcagcggccatggagaggctgtgatctctcttcctcgacgaggacgagctgagcgaggagattgcggagggaggggggagaagattggatcacgaaggagtgtcgtggtcgcactgtcgcagcagaggtgtggcgacgccaataagctggtgggggtggtgggcagtaagcagcagggaggctagcttgtggagctgtggatgcgcattgcgtcgtgggaggggtgctatttgtacgcggctccggccgcgttgcgcgcctcgctaagtaaccaacctaacgactagtgcgactgagtcggagttcggtagt

SEQ ID NO: 26555 - DNA, 432 bp, Setaria italica
  Peptide Sequence Number=SeqID_92529
cgttgggattcggtggactgctgccgatgaagaaggagaagcttacgttgaagctgactctctcgttggtgcggcggtcccacaggcgcaccggctccgggtagaacacgcggccggtgctgttgttcttgttcccgatcgtgaggtcgaccctgtcgccggcgcgagaggagtcgttgatgtacctgaggtttgcgcggtcgaggtcgcccgggatggagaagttgtagctgaaatagagcgcgctggcggcgcgaagagacgcgaggcagaggtgagcgtggaggaggagaagcaggtggcgggctcttggtcttggataggcagccatggctgcagcctgcagcaggggaagatgcaatgcagtatcccttctagttcttttccggcctgttaaatggatagctagcttggtttcgcaggcggtgtcgg

SEQ ID NO: 26556 - DNA, 500 bp, Setaria italica
  Peptide Sequence Number=SeqID_92530
ggagtcctgaacatctgcactttgaatttcctatctaagctataatctaaaggtagaattttttaatctgatacacttctaacgacctaattcagtaatcgatacaattcaataagagaacaaggccatcccagaattagcaagctttggacagttctaatcaggtgggcactagaaaggaggatgggcactgctccaaactcttcatctagaaaccatttgatcggaaccctctcaactcaatatcacaaaccctgcagggcaatcaaattcccccaatctgataaaccccagcccggcagtcacatgttgtgggattaagaataagcacaaagtgaagtcaggggctggcattgccacgagagccttaatcttcctttctagcaagcaccattgctgcaatatgtaagctgtagaatttaactatgagtgcaacacataagactgaaaaagaaaaacaagtactgagaacatagagtccagttagcaaactacttctt

SEQ ID NO: 26557 - DNA, 424 bp, Setaria italica
  Peptide Sequence Number=SeqID_92531
agaaatagtttgaatgtttagcaatgaggatgttacaattggatcctggatgcttgctatgaacgtcaaccatgagaacacgcatgcactttgtgaaccagactgcacagagtcctcaattgctgtttgggatattccaaaatgctcaggtgattttctttcatatttctagattgctattggtgtaattagcaaaaaatatggttttccactacagttatatattttcttgtccccttgcaagtatttggctaacatgtatatttaacgctgtacaatatcttttatgaactgtacgtatgaagaccaaaaaatagtgagcattagtaaactggcctgtaaataggttccacaggtactaatgtgtagtgcataatagtgataaataaatttgagggatgctttcgtaagactagaaactttt

SEQ ID NO: 26558 - DNA, 897 bp, Setaria italica
  Peptide Sequence Number=SeqID_92532
atcttgaggaggagtatagcaggctcccatacaaaacgttagctttctttaaggctgcctatgcattgtatgattctgatttctatgttaaagctgatgatgacatttacttgcgaccagatagactttccttacttctagctaaagagaggtcacatccacaaacatatatcggatgcatgaagaaggggcctgtttttactgatcctaagttgaaatggtatgagccccaatccttcttactcggatctgaatacttccttcatgcatatgggccaatttatgctttgtcagctgatgtagtggctagcttggttgccttgagaaacaacagtttccgaatgtttagcaatgaggatgttacaattggatcctggatgcttgctatgaacgtcaaccatgagaacacgcatgcactttgtgaaccagactgcacagagtcctcaattgctgtttgggatattccaaaatgctcagggctatgccacccagaggtaaaaatgctagagcttcataaaagaaaagaatgcgtgggtggtccaacggtggcagctgaggtgtctgagtctgaggaccgatgatttcttcatcggaaacacgaactacggatctgatagttgacctctgcccctaactcaatagctgtgcttggagtattcattgggttcatcaggtacaatcattgcgggagcactgttcaaggagcctatactggtggcgtcataacctagcactgtagcaaaggcattctcattcagcatttttgtcatagcagccttcattgcttttcttttttgacaatggaaccgtgatggtcgtttggagcgttcatcctgtctcgtagcagagggaattttgttgtatagaaattagaggaggagaatgcattggcggctg

SEQ ID NO: 26559 - DNA, 247 bp, Setaria italica
  Peptide Sequence Number=SeqID_92533
gccgtcttcgtccgcaggatcatgccgtcctcgccgatcacggaatgctcgtcgccgacgatgccgtcgccgccgtcggtggcgctgaagtcggcgccgtgcacgctggcgcaccggaactccatccggttctcggtgagcgtgccggtcttgtcggagaacacgtacttgatctggcccaggtcctcgttgatgttgagcgcgcggcactggaacttcgcctgccgcttctcgtcgagcatgtcgg

SEQ ID NO: 26560 - DNA, 473 bp, Setaria italica
  misc_feature (471)..(471): n is a, c, g, or t
  Peptide Sequence Number=SeqID_92534
ttccgtcagggtatctccttcagcaaacaatcttgctagagctctgaaaccatgccatacttcgcctctatcatttgttgaggaagggaagtgcatggattctggtatagtgagtttggcagatatattagggaccagggttgcagatcatgttcctcagacgcctaacaagatatccgaggacatgatcaaatgcattgctgccatatacatacggctgagagacgttcccacagttcaacatgccttcttcccctcaccctgctcatccttttcatcagcaagtggattatcttcgaaatataccgcagatatttggagccccaggtgcaggaaagagagcttcattgaggcgtggcaggagaacgcattaggcaatggcgaatcaagggagctgggtctacagtatgattctgtggttgaggtttctgctctttgcaagggtgatcagaggtctgctgatgttaaagnta

SEQ ID NO: 26561 - DNA, 189 bp, Setaria italica
  Peptide Sequence Number=SeqID_92535
cagggccggctgccttcccggcgccggcgaagatcccatggaacgggaacaggggagcacggccggcgtcctggctccagtcgccgtccgtgaatgataggtggcggatcaggaggccggcacggtcgccgtcgacgctgagctccccggctgataaggagagaaggggttggcagtggcgcgtgattt

SEQ ID NO: 26562 - DNA, 646 bp, Setaria italica
  Peptide Sequence Number=SeqID_92536
gctcaacgaatctaagaagtcatttgtattacatatgaccatcagagtaatcaatattcttgtcgatcatacatattcagacattcttcacagaagctattgttttcttctaggaaagggactcaaaaatctcatcttaaaacagtagtccagtgcaacagcagcaggaagaaatatgaaaatgttctcaaccacactaactgcaccatcaataacaactgatattaaggtatcagtgctcagctcgagggttctaccagattccagcagagcaaggcctctaacaaaagcaaatgctgcaggagcccctgtttttagttggatattgtctagatctcttctaacagcataccggaatgtgactccaaacaaagcgcaacttatgaaaataactgatgaccgaagaaatagttgtggcagatcttgaacttcatagaaagatacgggcaaactagccagaacaccaactatagaggaaactgcagcagcttttacagattctagtctctcgctatcttcatcaatatcaccacttgacacatctccaaagcttccttcctcaagactagaagacaaagaacgctcagcttcatcaatcatttctcttgcttggagcaattcccgctgggactctgcaatcatgatt

SEQ ID NO: 26563 - DNA, 376 bp, Setaria italica
  Peptide Sequence Number=SeqID_92537
tagtacctacccaagactacccacggaccaacctacctcacctcgcgactcgcgtggcctcctcccgttccgagtccgtcggcctcaacgactagttgagcgctccgccgccgccgagggtccggcgaggggaggaggctcatggagcggctgtaggctccgttttcagcagccgccgctggtgctcgggagggggccgcgtgtgggagtccgtgattttggacgccccgccgcggtgagatccgagggcgcgcggctgctgtgcggggggtttgaggtttggtggcggcttgctgctgtgcggtgacgaggagggaaggccatggcggggtccaggttcgggtcgttcaagtcggagaagggcgactcggccgcc

SEQ ID NO: 26564 - DNA, 568 bp, Setaria italica
  Peptide Sequence Number=SeqID_92538
ggccggccgacgcaccaacccccctgatccgaaggcgagccggaacccaaaccctagcagccgagagcaatggcgcgcccgaggggcaagaagcgcacggcggccgaggcggcggccactgattcgagcaagccggaggcggcggcgaaggagccggccaagcgggggcgggcgaagcgcgtcaaggcgccggccgagcccacggaatactttcccgagaagaggaatctcgaggatctgtggttatctgcttttcctgttggcactgagtgggaaaacattgataagataaaggaattcaactggaactttgaaaacttagagaaacattagaagaagggggagaactttatggcaagacagtttacttgtttggaagcactgagcctcagctattgtatgtgaatggtgaatcaaagatagtgcttattccagttataatcgcggtagactgtcctttccctccatcagataagatcggcataaattcggtccaaagagaaaatgaagaaatagtgccaatgaaggcgatgaagatggcatgggtgccttacgttccccttgagga

SEQ ID NO: 26565 - DNA, 529 bp, Setaria italica
  Peptide Sequence Number=SeqID_92539
tttttttttaacttaactgcactgctggcaaagccgagacgttaacaatagtaatttgcacgcagtacacgacaacctccagaccactcaacacacgaccagactctcgagtcacacgcaggcagcacgtcccaaagtgaacggtttacacaggtacacgaatcgatcaaagggcaaaggcgaacccaacagaaaaaaaagaatggtcctagtcctggctcatcatgcggtggaagtcgtggaagtcgagctcgccgtcgccgtcgtcgtcgtaggcgcggatcatggcctcgcactcggccacggacggctcgtcgcccagctggctgagcacacgctgcaggccgcgcggcgtgatccggccggaccccttgacggcctcgaacgcctcgaaggcgcggcgcaggtcctcgcgctcctcctcctccccgcccttgctctccacgatgcgcacgaagtcgtcgaaccccagcatcaggtccccgccgccgccgtcctccagcccgccgagcgccagcccctgccccag

SEQ ID NO: 26566 - DNA, 376 bp, Setaria italica
  Peptide Sequence Number=SeqID_92540
ctcggcagatcaatgcccggaagcagttaaccgctgctccagaccataaagaaacgcccacagaggcagaacagcagcggaagtaaatgagagaacccaggaacacggcggaaggcacggaggcgaccagcgctgcgctgcctcgagcaatgcaagaccggggcagcggctcagcggatggcgcggccgcggatttgaaggcccggtgagggagagggggaggctgcagacagtgcaaggacggacggacggacacgctgctccgcgcctgcgcgctcgcgctgttcgagaagacgagccgggctgtgcaggcgaggtggggggagtaggggagtgggagagcagcagcggcagtagggaggagagtactgggggc

SEQ ID NO: 26567 - DNA, 183 bp, Setaria italica
  Peptide Sequence Number=SeqID_92541
cagaaacaggcctcttgtagacgcactcggcgaggaccatggcgcagagcagctcctggagctcggcgaaggtgtcaacgcggacggcgcggcagagctcgcggagctggcgccggcgccggtcgacctcctcccggaacatgcgctcccgcttggcgcatgcggcccccgggccacggccta

SEQ ID NO: 26568 - DNA, 258 bp, Setaria italica
  Peptide Sequence Number=SeqID_92542
acgacaggagctccccggcgcgcatcctcgggaacgcccacagcaccatgttgccgaagaagtccgttggcacgggaggcttggccctgctccggcagttcacggcgacccgtatctgcgtgagctcttctggcgccaggcgccgcgccgccgtggccttcttccacgcgtgcgccaggaggcactggaacatgctgcaccgcgctccgacgtgggccttcagcctcgccacgaactcttcggagaagtgcacggtga

SEQ ID NO: 26569 - DNA, 1059 bp, Setaria italica
  Peptide Sequence Number=SeqID_92543
atccgtaaacaacaattcattttggtacgacaaaccatcgaccaactgtaccaaccaacaattcattcagcaagaagcgacaaagctgacagctaatctcctgatgtcagaaattataccaaccaactgtagtaccttttaaattaacagttttccaattccaaatgttgggactaattaagaaacaactccgtatctagcttcttctggagattacatcttttgtggggaggaaggtgatgagattttctaacagcaagtccaaaagaaagccagggatcagctaatcatagagtccttcttcatgccatatgtcgaccaaaaaatcaaccatctcagatagtgggattggctgtggaaaacgttcgcttgtcgacaagagatcatcatatgttgtgcaccaacttattactggctctcgaggtgccttttttggaacttctgcctggtgtccaacccattgccttctcatctcagcccatgctacagcagcatggtttataaatgatgtatctaacccgttgtccgttgacattttagaatcgttgattattgagttgggaatagacgagatattcccctcaagagaaactgatatgctgacgttgttctccattgcttctagacccggttgccatcgtcttctgtttccaatagaagaattccgagacctctttcttaaagaacctttcagtttagaatcttgaagtgactgggatttgcttaaattaccaatacagccactgttcccatataagctcaaagaggatgtcatgcaaacacctcagccatcagtgtgctaacaaaaccgtttaacatagtgagatggtatatcttttcatgcttcagacatctattgcacagcacatttatttctccgattgtaccgaacctagcagcaggttaccatcaggattagaacggctcaaacacgcgccacaccggagatgagccaagcgcaaccgcgggcacccctcttcgagccggagcccccaccaggatttccaagcaatccgcctcgcgatcaatccggaacgggagaaggagccaagttccttt

SEQ ID NO: 26570 - DNA, 508 bp, Setaria italica
  Peptide Sequence Number=SeqID_92544
tacctacaaaggtagaaggaccaaaaggattcataaatctgggggagttgcattctcggcttcaaaggtatgaagaggcaaagctttgttacaataaagctcttagaatagcaacatgcttggaagatgaggatgccttaatggaacaaattaaccagaatattgaaactgttacaaaagcggctgaagtacttgaggagttgaagaaagatgaacagaagctgaagaaacttgtcagagatacttctaatgctcgtggaacatctaaagagagaaaattcctccttgagcagcatgcgtggttggataatcttattgagaaggcaaggatgatatgtgcatggcaaaaaacacaaggaattctcaaaaaggaaagaaaagggtagcaactgaacttcatgataaggaaaagttgagtgactctcttctgtcagttggagaatcgtaccaaaagcttagaaacttcagcaaagctcgtaagtggtatatgaaaagttggaacatgtat

SEQ ID NO: 26571 - DNA, 265 bp, Setaria italica
  Peptide Sequence Number=SeqID_92545
cctggttggtttaattttggcatcagtttaaaagtcctttttcttgcactcattttgcagtcttccttctcctttcaacaggttcgtactgtaattcctgctggcacttcgttccaggaggactgtgcccgtattctacgtgcaattagaattgcagctcggttagggtttagcttccccaaagaaacagcttattatgtgagaacacttgcctgctcagtggcaagacttgacaagggaagaatacttatggagatgaactata

SEQ ID NO: 26572 - DNA, 380 bp, Setaria italica
  Peptide Sequence Number=SeqID_92546
agccttctacctgggaggtgatatgtcattggcagtggatattggaaaatcaatcgaccggcaacatgatactagctatcgagagctcttagaacccaaagtctgggctgataagcatttggtagatgaagtacaaagctttgctgcattgatgaagcgagtgttaactgaaatgactgatgaatattttgttgcaaatgctatggcaaaaattcctcaagcaccatcctcagatcttgtaagcactaccgacttatgtcttccatttttagcttagatgttttctccaatgtttaatgtgcaacctggcctctatatctgcgagaaaggtacttgaagtcatgggagtgtgactgtgtgaaggatatcaaattaattca

SEQ ID NO: 26573 - DNA, 1873 bp, Setaria italica
  Peptide Sequence Number=SeqID_92547
cgcgcgccgtccccgtccccttcgccctcgcccaccgactcctccaccccctccaccgcccccgccatccgccggagggccgggtgcggaggggttggagggtccggagtggaagaaggtcagtgcgaagcggttcgggatcaaggagtccatgatccctgccgaggcctggaacgtactgcaccgcctccgcagcagaggatatgatgtgtaccttgttggtggttgtgttcgagatctcataatgaagaagacaccgaaagattttgacataataacaacagctgatcttaggcaggtgaaagacactttctcaggatcagctgttatcgtaggaaggcgtttccccatatgccatgtacatgagaacaattccatcgttgaggtgtctagttttaatacttgtgcaagggggtcaagtggtagccagatttacaattcaaagagccaaaactgtagcaagaatgattttgttcgctggaaaaactgccaagggagggacttcacaataaatgggttaatgttcaacccatattcagaaaagatctatgattacttgggaggcattgaagatattaagaaagctaaggttcgtactgtaattcctgctggcacttcgttccaggaggactgtgcccgtattctacgtgcaattagaattgcagctcggttagggtttagcttccccaaagaaacagcttattatgtgagaacacttgcctgctcagtggcaagacttgacaagggaagaatacttatggagatgaactatatgcttgcttatggttcagctgaagcttctttaaggttgctttggagatttggtcttcttgagcatttgttgccctttcaggcagcatatttctcttcgactcgttttaagaggaaggataaaggaaccaatatgctacttgtcttattttctaagctggataattttcttgcacccaacaggccatgccataatagtctatggataagccttttagcttttcatgaagcgttggcacgccaaccatgtgatcctttggtggtggctacttttgcactagccttctacctgggaggtgatatgtcattggcagtggatattggaaaatcaatcgaccggcaacatgatactagctatcgagagctcttagaacccaaagctgggctgataagcatttggtagatgaagtacaaagctttgctgcattgatgaagcgagtgttaactgaaatgactgatgaatattttgttgcaaatgctatggcaaaaattcctcaagcaccatcctcagatcttgtatttataccgctacaagcatacctgaaggttctcaaattcatcgagtgtgttcaatacggcaaaaaggagcgtggctatgaaccaaaacgtgatgggaagatcaattaccataacctgtcttatggtacaaatgcggaaataaggaatctctttacactggtcgttttcgacacactgtatcccacgaacatggaggatcaacatgatgggagttcttgaaggtagatcgtgatcaggatgaaccattcaaggctttcaaggggcctgaagctttgcaagatcataatatattgcaaggtccagaattgagctgctgcatctaaggaaaggcagagtatccgatgccattgcttgttctgatgctgttggtatattcatgctcctcaccgccacatggcaagagctcgagctttctgggggaagttgatagttctctgaataaaacaaactgtagggatttagcattctttctaactgttggaggtgctttcataagaaaacaattaatatgttgaatttgtttttggacaccttcctggacaagggatacgccctgcaaatgattcccctaaaaaaaaaaaaa

SEQ ID NO: 26574 - DNA, 480 bp, Setaria italica
  Peptide Sequence Number=SeqID_92548
ctttttctaaagaaaagaggacaaggtttcttctcgtttcttttgatacatgcacaaaaccttgggaaggggaaatagcaacgagaagaaaacatgtcctctttctttagaacaagacacacaagaccgaaaaggagttctacgtcaagagcttcgagtatataatggcttagaccggtcactcggtcctatcaaggcctggaccggcatcaccagaaatctcattatttgcgctatcttctatttccattgcaaaaaaaaggttggcggtcatctttcatgcgaaggaagcccggcgctgcaaatgcctcaggctctgctccatgctgaccttcaccatctcagcaagcatcttcttcgccttgccgccacggtcttcaccatctatttgggaggcaatgttggtcactatgttctcgagcgtgtctggctgcagctttgatcttgaatacggggattccgcagcaagtcaagaagaac

SEQ ID NO: 26575 - DNA, 343 bp, Setaria italica
  Peptide Sequence Number=SeqID_92549
gggggccgaacatagggtcgccggagcggtagcactcggcgaggagggtggaggtgtagtagatgacggcggcgaagagcgccatcacggcggggcctgccgcccaccccagctgcgcgacgccccacgcgagcgacagcacgccggagccgatgaccgccgtgatgatgtgcgcgctggccgtccacagagtgcccgtgcgcatcggccggccgtcgtcgtcaacgagtggcttgggtggctctgcctctgtgcggctctgaacatggtcaccgggggcgcccagctccacctccacgctgcgacagtggaggggcgctacgctgaccgcgtgggacattgc

SEQ ID NO: 26576 - DNA, 351 bp, Setaria italica
  Peptide Sequence Number=SeqID_92550
ggaagaattgttcataaatgttgtagtcgtttggaccctcaagctgtggaggcactaatctgcagcaaggattggataagagcggcacgaattggtaatgtcactgctatattgtatactgtacatttgtttgtatgtctggttgagattagttactgctaatacccatgtccccatgttttttttcttgtttatttcagatcaaagtaatgtatcttcaattcttgatgattttgttggccttggtgttgatgatatagctggagaagaaggtatattagctatttagttagacatcatctagttagttttagatgctcagattcatttacattgataattattgtgttg

SEQ ID NO: 26577 - DNA, 581 bp, Setaria italica
  Peptide Sequence Number=SeqID_92551
gagttgcacgggatgtgtttggctattcctgcaaccacagtagcatctgaatcagccttttgttctggaggaagaattgttcataaatgttgtagtcgtttggaccctcaagctgtggaggcactaatctgcagcaaggattggataagagcggcacgaattgatcaaagtaatgtatcttcaattcttgatgattttgttggccttggtgttgatgatatagctggagaagaaggtgctcctgctgatgctggatatcaaagtggcagggtggatttgtcagataactaggctgttgagagtgaagacgtgttggctgctgctgtcatttcaaaaatctaagctattgctagctgttatgaactatcaactgtgagactgctatttatgccttgctgcttgctgtgtgaacttgtgagttgtgagagcagagccttttatcttatatgcgctaagttttgcttgctgaactgctatggcaaacctatccataaaaagataagttaaagtgtgggatactagcactgacttgcaattttttggtgcatgcatgaacatgcttcaactttttttggtgaatt

SEQ ID NO: 26578 - DNA, 1287 bp, Setaria italica
  Peptide Sequence Number=SeqID_92552
tatattacagaggaaaacgagcttagactggagagtagtaccatggaattctggaacttatcacaggtgctagacagttctataggttcctatgaagtgcaaacttctagattgttaagtcctgtttcccaggggaaaggacatttagttgcttccttaacttacctaacagaggcatctggaccagcaaaggttctcaagatcgtgcaagaggttaatgtttgtagtaaggtgaaggcattctgggatgaaggattggagagctccaatgttattcaccttccctgggttcctggagtctatcaggaaattgaactgaaggcaactggaggctgtggtaagacactggatgactacaagttattttcctctgatgaagatgttgcttctgtctctgactctcgtattgtgcatgcaaaaaagcctggtcaagctgtcatcagagtagtttctgcttttgatttcttgaattttgacgagatcattgttgaagtttccattccttcagtattgtctatcttgccggtctttcctgtggaggtgcctgttggaacacgacttcatgctgctgcggcactaaaaacatctaatggacactcattctcacgatgtgaccatcttaatgcttttataaggtggagtgtactatctgataatgagtcttttcacattcttaacactgctgaggcctcgagcgttgaggacataaaacatagtgctggttcttggggacaaaatggcaatccttgtgcctggatatctctaaatgcatctgctgctggccgatccacagtagttgcaacgttcacctttgattcagattctaatattgagacacttggacctatttctctaaaggcaacttcaaaaatttctgcatattatcctctggtggttcttcaagggggaaatggaaaccaatttggtgggtactggtttgacttatctggaatacatggtaggattgagatcatggataacaactctctgaaggagctgtacttagttcctggatcagcaatggatgtttttctctttggaggacctgagcggtgggaccaagtggttgattttgttgaaaccgttgatgtgattggtgaattgaaaaatcatattactagttctactactgtgcagaaattatctagtggaatataccgagtatcttgcccaagcaaagtgaactataaactgctgttctcacgtggaaacatgatcgggaaagatcatcctgtgcctgctatagccaaatcagagttttctgttgtgtgtgacttcccatcagaa

SEQ ID NO: 26579 - DNA, 636 bp, Setaria italica
  Peptide Sequence Number=SeqID_92553
gcgctggggaggggttggtggcggaggaggacgggccgcgccggccgccgttcgacctcaacctcgccgtcgtgctcgccgggttcgcattcgaagcctacaccagcccgccggcagatgtgggctggcgcgagaccgatgcggcggactgtcagacagtgttcctatccgacgtgtttctccgtgaagtatatgatggacaactagttgtgaaactgaagaaaggcataaatcttcctgcaatggacccatggggtacaagtgatccttatgtaattctacaactgaatggccaaactgcaagaagcaacattaaatgggcgacgaaggagccaacatggaatgaaagtttcacgtttaacattaggaaatctcgagaaaatctgcttcaggttgcagcttgggacgcgaaccttgttaccccacacaaacgcatgggaaatgctggattgtaccttgaatcactttgtgacggaaatagtcataatgttactgttgaattagaaggccttggtggtggtggaactattgagatagaggtcaaatacaagagttatgatgatattgagcgcgagaaacaatggtggagaataccctttgtgtctgactttcttgtgaagagtagcctgggatccg

SEQ ID NO: 26580 - DNA, 239 bp, Setaria italica
  Peptide Sequence Number=SeqID_92554
atcgcaatcagcctcctgtttttcgtcagcgctaacacacttccatccttggcaacagaatgccttgagcaagcaaccttgcctgcttgatcagttgaccaaacttaccaattcatatgaatagccggccatcatgtgggttcggatcttgtctcgtctctcttcaaggtcgtggcagccatggcggagctgaagcttctcttctccctcaccttcctcatcctggcccgtgtctccgg

SEQ ID NO: 26581 - DNA, 1270 bp, Setaria italica
  misc_feature (1252)..(1270): n is a, c, g, or t
  Peptide Sequence Number=SeqID_92555
ttgtgatctcagacccttcgctgcgcagcgagcgcgcctcccccaaacccgggtcgattcgaccaaagcccaccagcctctgccccgccgcaccccgccgcctccggccaccgccggagcctgagaaggaagaggagatctcgttggagccgaggcggaggcggaggaggagaagatggtgagctcttcgtcgccggtggtcaacgtgtacccgctcgccaactacacgttcggtaccaaggagcccaagatggagaaggacacctccgtcgccgaccgcctcgcccgcatgaaggtcaactacatgaaagaaggaatgcgcacaagtgtcgaagcaatcctattggttcaagagcacaaccacccccacatactgctcctgcaaattggaaatacattttgcaaactccctggtggacggttgaagcctggagaaaatgaaattgagggtctgaaaagaaagctgtgcagcaaacttgcagtgaactcgccctcctttccacctaactggcaggttggagagtgtgttgctgtgtggtggaggccaaactttgagactgtgatgtatccttactgccctccacatatcaccaagcccaaggagtgcaagaagcttttcattgttcacctttctgaaagagagtatttcgctgttccgaggaatttgaagctgcttgctgttccactctttgaactctatgacaatgttcagcgatacgggcctgtcatctccaccatcccacagcagctttctaggttccagttcaacatggttagctcttagggcaacaagacaggaagattagtgtggttgaggctgctcttttttcagacttatgttgagatggatcttgacgtgctgagccagctgatcgccgtatgatgactgattttatttcgccatgctggatttttttatctagactacaacaatctagacatgcatttctgactgtattttgttggtctattctgttatcgtagctcaagctggtgcgtgatgtatgttagattattgcttgttctgtcgcgctaattgtttgtgtagttgtacgtctgtattcttgttctgccgctttgggttatgtttctaacttgcaccagctcttcaggctgtcatgtttttggttttagagcttgtaatgtttattttgcacggagcaaccactgtaagctgtaaacaggcacattggcacatcttatcttagggatagattacacatgattggatattcaaaaaatctcgttcagnnnnnnnnnnnnnnnnnnn

SEQ ID NO: 26582 - DNA, 364 bp, Setaria italica
  Peptide Sequence Number=SeqID_92556
tttttgattatagactttgatcggcatgaacatgcatatagacattaatggcagaatggtttgctggaaaaatatgaaaaactcacagctgcccaacttgctcagatccagatcaggtacaatatcttggacaagatcactgggggctgaccacattcttgcatatttgcatgatgtcaaaaatcttagtcatgttctcaggatcattttcatagacctcaataagcttcaccatgagtccgagctgattgttgtaacgctcatattcttctttgcttattgtacctttgttatcctccagccattttggatatttttccacaatgtctttcatgggctcatgaagaatctccttggacaaaag

SEQ ID NO: 26583 - DNA, 921 bp, Setaria italica
  Peptide Sequence Number=SeqID_92557
aaaaaatttagaagttggtaggagaggaagggacattacttttcttcaacgggaaagaatatagctttcactcaagaaccataaagaaccatgaattcattatataattgtgaggctttacagattatccagatgaaaattatcttcaagctacagaagccaaaagggggctcgtagaggtaaagaaaactccatggaatttgcatccaaaatggaattcttcactcatcacattacacaacaatttggtgctgattcaagcatctcaggagacagctgccccaacttgctcagatccagatcaggtacaatatcttggacaagatcactggggggctgaccacattcttgcatattttgcatgatgtcaaaaatcttagtcatgttctcaggatcattttcatagacctcaataagcttcaccatgagtccgagctgattgttgtaacgctcatattcttctttgcttattgtacctttgttatcctccagccattttggatatttttccacaatgtctttcatgggctcatgaagaatctccttggacaaaagttgctgcatcattgtttcaacaatagagtccatatcctgcgcccctgcgaactcctcgaactgcttgacgaactcctccatcatggcatcgtcgtccagtgacgggacaccgccggtggccgtctcgagcccacgcaccgcctcccgcgtctcgcgcgtaagcttctcgagcgcctccgacgcgcacgcgcccctcggcagcgggggaggcttcgccccgcgccgcttcggcgccttggggtccggcagccctagccccagccccagcaccggccccttggcacccgaccccgacgccgacgcggaggcctcgctgccgctgctgcacggggagacagacgccgagtcagtgatttgcgcaaacac

SEQ ID NO: 26584 - DNA, 388 bp, Setaria italica
  Peptide Sequence Number=SeqID_92558
aaataagaaataagaaacggaacaaagaatagggacgaagacgggaacgacccgggacgagctcttcaaggccttccgcatcatcgaccaggaccgcaacggcaagatctccgacatcgacatccagcggctggccatcgagaccggcgagcacttcaccatcgacgaggtcagggagatgatagaggccgccgacgagaacggtgacggcgagatcgacctggaggagttcatgaagatgatgaagcggacgaacctcgtgtctgggttttaatcccatcattggattggtgagcaattgcccagtgcatacggttgcagcccattactccctctgttccaaattgtatatcgttttaacttttctagatttatatatattattata

SEQ ID NO: 26585 - DNA, 353 bp, Setaria italica
  Peptide Sequence Number=SeqID_92559
aaaattacaagaagggacaaggaagacaagcaagaaatttcgcggccagcttcatcgcgcgccctgaaggatcaacgccagccgatcgtcccccgagatggcgagcacgtacaaagcagccgatgagcctcctgcttccaactcctccggctaccggaaagacaaagtccgccgcaagaagctgacggcgcagaagaggaaggagatcaaagaggcgttcgacctcttcgacatcgacggctcaggcaccatcgatgcgagggagctcaacgttgcgatgagagccctgggattcgagatgacaccggaggtacttccagtctgaacattattccctctgttcttcttcagaa

SEQ ID NO: 26586 - DNA, 975 bp, Setaria italica
  Peptide Sequence Number=SeqID_92560
tgtctattctattcgtacctaggtaccgtctaacggtctaagtattcttccgtacattcgacatccagcggctggccatcgagaccggcgagcacttcaccatcgacgaggtcagggagatgatagaggccgccgacgagaacggtgacggcgagatcgacctggaggagttcatgaagatgatgaagcggacgaacctcgtgtctgggttttaatcccatcattggattggtgagcaattgcccagtgcatacggttgcagcccattactccctctgttccaaattgtatatcgttttaacttttctagatttatatatattattatacacttacaatttggaacgaagggagtagaaatttagggaacgaagggagtagaaatttagggtccgtttggctaagagcatcgttgcagattcctgctagaattagtctattgctagccaaacggtcaccacagctagtgattctagatagaaacgtttctagcgattctagtttttttgtactagctggtttcacgtgattatgctctagtatgtgtagtatgtggtaagtaaactttgtctttttaagtgcaataatttaaaattaaaaaaagctagtacttttgtgaagcctatctatttttatatttttttaaaagaaaaataatgtatatttatgtctattttagaaaccgaatcagctaggtaccatggaagtgattctatttcaacatagaaacagagaatttggatctgaaacgtttcttcggtatacatcctgtgcagttcctacctttcctcagtgaacacggtacctagatggaagctgcaagacatacttatgtgaccatagcgtagtgtagttgcacgtatatatacggtgcatgtaccttgtcttataggagtatttatgtatatatatgtattaagccatatgtattgactagtgaagaaggctcaaatatcgattctataacgagcaaat

SEQ ID NO: 26587 - DNA, 1084 bp, Setaria italica
  Peptide Sequence Number=SeqID_92561
caagagagcttcagccacaagagacccaaaaattcagagggcaggagcagcagaaataccgcggccagcttcatcgcgcgccctgaaggatcaacgccagccgatcgtcccccgagatggcgagcacgtacaaagcagccgatgagcctcctgcttccaactcctccggctaccggaaagacaaagtccgccgcaagaagctgacggcgcagaagaggaaggagatcaaagaggcgttcgacctcttcgacatcgacggctcaggcaccatcgatgcgagggagctcaacgttgcgatgagagccctgggattcgagatgacaccggagcaaatcaaccagatgatcgcggaggtggacaaggacggcagcggcaccatcgacttcgacgagttcgtgcacatgatgacggacaagatgggcgagcgggacgcccgggacgagctcttcaaggccttccgcatcatcgaccaggaccgcaacggcaagatctccgacatcgacatccagcggctggccatcgagaccggcgagcacttcaccatcgacgaggtcagggagatgatagaggccgccgacgagaacggtgacggcgagatcgacctggaggagttcatgaagatgatgaagcggacgaacctcgtgtctgggttttaatcccatcattggattggtgagcaattgcccaatcattggattgttcctacctttcctcagtgaacacggtacctagatggaagctgcaagacatacttatgtgaccatagcgtagtgtagttgcacgtatatatacggtgcatgtaccttgtcttataggagtatttatgtatatatatgtattaagccatatgtattgactagtgaagaaggctcaaatatcgattctataacgagcaaataaagcacgaataaaaacaacgaaaatgcaggggaaaactactgggccaaccagcccatggcactcgaagccgatcttgggccacttaacttttgttgttggcggagttgatgatgactattgcagaacaaatggcctatgtaatactagtacctgatcattttgtattttttacccgtgcccagcc

SEQ ID NO: 26588 - DNA, 363 bp, Setaria italica
  misc_feature (32)..(32): n is a, c, g, or t
  Peptide Sequence Number=SeqID_92562
gatctccaataccacagtagtagaaagtaagncccaaaagacagatctttagaagaaaagccagtgaagctcacaactaaaatggaagactgttggcatacaaggaaacttggatgattttgatgaagatatagattttgatgatatttacggagaaagtcattcaaaaaaagctggaccacctcggaggaacaagaagttcctgaccaacaatgttgatggcattggacagtctgggaactccctagatcaggacagtgatagggttcggtacaatagactgctggagaaggcaagtgctaaattggccaaggaaaccaagaagaacaacactaatgttcatgctggccatactacatcaag

SEQ ID NO: 26589 - DNA, 383 bp, Setaria italica
  Peptide Sequence Number=SeqID_92563
ctaaacagggactgagagcctaaacgtaaaaaggactaactaattcgaaaaaaataatgaccgaaacaagagcatgacacacaacatttacattacattcatcactgaataaatttcagtagtttcaaaattctacaaatatgttaaataatgtatgcatctctttttcaggtcaagcttcgatgacgactctccaggacgctcagcgtacctccaatggctctgctagctcccaggctcgggggctaagcgccgattactactcataacatctccaatgactcagctagtttccaaactcgggggctaaacgacaaataactactcaacgtggcttctacggctcacctggcgcataagctcgggagctggatgccaaataa

SEQ ID NO: 26590 - DNA, 678 bp, Setaria italica
  Peptide Sequence Number=SeqID_92564
ccttcggcagcatggcttaccaaatctgagtataggcaatccaactctagctggcaataggacatgacacgggctgctttcctgtacttcccagcaggaacttcaatccagttgccaccaacaatattgcaatcaatcatgaaacgaagggcaaaaagaatattgctctcatatgtcaggaaactctttgaaccaaggccttcaatcgttatgcccctttccaggatgccgcgacagctagcaaccattgtaggcaaagcgactactatcttgaggaaaggctgagattgttgtgtttggtaatgcataattgtctgcttctgcacaagctcaactctcttcacgaaccttggcacattgctacttctatttgactccttcatcctcccctcaagtgtttggtgaaagcgtgatatatcatcaggacccatcccagaaggacaaccgatatagaaatatggctcaaatccatgcacctgacagcatatgctgtgaccttctctggtgacaccaaaaatcctgagtatggctgcaggaccagatgagttgggcagcagttctttgtgactctcaccaataacataatctatttccaattgctgaaaagcgacggtgcgggagcagccggtggcgaggtctgcggggagcgcggggcgcttccaccgcgcgaggcgggac

SEQ ID NO: 26591 - DNA, 393 bp, Setaria italica
  Peptide Sequence Number=SeqID_92565
ccgtagactggcaacaagtttttggtccctatggttgatgtttggaccggtccagaagagttggaactggcatggggtcaagctaacaactttgagttcaatgtgttggacatcaggcaaactacttctccaaagtcgtcaagggtggaggtgccattagtgaccttgcttggccattatccgctgacaggcagtgacagcaggggtgatatccatgttgactccactgcatggggtcacattatcagcaatgaggaactccttgaagattttcaggagtatcccactcccaggatggctaggcttggcgatggcaccaatgtgccaattgttgggtttggcaagatgaagacagaggctttcaacatccctcacgtcgagttcgccccagat

SEQ ID NO: 26592 - DNA, 2174 bp, Setaria italica
  Peptide Sequence Number=SeqID_92566
actaccgtaagtagcatattctacatttgctaatatcccatcagaaaatggggcatcaggcagtgaaactgcttctggtatttcttctgatgatatggatttggagacatcatctggtgcgccagtgagaacagcaaccctacttgatctatattctggctgtgggggcatgtccactggactttgcttgggtgcagcacttgcaggcctgaaacttgaaacgcgatgggctgttgacctcaacagctatgcatgccagagtttaaagtacaatcatccacaaactgaggttcggaatgagaaagccgacgagtttcttgctcttcttaaggaatgggcagttctttgtgacaaatatgtccacaaagatgtgggttcggattcagcaggctcagaggatcaagaggatgatggcagccctcttgataaggatgaattcgttgtagagaagcttattgggatatgttatggtggcagtggcagagaaaatggcctctattttaaggtccaatgggcaggatatggtcctgaagaagatacatgggagcccattgataacctcagtgactgcccactgaaaattaaagaatttgtacaagaagggtacaggagaaaaattttgccattgcctggtgatgttgatgtcatttgtggaggtccaccatgccaagggataagtgggtttaaccgtttcaggaatcgtaatgagccccttaaagatgaaaaaaacaagcaaatggtgactttcatggatattgtggcatacttgaagcccaagtatgttcttatggaaaatgttgtggacatactaaaatttgctgatggctacctaggaagatatgctttgagctgcctggtcgcaatgaactaccaagcacggcttggaatgatggtggctggctgttatggtctgccacaattccggatgcgtgtgtttctttggggtgctctttcatccatggttctcccaaagtaccctcttcctacgcatgatgttgttgtgcgtggaggggctcctaatgctttttctcaaagcattgttgcatatgatgaaactcaaaggccttccttaaaaaaggccttgcttcttggcgatgctatttcagacttaccacaggttgagaattatcagcctcatgatgtaatggaatatacttcttcccccaagacagaattccagcgctatattcgacttggtcgtaaagacatgttggattggtcctttggggaggaggctggtccagatgaaggcaaactgttggatcaccagcccttacggctgaataatgatgattatgagcgtgttaaacagattcctgttaagaagggagccaatttccgagacctcaagggtgtaaaggttggagcaaacaacatagttgagtgggatccagaaattgaacgtgtgtacctgtcgtctgggaaaccactggttccggattatgcgatgtcattcatcaaggggaggtcacctaagccatttgggcgcctgtggtgggatgagacagttcctactgtcgtgaccagagcagaaccgcataaccagattatattgcatccgactcaggcaagagttcttacagtccgggagaacgcgagattgcagggcttccctgattactaccgattgtttggcccaatcaaggaaaagtacattcaagtcggcaacgcagtggctgtccctgttgcccgagcactgggctactgtctggggcaagcgttcctgggcgaatcagaggggagtcagccgctgtatgagctgcctgcaagcttcacctctgtggcacgtgtggcacaggtgggggcttcgtctgtcagcactcctgcaggggaggtggttgagcagtaaaaagaaagcaaaactgagcaaggcaaggccagggccaaccctcattgggtttgatctgggtctgcccaggaccatgttactaataatgttatgttgtcattgttctggttcttagattggatgaatgtagccatgggtggcactcgagcttgagtgcttgttgtactgtatggtgaggttgcaaaacattcattagcctagttgtagcttgtaggagacccttctcatgtcttctcaatttagcaatctgatgatttgatgctttgcatcgtgtatgtgtatttgggagaaataattaattcttattgttcgatggaagagaaac

SEQ ID NO: 26593 - DNA, 574 bp, Setaria italica
  misc_feature (13)..(13): n is a, c, g, or t
  Peptide Sequence Number=SeqID_92567
ggtccctcttcanggttggtttctgcagcagtgttcctctgagatatgttggtgctttagcagcgctgaagacagcagttgagaagtttggcagtgccaatgtttgtgttactgggcactccttgggagctggctttgcccttcaagtctgcaaggagcttgccaagcaaggagtttacgtggagtgtcatctatttaatccaccttctgtttcattggccatgggtgtaaggagcatgagtgagaaggccagctacctgtggaagaaagtcaaagcaagcctgccaatgaaggaagaagcaacaacaccccttgagagtgccaaggaggaggcgagtgacaagaagagattgcgcactgagaagaaatgggtgccacatttatacgtcaacaacagtgattacatctgctgctattacaacgctccttcttgcccttccacaacagcagatgatgcttccgacgaacagcaacaacaacacaaggcaagtgagatcgccggtgatgttgtcgcaaagctatttgtgacatcaaaaaggttaccgtactaagttaaagttttacctttagttaa

SEQ ID NO: 26594 - DNA, 469 bp, Setaria italica
  Peptide Sequence Number=SeqID_92568
tgtacaatccttctagataaagagcttcttagattgataaatttaggggttgcttgggttggatgtgatataagaacaggctcatgcatttgttcccatcccccatgcggaatgagagacaagtacaaagggtttcttggatcaacattgtgaaccttcacagcctctccaggatttaaggcaccacgagagcaacttgaatcttcatcatcgtggtggctagaacttacagtataatgtgcagaaatgggaagatagtatgccaaacacaatggggacttgataatgatgctccaatcgtatactggatccatgtgaacatctttgcctatttccttggcttctatactcaagcaaaaccatagtccatgacaagaactggaagtgccatcaatctgtgagcagaatagcaagttttctgattcatacagatctgatacacatatatctaggatctcctcctttctaa

SEQ ID NO: 26595 - DNA, 811 bp, Setaria italica
  Peptide Sequence Number=SeqID_92569
gctctattcgtatctcaggatccacttcagtgacagttgtgctactactggcactcacaaaacgaagattgctgtagaagtcaactagtgcccaaataataggctcatgaatattcagtctccatgcttcattaattacccggatatagacatgtgggtaaacttgaatgccgtttgacgttacattgccaacagcaatgtttgctttgaacacaggacgatttaaatcaggcctgctctcagtggccaaaataacaggcattgtagacagttgcaattagataatcagctgccactgtctacaatgcctgttatctaattgcaactggccaagaattaacttaaacctgctagtggtcccagaatcataaccagtcatgtatgaaatgaaaaccttctgcagatgcaagtataaaagctctctcggcttatgatcaatcaaagatattccaacaactccaagttcaacaataagctccaagggcttggcatctggctctatctcgttttctttcaatgccgatgcttggtgatcaattagttcagatccaggcgatccatatacttcctcttttcttagggaatcggtaaacttcagtatcttaatatcactagtctcaactatactgaacttgaggccatgttccctaaaactggtgtaacttccaacagggttctccaagtcaacacataggacacaagcaacatctcctttcttggtattgtcttaactattctaattagtcttttcttgttcctattattgggttctattcctaaaagtaaattaattttttcttggtttgttaaa

SEQ ID NO: 26596 - DNA, 1992 bp, Setaria italica
  misc_feature (1949)..(1992): n is a, c, g, or t
  Peptide Sequence Number=SeqID_92570
atctctcttgattcggttcatgatagcagggatgatggagctcttccgcatataccggcttctgtgcatgaccttccgcagatgtacctgaatcttaaaggcattacccacagcagataggacagggctccatacgcctaggacacctcgaggtctttgagtaggcgcagtttccagagatattttgagccttatctctgaaatatcaacaagctctattcgtatctcaggatccacttcagtgacagttgtgctactactggcactcacaaaacgaagattgctgtagaagtcaactagtgcccaaataataggctcatgaatattcagtctccatgcttcattaattacccggatatagacatgtgggtaaacttgaatgccgtttgacgttacattgccaacagcaatgtttgctttgaacacaggacgatttaaatcaggcctgctctcagtggccaaaataacaggcattgtagacagtggcagctgattatctaattgcaactggccaagaattaacttaaacctgctagtggtcccagaatcataaccagtcatgtatgaaatgaaaaccttctgcagatgcaagtataaaagctctctcggcttatgatcaatcaaagatattccaacaactccaagttcaacaataagctccaagggcttggcatctggctctatctcgttttctttcaatgccgatgcttggtgatcaattagttcagatccaggcgatccatatacttcctcttttcttagggaatcggtaaacttcagtatcttaatatcactagtctcaactatactgaacttgaggccatgttccctaaaactggtgtaacttccaacagggttctccaagtcaacacataggacacaagcaacatctcctttctggatgctaacatcaatagctttctgtccatatgggtcatccaaagaatattttctggttgaaagtggtttcacttggatccaagtatcttcacctaaaccagactggcgagtactgattgttgtactacttgtccggttctcaatcctgattggcccatatgctggccccagacggaatacaatcaagaatcttgaaccttcctcatagccgcgtatctcggctttcacaaatttcatagtaccatcctgctttctcattgctataacaatggtgtcttcttttactatctccagaggttgacaccagtctgtatccgccagtcggacctgcagtttgtcagtatcaccctcagagtacataaaggaaaccctccagtcatatgcttgtagaacctttggctcatctccagcactaagttttatgtacaaatcttgtcctaacctgtttgtgaatgttatgtacgggcgtacattgataacctttgttggaacagcttggtatgaggatggctttgaacaaagaagaatatgcatgcattttccatcatcatcgtaggcagaaatatcaaccgtgccatccatatcaccaagaggtgataattctttcacagctccaaattgtcctccatgtccacccacagatgataaaagtcctaagcccttgaaatttaatccagatgctatagtgtatccctcaaccaattcatcgtgttttatatcatagaggtgcttctcactcctttccaaatgtgaacgtgcaagaagccgcttcttctctttctttccagaggtatcaatgagtcgcagagtaagtggaggcaatctagcaaaagatatccaatagggaacatatattctgataacccttgccatcaaatagtcattatcgctgctttgttcaagcacaatttgtacaatccttctagataaagagcttcttagattgataaagaagcttgggttggatgtgatataagaacaggctcatgcatttgtatgcggaatgagagacaagttgttactaaattctttgttcctttaacctttgnnnnnnnnnnnnnnnnnnnnnnnnnnnnnnnnnnnnnnnnnnnn

SEQ ID NO: 26597 - DNA, 723 bp, Setaria italica
  Peptide Sequence Number=SeqID_92571
gcgaagaaggctgagcagggtgcaaagcaagaggatggaaaatacaagcacacagtggatctcccaaaaacaacatttgggttgagagcgaattctgttgtaagggaaccagagctccagaaattatgggaggagaatcaggttctgaaaagggtctctgaaaggaacactgggactacatttgttctccatgatggccctccttatgctaatggcgaccttcatatgggccatgcgctcaataaaatcctcaaagatattataaatcgctacaagctgctacagaatcataaagtgtcttttgttcctgggtgggattgccacggccttccaatagaactaaaagttttgaagtcaatggataaggaaactcttgctgctcttacacccataaaattaaggcaaaaagctgcaaaatttgctaaagcaacagtcgatgcacaaatgaaatctttcaagcggtatggcatatgggctgattgggacaatccttacctaactctgtcaccagaatatgaagctgctcagttggaagtgtttggtcaaatggttatgaaaggatatatctatagaggacgaaagcccgtccattggagtccttcatcacgtacagctttggcagaagctgaacttgagtattccgaaaaccacatttccagaagcatatatgctgcattcaagattaccaatccatctaaatctgggatgctggacgaatttctt

SEQ ID NO: 26598 - DNA, 279 bp, Setaria italica
  Peptide Sequence Number=SeqID_92572
ttgtgttgcttttcttggacaggttccaattgctggaccatttcgatttcctcgcgtggaccatcaattcccacgagatccgtcgcctccgcaatgagtgcaggtgttcgtggatccaagaccactgggtcaggtgaggcggcgaggtaccggtggatggcatagcgtttggcccgatcgctctgctcgattacaagaaacttgagttcttcaatctccattgctattcgccggtactgcgacaccatcttcacctttcgcacgagcttgcgaaacaaa

SEQ ID NO: 26599 - DNA, 732 bp, Setaria italica
  Peptide Sequence Number=SeqID_92573
tgcggcacctcgagacggccgggcggctggctctggccgacctgctccggcgccaggcggaggcggggcggccggtggcgtgcgtcgtcgggaacccgttcctgccgtgggcgaccgacgtcgccgctgacgccggcattaccacggcggtgctgtgggtgcagtcgtgcgcggtgttctcgatctattaccacttcgtgcacgggctcgctgagttcccgcgtgaggacgacctcgacgcgcggttcgcgctcccgggcctcccgggcctgtccctcgccgacgtgccgtcgttcctgctcccgtcgcacccgtacaggattctcggcgacacgatacaggaccagttccgaaacatgggcagggcgtcgtgggtgttcgtcaactccttcgccgagctcgagcgcgacgtggtcgccgcgctcccgagcgtcacgccgcgcccgccggagctcatccctgtgggtccgctagtcgagctcgggggcccggacgacgatgacgcggtggcagtgcgcggcgacctgatcaaggcggcagacgactgcgtggcgtggctggatgcgcaggcgccgcgctccgtcgtgtacgcgtcgttgggtagcatcgtcatgctctccgccgaggcggtcgccgagatggcgcacggtctcgcgtccaccggtcggcccttcctgtgggtggtgcggccggatacccagccgctgctcccggagggattcttggacgccg

SEQ ID NO: 26600 - DNA, 644 bp, Setaria italica
  Peptide Sequence Number=SeqID_92574
gagatccaacaatatttggagatttttcaactgaggccaataccacatttatctttgctcgtcttaaacatcaaccagaattatgatctccatctcttctgacccatttgcgattggaattagaacatgagggttgtgatcaacagaccactcaagttcattgacttctgtgctcctttcaaggtcaccatcaatttgtgtcatcaaaactctgtccacatcttcagctgcatgaggcccaaacatttgctcaacaaatgataaagcgaactggaatgatgtccctggcccacgacttgtagtgagctctcctgaaacctgaacatttgattcgacagctcggaatgtagggagatatcctataaaagatgggtgacaggtgatcttttttctcttgtggagaccccacggcattagaacaactgcaggtgcagcacatatagcaccatacagtcttttctcctcagcctgacgaaccatgatcctctgaaggatatcactgtctctcaaacgcactgaaccaggcattcctcccgggagagccacgaggtcgaacacctggtcggcgcaggaggcaatgtgcgtgtccgcgacgatgcgggagccgcaggacgcctccacttcgaggccatcctcgacggagg

SEQ ID NO: 26601 - DNA, 210 bp, Setaria italica
  Peptide Sequence Number=SeqID_92575
cttcttcttccttctctcccgccttctcctctcggcagcagctgccacctagctcttcaaactcaaatcctactcccacacactggtccagctcgcctgcgagctcgagcagcgatatccttattcagttgatcgatccacgatcagcgctgagagagaaatcaagcaggggacgtgatctcgagagagagaaagaacctgatggacatg

SEQ ID NO: 26602 - DNA, 602 bp, Setaria italica
  Peptide Sequence Number=SeqID_92576
caaaaaagagtgtgtgacaataattgtagctgaacgtaaattaactaaactactagtcccatccgcactaatgcaaacatgcagagagtaccaataggatgagtgatgtaccaaaaggatgaaactattgtttgctactgtaactttgatttctacagtgtttgtttctggacatgatgatatggaggagttagcataacaactggtggtttgtattagattagatatgaccccccttcatcacctggacttattaacaatgtggaaaaagggtttagggttgtaatgtggcagcaatgcggaaaaagggtaaacaatagagcacctacggtttttcatgtcttaaaactaacactaacagattaagtaattaataacacaaatcaactacggataagccattaagaacagaagcattttatagtaatgcataagaatgtttgtatgtcagattttcaagaaacaaaacatcgagttcaaatgattatcacatttcagcatcttcataggctaaatgacattgctaacctgttgtttcactttcttgaaatccaacaaacgcaaatgcttcaatttatggatgacatatagcctgtagtctg

SEQ ID NO: 26603 - DNA, 1049 bp, Setaria italica
  Peptide Sequence Number=SeqID_92577
ttttttttttttggtttgaaccatggattccttgctcctcttaccaaacaaaaataggccactattcatatgaatgataattgatatgacaatacaatgatactgttgggttgagttgagtttgagctgaacaccaactttgacaaatctaattccagataatacacaacaagtagtaaattacattacaagagattttacacataaaaggaagaacgtggcaacggactcacgatgagcaccataaggcgccatgatcaaactcaagcctcatcagttgcaacaccctatctttgagggaaatgaaaggagttatcgttcagtggaacaacaacgctactaccacactcaagacagtaatccatgcaagcaagctgctttgagcgtgttgtccaccgtttgcagtggtaatgtctctctgagggacatctgcgcacgaaagccccaacttgccttccttgcactcgctggagaacagccctggtgggtacttgccatagaggttgatgtaggtgaacattgttgttgcgcagctgctgctgtcatcattgaggtacatataaaatgggcatgcgaattccttgagagcggcacagcattgtttggcaggaaattttggccctttgcacttgcttgtgatgattgtgtagttttggaactcaaaattcactgggcaatccttcctggcctgcaacaagctcctcccagtggatccggcgctcacctggaacacgccgtcggacaagaaagggccagcggcagaggcgacccctgccagggcggcggccgagaggaggaagaggagaaggcgcccgcacgccaccgccatcgcccacgcgtcctcccaccggaagcagaactcgctgccgccgccgccgaccgtgagactctaccagcggggctgccggagggtagtggcctcgagggaatggagctcgggagcttggcggagctaggccgacgtcgatgacggtgatagaggattagaggtggaacgcgggatgctggacgccttcgcttgtggcgtttcgcaagctctaactctcgtg

SEQ ID NO: 26604 - DNA, 451 bp, Setaria italica
  misc_feature (440)..(440): n is a, c, g, or t
  Peptide Sequence Number=SeqID_92578
gccattctttgtattcattaacctcttgacagcaatctgagagccatcccaaacttgtccccaatacacactcccaagtggcccttgtccaatcttgttatcgtaattgaagctgtttgttgccgatcgaagctccctcaacgagaacacccaccgcaacgatccgctgccttcgtcagacaggtcctcccgggaggcggccctggcgcagcagaggagcctgcgggcggcccgcgacagcttcgggtgcatccccgccggcggcgccgctcctgcgcgtgcgaacggaggaggaggaggaggagcggagtggggaacttggactcgacgactcggaaggagctgtggggtggggcggggtggaaggtggtggccggtggggtgggggacttgggctagaggaagaagagggagagcagagccgagccgagacgtaaacngcggagaccag

SEQ ID NO: 26605 - DNA, 399 bp, Setaria italica
  Peptide Sequence Number=SeqID_92579
cgacagcagcacgcggcggcggagaacgggggatcggtgccccccgaccgtggcggccgtggccgcggtcggggagaggaggccgctgtcggtgacgctgcggctggccacggcggcgctcagcctcgcggccttctcggtcatcgccagcgcccggacgtccgggtgggccggcgactcctacgcccgccaccagcagtacaggtacgccgtcgcagtgaacgtgatcgtctgcgcctactcgatcgcgcaatccttcggcgagatccgccgcctgatctcacccacgttcatattccggagcaggccaagctactactgcagcctgttcctggaccaggcaagtgcagtgcgccgcccccactcattcctgaactgaaaccgctcatgtacaaggga

SEQ ID NO: 26606 - DNA, 552 bp, Setaria italica
  Peptide Sequence Number=SeqID_92580
ctgcggaagcggatggcggacttcgccagggagagggactgggagcagttccactcccctaggaacctgctcctcgccctggttggagagatgggggagctatctgagatattccaatggaaaggggaggtgcccaaggggctgccaggctgggatgaggccgagaaggagcacttgggcgaggagcttgccgacgtgctcctctacctggtccggctgtcggacatgtgtggagtcgaccttggcaaggctgccctgcgcaagatggagatcaatgcacgcaaatacccagttggccagtgcaagggctcatccaagaagcacacccactatggctccactaacagtgttaccgctagcgccagggacaatgttaacaccatgaacaaggaggataacaatggagtctaaacagacccagagatccttgaatggttggctggtccctgcgttacatgatctaggttaagtgctgatgaaagagggatcctctattttggtggtaaatgaacaagtatgtgggttcaagttccactagatattagatggact

SEQ ID NO: 26607 - DNA, 872 bp, Setaria italica
  Peptide Sequence Number=SeqID_92581
actttgcattcctgtctcaaaagatattgttctctgtagtgccttcacatcggctgacttgtgaaaccaagtaccagcaagatgataaccagatagaaaagatgaggtatggaacgcaaaaaggagcagcacgatggctaatccaaatggagacaaaacagccttaatatttatagctagtggtgagccaacacacaatgcggtgacaaatactgataacggagggagaaatggctgaatagctgcacagagccttggaaggaatctattcaggagcaatccagctgcaatcggagcaacaactatttgaacaatgctggacatcatccctttgacatctacaggtaatttctggccaataagaaagtaagataatgttggggtgacaaaaactgcagtagcggttgacaatgctgtcataacaatgctgagaggagccatatgtggatccgtcaggaaagttgcatagtttgaaagctgtgctccgctcacacatgaaactaacatgataccagcacctagagcagttggaaaattaagaactgcaactgcaagagtaccaaaaaggaatccaaacagaggcttgatgacgaactgtccaatatagccggcagcaatagcatctggcctttttattgcttcaacaaaatccttgacgcttgagttcacaccaacagaaaacatcaagaatcccaaagctggtgcataatacctggttgtgaaccatgtaaaagaaggcgggtacaccagagccagaattgtgctcccgagcactatatggggaataacggtgttagcactccttaggatcttcagcaaatctactttaccctcctcaggtagtggaggagggtaaagtagatttgctgaag

SEQ ID NO: 26608 - DNA, 249 bp, Setaria italica
  Peptide Sequence Number=SeqID_92582
ttagagtcagaagattacagccactccagtggtgatacttcagcccaggaccaggagtttcagtttccccgggcaccttcggagaagagctgggaggtggccaacgacgaggatcagctgagcaatccgtggagccctccgaggagcgcggtgacgacgctggaggagcttatggtgctcagccggagactgaggtgcggacaaggattgccagttgatgtcgggaagaagagcctctcctccgtggag

SEQ ID NO: 26609 - DNA, 304 bp, Setaria italica
  Peptide Sequence Number=SeqID_92583
cggcggtggtgctgtgatgacagatgcggtggaggggccaggcggcgcggagacggatgccgccgccgccgctgccgcggccacagcgtggtgggaatcggaggccaccaggctagggtcgggcgcctcgccgtgggcgaaatcggatagcgcgccaccggtgctcttgaggcggacggtgtagccggtgtgggcggcggcgaaggcgttccgcgccaccacggcgtccgccatcagccgcttccggtcccggcaccggcacacggcctcctcctggtcgatcttggactgcccgcaccccatc

SEQ ID NO: 26610 - DNA, 240 bp, Setaria italica
  Peptide Sequence Number=SeqID_92584
ttgcatttttatatctaggaagcctcatatatagtaaaatacccaaagaagttacaaggccaaaatgcaacagaagtactgcaaataagcccagaactcagaagccatacaaaataacgaaaagaacagcagggccatacatgcttatagtagattacagatgaagagaggtatcgacatctacatcactcctatagcctgaattctgcattcctccccacgagcttgctgctggcggcg

SEQ ID NO: 26611 - DNA, 2240 bp, Setaria italica
  Peptide Sequence Number=SeqID_92585
ttttagggaaacttccttttttaatctgaattactgtccttccggtctgaaggaggaaacaaacaacaatggacatcccattcacacggggatgaatactcgaaaaatgaaactagatagcagttgcagagaaacttgaagagttccttcttatttttcccaagaaaaaaaggcgaacagtggacaactgacgcatccggaataaaaacgtggcgccaagaactccggcgacgacgagacacccgacgactacgaccatgacacgatacaacaccgggcggagggttaggttaccaacgccggcgactgacaaacttgctggcgacttgtttcaccagggacggtacaggggagcttctgctgcttcttcatcgtcagacggtgagcccgcgcatgaactcccactcctcctcatcttcttcctcggcggcgccggcggccgacccctccgagtcgctgctcatgccgctgctctccccgctggacatcaccgcggcctcggggtcgaacaccaggtacggcattgcgccgaacgccctggcgagcgacgcggccgtggcgtcgtcggtcctctgcttcagcacctcgaacatcacctcgggctcgtgctgcatcgcgcggagcacgtcggcgcacgagggccccgccgccgcgcgcgtcaccgcgaagcagtgggggccgtcgctttgcgtcacgcgcaccacgctgggcccgccgaagaggttgtgcagcccgccgagggcctcctggtaggcgcccccgaggaacatgcccaggtagtagccgcgggtggcgtgggtggggagctcgtgcagcggcaggctgtgcctcccgccgatgaactcgcaaaccttgccgtcgctgtcgcaggtgaggtcggagaggacgccgtccacggccgggcgctcctgcaggcgctggatgggaatgatggggaactgctgcccgatggcccacatgtccggcagggaggtgaacactgataggttgatgtggtaggtgcgcggcgcctcgggagcgcccatgccacgggcgacgatctcgcagaaggcgtcgactgcggcgaggtgctccaggccaagaaccccctccttgaactgctcggcggagcggcgcttcagctggtcaacgtagaggccgcaggtgtcgtagtcgccgcgcacggcggcggccatgacgttgcggtagtcggcgcggcagtcgtcggtgagctcgtcgagcaggtaggccgtggccgcatcaagctgcccgggcgccgtggccgagaaggcctcgaacaccaggaccgagtggtgcgacaccagcgcgcggccgctctcgctgcagatgatggggtgctgcacccccttgcggtcacagacgcggccgacggcggcgaccacggccaccgcgtactcctcgaggctgtaggccaccgacatgtcggtctgcgccgagtgggtcccgtcgtagtcgatgccgaggccgccgccaacgtcgatgacgcgcatgccagcgccgaggcgggcgagctcgcagtagatctgcgcggcctcgccgacgccgtcggagagcagggcggtggtggggatctgggagccaatgtggaagtgcaggagctggaggcagtcgagcataccaacggccttgagcttggtgaccacggacagtatctgggcggcgttgaggccgaacttgcccttctccccggaggtggagccgaagtggccggcgtgcttggtgcgcagcttggcgcgcatgccgacgacggggcgcacgccgaggcggcggctggcctcgaggacgatgtcgagctcctcctcctgctcgagcacgatgacggtgttgaggcccatggtgcgcgccgtgagcgcgagcgagacgtagccgtcgtccttgtagccgttgcagacgaggagggcgtccgggttgccgcgcgcggcaaggcagctcatggcgaggagcagctccggcttggagccggcctcgaggccgaagcggaagggctcgccgaactcgacaatgtcctcgacgacgtacctatcctgattgcacttgaccgggtacacgccctggtacctggagccgtagccggtggagcggacggcgtagtcgaaggcggcgttgagggtctcgacgcggtggcgcagcacgtcggggaagcgcacgagcaggggcagcggcaggccgagccccccgccgtcgcgcgggccggcggccttggccacgaccttggccaggtcgatctcctgccccggcag

SEQ ID NO: 26612 - DNA, 278 bp, Setaria italica
  Peptide Sequence Number=SeqID_92586
tcttcagcagcacaggctccatgcctgaaatccaccccggttgagaaaccatcaggcagctgattgctcaggaaggggttgcacttcactgacaggttgcgcaggtgtttgagagcagaaaaggataccggaatagatccagtgaaattattgtcttgcagatcaatttcagttaggtccgttaagttaccaatggttgccggaatctggccttgcaaattcttcgaagaaaagttcagcttgacgacgacacggacgccatccttgggttcgcaaga

SEQ ID NO: 26613 - DNA, 546 bp, Setaria italica
  Peptide Sequence Number=SeqID_92587
cgccgccgagctgcccgacgagcgacatgggcccccagccgaggcccaagagccctgccgctccgacgaagaggccgtggttgcggtggccgcagccgatggcgacgccctcgaccgccgtgcccccgaccgtgagcgtctcgagcgcgagcacgccgttggtgtacgacccgtccccgtacgacacctcgtactgacaccggtcggagtcgccgcacccggagctggagagcatccggcagatggccgagccgcacgacacggcggagaaggtcgtggaggaggcggggtcgaagagagggtcggcctgcgcgtagcactgcgagcacggcttgcactgcacccagatgacgtcactgccggagtccaccacgaggtactgctccgtgggcggcgagccgacgccaacgcggacgaaatactcgccgcttccctcgtcgaggccggacaccacctcggagcccaggtccgtcgtcggcaggtacgtcggggacaggcgcctcgccaggtactcggcgcgcgcattgtcgcgggcgacgcggtcga

SEQ ID NO: 26614 - DNA, 761 bp, Setaria italica
  Peptide Sequence Number=SeqID_92588
gttcgtttgtcagctaattctttcaccagtctacagaaggtctctagtgcttgaagacgattaaaacagcagtgcagttatccttgcatcgcctctcacgaacagcctccttcacgaggcggcgtactgcaagtgaggctgaagaggtctcctgcagtatgtcattcgaataaaatgcgggaaaacagcaaatgaaaagctatgggtgaaaaacagaaaaagaactataactgaattaaagagaccattatctatgttcaagtatagtgttcaggtttggtaataccagcatgtacacaggctacgtagactgggtaaacatcaaatcatcaaatgatctactaccagtgtctttctgattatattctctggttttcctactagctgaaaaatactggagaaatgaaacgactaaatctggattttggattcgctgatactgaaatagaaagaaccttcaactgattctgaacaaattcaacagcatcacttggtccaaatactccccataagccatcacaccctagaatgatgaaatgatctttcttggtaagttcaaaagagtggacgtctggggttgaaatcaatccaaccttcttaaactggcgatcaccaaaagctcttgatacttcaattacgaccttgtaatcttccattagaaccaacagaacctccagccttctggattcgggagcgctcctgcggaaagatggccttagtgttctcttgtcaaaacatagccttagctggcttttagctca

SEQ ID NO: 26615 - DNA, 1614 bp, Setaria italica
  Peptide Sequence Number=SeqID_92589
aaatagaaagaaccttcaactgattctgaacaaattcaacagcatcacttggtccaaaatacctgggcacacaggtataacgcaaatgtcagaattgccttaaacatttgactgaagcagttcagaaacaataattggtaccaaacaaattaaatagggaaacaaacatactccccataagccatcacaccctagaatgatgaaatgatctttcttggtaagttcaaaagagtggacgtctggggttgaaatcaatccaacctacataatatttgaagagtaaactgacaaatgaacaatgacagcaaaatatgaatgccagcatttttctctgtctggtatggaccttttaagagtgtgcgaaaaatcattcagtacaaaaaggacaaccctttctttttagctaagttaagatgtggatctcttgtactaatacaaatgcattaaaagttgtgcatgacacagtaacaagaaagataattaaaaattgtgacaatacagcagatttaggtctatgtcaaagattgcttgtgtttccatcactcaactgtgctgacgaattaacttatttatgcacattattttttgcaaaggtctgtattagaaaaaggtaaatcaccatgtaggaaacaataactcaactaatcacttttagcttagaaatttacataaccaattttctttagcattatggcattatgcaaaaaaaggtcaaccttggcgaaactaagacattttgcatggagctcatcaaagttcaagcaaaagaggactggaacctgggttgctgatgcacattgcacatttgcacatcctcacctcccttgaaaactgagctaactcagttcctcattacagacaacaaaggtttcaagaagcaatattcttaatagcatatacccgcaacaatcagtgaggctacatttctagcatacaaagttcagctcatgggacacttcactggttaacctagatcaacacactaaggcacagatctgcaataataatattttattattaaaaaaacattttgcgatcagtgctgtacattgcactaaaaaatacatagttttcagcataaactagtgactccattaattattaatgctgaaaagtaacctattttctatataaacaaataagttgtgaccaaataagcttgtatcagcaaaccttcttaaactggcgatcaccaaaagctcttgatacttcaatacgaccttgtaatcttccattagaaccaacagaacctccagccttctggattcgggagcgctcctgcggaaagatggccttatgttctcttgtcaaaacaatagcctttagctggcttttagtctcatcaacgacaccttcaccatcagttgaaatagaacgagccaataccgctttagcatctccagcattagcaactacaaccatctgtcccaagatccaaacacaaacagctgtcgcaccatcttgccaatttcctttagtactttcttgcagtaaagattcatcagttcggcggaaaccttcaattatggccttcttgcagctttaacatccatcaactcacgtggtaatccagcagcgatgacattctgatgcaagtgcttctgtgcataatct

SEQ ID NO: 26616 - DNA, 504 bp, Setaria italica
  misc_feature (1)..(45): n is a, c, g, or t
  Peptide Sequence Number=SeqID_92590
nnnnnnnnnnnnnnnnnnnnnnnnnnnnnnnnnnnnnnnnnnnnnaacttaaacttatccaatttccaaatgaatatggatagtttgttaataggccacatagaaacaaacaaaacaaaagtttcaaaaaaaagaagaaacaaacaaaacaagagttccatgttcaactatcttcagttcaaacattgttcgttgtcagctaattctttcacagtctacagaaggtctctagtgcttgaagacgattaaaacagcagtgcagttatccttgcatcgcctctcacgaacagcctccttcacgaggcggcgtactgcaagtgaggctgaagaggtctccttcaactgattctgaacaaattcaacagcatcacttggtccaaatactccccataagccatcacaccctagaatgatgaaatgatctttcttggtaagttcaaaagagtggacgtctggggttgaaatcaatccaaccttcttaaacttggtcgattctacctaaaa

SEQ ID NO: 26617 - DNA, 1352 bp, Setaria italica
  Peptide Sequence Number=SeqID_92591
gcgctttccaatgtccaggagtacagtgaacctgctgaagagagttctgcacagctgctcaccagaatacacttagtcatggtccatatcccctacggaaaattgtgaatggaaaaatccatcttcattggttctagaggaaaacaatggttcttgaacaaagttcaaaaatccaaacatttccttgaaatatgctctgatgtgcagttaaggatctaagagacaacgaaccatagttcagacagcacggtactcaataaacaaactcaacttctgaaccaacactgcttgggaaccatatacaggctttctcccttcactgatccaattcttctccaaacttgctggttttgcatttgctcgcaggtcatcgatgaatgcagaaactatttgataaactgaagtcctaagaacatccgccatggcacaagctttcttgtgcaaaccaacttgcttgcttgcaattgcagttccagtgccagttcgtactgtggagaactgagcccacctaatgctttcaggacccaagtgcacaggcagtgggttcgttttctttcctaaacatgcctcaattgccactagagcagatagcaatgtagtcatcacggcagcattgcagccagtgagctgagcaactccataacgatcctcctggcgtgagcgcgcggttaatcctgccaatgtccgagcacaccacgtgcatatctgagaatcatcaaatgcattgatgagtacgtactgttgcgatatcaattctggatcgtattcaagggcttgagcgacttttgaagaaaacccctcaagtggcttcaaacaagctgtcacaattcttttatatgtttcaccagattcttcaaagaaggcagctcggcgccaaggttccaagttacactcagataccacacacaaatcttggtaagcaagatattgtattaatgatcgtggatcgctttgttccaatgtttccaggataaattcagtgggattagtctcagcagcggcagtgctctgaggtggagcaaaactgcacctccttgtatgtacgacctggacaaaatgatggctatttccaaacagaaggaaacaccagcagtcactataaaaatgctgatctgagtgagtatttggcttccaatagagcctccgtttctgaattgccaaggaaggagtaaaatcagggcaaatgaaaggcagaaggcctgaagcgacacttttagggactttttcccagatggcagaagtcccatcttcaatccgtagaataaaggccgctgcacgacggggaactggagcaaccacctccgacggccaaagtagtgcgcggcgaagacggcacccagcacggccccgcg

SEQ ID NO: 26618 - DNA, 312 bp, Setaria italica
  Peptide Sequence Number=SeqID_92592
ccagcacaccagcagatggttcagtgccgtgacgccagagctcaccatcaccgggagtactatgttttgtgtctggaggaaccggacatggcactgcagcggcccatacgcgaacagagccggaatcatccaccggatgtagctccctgccccggatgcaatctctgggtcctgaccaaagagtagaaggatctggccggtgtacgaccagattaccgcgacgacaacactcaccagagtgagcacaaggatggctctctgcttgtagatgccaagaagagagtattgctttgctccgaatgcttgcccaca

SEQ ID NO: 26619 - DNA, 534 bp, Setaria italica
  Peptide Sequence Number=SeqID_92593
ggagagagcaaatgcctttcagcacacctaggtactacaataaatcatgtgcccttctttgacaactaaattttgaaagaaaccatatgggatcaactaatagtacaaaagatagcgatactctgtcaagttatcaccgatatcatcgccaaaagataccttataatcactggtcggacgatggaaactttatgtactggatggattcacatctgattccactctaacaccatctgatctctgagaccgaaggtgtttgggtagtagacttggtggtggaggtggcagttcttcactcttggtgtcagatgccaaatgcttctgcggagcttgatggtttgctgcctctaaaatattctccaaatatgtggcatcttttgttttgggatacctatctgcagcttttgaaggataatcacagttctcctcagagaaaaactggaagagctcaagggtgccttctagcccatattctctgtcgaatcctccatttacagcaatatttgctatcggtgacccatatttgtcgtgaaa

SEQ ID NO: 26620 - DNA, 877 bp, Setaria italica
  Peptide Sequence Number=SeqID_92594
cagatggactgaagtgaagtaagagtgatctagattcaatagctgatgatgctcaatgatcccaagctcacgaacattgcaatgcagagcatagcaaacacatcggttagctctgtcatcgtcaagggaaacactactacttgaggtccattgaaagttgtccagaggaatacagccacggtgcagtagtaaattgtctatgaatttcatgaatcctatcttgctagtgaattcgcgtccttcaatgttaaggcgccgcaatggtttccaaacgtggagccatctcatggacagcacgcatgtctgtacagcctcccgtgctgtcgtgaaagacagtatatggtggagcaactcatcagggaggctgctgatcacgtcacaggtgctgacctcaagagcttttggtctcatgtgcttgttggacatcctcgtcactgaaaatctcactccaagggacatctactatagtgtgtggtgaacaatagcctgaacatggagaaataaatctccggcgctcgttgtaccggcgcgcgcgcgcgacggcttgagtcgccgttcgccgtcgtcgtggccgagaatgcaggctgtggtcgatacgcccgttgccgggcgtggccctagcggtccatctgcgccgccgcagcctggagtgaggccggcacgacggtaactggtgtgagagcgagtttccaaaacattctttaccaaaactatgtttcgaagggctctactaaaaaaaattttcctcaaaatcatcacatctcacagcagattcttgataataaatttcccaatattttaaaactcgccacatcagcacgcgtgcccccttgagctgggccgccccctcatcaatggccgccaccccgccgctccg

SEQ ID NO: 26621 - DNA, 972 bp, Setaria italica
  misc_feature (1)..(75): n is a, c, g, or t
  Peptide Sequence Number=SeqID_92595
nnnnnnnnnnnnnnnnnnnnnnnnnnnnnnnnnnnnnnnnnnnnnnnnnnnnnnnnnnnnnnnnnnnnnnnnnnngaattttagccataccatgctggaacatacacggaaaatttatgaaactgatcacatggctgaggggaattccactaagaaattccacaaagcacaatcgaactatcattgtttattccatcaaacaactacctgagatactgtaatcctgtattacaacagcaacagagctaattctgccctggtaggcgatagaattcgagtgaatatggactcaacacacttaacaacaggtaaaggatttgcctcaaatgctttagctcaaaactattctttcaagaaagtaacctgatcccattctaggcaatgtctctgcaacagaatctggcgggttgctacgtatctctgccctattcagttgcactgaccaggaggaactccccctcgcaaaccaggtcaccaccaacataagcttttccttccatctttgcaagtccaaatctcttctggtactttgtcagagtcattctcatgatcaacgtgtccccagcaattactggcttcctgaacctaactttatcaatccctgcaaaaaagaagttgtcccgggatccaccgacttcaggttgcagcatcaccagacccccaacctgggccatagcctcaaccatgagaacaccaggcattatggggcgttcagggaaatgtcctgggaagaagttatcatttatggtaacattcttgatccccactgcatattctccagccttgtattcaattactctatcaaccaaaaggaatgggaacctgtgggggaggatctcgcggatctggttgatgtccatgacgctggggaagggagggaaccttttctcgattgggaccgcctccggcgccgtctccacgctgtcgccgtcagcggcgcggcgcgcggcgaggaccaggcgccgcgccgga

SEQ ID NO: 26622 - DNA, 507 bp, Setaria italica
  Peptide Sequence Number=SeqID_92596
taaagaacgaataattttgtttttgcatttcaccagttctgcatgtgggtacatatttgattcaatgtagactgttgctctcacttttatgtttcactagatctaaaattattattaaactgttatcaatgaaaaatacttaactttgtgtggttatagttgaataacatcatttgacttgcaggtgagtgcactgtgcccgctgttccgttgtttacacctacagcatatttccaataattttcgagtccaaggagatccctttgattcctgtaacagaagttgtggggaaccttgcttgagggtgtggcgtgctatgttcctcttgacctggacgatatggaatggtgaaactatataatgtacaaatgctcagttgtattcaaaatggatggttgtaaccataactgaggttgctcttattgattagtataactttgctaaataactatggtatcggttgttgccttattggattcgatgttcattttttctaaaaaaaaaaaa

SEQ ID NO: 26623 - DNA, 512 bp, Setaria italica
  Peptide Sequence Number=SeqID_92597
ctctctcctgtgtgtctcccgactccagcggctgcggcggcgatctagagccttcttgctccatccttctgttctccacagaccacaggcaactacgctgctcaaagaatcgaatcatggaaggaggaggtagcaccacgcgcttctaccgcggcaccaccaccactctcgccacaaaccccacttctgctgcgaatggggcacagaaaggggatagggaggctgctgttgatgctgagatagcgcgggttaacaagctaccagcccatagctcctatgctatacaccgcatgaaggtgctaaacaaacttcgccatctgttgtctatcaagaggaccacatctcaagatgaggagctcgaacttctttttgcaaccctttcaatctgaagtgtattcctgataagtcaatattttaaccctactaggtgagtgcactgtgatgatattgtgtttttgtcattttcacctagttctgcatgtgggtacatatttgattcaatgtagactgtt

SEQ ID NO: 26624 - DNA, 551 bp, Setaria italica
  Peptide Sequence Number=SeqID_92598
ccatggccaccgctatggtaacccgtcttccatgggctgttaatgagctgcccctgctcctaccctgcacgccactactactccgacacagcctcactggtcacagccccactcttcacctgctgccaccaccaggctggccagcttccctagtcgtccttctaagcctggagccctggaagcacattcactaagcccctaacccaaatcccaaaaccctaacttccctggagccttggtggagaaaaccccttcccccaaccataaccctgaccttgctaaagctcgcttgcagctttggagaagagggtggagagagggtaagaagagttggttacttggtttgtaagaaaatcacacgacaccagtcaattatagaagtcccgtttctttatgagtatctcacatactctgtctcacttccacttctagtcactgaggtatgctttagagtttacccggcgcccagtgacagtgagaaccataggcttttcaccacaaaaacatcttactcgcataaattttgcagcgtatgaacagccacagcccac

SEQ ID NO: 26625 - DNA, 457 bp, Setaria italica
  Peptide Sequence Number=SeqID_92599
ttaacactcatggggaggcttgagatacatgatgcgatatgcctttctaggcggtgtaaatgccttcccattgaaaaggaaagactttggatagcatgaccctgatccttgctggtacatgaagcctttgcaggtgcaatcactcctacatatgttcttgcaggcttgcaaggatacctggtcaacatgcatctgatcggatccccaatagtcggtgcctggaagtggcaagaacttgacaggttgcacttgctcgacagtacagttaatgtctactagaggcctacagccttggctccagttcccagggttgctcatcgcataacccggtgggcacaagcatgtaggcgcaggcaagtagtggcagatcccatttggaccacagaagccatgaatattgcagggctgagacattgcaatccaggaaaccaaccatctcccatctgaactgttcaag

SEQ ID NO: 26626 - DNA, 951 bp, Setaria italica
  misc_feature (1)..(1): n is a, c, g, or t
  Peptide Sequence Number=SeqID_92600
ncctttgcagcaagtttgaacttagaagatggccctgcaccctccgactcaacttcttcagatggtgatgcatctgaaaatccgctttcccaaaagctgagctctgatgagttgaagtctcttttggctgattcagaacgaagtaagcttttgaggaggctcagtgaagcaaatcaatataaccggttcctcaagagacagttgcaactaaaggatgatgcagtcgtaaagttcaaaagtgaacttgccgctttggaactagaactgcaggctctggttggcctagccgaagagattgctaattttgatgttccgttagggtctaggaagataaatggaaaatatattcaatctcaccttctctccagattagaagctgttcatggtaaggttatggaccagataaaggatgttgactctttaaagccccaagaaatttctgtatactgggttggcatggccgagaatgtgcagattatgggctcgttcgacggatggtcccagggtgagacaatgtccagggagtattcaggtgactatggaagattctctgcgactctgaagctaagacctggaaggtatgagatcaagttcttggtcgatggggagtggagattgtcacctgaataccccatggctggcgagggactgacgcagaacaatattattgtcgtggagtagcagatttttctcctctagcattttagtaattctgtagagctaaaaccgtgccgaagtgtatccccatgccttcttacacctgtaatattttgctaccgtgctgttgcctcacagaactcaatgttttgtgaaacgcaagcctccagaagcatgatgtatatttggcactcaagattatctagccctctgttcttattacgtggtgtatattcaacattaccttgatcactaccaattaataacaaatcttaacggatccaaatatacatc

SEQ ID NO: 26627 - DNA, 1026 bp, Setaria italica
  Peptide Sequence Number=SeqID_92601
ccagcccgagctgtgaatccaacccactggccgctggtgcccccctcgttcagagagagtctcggaagacgaaaagcagcagccaaaaaattgtggccgcgaacggaggcgaccgcgccgacggccacaccgcacgagctcttcgcctccgtccctcttcccctccccgccgccggcctctcgctccgcccctggcaggaggcaggtcctccgcctcaccccgcgtcctgtatccagggctcaaggctccagcttcaggccgcccccttacatctcgcattcgcggaaggtagtttcagggcaacgttatggaatgcttaacagcaagttttccaagaaatgtgggaaaagagcacaacttcgtatgttcaagtaagttggggtctgaaaaccaatgggttcccagaaggatctgctgctatgtccccagttcgacaaactccagtcaacagcacaagttcactactacgacatatcccatgagcccaactattggaagacgttcacgctggagatcctttgcagcaagtttgaacttagaagatggccctgcaccctccgactcaacttcttcagatggtgatgcatctgaaaatccgctttcccaaaagctgagctctgatgagttgaagtctcttttggctgattcagaacgaagtaagcttttgaggaggctcagtgaagcaaatcaatataaccggttcctcaagagacaggttctttttagtgttctcttgcaaatagtctggtagactgcatcatcacatatttgttcatagtgaactgtgttcttcctactttttagtctcccaaatactaaggtgtcatatgaacagccaatggctgctcaatttcttaatctgttggatacagcatctagtcattttaagaatacagcatccaatcactgtgtttgctatcatgatgtggtcagcaaatacagtggatttgctctgatcatgtatcagatatggtttatcggaaggatatagagtaattgctatgtcaagttagcattgtgcaaat

SEQ ID NO: 26628 - DNA, 431 bp, Setaria italica
  Peptide Sequence Number=SeqID_92602
gtcagaagtcaaactcaggtacaagcagagaactggctgatcttggggctggtatgtgatgttcagacattggtcactgtgatcctggattcgtcttctgaacctcggctaaagttgtccatgagatctgcgtccaccagaatcagatactcgcctggagtcatgaaaagcttgctggaggatgagtaacagtcaatcctgtgtcatggctgatgaatggtgatgtcggtaaccttgagagctattaactgttgtaaactcgcagatggcgagtgcgccacctgcagtgggaaaattcggagttgaagcccggtgatggcgaaggtgggaagcagttgtacgtgtcaagatggcagcaaattattaattctgatgattcagtcagttgtggatgtttcgtgatcctgttgacgtcgtcgagaagggaagaa

SEQ ID NO: 26629 - DNA, 382 bp, Setaria italica
  Peptide Sequence Number=SeqID_92603
ggctcggccacctcgaccgtgggcagcgcggcgatggacgtggccggggcggggggctccccgcccctggcggcggcgggggccggggggaggtcgagatgcctctggattatgtcgttgaaggcgtacctcaggccgcggcggggggtgtggtgccggagcgcggacatggtggcggccgcggtgtagttgcggaggggcacgtcgtgggagccctggttgacgaagctcctgatgaattcgcgcccggcgtcgtagtccgcgccgaggaggtcgacgtcgtcgtcttcggggtcgtcggagagctcggaggaggaggaggaggagccggagccggagccgggcgggggcggcggggaagatggaggtggagggttctcct

SEQ ID NO: 26630 - DNA, 552 bp, Setaria italica
  Peptide Sequence Number=SeqID_92604
ctttgttcgactcgtaaaagatttcaagaatttatcttcgttcagagtccaagaaggtggatccaatcgcacatacacagggacacctcgggccagttcaatgcacgtctcgtacgtttcgtaagcagggtcgaagagcaaaacctcatccccttgatcaattgttgcaaagatagcagcggcaaacgcttccgactgcccgcagcagatgacgaagtccgtgagcgggtcggcgtcgaggccgtggtcccgtctcgccgtctccgcgaggacgtcgcagatcccctgcacatgcctgtactggttgaggtcggcggcgatggcggcggcggcggcggccttgacgcggggaggcgcggggaagtccgggaagccctcggcgaggttgacggcgccgacgcgctgcgccaggtgggacagctgctggatgggcgacggcgcggaccgcctcgacgccgccgacagcctccgctccatcgcgtgctgtcagctccaagcaaagccgctccggtttcgcggcgtcgcgtgtgagtgtgaccgtgtgagaaagag

SEQ ID NO: 26631 - DNA, 1277 bp, Setaria italica
  Peptide Sequence Number=SeqID_92605
cacgcatggacattcaaccagaaccgcatcaaagagaggcagaggcagtctgatcttcttgtctggcactgccactgccagtaagccacgttttcaccttgctgtccgccagcttcctcatcctgagagcagcagccatcagtgtgtcatcgctcttgcagaaggcaaacctgacgtactggttatggtagctttcacggtcgcaattatcgtggaagaacccatggccaggcacggctgccacaccagcatcgttgatcaagttcgtcacaaaatctatatctgaaagttgccaggacaggggcagctcagcaaatacaaagactgaaccttgtggcttgaagctgatgtgaaagccaaaatctttcagcaactgaaggatgaagtctcttctcacctcatagtcttttttcagggatgaatagaagtccggtgtgcttgtcaacgcggtcagtgctgcttcttggaatggtgcaggagctgaatctgttagtttgatatggatattccttattgctgaggcaatgcttgctggagcacaagcccatccaattctccaaccagttacactgtaagttttagacagtgaggatgtgatgatggtcctctcttgcatccctggaagagaagccagtgagatatgcttgttctcatcgtaagtaatatactcataaacctcatctgttattgcaaagcagtccattttctgacaagcttgggcgataatcagcaactcctctttgctgaagaccttccctgttggattatgtgggctgttcaagacaaccgcctttgttcgactcgtaaaagatttcaagaatttatcttcgttcagagtccaagaaggtggatccaatcgcacatacacctaataacaaattgaagattcttctgaattccaaatcaccaaccttgctcggaggaaaaaactctgaattctgaattagaggagccatcttacagggacacctcgggccagttcaatgcacgtctcgtacgtttcgtaagcagggtcgaagagcaaaacctcatcccctgctgcacttcttgcaaagatagcagcggcaaacgcttccgactgcccgcagcagatgacgaagtccgtgagcgggtcggcgtcgaggccgtggtcccgtctcgccgtctccgcgaggacgtcgcagatcccctgcacatgcctgtactggttgaggtcggcggcgttgtggtccttcttcttctcgtggtgctcgtgactcttaaaccatccccggtcacccccacgggcctcgcgactc

SEQ ID NO: 26632 - DNA, 643 bp, Setaria italica
  Peptide Sequence Number=SeqID_92606
ttttgtcagaataaaggtttagtttatgttttttctaggtattgtgcgtaaagaagcatgtcataacatcaaacttctatccagaaaactacaaaaagaagaaatctattcaagcaaaaccgcaccacgcatggacattcaaccagaaccgcatcaaagagaggcagaggcagtctgatcttcttgtctggcactgccactgccagtaagccacgttttcaccttgctgtccgccagcttcctcatcctgagagcagcagccatcagtgtgtcatcgctcttgcagaaggcaaacctgacgtactggttatggtagctttcacggtcgcaattatcgtggaagaacccatggccaggcacggctgccacaccagcatcgttgatcaagttcgtcacaaaatctatctgcattgtgttttaatgcgccactggttagagtgcttgctcgatatgacaatatggatgcaagcttatccgcaaacatacattgatacatcttgattatctaccaatgcccagtaagttcagtcagatcatcgtgaataatagaagaagcatgtgaaagtaccagtatcagaatatcatgttttgcacataaatttcctgcaccaactagttgtgccaaattctataatttcttatt

SEQ ID NO: 26633 - DNA, 1991 bp, Setaria italica
  Peptide Sequence Number=SeqID_92607
cctacaggaggttgaggctgaagttggaggctcaggtggtacttccggacagaattcaactgagccaaacccctcgaaagcatcattggcgagggttctgttttatgatgctgaaattggagggcctcctatgaacttccgagatgtattcctttatagccaagcacttgagggtattactctgtccatgattcttgaagctcctaaggaagaggaggtttcccttcttctagaaattttcggaatatgtcttacagggggaaaggaagttaataatgctatagtgagcagtatacaggacttggcaaagtctttctcaaattaccatgacgaagtcctggtgaaacgggaagaattacttcagtttacacaaagtgccatttcaggtctaaagaggaatgctgacattgtgaggatagatgctgaagctgtagaattgtggaagaaactggatgaaaaggaggcatcaggagttcactcaattgatgatcctgataaagttgcagaaaagactgcaactgttgagtctttcaaagaagcactcaacgaagtcagattctgctctagaatggaggaacttctattgaagaaaaaatcaattaatactggggactccctagaaatccattcccaaaaggttgagaaattgaaggtattggctacttcccttgctaattcatcctccaaggcagagaagcgtattttggaccacaggcgccagaaagaagaggctcttaactttcgtgctaagaaggataatgaagtgatcgcagttgaaaaggatttgactgctgaggtgtctgaattggagaagcaaagggacgaacttgaggctcagttgaagaaggtcaacatttcactgaatgctgctgttggccggctcaagcagacaagggaagagagggaccaattttatgaggcaaacaaccagatgatctttagtttacaagcaaaggagaatgaactttcaaaatctattgactcatgtaacatggaggctggtgtagtgaagacttgggtaaatttccttgaggatacatggcaacttcagtcgtcatacaatgaacagaaggaaaatacaaccaataatgagctggagagatgcacaagcaattttctgaagttgaccaaacatcacctttgtaattttaaggaccttctaagtccatcaattgagcggatccgcacatacgtcgacaatttggcagtcttaaattcaagggaggagtcaatagaacacggagaggatgatgaaatttctgaaaagacaagtccacagaaatcccttgaggaggaatatttggaaactgaaaagaagatcgtaattgcctttagcatcgtagaccgcatgaagaagatgttttattctgagcaaggggctaattctaggcaagatgatgaagaggtcaggaagttattttctgagatagagaaactgagagaaatatttgagtcggtagaaaggccgacgctagacattgaagtccgcaaggcaaaggagccaactaaggataaatctgaatcaattcgttcgaccaaggacaaatccggatcgagtcattcacctgttcacgcaccgtcgtcacctaaagatgtgcctgtggagtctccaaaatctccggtgaaacctgagcagatgctggacccagattcagaacttgcgaagttagagttagaatttggtaatgttaacaaagaccatgaggagataagtggttgggacttcgacgagcttgaagaagagctgcgagctgacatttctaaatcaagcaatccaaaataaccacgcgcaccctactttccacgtggtggcttgactgaacatttgtacatactttttaattcattgaatgtacataatgttgtttcattgtgtcttgtataatgatactccctgcatgggaggtggaggttacagtgtagtgtacattggcgtcagctatttgtttgattttatccagtacatgaacacaagaaatggtgaaacttat

SEQ ID NO: 26634 - DNA, 299 bp, Setaria italica
  misc_feature (13)..(13): n is a, c, g, or t
  misc_feature (16)..(16): n is a, c, g, or t
  Peptide Sequence Number=SeqID_92608
ccattaggatganganaagtttgccctttaccatacccagattgggtgttattagcttctgcaccattgtactgctgatgggcatttggaagatgtccaccatggctttgctggttgtatgcactgctagttctataggattgtgttgcatcatatccaggttgctcattatttgcccttgcaccagtatatggctgattagcgtttggagagccatatgatccaccacttctgtaaggttgctcggaaccaccaccaatattcgcagcacttctggaaccagctgaaggggcatctct

SEQ ID NO: 26635 - DNA, 480 bp, Setaria italica
  misc_feature (106)..(106): n is a, c, g, or t
  Peptide Sequence Number=SeqID_92609
atttggttctgtgtgtgattagaggcttgattgatggcaggattcattgctagtgctttcttaatcatattcagatcagaggaagaccacctggtaaaattcatgntccgtttatgctattcaaacgaagttatctctaaccttgaatctatcaaacaaacaactaaaatgcattttcctaaaattctgataaaacttgatttaggaaattgatgtgcaattcttgtgacccaatgctcatatgtttacagctcgagattgaggtacggataaaaaaggcaataaacacaatgctactagccagtacaaagatgttctgtctcaaaatttccatccatccgatgttccacttctgctccagggcgctgcatatccgattcaaacagcaggcagcactgagagggtagttgaaaccgcatcaacaaggaaagttgtcaatttggttgaaaggtagacagagacagacaagaagaacaagaa

SEQ ID NO: 26636 - DNA, 317 bp, Setaria italica
  Peptide Sequence Number=SeqID_92610
tcctccttgctcggcagcttgccttggtcgccgggtcgcgagagctccgcctggagacccgcgctgaagaacattgcgccgatcagcttgttgttgcactggaaggtcgggtcgcagcctttgtcgcagatgccacgccaatccttgggggcgccaaggccatagtcttggaagctctgggattgcggccatacgccagtgtcgatgttgccgatgattgtgtccgcaccaaacttggcagacgaccatgcggacgcgggggttccctggccattttccgcgaggccgaggaagtcccacgagtgcgtggttcggaa

SEQ ID NO: 26637 - DNA, 394 bp, Setaria italica
  Peptide Sequence Number=SeqID_92611
agacgacgactacaaaccaagacctagaacaataccctacaaacatctcgtacaacaacttctccggcgcgatcccggtgacaccattcttcaagacattgtcgtcaaactcctacattggcaatgccaacctctgcgagtcctacgacggccacacctgtgcgtcggatatggttcgtaggtcggccctgaagacggtcaagactgtgatcctcgtctgcgccgttctggggtcagtcacgcttctacttgtcgtggtttggattctgatcaacagaaacaggaagcttgccggcgagaaggcgatgagcttgtcgggtgcgggcggtgatgatttctccaacccctggacgtttacaccgttccagaagctcaacttcagcatcgacaacat

SEQ ID NO: 26638 - DNA, 375 bp, Setaria italica
  Peptide Sequence Number=SeqID_92612
agcaacgccgcgctgatgggcgccgtcataaacggcgccgtgaacctggtctccctcctcctctccaccctcgtcatcgacaggtacggccgcaaggtgctcttcatggtcggcggcatccaaatggtcattgcccaggttgggatggcttggatcatgggcgcaaaaatcggcaggagcggcgaggcggcgatgccgcacccctacgcggtggcggtgctggtgttcacctgcctgcacaccgccgggttcgggtggtcatggggacccctgggatgggtgatcccgagcgagatattcccagtcgacatccggtcggcggggcaggccatgaacgtctccatcggcctgtgcctcaccttcgtgcagacgcag

SEQ ID NO: 26639 - DNA, 1569 bp, Setaria italica
  Peptide Sequence Number=SeqID_92613
cctcctctcatcgtcgcggcctcgtcgggctcctcctccctcctccccgccttccaattccaaacccatcgccccgccggagcccgccgccgctgcatttgcgggtgacctctgctacgagagccgcgggtggctgcgagacgcgcggcgggggggggggggtcgcggtcatcgattgcggcttctgccctgtccgctccggcgagcttctccccgtcgacgggcctgggactggaaattcttccatatattcagttcatgagttgttggtattccggttgctgttaagtgattgggaaagctgattggccagaagcattcttggtcatgggtagcaatgaacctagcacaccctccaaggctccaaaggcatcagaacaagatcaacctccagccactacgtctggtgcaacagcttcagtttaccctgaatggcccagctttcaggcctactcagcaatgccaccacatgggttcttcccccctactgtcgctgcaaatccacaggctcatccatacatgtggggagctcagcccatggtgccaccttacgggacaccacaatcaccttatgtgatgtatccacctggaacagtatatgcccatccctctacaacacctggtatgcatccatttagtcattatcctatgccaacaaatggacatgctgaaactcctggagctgcgccaagtgctccagaaatgaatgggaaaagtgagcctggcagaacatctgctccatctgccaatgggattacctcccacagtgagagtggaagtgagagtgaaagtgaaggaagtgatgccaattcccaaaatgattcacactcaaaggacaatgatggaaaggaagacggcagttcacagaatggcatatcttattcagcatcacagggaatgttaaatcaaagcatgtcgatgattccaatacaaccgggtgcgatggttggagttcctggctccacagctaacttgaatattggaatggactactgggctgctcccggttctgcagctatccctgcaacgcagggcaaagcaactgctggttcagcccgaggagatcaatgggatgaaagggaactcaagaagcagaaacgaaagcagtctaatcgagaatcagcacgcaggtcccggctgcgcaagcaggctgagtgcgaggagcttgggcaacgtgctgaatctttaaggtcggaaaactcctcgcttagggcagagcttgaacggattagaaaggagtacgaacagctactttcacagaatgcttccctcaaggaaaagctgggggcaaccggcgattcgattcctgatatgaatgagcagaacgacggcgatggcagcggccaccagaagcagcctgattccgatgcccagcctggcaacgagtcttgacctgtttagcccaggattgttgtaacacggcattgccatttattttctcgaacaaatatcgaacagaaaataggagaaaattgtgtatgcagttctacctcagctggctaatatatttctaacggcatatgcatatatgccaatcactgctttacctaaaagaaaaaaaaaaaaaaa

SEQ ID NO: 26640 - DNA, 261 bp, Setaria italica
  Peptide Sequence Number=SeqID_92614
gcccgacttttcatatgcatcaaacgtccaaagacaaatagagatgtaaagataggtagtaatgcagttcaagacactccattcgcaggttaaatttggttcagtacccagggacacaaataatttcccattttacaccaccagttcatctacaaaatgctcaattggtgatccatgagtattctaagacctcatccatgagccacaaaggtcactaagttccataaccaaaagcacagaaaaatcacataagctaagaag

SEQ ID NO: 26641 - DNA, 256 bp, Setaria italica
  misc_feature (252)..(256): n is a, c, g, or t
  Peptide Sequence Number=SeqID_92615
ccgcttgagatccgagcgcgccggagtctcctcgtcatcgtcagcatgagaagcttccccgatggaattctgcctaggcccacctgtcagataccatttgtaaattaccggtgaatgtttctgttcttaattcgtaagcatagctgtacattttgttcatagctaggattgtgcatgcaccttgtaaaatgcagtgtctgcattttgtaaaatggggaaaataccgtgcagtcgtgtgctcaaaaaaaaaannnnn

SEQ ID NO: 26642 - DNA, 306 bp, Setaria italica
  Peptide Sequence Number=SeqID_92616
agagcagcaagggggtggaggaccaacggcgtcgatggcgatcaggataggccgtactttgttctccgcgacgtatgggaggcttacagtgaatggagcgcgtatggtgctggcgtgccactcatgcttgatggttgcgacggggtcgttcagtactatgtgccctacttgtctgccatccagctctatggagaccctgctgtcctgcggacatctaccagcccaagatactgaaagagcaagcggtcatgaggatctccagattcaccatcatcacttgaagaaagccttcccgaagttcccgag

SEQ ID NO: 26643 - DNA, 281 bp, Setaria italica
  Peptide Sequence Number=SeqID_92617
gggagaggaagaggaggagaagggggacggggaggaggcgacgaggggaggaggaggatttgagtggaggaagagggtggggaggtaagaaggtgttggttcttggttgtaaacctaactaagaaaggtgggggtctgactgctttaatactctgatgcatgctacgatgcgtgttgaggtagagtttgaactgccaagtgagagtcaagcagtgccgttctgccatgtaaagtgaactaatgggatgacttgatcggctgtggttttttggaatagtcgg

SEQ ID NO: 26644 - DNA, 1088 bp, Setaria italica
  Peptide Sequence Number=SeqID_92618
ccctttccaccattcctttccttcctccactcccccttctcttggcgtctcctccaatcgaatcggtttccttcccccaaactcttagggttagggtttcgtctattccttcccttccccgccaaatttagcgcgtcgcggagggctagcgttgcgtgggatgatgggcaccgccgtcgagctcggccggaggcaaggcgatgcccgcttctacgacgccgccagggcccgccgaggcaaccagcgcggcctcccgaagtctcggtggtctcccgccgacgccgcccaggagaaagtaccatctgcggcggcggcccccggcgtttcgggcaacctcgagcgattcgtggcagccgtgactccgtccgtcccggcgcagtacccctccaagagagcagcaagggggtggaggaccaacggcgtcgatggcgatcaggataggccgtactttgttctccgcgacgtatgggaggcttacagtgaatggagcgcgtatggtgctggcgtgccactcatgcttgatggttgcgacggggtcttcagtactatgtgccctacttgtctgccatccagctctatggagaccctgctgtcctgcggacatctaccagcccaagacatatgatgaatgacagtgacggggatagccatgagtcaagtagtgatgcgagcagtgattgtggacatggaaggctaaagcatcttactcgggaaggcttctcaagtgatgatggtgaatctggagatcctcatgaccgcttgctctttcagtatcttgagtttgattctccattctgtcgcgaaccattgactgataaggtctctagcctttcagctagatttcctggactgaaaagcttaaaaagtagtgatttatcattgagaagttggatatctgttgcttggtatccaatttaccgtatccccattggcccaacattgaaagatctggatgcttgctttctgaccttccatcggctttcaactcgtgtaggagatcatgttggtgccatacaatatgcttggggtagctcaccaaatatatcgctccctgtttttggtatggcttcttataagttcagcaagtc

SEQ ID NO: 26645 - DNA, 1432 bp, Setaria italica
  misc_feature (1394)..(1432): n is a, c, g, or t
  Peptide Sequence Number=SeqID_92619
ggcaacctcgagtcgtatttcgttggtctagtccgttgtacttccgttccgttcccggtcgtcagttaccccttccaagagagcagcaagggggtggaggaccaacggcgtcgatggcgatcaggataggccgtactttgttctccgcgacgtatgggaggcttacagtgaatggagcgcgtatggtgctggcgtgccactcatgcttgatggttgcgacggggtcgttcagtactatgtgccctacttgtctgccatccagctctatggagaccctgctgtcctgcggacatctaccagcccaagacatatgatgaatgacagtgacggggatagccatgagtcaagtagtgatgcgagcagtgattgtggacatggaaggctaaagcatcttactcgggaaggcttctcaagtgatgatggtgaatctggagatcctcatgaccgcttgctctttcagtatcttgagtttgattctccattctgtcgcgaaccattgactgataaggtctctagcctttcagctagatttcctggactgaaaagcttaaaaagtagtgatttatcattgagaagttggatatctgttgcttggtatccaatttaccgtatccccactggcccaactatccccactggcccaacattgaaagatctggatgcttgctttctgaccttccatcggctttcaactcgtgtaggagatcatgttggtgccatacaatatgcttggggtagctcaccaaatatatcgctccctgtttttggtatggcttcttataagttcagcaagtcagtatggtcttcgaatgatgaggattggcagctggcaagcggcttactgcaagctgctgccgattggctgcgagatagccgtgctagccatccggattatcagttctttgtctcgcgtggtgcatacaacaggtagattcactcaatgtaagcttggagagggtgtgggatgtcttgaaggtgttggttcttggttgtaaacctaactaagaaaggtgggggtctgactgctttaatactctgatgcatgctacgatgcgtgttgaggtagagtttgaactgccaagtgagagtcaagcagtgccgttctgccatgtaaagtgaactaatgggatgacttgatcggctgtggtttttttggtaatagtcggtcggtgatcatcatgaagaaaattgggacaaaaagagtgtgaaagggataagggacctgtttgttgaattatctgtagttaccaggtggatggagctgctggactttcttgtgtattacaaaagtacggggatgaattttgctaatttcccctagaatgtctgtataaacttgtcaatgctcgtcgacactgcatagttctgtttaattgaaatttgttgtagaattnnnnnnnnnnnnnnnnnnnnnnnnnnnnnnnnnnnnnnn

SEQ ID NO: 26646 - DNA, 1108 bp, Setaria italica
  Peptide Sequence Number=SeqID_92620
cctggactttggatattggaaggccaacacgaacattgaactgcagacccgcaggaggagctctccaccctgttctcatcatccaactttactttgcagaagaaattaggatcttcctgttgtatctctctaaagcggtctatagcctcttgcatgtccttgtacttttttgccctcctaatcttggaccgaaagttgctgacatctttcccttcatatggcaccatctgtgctgaaccatacatctcattcatcagctgcattatacgccctgtggacaggttgcatccgtgcagtagggtaataaactccttctcttgctgcgggatccttttgtgagaccttaggaattttttcagagatggcttcacaactagatcatggttgtggtcagccataaagtaggccacatgccacctccatctatgagattcacaaccatcgtggctttgcatcctgtgtgaatcatctcccctttcctttctttccaccatcaactttcttcttctctttgtttcatcattgttgctctcaggttcagaatcatgttcagaagatttgtccccatcagactcagcagttgcttcctcttccttagccttcttaccatagccctctttgttacacacatgtcactttgtgctgctcccttgataaacctgacagacatgtagaactaatgtgaattgagaagccaatcctctttgcatatgtgttgtagtaagactttgcttccgctttagatgcaaaagtctgtccagtgtacgggacaggaggtgtacaccaaacttcttcaacaacctcatcagcaacaccataaacttgattgtcatcagcaaattctgtactagcagcagcaacttggttggtgtcaggaaatggactactctgcaccaggttttgcgcatcaccagcagttagcagggtgctcccatctgcaatttgaacctgctcacaggaccccaacccagcccctgctaaatctgcttgagtacagaaggaaggatttgcagcgtcaacatccaggaaatcaaagtctggcggtagcttgttcaaatccataatgactgtaccgtcttttctgtcgatctaaactgcctgcagcttt

SEQ ID NO: 26647 - DNA, 267 bp, Setaria italica
  Peptide Sequence Number=SeqID_92621
gcagtgacgccgcacaacctgagacgacctgtcgatctgtgggttgcggtcgggcgcggtcgccgcccaccgtggattcgatcgatcacacacgctcctcatcgggtcccggcgggactcccatctactgagttgcatagtagatgggagtcccgtcagcggtcagccggccgcggtcaccgaatccccctcgcggacggtctcgtcccgcgccgggggccggtccagtcggcccgaatgctcgagcaggtacagcgaaccgacacg

SEQ ID NO: 26648 - DNA, 620 bp, Setaria italica
  Peptide Sequence Number=SeqID_92622
cggggagagccggaggggctgctgcagcgaggacgaggagcccgccgcgtcgtctcccaacagcacgctgtccagcctcagcgggaagcggcccgcggcgacgaggagcggggacctagagggcgaccacaccccgagggccggcggcgccagcgacgacgaggacagtggcgccggcggcgggtcccgcaagaagctccgcctgtccaaggaccaggccgccgtcctcgaggagagcttcaaggagcacaacaccctcaaccccttgcggacggcgcccgtaagtgcaattataggatagattagcggtggcgtgcaattataggatggattagcggtggcccgaaaagattctgatatctccgttcgattggtaacgtgcagcaaattttgtcatgtaaattaaatctgatcatttaatttggtaggtagttgaatctatttctagaattgcactcttttatgacactcatgcagtaagttttagcatacaaatcatttaattaggtaggtagttagatctatttttaggaatgctacgatgcaatttttttttcaaaagttaggattgcatttttacgggacggtaaggagtaccatgcaatcactctcggctcctg

SEQ ID NO: 26649 - DNA, 490 bp, Setaria italica
  Peptide Sequence Number=SeqID_92623
tgatgttgcagatggacaaggcgaccattcttggggacgcggtgaagtacgtgaggaagctgcaggagaaggtgaagaccctggaggaggacggcgcccacagcgccggcggcagcagcagcatggtgcagtcggcggtgctcgtcaagaagccgtgccacctgcagcccgaggacgaggccatcatggcgagcggcggcggcggcggcgacggcggtcagctgccggagatcgaggcgcggctgtcggagaagagcgttttggtgcggatccactgccgcaacgcgagggggcttctggtgagggtgatatcggaggtggagaagatgcacctctccatcacccacaccaacgtcatgcccttcccgcctccaccgccatcatcaccatcacagccaaggcgagtggaggaggggttcattgccacagtggatgagatagtgagaagtattaactccgtgctacaccaacattaattacagcagcagtt

SEQ ID NO: 26650 - DNA, 410 bp, Setaria italica
  Peptide Sequence Number=SeqID_92624
ctgctggcttggaagagaacgaaagaagcccgatggggatcgaagaagggaattattggatccctgcactgctcctggccccgctgcttgtccaggagggccacgctcacgtgctcactccagtcgacgactcgaggtcaaggccaaggtctccccacccttcaaacgtttcccgttccgtttcgctgccttttctccggtcactatcgtcagttcttgacatactaatgcaatttctggagaaatgcaatataatgctctcccatgcacttgttctcttgattgactgtgataaatagtttctgcatcttttgcagcttgttctgtcgagtgcctagtgctctcggaggttggtttgctggatcgcgccgccagccgctcatcgccggaccgaggttgcttgattcaag

SEQ ID NO: 26651 - DNA, 234 bp, Setaria italica
  Peptide Sequence Number=SeqID_92625
cggctctcaggctaatcctgggctcctcgtcggcgtcgcgccgccagattctgtccgagatgggatacaagttcacacttcttagtgcggatatcgacgagaaggagatcagaaaggagaagccagaggaactggtggtcgccttggctcatgcgaaagcggatgctattcttgagaagatgaagaacaatgggatgatgaaagagattgttgattctcaagagactactttga

SEQ ID NO: 26652 - DNA, 314 bp, Setaria italica
  Peptide Sequence Number=SeqID_92626
gtacgtaggtacgccggcgaagacgaggagggagatgaggatgctattcttgagaagatgaagaacaatgggatgatgaaagagattgttgattctcaagagactactttgatgatcaccgctgaccaagttgtggttcatgatggagtgattagagaaaaacctagtactccagaagaggcacggaaattcatcaagggtttgtgttattttgtagaactcaaattattttagatgctctgttgtacttgtccttgccctgtggtgatttgtaaacgaattttgctttcagggtactctgaaagccatgctgc

SEQ ID NO: 26653 - DNA, 1001 bp, Setaria italica
  misc_feature (954)..(1001): n is a, c, g, or t
  Peptide Sequence Number=SeqID_92627
ttggaggggaaggagcgagaggactgaagcatggccgcctcttcggctctcaggctaatcctgggctcctcgtcggcgtcgcgccgccagaccaagaattctgtccgagatgggatacaagttcacacttcttgttggatatctttgccctctttggttgacatgttatgcttcagtagattcttcccctacggttcagtacttcagttcaacccttgtttgccttctccgggggctacagagtgcggatatcgacgagaaggagatcagaaaggagaagccagaggaactggtggtcgccttggctcatgcgaaagcggatgctattcttgagaagatgaagaacaatgggatgatgaaagagattgttgattctcaagagactactttgatgatcaccgctgaccaagttgtggttcatgatggagtgattagagaaaaacctagtactccagaagaggcacggaaattcatcaaggggtactctgaaagccatgctgcaacgattggatctgtgcttgttacaaatgtgaagactggagctagaagggaaggatgggataaagcagaagtttatttccacaaaattcctgatgaagttgtggagagtttgattgaggagggcaatgtcttctatgttgctggtggtctcctagtagagcatcccctaacttcacctctcgtggaagccattgttggtacaattgatagtgtaatggggctaccgaaagcactcacggagaagctgatcaaggaatccctttcggagccatagctagaaacctctggactgaactgaccggagatacataaatcgtattggtggcgctggcaaaatctgtttggcaaacatcgtagtgtgagaatcatgtactattcatcttatttttcgaacaaaaaaccatgtgatcatctcaccatgaatggaatttatccttggctaacccaaaaaannnnnnnnnnnnnnnnnnnnnnnnnnnnnnnnnnnnnnnnnnnnnnnn

SEQ ID NO: 26654 - DNA, 300 bp, Setaria italica
  Peptide Sequence Number=SeqID_92628
gggtgctgaaagcaaaacttgcacgttatgttgcatttgagcggaaggcagattcttcgaagcttttggagtattgggttcctgctcacctatcaccggtgcaactagagatgtactgttacacattactctcaaattccccggcacttcgatcgcattcgaaaactgataatgttggtgctcttcgcaacattcttgtatccctccggaagtgttgtgaccacccttatctcgttgatcaaatgctgcaaagctctcttaccaagggtcaccatgtaactgatatccttgatattggag

SEQ ID NO: 26655 - DNA, 311 bp, Setaria italica
  Peptide Sequence Number=SeqID_92629
gggatgaaactaggcaacttatttgttaattcaacctaaaacaaacaacacaggcgcgcacaagtttagattggttgctccgatcggatcacatcgccgccacttgttggctcgccggccaggtgatggcaatggggctcgtcaccttgtgcttcccgtcactccacacgatggacccgaacgtgtacttctcggtcacgcttccctgctgcgccgcgaatgtgattgcgtactcctgcgtcttctgcgtcgcgctgaactgcagcgtcggaggctccaccgtgacgcgcacgccagccgggctggtcacg

SEQ ID NO: 26656 - DNA, 447 bp, Setaria italica
  Peptide Sequence Number=SeqID_92630
tgccccttcaggaggtgagctctatgctgctgaggaagttggtggctgctggggttggtaataggcctgttgtttttgtgacacacagcatgggaggactggtggttaagcagctgttgtatcaagcaaagctgaataactatgacaatttcctcaataatactgttgggctggttttctatagctgcccgcattttggcagtaaactagctgacatgccatggcgcatggggttggtgtttcgtccagctccttcgatcggggaattaagaagtggatctccgagactagttgaattaaatgattttgtgagacagcgccataacaaaggacttctcaatgttcttagctttagtgagacccaggtcacaccgattgttgagggctagtggtggttgggcacttcggatggagatagtgccaattgagtccgcgtacccttggttt

SEQ ID NO: 26657 - DNA, 993 bp, Setaria italica
  Peptide Sequence Number=SeqID_92631
ttgagctctatgctgctgaggaagttggtggctgctggggttggtaataggcctgttgtttttgtgacacacagcatgggaggactggtggttaagcagctgttgtatcaagcaaagctgaataactatgacaatttcctcaataatactgttgggctggtatgtatttgtctgttgaattttgtgatcatctgcgtgactgaataggatctaactatgtctgtaccacaggttttctatagctgcccgcattttggcagtaaactagctgacatgccatggcgcatggggttggtgtttcgtccagctccttcgatcggggaattaagaagtggatctccgagactagttgaattaaatgattttgtgagacagcgccataacaaaggacttctcaatgttcttagctttagtgagacccaggtcacaccgattgttgagggctatggtggttgggcacttcggatggagatagtgccaattgagtccgcgtaccctggttttggggagcttgttgttctgccatccactgatcatataaattcatgcaagccagtgaacaagaacgatccttcttacgcagaaaccttggcatttctggagaagaacttcaaattgcgtctaaaaagagtggaatcctaggttttgtttcgcaggcggcgtgtcatggaatttttgggcactggtggaggcttcatttccgttttcctctggagactctgttctcccttcaactgcgaaatggtggttgatctgtctgacggagcgatttgggcgtgctgtgttttatgaagctcgcacccaacttgtgtagtatactttgcacatagcggataggctgtaaatagctgtctttacctttgagataattgcccccaatgtaagataagtcatagcactctacagtatcataacagtatttcattctccgttcaaaattcaaaaaggatatacacgttcccttttcctctacctaaattccactttacatgc

SEQ ID NO: 26658 - DNA, 268 bp, Setaria italica
  Peptide Sequence Number=SeqID_92632
gcctgtggatcttggtagacgctgccattcgatggagtggcgccttccaaccctcgcatcagcctgtcgattccggcgtcagacactttggcgatgaagttctcgtcgacgagaacgttgctcgtcttgaagtccctgtggatcaacggaggtgccagggtgtgcagatgattcagacctttagctgagccaatggctatggagagcctctgcttgaactccagccttgtcattgactccttgccggtgtcgtacaaatggccgttca

SEQ ID NO: 26659 - DNA, 1476 bp, Setaria italica
  Peptide Sequence Number=SeqID_92633
gttttccttttcttggctgtattgtgacataaaggcattgcttatcatgatcaatccaatcctagctgcttctgttaaaggggagtcctttcaagtactattagatgggttggtgcattctatgcgccacagaagtcacgatgtgccattgaatacagaagggggaatgtccagtgcttcagtgcataagatacagctagagaagagtgaaaattcgaatctttcaattgatgagaaatggaatttgataggtgcttctttatggattcggttgacatccgtaatgcaactttatttaagggagtttgttgaaaaagagagacttgaacatgaaactggtggtagtgattcagagtttaagggtcatttctcttcagttgctgcaaagtttgctatggattccatacattttgtgtcatcttcgttagtaaaagtgcacgcgtcattcttgaggaagaatttaccaacacattcacattctagtgtgctcttctggttagagtcatctcagcaatggtcagacagcaatggttatgatcagctttcaagaatttttcagcttgcaaacaatgagaatatggaggcgttgttttctaatttgtgggaaatttctgttaattctgtggatatttgtaatgcttttgtgaatgaaggagttaagtgcttttccttaagcagcataaatgttactagatcttggaaggatataagaggtactggggttgagtgcaaagttagtagtacccaaagaagtggagaagaacataagcatggacttagctcgaataacaatgatcaaggacaaggatttactgacggggcctcttctaatggggaagtctttcctgaaactaaaggaaagagtcgatagtacaaaaagattttcaaagcccaagggaacttctaaggagaagtggggaacttcttgaggcgatatgtcttaactcaatcaatgagaaacaagctgctattgctactaatcgaaagggccttgttttcttcaactggagtgaaaagaaacattgcaagaattttgcagaatatgtctggtctggatctgattggcctttagatagttgggctggttgtgaatctacaccaactccaacttttatttcatctggtgctggccttggcagaaaaaaaggatcacaacctggttcaggtggagcaactattggtttgggttcattggcaaaacctggaagagacctaactggcggtggagcatttggaattccaggttatgctggtattggggcctctgggtttggctggggtgaacctgaagaatttgaggattttgtcgatcctccagcaacacttgggaacatccattcaagagcattgtcccgacatccttcgttaccattatttcttgttggttcgagcaatacacatgtgtatctatgggagtttggtaaagatagtgccatggctacatatggtgttctgcctgctgctaaccattccacc

SEQ ID NO: 26660 - DNA, 409 bp, Setaria italica
  Peptide Sequence Number=SeqID_92634
ggtgtcggagcgcgcgctccgcccgtcgtggcgggtgcgggcgtcgccgttgcggtaggcctccactagcgccgacgcaacggtctggtccgccgccacctcctcggcgatgtcctggacgcggaggatgcgctccactgcccacaccgcccggcgctgcagcgcctccgtccggttctccaccagcagctcgacgacggggcgcaggccctccgcctcaccgagcaccagcacgccctccgccgtgttcgccacgccgtcccccagcagggtcgacagcgccaccagcgctgcctccaccaccggcgcgtcggcgtgctccaggcacgccaccagccgctccaccgccttgcacccgccctccgccaggcagaagctctcccgcagcgagcagaagccgccgtgcacg

SEQ ID NO: 26661 - DNA, 306 bp, Setaria italica
  Peptide Sequence Number=SeqID_92635
actaggagcaagtcaggaagcgtttagcacatgaaagaaaggctagcaggatcaggggacggacatagtataggacatgggtttactcatgtacaaccgataatttttgcacgaaaagaaatcgaagtttcgcaggtaacagatgaagaaccgaatacaaacagcacgttagggtttggggtcttcgtttcgcacagcaggaagggaagggaagggaataggctggcatacccgtcggatgctcgtcaccggcgaagagcccggcgaagacctagccaatggcggccgctcgccctgtgtcgccgg

SEQ ID NO: 26662 - DNA, 298 bp, Setaria italica
  Peptide Sequence Number=SeqID_92636
cccgcccccgcacccggccccaccccgggcgcccccgccatgccaggcgccaccgctgccggcgcctactcgtcccccgcgatcaactcccgggccgtaaccctaccgccggtaacgaacagactccgccggctcggcgctggtccgtgggggagtaggggagcgcgggtacggtttcccagaggcacagatggatccaggcggcggcgagggaggaggaggaggagacgaggagcggtggctggctcgatttggggatgagaagccgagacgaagaaatggctcggtgcaatttgga

SEQ ID NO: 26663 - DNA, 448 bp, Setaria italica
  Peptide Sequence Number=SeqID_92637
ccgtactcgccgctgcagcagtactgagccgacccgaacgcctcgcacgcgctcttgcacgccacgccggcgggcgcggcggcggacgtcacccggaggtcggccgggcacgcgccgttgaggtccacctcgcaccccgtgggcgcgcagttgccgcccggggctgcgccctgcggtgctaccagcacggggaggttgtacccgtccacaaggctcacgtcgtagaagtccatgccgccgctgccgtccagtgtgaactccgcgagcgtcgccggtggcgccgcgttgccgcccgcgcagtcctggcgccctgagccgcagtcgccggtcacgcaagtgaacttgccggtgctgtcagtggagcagagtgtccggccccagagcttccctgaccatcccgccggcgccgacagggtctgtgactggccaggcgcgagctggaagcccg

SEQ ID NO: 26664 - DNA, 280 bp, Setaria italica
  Peptide Sequence Number=SeqID_92638
gcccccttctccactcaaaccctcctccccgtatatgcttcattcccttccttcgccgcaaagtttcctattggaagggagaattaggggaagatgaagctggtgtggtgtccggaggtggcgtccaaggcctacatcgacggcgtcagggcgctcgccggccacgacgacctcgccggatcggcggaggtcgccgagctcgtcgccgccatggccggcggctggaacgcgcagctcgtcgtcgaggcgccggacgtgccggcgcaatcatccatctctt

SEQ ID NO: 26665 - DNA, 388 bp, Setaria italica
  Peptide Sequence Number=SeqID_92639
cgcgggacgccgtgctcggcggcggcgtccgcagcccacgggtagaagctatcggccacggcggcgtcggggcggtggtcggccaggaaccggccgaagggctcccggagccgcttgatcgcttccaacaacatgtacctgtcggcctccgaggagaggcccacgacgctctcgacgcccggcggcagcccgacgtcggggaaggggatggtggagaggtcgatcgccggggcgccggcgctgcggaaggcgtcgttggctcggtcaacggcggagcggatcaccgcggcgttgacgggagtggcgaggatgctgcacttgacgccgcgaggggcgaagagggcggccatgtcggccaccgggatgaggtggcccggcgcgacaaacg

SEQ ID NO: 26666 - DNA, 716 bp, Setaria italica
  Peptide Sequence Number=SeqID_92640
atgcttggtccactcaaatcagtcaccctcagttctgtcaagttctttagcaaggaaatttcttgaggaataggtccactcatcaaggtaccctgcatgtctattctgttcacgcgctgccaattcttaatgaagctgggtattttccctgagatactggtcccatcaatacgaaagtctgtcatatttgtcagcctggaaaacgttgggggcaactctcctgtgatgttatttgcagaaatgaaaaatctctccaagctgatgatattacccagctctggtggaatagggccctcaatctgattactttctagcacgatagatttcaacatgggcatgcgtccaagttccttaggtagtcttccagatatgcgatttccctgcagagacagattaaaaacaggtaggcttgcccaggatgctggaattggtccttgaatgaagttgcgtggcaagtcaagatgtcgcaaataagtaagattcaaaacttcttcaggtagaactccactgagattctgacgcctaagctgcaagctgataacgtgacactccatgtggttcttgaatgaacaatcacatgtcacattgctgataagaaatttggtgggggaattgacccaatttcctgatgcactgcatggatccacgttgaagtcccagtccgtcttgttaagcttgggtttgcttatttccttttgtagtcgtcttttctaact

SEQ ID NO: 26667 - DNA, 1170 bp, Setaria italica
  misc_feature (635)..(640): n is a, c, g, or t
  Peptide Sequence Number=SeqID_92641
cgtgaagtcattatacgatatatccatgttttttttatttgcttgccctgtttttcaacatccaatcaggcaaatctcctgtcagcatattgctagtcaggtacaaatattgtagtgctgtcattccttgaaaatttattgggatttgaccggtcaacttgttgaagcttatatctaagactttaaggtactgcattagtccaaggtaagaaggtatttcaccatagatggagcaatttcttaggaccaattctttaaggtgcagcgcattttgtaagggaggaaatttcatgcttggtccactcaaatcagtcaccctcagttctgtcaagttctttagcaaggaaatttcttgaggaataggtccactcatcaaggtaccctgcatgtctattctgttcacgcgctgccaattcttaatgaagctgggtattttccctgagatactggtcccatcaatacgaaagtctgtcatatttgtcagcctggaaaacgttgggggcaactctcaatctctccaagctgatgatattacccagctctggtggaatagggccctcaatctgattactttctgcacgatagatttcaacgtaaacatgcgtcccagttacacaaaaaaataaaaaaagggnnnnnntaaaactttctttctaggttagaactccactgagattctgacgcctaagctgcaagctgataacgtgacactccatgtggttcttgaatgaacaatcacatgtcacattgctgataagaaatttggtgggggaattgacccaatttcctgatgcactgcatggatccacgttgaagtcccagtccgtcttgttaagcttggttgctattcctttgagcgcttcaactgaaaaggcaaaggcaattcaaattttgcccaatgtaatttggtatattgttaaaaaatagcaatttggtatgcacaaaacttagctggaaatttacttccctggaaatcaaaatttataaataaacggtaccggagtaataaggcgaacatgaagcatccccggatcaagaacattgcagggtagtcacaattagtttattccacagaacttctatgaaacattccaagaaccaaatatttagaacggcagaggaaaaggagagggcagctttggtccatctgcttcgatatatgtcaaagtt

SEQ ID NO: 26668 - DNA, 1058 bp, Setaria italica
  misc_feature (994)..(1058): n is a, c, g, or t
  Peptide Sequence Number=SeqID_92642
ctaactcgccgtgcgcccgtgccttgcaacccatccatcccgcttcccccaacaaaccgtgcgtcttcccccctccgctggcgacggcggcgaggcgaggcgactgaccaccgaaatcgggccctctccggcgaccgccaccccggcttccagacaggagcaatggctctgtcttcgccgatacggatttccctcattgtttcgttctttgggattctggcgttcgtgcttggcgtcatcgcggaaaacaaaaagcctgctgctgggactcctatccaaggaaaggatgttgtcatctgcaagtttccaagtgatccaactattgcaatgggaagcctgtcccttgtggcgctcgttgtagctgccattgtaggacacgttgctatctttttcccgtactcgggcaagtcagtacctcgtggagcgctctttcaaagcaccagcttgactgtgttctttgttgttgcagagcttgtctcggccctggctattgcaatgttgctctgggcaactgttactgagggccttcaccgcagcaacacaatccaccacgacatgacttaccagtgccctactgcaaagactggcctgtttggtggcgccgctttccttgccctagacgctgctctcttctggcttgtttgccagatgctggccctcaatgcaagggctgattacctggatgaggatgacaacaagggtgaatatggccaggtttacgctgctgaagttgatggctcgaaggtctgagcccgtgtgatcatcacatcgtcagagttttatgattagtgccacttaactgtattatgtcgtcaacaaagtcactgtagctctcttaaatttgtatatacgtgtgatgctggctgcgaagtcgtaaggctattacttattctgcattttcagatttcagtgtgaacaataaactgcattctcaatacaattggtttgctacttcccaaagtgaacttaaaaaaaaaatacaaaaaaacaaaannnnnnnnnnnnnnnnnnnnnnnnnnnnnnnnnnnnnnnnnnnnnnnnnnnnnnnnnnnnnnnnn

SEQ ID NO: 26669 - DNA, 504 bp, Setaria italica
  Peptide Sequence Number=SeqID_92643
ccagctgtatggtattgatccagaaaagcagaaaagccgaccattaaaaaggagagtgctgtcatcacaaggtgtctccgcctcacttgatttggttattgaagaagcaataccttgtattgcagaatccaatggctggtatccagatgagaagaggatgaatctgtagtctgtcaactctatggcaaccttaagcaccattagaaatgctttaggatttctaagaaaacccatgcaattgaacttaatcctacaaatataggtcctgatgaataagaattccctatgaggaagtgttccagggaagaatggtttgcacacaaaacacccccaaatgaaggattagtatttccagacaactccatgcattgtcacaagaaaattgccaagccataggaagaaaccaaaagccacaagcatgagcaccggatggccaatatccggggcactcgacaatttcttgctgaaaccatacaacaacagtggtgactcctctcgcacatg

SEQ ID NO: 26670 - DNA, 705 bp, Setaria italica
  misc_feature (200)..(200): n is a, c, g, or t
  Peptide Sequence Number=SeqID_92644
tcctttgtgcacagttgtactgaaatggtttctttatagcttaatgataggccagaaaattaatatgtaatttcaaggattaaaaataatatttgttaatgatgaatggttcagtaaagtagggtcatattccaatctgtatcgaggatccattgcaatgcaaagtcactaggctagcaagagactagaagcaaaaaatntaaaacacaaatttgtatcagatgagaaacacacctaccaattgaacttaatcctacaaatataggtcctgatgaataagaattccctatgaggaagtgttccagggaagaatggtttgcacacaaaacacccccaaatgaaggattagtatttccagacaactccatgcatttgtcacaagaaaattgccaagccataggaagaaaccaaaagccacaagcatgagcaccggatggccaatatccggggcactcgacaatttctttgctgaaaccatacaacaacagtggtgactcctctcgcacatgccacaacggaagatttgttactggatctgtgaaaggaatagcgctaagatttagacaattctctctccacgatccccaactttctgtgaagagcgcccacatccagtggattatgtccttccagcagaccgtgtttgtgggagcttcttggaagtacttgtacaatagaggaaaattatgtttaaattggcgttca

SEQ ID NO: 26671 - DNA, 252 bp, Setaria italica
  Peptide Sequence Number=SeqID_92645
cagcaagaaacctcccgtccggccggaccatttggttttgcttcgaagaaaccttcacggccgctgcatctaaattctcaaccgacccacccagcttcccttgcgaaagaccacgcgcgaagtcgcgagcacgagcaggagatcgaaggcaggcaaagcagtggagcagagcgttgtcaggcatgctggagctcctgctggtggggtgcagcagcgtggtggtgctcctccacggcgctagcctcttcctcc

SEQ ID NO: 26672 - DNA, 625 bp, Setaria italica
  Peptide Sequence Number=SeqID_92646
ccgcgccaagttcaagtccaacctgccgctggaatcaagtctggaatttaccaatggtaaaatgggcagccgagctagagaggaatcccatagatccttcattagggatgaagttcttgtgatggtggcaactatagcttttggaatgggtattgataaacctgatgttagatgtgtaatacactatggatgtccaaagagcctagagtcctactaccaggaaagtggccgttgtggaagggatggtctgtcttcagtctgctggctatattaccaaagaagtgattttacgaaagctgacttttattgtgccgaggcaaaaaatggaacccagaggaaagcaatcatggattccttcatggcagcacaaaaatattgcctccttgctacatgccgcagaaggttcttattgcagtattttggcgaagagctcaactccgactgtggtaactgtgataactgcacagcagtgaaaaatgttagagatttgtcaaaagaaacttttttgttgctgtcgtgcgtcaaatcttgtggaggacgctggggccttaatttacctattgatgttctccgtggatcacgagcgaagaaaattgttgacaacaattatgataaactacaaatg

SEQ ID NO: 26673 - DNA, 321 bp, Setaria italica
  Peptide Sequence Number=SeqID_92647
aaaaactgcccacagctcaacaccaggaggttttgcattacttgttgacataggatcaaatccaccccactgctcatagttccatcttccctgggtgaaagatagctccaactcactaatgtgatattttttgaccagctgggagatggccttggggaagaggtggtggtgccggccgacggtggcagctgggggcgcagaggagcggaagtagaagtgggccagcgccttgcggtcagggagcggccgcaggagcagctcctccgtgaactcctcctcaggcgccgctgccgatgccgctgcggcagttcgaaaggtagt

SEQ ID NO: 26674 - DNA, 1124 bp, Setaria italica
  Peptide Sequence Number=SeqID_92648
gggagctcccctgcaaggtccacaagggccagggcggatcaagcggccacggaacatcctgtgacagcccagtgatgctgaggttcttcacgagcaacaacgtgacggtgcagggcctcaaggtgcagaacagcccggagttccacttccggttcgacagctgccgcggcgtgcacgtgagcgggctgtccatcagctccccgcaggggagccccaacacggacggcatccacgtcgagaacacccaggacgtgctcatcaccgacaccgccgtctccaacggcgacgactgcgtctccatcggcgccggcaccctcaacgtgcacatcgagaacgtcacctgcggcctgggccacggcatcagcatcgggagcctggggaagcagggcacccgggcgtgcgtcgccaacatcaccgtgcgcaacgccgtgatccgccactcggacaacggggtccggatcaagacgtggcagggcgggtcgggctccgtgtcgtcggtgtcgttcgagaacgtgcgcatggacgccgtgcgcaaccccatcatcatcgaccagtactactgcctctccaagagctgcgagaacgccaccaccgccgtcttcgtctccggcgtctcctacgccggcatccggggaacctacgacgcccgcagcgcgcccatccacttcggttgcagcgacgccgtgccctgcaccaacatcacgctctccgacgtcgagctgctcccggcgtcggggcagacggtcgacgacccattctgctggaacgtctacggcaacgccaccacgcccacggtgccgccggtggcgtgcctcatggatggcgtgccagggaactacgccgaccacaccagcctcaaatgctactgatgatactatagtgatcggccgacaatagctgctacttcttgtttagcgaggaagggaaaaaacgagacagagaaaagtaattaagattagtgcagataaaaaaagaaggttaaagcgtgattacatattatgtatatatagaaaaaggatgaaagtatgatactcttagcaacaggtgatttgtgtgagaattaccggaatgtatacacagtatgtataagaaaaaaaaaaaaaaaacaaaaaaactagagaact

SEQ ID NO: 26675 - DNA, 839 bp, Setaria italica
  Peptide Sequence Number=SeqID_92649
tggcgtcgcgctcggcaaccccacggcggccgccatcacgcacgtactcaacaacaagcgcgagttcccgctcgccgcgggcgtcgaggacctgctcgtcgtctccatcggcagcggcgaggccgagccccggggcgccgcctccacgtccgagatcgtcaggatcgccgccgagggcgtcgccgacatggtggatcaggccgtggccatggcgttcggacataataggacaagcaactacatccgcattcaggcgacggggacgccgcgggcgagccgtggcggtgcggcgaagggcgggtgcggcgtggcggaggagatgctggcgcagaagaacgtggagtcggtgctgttccgcgggaagaaggtggccgagcagaccaacgccgagaagctggagcggttcgcgcacgagctcgtcaaggagcgagaccgccgccggaccagcccggtctcgcccaccgtcgtcaagcagcagccctcgacgccggcggcggcgccgccggcgtcgtactcgaacctggtcagccacatgctcaccagcatcatgtagacgaccaccaccagcacagcaaggccaagtgaaatgtgctgcatgtattagtctcctagcatttttttttctttctccccagctcttttcctgcagcctgccgatttttgtaaatggtttgaccacaagggaaaaaatggcgcgtgatctgcagggtcatcctgtatcttgagaatgcctgcacagcttgtgagtctaatgagcagagctgtgactgaacaaacagaccccggatctgaagaataatagatcacaaagcagctgttaataacaaaaaaaaaaaaaa

SEQ ID NO: 26676 - DNA, 276 bp, Setaria italica
  misc_feature (261)..(261): n is a, c, g, or t
  Peptide Sequence Number=SeqID_92650
cagcgggaggagatcaggacgctcaaggacgccgtcctgttcccggacgcagagcgggagccggagccggaccgccgcctccgggatgagatctccacgctcaccggtcagatccagtgccttgcgcaggagctcgcccaggttaaggccgagaagcactcggcaaggtcctgctttgaagatgatggatactgctcttcccctaggacgccggggtttaacgaggagaccgctttctctctggagtgcagcattgggaanctgagacaccaaact

SEQ ID NO: 26677 - DNA, 1074 bp, Setaria italica
  misc_feature (1)..(35): n is a, c, g, or t
  Peptide Sequence Number=SeqID_92651
nnnnnnnnnnnnnnnnnnnnnnnnnnnnnnnnnnntttttaaatataatactataattcagcacgtttctgtgaccaggagtgtagtaaagctcaagaagatcatgaacctcaggtgagtagtacattcagtaggggctatacacctatatataaacatagcccattcaccgttgggcgtaatcttttctcaagcacaaagtatgcttcgacgcctgcgtgtactgcacaggaaaaaaaaaacaacggttcttccccctttatttgcgtgaagatatcacggcaactgcaatgactcgagagtcgagtctgcagagtccctttctcatggagtactagattgtgatattgtttttttcacagattcaggtaaagaaatccttttgctgcatgcccgtgacgagcctatacgagtattgtctctaggagtctataggcgggtatctgtccttgaacagcggcgtgccctcctttggcttcgaccaagggtacttcatggttgcatccctcgggaacttcctgaagttgacgaacggcgcccagaccatcagcgcggggaagaagaggtaggtgaacatgaactgcaggtacgtctccacgaagtcgcgcttgtaccacctcagcctcatccagttcatgatcaccggaggggcgatgaggaagtagaagaaggcgaacaccgcgagcggcggcaggatcgccaggaggtcgatgtcctcctccccggtcaccgtcgccagcgccgccggcgcctcaacggctgcccaggcggcgccacaatgcagcgccgccgccagcctctgcagctgcgacaccgacggggatgaagcagctagcttgcaaggggccttgtcgtggaggtggcagaggagcctgaacttggcggagcgctgtggcgacgacgcagcgagcgtcgtcgcctgccgtctgggtagctgcggagcggtcggcggcgaggaggaggccgaggagaggaggcgccatgaggcggtggtctccatgagcggcaacgggacgggaggctcgcttcgcgggcaaggccgtggcgcaccagtcttatctggataggcgacgg

SEQ ID NO: 26678 - DNA, 251 bp, Setaria italica
  Peptide Sequence Number=SeqID_92652
gaagattctggtgtacgagtacatggcaaataaaagcctagacctcatcatcttcgacagtaaaaaaggattgtcactggactggcctaaacgtctgaatataatcgatgggatatcacaggggcttctttacctccacatacactcacgcccctgcgttgtccatagggatctcaaagccagcaacattctcttggacaacgagatgaaccccaaaatttcagattttgggatggctaggatattcagct

SEQ ID NO: 26679 - DNA, 233 bp, Setaria italica
  Peptide Sequence Number=SeqID_92653
ctcgcgtcgcgtcgcgtcgcgctgcacgcatcggcgtcacgtgccggtggcgacgtctggcgctacaagaagcccccgcgccccgcaggcctttctgatcagcttctttctccgagcgtcgagcgagagagagagatggagcagcagcagcagctgcgcgacggcgatggcggcgcggcggagggggacatcgagcggctccccgccgacctcctcgcgcacgtcctctccct

SEQ ID NO: 26680 - DNA, 248 bp, Setaria italica
  Peptide Sequence Number=SeqID_92654
cgtgggcatccgcgtccacgacgtgatcatcaagggcaacaccaagacgcgggatgagctcatcgagagggagttcgccgaccctccaagatgacgccccaccgtgcaggacctgctccgggccgccagcgtcgccaccggccggctgcacaggctcgacgtcttcgacgccgtcaagatcacgctcgacgcggggccacccgagctgcccggcaccaccaacgttgtcgtcgagcgtgatcttgacg

SEQ ID NO: 26681 - DNA, 500 bp, Setaria italica
  Peptide Sequence Number=SeqID_92655
aggaagcgccggagtaggccgaaacggcactccgggctcggtttggcgcggggatttcaccagaagaaagaggaggacgcggcgaacacgttttagcggtccacggcgaccggagctcaccggaggcggcgcttgacggcggggaagaggcggcggtgctggagctcgcggcgactaggctttcaggtgttgcgggcgtgggtgttggagactgggaggggaagctactagcacatctctctcccacctaacttcatgaagctcccgttgaatctcaaagaggtggttgtttgtttcattcaaagcggtgagagttgccgacaagtacttgcgaagaaaatccgtggccatgtcaactccatcatgagtagctatgaaggttcttgcttctccactagctctggatggaaggaaccgatgatatgtgtactgtagccgtggccgttccttgtgagagaggacctcaagtgccctcctagctgcctcggcaatgccggact

SEQ ID NO: 26682 - DNA, 300 bp, Setaria italica
  Peptide Sequence Number=SeqID_92656
gggaggagggaccacaaggcagagatccccacacccctccctcgtcgtctcctctcctccacacgcgcccgcccgcgagagagcgaagagcttgcgcctgcacttccatggccagagcctcatcgtgtgctcttcgaggcttcagagtcgctcggtcgcccgtagcagtcctggtttgaaaggacgggcgtgcggagagaggcgttgtgattatttcttggagcaggaggacgagcagagaggagcggggaggaagatgatgggtgggaagagggagagggactgcaagaacccgatcgg

SEQ ID NO: 26683 - DNA, 486 bp, Setaria italica
  Peptide Sequence Number=SeqID_92657
cactcacagtagtatgctctttcccggtaccaacaggctcgtcattaagagtttactagtatcgtaaaagtttaattgcacaaactcgaaagcagtattatcagaagctcagtggcggtattcattgcttagcaaggttgttttctatgtactagcaacagtatctaaaagcttgtaacttgccttggtctttagtctttactgttgtgttgttgaatcagttaggaatttatcttggtttgatccgtgtggcaaccggcaataattactaggtcacattctgtctttgttagtttcagactttcagcgatattagaagaaacttgaaataatcctcctttgcatttccatgatttgtctaccgctgtggagttacatgtgattagggcattaattttagtatgcaataatgatggttttcacatttatactgctgttgtctaatggacacatcttcaggtcaatctttgtcttacaaaccaaaca

SEQ ID NO: 26684 - DNA, 1628 bp, Setaria italica
  Peptide Sequence Number=SeqID_92658
ttacttaagttctttgttcccttgtaagtaaattcgacgctgcaattgacgtctgcgagggaatctgcaaacccttttgtggagcaggccatacagttctctgtagcagctgctaaagcaaccattactgataaggagaggaaggatgcgcaggataagctactgttgcaaggtctgagcattactattctgggttgcaatgacttctattcttatagaaagcagattgaagcacgtggtctccctcttactccggaggtattgctttcattgcctccattctcttctattacatttaactcagaagttgctaatggatcaatgactggagaaaaatgtaaacctgaagtagccaaaactggacttgggtcatcagctgccatgaccacatcagttgttgcagctcttcttcactatcttggtgctgttgacctttcacgtcctggacaaccttccagtaatagggcaactggacgagaccttgacttggttcacgctattgcccaaagtgcacattgtatagcacaagggaaaattggaagtggttttgacgttagtgctgctgtctatgggggtcagcgctacataaggttttctccagaaatactctcctcagctcaggctacaggtgggacttggttgccagatgcagtatcagatattgttacacgaaagtgggatcacgagaatacacaattttcattgcctcctctgttgacccttgtccttggggaacctggaactggaggaacatctaccccatcaatggttggatctgtgaaacggtggcagaagtctgaccctgagaaatccaaagatacatggactaagctgggaattgccaattcagcgctggagaaccaactgagaatcttaaaaaaactttctgaagatcatcaggaggcatatgaatccgtagtgcggtcctgtagtcatctcgcatatgggaagtggacagaggtggctactaaccaacatcaagaaacaattgttagatcactgctggctgcaagggatgctttccttgagataaggcttcatatgcgcgagatgggcatagcagccggtgttccaattgagccagagtcacaaacacaactactagatgccactatgaatatggagggtgttctgctagctggagtccccggagctggtggctttgatgcagttttttcggtgactttgggtgatgcaagtaatgctgtagcaagtgcgtggagctcagctggcgttctgccacttcttgttcgagaagaccaccggggtgtttcactggaagatgctgacccaagaacaagggaggtctcagcagctgtatcaaccattcaaattaattgatgccactgttaataaattctgtttagggtgtaccatcattatctcgttcatttagaagcacccaattgtgccaaataagtgctgcccttgcagcaagatagcacattatttttagggactgtccatgagtgtagaaaataagaaattttagagatctccatggaattattagtgcctgtagctatggaatgtacgtgaggaaatgccaagctatttcaatatattcataatgtagaccgtctatttgtaactcatccatggttttgatgagaattcagcatgtttgg

SEQ ID NO: 26685 - DNA, 510 bp, Setaria italica
  misc_feature (491)..(491): n is a, c, g, or t
  Peptide Sequence Number=SeqID_92659
aggttggttttctaatttcaggtttatgcttttgtcaatttcacttgtgtttactaaaattcataccaatacattaatacaatgctctaagtatcagagtatcagaccaagtgctatacaacttcagacaatgaaaatatgattgtagaagagttttcagggattcagatgctaagtcttgcagtttctcatattctgatactaaaatcaacacagattcaaatatactatgagtctatgatgtaggatgacatagctgtcaattttaatcaagcgccattacgaagtgacatggtattattaaagtgtagctcatgaacacaaggtggagaagaggaactcagaattccagcatatttcacgctcactcttctccaagtacggtaaaccgtatgcccaatccgcagacataacagtgtggctcggtgatctcaattatagactcgaaggaataagctcgatacatttatgtcttgtttcagaagctaagnggcaaagatcagcttcttc

SEQ ID NO: 26686 - DNA, 370 bp, Setaria italica
  Peptide Sequence Number=SeqID_92660
tttaaccttcaccttccagatgccaagttgcagactgaaccaaccgaagcttttgaaaatcttacgtgttatgcttgtgatcttcacttctgcaggtaagagtgccttcttggacagacaggatattgttcaaggtcgaccattcttcaggcttggatgcagtattaagctcatatgaatccctcgactgtgttaggagctccgatcacaagcctgtgaaagcgcatctttgcctcagtgcgcagcgaggatgattagtttgtctagttgacatagcagaggtagcatttataaagattgacttcttctcataaggctgtagagatgtttaatgtgatgtaaactaaacctgttgatgttatttcctttg

SEQ ID NO: 26687 - DNA, 1165 bp, Setaria italica
  Peptide Sequence Number=SeqID_92661
acaagaaaacaaacaaggattcagtacgtcgatatgggaaactgcagcagccttactcttccaacatggagaagccagctacagaataacagcctggtttctactgatgaggatgggactcacgatggcataaagataattccaattcagaaaggttgtgaattcaccaccaactctgtgctctgtgtgtgtatcatcacatggaacatgaatggcaagatgtctgtggaagatataacaaaattggtaagatccaacagaaagtttgatttgctagttgttggactgcaagaggcaccaaaatgtgatgtttcgcaagttctgcaagaaaccatggccgacacacacattctattaggtcagaaaagcatgcagtctcttcagatgcttcttttcggatcaaagagttcggagaagtacatcggagagatgaaggtggacaaacatgcagttggaggttttgggggtatgattgggagaaagaaaggagctgtggccatgtacatcaacttcagtgggatccggatggtttttgtggtctgccatcttgcagctcatgaacacaaggtggagaagaggaactcagaattccagcatatttcacgctcactcttctccaagtacggtaaaccgtatgcccaatccgcagacataacagtgtggctcggtgatctcaattatagactcgaaggaataagctcgatacctgcaaggaagatgattgaggagaatcgtcagagtaagctaagaggcaaagatcagcttcttcaagaagctgaaaagggcgaagtgttcaatggatactacgaaggaaccctgtcgtttaagccaacatacaagtacgatgtcggaagtagcatctacgatacaagtcataaggtaagagtgccttcttggacagacaggatattgttcaaggtcgaccattcttcaggcttggatgcagtattaagctcatatgaatccctcgactgtgttaggagctccgatcacaagcctgtgaaagcgcatctttgcctcagtgcgcagcgaggatgattagtttgtctagttgacatagcagaggtagcatttataaagattgacaaactaatcatctttgcctcagtgcgcagcgaaggatgattagttgtctagttgacatagcagaggtagcatttataaa

SEQ ID NO: 26688 - DNA, 301 bp, Setaria italica
  Peptide Sequence Number=SeqID_92662
gtccaaagaagccaagccagctgctgtgtactcctctgatttgaagcgcgctgccgagactgcacaaactatcgcaacagcttgccatgtatccaatctggtgtttgatcagtcactgagagaaaggcacatgggagatctccacggtttgaagtttgatgatgccgtcagtaccaagcctgaagcttacaaggctttctcagccgatgacagaaaccaagaaattcctggtggtgggagagtcttgatcagctttccgagcgctgtgtttcctacttgaacacgatagctgacaagcaca

SEQ ID NO: 26689 - DNA, 256 bp, Setaria italica
  Peptide Sequence Number=SeqID_92663
cgatcggcatctcctcgccccctcgcgcccaacgaacagttcttgcagtcaatgtgaatgcagatctctccggttgctttcagccttcaacccttttgatctcgttgtcgccgtcaagattctcggttaccagcattgtgcatttttttttacagctcgggatccaagattaggaacacatgcatggtacgactggagactcaaaactttgcgaaatgggctgcttcgtcgtagcccattcataaaagagaaccgg

SEQ ID NO: 26690 - DNA, 2050 bp, Setaria italica
  Peptide Sequence Number=SeqID_92664
ttgcagatccattcctaacagtggacatgagccctttcagcaccagcggctgcaccccttcgaaagcagggaccttcccagtctcggttacagatagcaatctctctgaagtagttctagactccagcctgtggaggtcagttacatacccactgatgtcaaactcatcacgtggcatgcttgagagcaaaacattttctgttgtccggtcacggaatgtcaagcgatcaattaccctacagaacaactcgagcacttggcagtatatatgcacaaagtcggtatgcatcagtgcaacacagccccaaaagagttgcgggtaaagtataaccttctcaggctccatgttctcaaccataacttgtaatgtcaacaatatctccatcgcaaaacccagcacagctggaacaggattacccaagcatctgtggatgcatctcaggagcaatacacagctatcacttttaacactgggacgcaatgcacgatatatctggtgcgatcgacaagccaggtgacgagatgtgcactccatggcccacttaagagcttcagaaccccaagtttcacgaaggtccccctgaaagaaaatagcactaaccatgctttgcacaagtgctgataagagtgaagcgctaggaagttcggtccggacaagggtaggatcctcgttctcccacatcaggctgccccttttagactgaatgtattttatcaagcttaccacatgatgcttgttctctcgttcactactttcaacctcatatagttcaagatgacggccagcaagtgaatagaggagattcacgagcaagtcctggcaatgctcgagcacaatgtcttctgagctatccatcgaaacacatgtgacatggaacaacagaggtaaattttcacgaaagtcttcatcattttcataggcaatttcagccagaagaatcaaagctatgtcagcacgcgaaagcaagtgttggtgcccctgcaatgctgactggagctcattggcgttgatcccatgaactccactgcccccttgatgcaaaatatcatcggttgagtttggggtgtcaaagtagtagtcaccactatctctggaaacatgacggctcctcagattaccagcagagcttcgaacacccatcaatggccctgacatattcattaatgctggaagcagctggcctgatcggcctgccgtggggtttggaatgcttacctcaggagccaatgggctcagtgggccagatacacttcggccagtaactgcagatgtccgccagctcaggtttccactgacatttctgacggcaccatcaagggaaccacgaacaagaaggggggacatgtgaggctggctatcaatgactgttgaaacctgagaggcagtaggcccttgagaaaactccaatacaacatttgcagagacatcaaccttcccaggcctgactggttcctcattgtcctcgagcattctctgagataactcacagaccaagtgatcaatcgtctgttgtgggcaaatccgagcaagataaaggctgacacgctttgcaacagaaaagtaagtagcaaatgcaccagtgatctctgctgatggattggcatcacagtcctcgatccctcttgtgatcaagaagttcaaaactgggatgatattgcgagtattgcttgcaacagtgctccaaagtttctcaatctcatcaggaaactgatcaccatgtttccatgtcacataataaagacttttcagtaacctctcactccagccagattcctttagtctcacaaagttgagattttctatccaaggagccatgcaagtaaggacctgatgctgtgcaataatgtccactgcatcaagctggcgctgcattatctcctcacatagatgctcactgagctcaggatggtccttggcaagctttgaggacagcttatactggaattgttggtaggaatccgggaggttgccaacaacagaagcccggtaatgcccaataccatcagtatcatcctcagcccattcacgaagagaaagcgtctccaacat

SEQ ID NO: 26691 - DNA, 382 bp, Setaria italica
  Peptide Sequence Number=SeqID_92665
aataatatatccttgcacatgatagacagttaatcataaagctcaattttaatgtcagcaaatgagacataaggtagcatataaagcatgatcatgcagcactcatacctaagctgttaatttgcaatcaaatgaatgatcccagcctcccaggagcttaaagctaaactgtcccaatttgctcataccatcatatattttaatctatcattcatgcccccaacaaaaaagaactctttgtatgtgtggaaaaaggcttgcttgaaaagttttgcaatgcacatatggcctctactgttgcatttaagttggtagctcatttccagctgtctcgcaactgtatgttttatgagaggtgggtacgttaacattatccgtctgg

SEQ ID NO: 26692 - DNA, 648 bp, Setaria italica
  Peptide Sequence Number=SeqID_92666
tttgctttaaccatcacatgagcacattacaactattgattaggagagtgttgacaattagacttggctacctacgtttccccgtgttcctcacacaaaaatgtaacgtgttaaaatttcagacttgacaaatggaaaaacaattcatgtggagaaaaaaatgatgtgctaattacaacaggagcatatggatattatcatgatcataacacttattattttaatagccaatattactatctttgaggaattttcacacataatttggtataattccatatgcagaagcagtaatcttatctagcatatgcacttactggtttgaccaccagctgaccttgactttggtagaagatcaatggcacgttgcccacaatatttcctgtactgaaactttacaatgccaaatagctcatgaagccaagagttatatgaggtatatacattaaaaatcatttgaaagagaaatattgggatctggtggcatacttatttaacatgagtcaaataaagccataaaggtgaggaacaagaattgagggagaacatttcaaacaggtgagctgtaacaatttgtacaggcaatcagatatttagggaaccaagatgtaaagggatcaaactgaaaaacaataaatggaagttgta

SEQ ID NO: 26693 - DNA, 493 bp, Setaria italica
  Peptide Sequence Number=SeqID_92667
taaccgttaagtaactaattagggttaccttttttagttttttcgtttagtttctttagacccgacgcaacctcatgcacgacggccgtgacatgggcctgttcgagcacttcgccgccgtcgcgcagcgcctcggcgtgtacaccgccagggactacgcggacatcgtcgagttcgtcgtcaagcgctggaagctggagacgctggagggcgggctctccggcgagggacgcagggccagggacttcgtgtgcgggctcgcgccgaggatgcggcgggccgccgagcgcgccgaggacagggccaagaaggatgagcccaggaaggtcaagttcagctggatcttcgatagggaagtggttgtctaggcactttgtgttggttgctggctcctgagtttgacatgatcaggtcatgtcgctgtctgtcagtgtatttgtcacaatgtgttcatgtatttgataatgccagaaaagtaaataagttaacttaa

SEQ ID NO: 26694 - DNA, 381 bp, Setaria italica
  Peptide Sequence Number=SeqID_92668
ttgcagagcaaacccgacgaagttgcaaacaatgaagttcaggagctcgccggcggcgtctgcagcgattgccatcgctgtggtcttcttcctctctgccaaagcaccaccatcggccaatgctgctgtcgtcgaacacacctttgttgtgagccaggtgaaaatgacgcacttgtgcaacgagacgctggtcaccgttgtgaacgggcagttcccaggccctgcgatagaggtcacagagggagactcagttgctgttcatgtcgtcaacaagtcaccccacaacctaacaatccactggcatggcgtgaagcagcggatgaactgttgggcagatggggtgccaatgatcacacagtgcccaattctaccgaaccagag

SEQ ID NO: 26695 - DNA, 184 bp, Setaria italica
  Peptide Sequence Number=SeqID_92669
aaatagtgcagacacttgaagaagctggcggtcaggttgactatgttgagattgtggagcaagagagcttgacgcctgttgagaggatcgatcgccctgctgtgatttgtgtcgccgcatggtttgggaaggtgaggttgattgacaacatcgagatccagccaccatcgtgagattcggaaat

SEQ ID NO: 26696 - DNA, 385 bp, Setaria italica
  Peptide Sequence Number=SeqID_92670
agatttgtgtacaccactatttatgcatgaatccagtccaggaaaaaaaactaatgcatgcacagacctgtcctctaattcttatctgcttgcagtgatatccatatacgaagcaatgtatcatgtccagtttctccatgtggaagccccctgctaaagtcgaggtctccccaacacacaagtggcaggatgtcaccctctcctatttcgagccctagaactacttcaggcacttccacacccctatctggtggtaatggtgctattccttttaaccacctaaggtatgcaacctacagcagtgagggatttgggaccacatctagaggccgggatgatctctttcccaaccggcataaagatcctatccttgggcaattcactc

SEQ ID NO: 26697 - DNA, 1279 bp, Setaria italica
  Peptide Sequence Number=SeqID_92671
tggcagaccagagaatccatcaagtccagcatcacgatggaagaagggcaagctgattggtcgtgggacatttggtcatgtgtacgttggtttcaacagtgatagtggcgaaatgtgtgcaatgaaagaggtcacccaattcttggatgatcctaaatcgaaggagagtgcaaagcaattggggcaggaaatatcactcttgagccgcttacggcatccaaatattgtacaatactatggatcagaaagggtcgacgataaactttacatatacttggagtatgtgtctggtggatccatacataaacttctacaagagtatggacagcttggtgaaccagcaatacgcagctacactcagcagatactttcaggcttagcttatttgcatgccaagaatacagtccatagggacatcaaaggtgcaaacatactagtagatccaagtggccgtgttaaactagcagactttggaatggcaaaacatatcaacgggcagcatcctttctcatttaagggtagtccatactggatggctccagaggttataaaaaattctaatggatgcaaccttgcggttgacatatggagtttaggatgcactgtcctggaaatggctacttcaaagccaccgtggagccagtatgaagggattgctgcagtgttcaagattgggaacagcaaggaacttccaccaataccagatcacctttcagagcgctgcaaggacttcattaggaagtgtctgcaacgtgacccgtctcaacgtccaacatcagttgagcttttgcaacatccgttcatacaaaatggaatttcacttgagaaatctgttgctcctaatcctttggaacatctggctgccatatcctgtagaccaaaacccaaggtggccatgcagacaaggaatacctccttaggtttggagggtcagactatttaccaacgaaggggtgtaaaattatcttcaaaacacagtgatatccatatacgaagcaatgtatcatgtccagtttctccatgtggaagccccctgctaaagtcgaggtctccccaacacacaagtggcaggatgtcaccctctcctatttcgagccctagaactacttcaggcacttccacacccctatctggtggtaatggtgctattccttttaaccacctaaggtatgcaacctacagcagtgagggatttgggaccacatctagaggccgggatgatctctttcccaaccggcataaagatcctatccttgggcaattcactcaggcgcatcaa

SEQ ID NO: 26698 - DNA, 722 bp, Setaria italica
  Peptide Sequence Number=SeqID_92672
agtattgggggtgagagaggggtatacaaatggagagttactgctttgggtccttcagtgattcagtctgggaatctaatatacagtcccatcaatgacacttgttagcacgttggttgtagtatgctaaggcaagttgtttggcctgataggaatgggcggaatctttgttgacttgaattgcattgatgacaacaaagatcacatccattgccaaccattagcttctaaagcaattgtcaatctttctgaattcttaaactatgatacaattccagtcattgaatggttatagccaaaaaccaccagttaccttaacaaattccaaaaaatgccaccttgctttttacactctgatagttatttaccatgctggagtccaaggtttagagggccagatgttaggtcaagtgaaggatttagttccacgtgatcgacaaaggcatgacgagtaaaatgttcagagggggacagcctttcacgcaaatcaaaaacatttccaagtctctttccaaattgagggctcagaatatcagcttcagatactactctttcccgaggtccctgtgcgacttgatgcgcctgagtgaattgcccaaggataggatctttatgccggttgggaaagagatcatcccggcctctagatgtggtcccaaatccctcactgctgtaggttgcataccttaggtggttaaaaggaatagcaccattaccaccag

SEQ ID NO: 26699 - DNA, 408 bp, Setaria italica
  misc_feature (29)..(29): n is a, c, g, or t
  Peptide Sequence Number=SeqID_92673
ttgctattgttgtggtccatatggtaccngtcactgcccaccgtgtatagctgtttgcaattggatttttcgtatcctcatgatgtgacgtctcatattatatgtcattttgagtggtagcaaggtttcgactcccgatgagttttattaccttcagcgtcagaatggatatacggatcacgcatctcattttctgtcacgcatccctttcttggacaattggattcatagtcgtgtgcctttgctgacttgtccgtgtgcttttgctgttggaaggttcacgctccaagtcataccttaaattgccaatcggtggtgctttatgataaggctgaatctatgctctgatgttcaatatttgttctttttcttgagaacccaattgaactagtggcgccagtttctttg

SEQ ID NO: 26700 - DNA, 669 bp, Setaria italica
  Peptide Sequence Number=SeqID_92674
actttactaggaagaacttagggaatactacttctgggaagggaggaggacaagcttcgtttgcaggggcgtcttcttgctcaagcaagtagctatgctgctgcttcggagatatatcagaaggtcctcgagtcttgtcctgatgactgggagtcctttctccattatataggatgtttgctggagcatgatgtgaatttgcctaaaccatgcactggcgaacacacttgtccttcctgctctgttgattcagcattgtccaacaagacttctcttagccaggagctggttgaatctcgccttacaagtgcactatcatttgtgcaaaggctacaagaaaataactcaagtgattgtgtcagaggacctcatttagctaatattgaaattgaacggcaacggtgcctcaacggaaactcaaacaataccaaacttatggaagctttggtgaagtacttccacagatttggtcatctgttttgctcagcatctgatgttgaaatttaccttcatatgctatctggcaatgagatatccgagctgctagataaaatttctggatcttttgatgcatcatcagtttcagttaacacactgggtttgacaattactctttcaaggttcaagaactttgggaactttattcacaaatcaactgcagaactccag

SEQ ID NO: 26701 - DNA, 2229 bp, Setaria italica
  Peptide Sequence Number=SeqID_92675
gccgttcaatttcaatattagctaaatgaggtcctctgacacaatcacttgagttattattgaaattgaacggcaacggtgcctcaacggaaactcaaacaataccaaacttatggaagctttggtgaagtacttccacagatttggtcatctgttttgctcagcatctgatgttgaaatttaccttcatatgctatctggcaatgagatatccgagctgctagataaaatttctggatcttttgatgcatcatcagtttcagttaacacactgggtttgacaattactcttttcaaggttcaagaacttttgggaactttattcacaaaatcaactgcagaactccagggcattgcaaaaataatggttgatacattttataaaaacttgtctctctcaaatgacttggatcctcaggaaagcatgtatggtgaagaacttctgtctatggctagcagtattcttgtgcagctatactggcgcacaaggaacttaggatacttactggaagcaattttggtactggagtttggattgactgttcgcaagtacgtctggcaatacaagattattctggtgcatctgtactcttacctgggggctcttccattagcacataaatggtacataaccttggaagtgaaaaacattcttctagagtctgtctcgcaccacatcttgccacaaatgttaaattcccccttcttgcaacatgctgctgatcttgttaaggattatttgaaattcatggatgatcatttgaaagaatctgctgatcttacatgtctcgcgtatagacaccgtacttactcaaaggtaattgagtttgttcagtttaaagaccgcttgcaacgctccatgcagtatctttctgtaaaatcagattcggtgacgttacatctgaagcagaaggctgagtttcttgatgaagtggagtctattcttggaaatgtgagccatggaacaaagttggtagagctatctaatgaggatagcatgaaacacttaaccttcaatgaagaccttgaggcgcggccttggtggacgccaacaagcagtgttaatttcctttcagaaccatttgatgaaggctcaacacctgcaagctataggaccaaaatgtgcaagcacaaatctgatgagaaggatggtccaaagctgaaagatgcagagagaaaatctcttgttcctcgacttgtttatctttccatgcatggttgcacaacttttctcagggagggtgaatcaaacggtgcttcccctgatgtaactgctgctggggagatgaaaactttgcttgagaaatatgccaggagcattggttactcatttgatgatgctctaagcatagttctgggtatgtcaactggcaagaaggctgtcaaggattttgctcctgatatagtcagctggatgagctttgctgcatttatcaatgcttggaacttgtgttctaatgagtcgttgatccctggaattgaccagaacagctcaaattcttggcagattgtggatagcctgttcaaaacctgcatagagcagcatctgactgatgccaggcaaatgcttacttctccaggaaacaatattccacttctagcacggatggttacagaacccatttcctggcatcttctggtaatccaatcctgtatgagatctatgactccacaagggaagaagaagaagaaaggcggtccattggagcgaccaaacacccctcacttgcaggcaattcagagctccgttaactgcatggctgacacccttcggagcatccaaacatggttatcagatcaagtgaggccagaggagcaagctctggatgccctactgtcacatttgcaaggatccagcactgatggccctggacagatctcccgtaccttggacgagagcgcagcggcggccaactctgaaatcggtggccggatcgcccagtctctggaagcatggagctccaccagcgtggtgaggagaatcgtgggggctggggacgagacggtagccgagttgaagaagatatgtgccctgaagctgaaggtgctttcgtcagcatcggcttctctgtcttcggtgttgcactagacagaaattttggtcgtgtgaattttccccctcatccccgactgttgtggcttggaagcccgttgatgttgtaacgctaaagtgtgctggctgtttactaatagacaaaattttagaattagaagtagaacaaaaaaaaa

SEQ ID NO: 26702 - DNA, 245 bp, Setaria italica
  Peptide Sequence Number=SeqID_92676
ttttttttttaccgtcacaacacacaggtatttcattgcaggttcatacagaaaccaccgttgtaggttcttattaatacagacactgtcagacgtgcactaaattgaaagtcatgactgtcatagtgttaagcggccggaccgcttcgctctgttggcaccactgttaggtcctgtttggttaggctgtgtaggtcctgtttagttggactgtagtttttggagaagctcccgtgcatcacgct

SEQ ID NO: 26703 - DNA, 658 bp, Setaria italica
  Peptide Sequence Number=SeqID_92677
tcaaaagaacttaggtatcggtaagttatccaccaaaacaatttttccccatgtaattattgtagatgtgtaatatatatattggtagtgtgctttaatagaattagtggtctaagataataccatggatactaatgtttgagacaaacagttatttgtgaaaatgtggaacatataattatatattattattctgtgccttcttgtcctttgtaactcaagtctattacccctcttgccagggaatgtttccatcgattccctcgatcgatgaaattgaccattatccccagggggagattgcggatgggttcttatggctcctcctaagctagcaatcgacaagagaagggaaccttgcgccagtcatggaggttggaattccatggccacgcatcttgcagaggggattcgaacccctcccggttttattcccggtgctaagaagtaggtggctaccccactcttctctttttctcctatccgccgccgtctagttatccacgagcaaggtctccctacttgaatgtgtgatgtccgtagggtatcatcgtagttcaagcatgtgggtgcctatgtctcgttgtgttaagtcaaacacgagagtatagcctagatgctaggaagaggaagactctcctcggggaggagaggcttt

SEQ ID NO: 26704 - DNA, 397 bp, Setaria italica
  Peptide Sequence Number=SeqID_92678
aacatccacggcagatggtcagaggcaatgttttgcccggcgacagagtgagcaacaatgtttcctcaggggatcagagcctacgcacggtctctggtcactgaaatagctgacgacggcgcggacggacaggtcaaggcagcagtatgcacgagcgtgggatacagcggcagcgtgactgcatccagcggcaagacggcgctgctgcccctcggctcctccgcatcgtgatcgcgcgaagccctccactgtaacggcttccacagtctcctccgcggtggctcgggggcagttcacagggccactggtgactggggcggtgagcggcggctccaaccggacacccgggaggtagtacgcggcatcaggcgcgctggccttcgggcatggcacggcc

SEQ ID NO: 26705 - DNA, 321 bp, Setaria italica
  Peptide Sequence Number=SeqID_92679
atacagctagcgcacaaccgcttctcttccagtacccatggcgtccaagaggggcctcctgctggtgatcggggtcgcggtagcgatcgtgctcgcatctggcgcgccgcctgtccagccgccgcgcatccaagccgacgtcgtcgtgatgggcttcgtgccctgcaacaacggcacgtccatgagaacgggctctgctccagggttcgcaggcccggtggtgcagctgcagtgcacggacggcgccgacctggcggccaacgcgacgacggacggcaaggggagattccgcatggcggtgaacacgacggtggcgccgtc

SEQ ID NO: 26706 - DNA, 258 bp, Setaria italica
  Peptide Sequence Number=SeqID_92680
accgggcgcgcagatcaaagccaaggcaaaggcggcggggcccaggcctcggcgcgtcgcctcactgatcgagcgggcccgcgcagccaggggggccacgtcccgccacgtgtcggccgctgcgcgctcctctcctctcatcccccgcgctccttcctcctccgtccgccgcatcggaaggcccctacaaccgcggccactgcaaccgcatggacggcacgagcctttcctctgtctctctctccctctgtcctccga

SEQ ID NO: 26707 - DNA, 325 bp, Setaria italica
  Peptide Sequence Number=SeqID_92681
tacttcgccgacgacgactcaatgggatcggccttgagctgctcgcagaggacggaggacggcgactgcttggcgtggtggacgggcagcgggatgagcggcgcgccgatgacgccgagcatgagctgcagctccccgcggctcatggagcagggctcccccgcgccggaccggtcggcggcgtgcgaccgcgtccacgccttgacgaaggcgttggtgcagccgaacctggagccccgggagccgccgccgccgccgccggagaacatctcctccgggatgggcacctccagcaccgtgtccagcgcgtcatcgcgctccaggg

SEQ ID NO: 26708 - DNA, 388 bp, Setaria italica
  Peptide Sequence Number=SeqID_92682
accgcccgccggtcgaggactcgcagctgccgccgccgcagctggtggatggcagtgatcagcagcaggacagggacggccaccggagcaatcctagctcggcagcgcactccggcgccaggcatcgccattggcgcccttctctgcacagcatcgccgaagtcagcagctgatcttgacaaaaatccgtagccggtgaacaatctgcgttctagagtcaacgttcgtcagacttcagccttcctgcagaggaagagttgccgtggtgccaatgcgagaatcggtcagtttcattgttcggtacctcagtacaaaacaattccgaaggggctcgtagttagcatcaagcagcccatgtaagataaagaagtggcagatcttggtcagg

SEQ ID NO: 26709 - DNA, 641 bp, Setaria italica
  Peptide Sequence Number=SeqID_92683
gtttctcgatgagaggtcactaatgatcgtgaaaacctctgtacaggcccttcctggtgtagaaaacattaaattcaacactgacttacacaaggtcaccatctcatacaagcctgaccagacaggtccccgggacctcattgaagtcatcaagtcagctacatctggtcttgtcaatgcatcaatatatctggaagcagatggaagggaccagcataggtatggggaaatcaaacgatacaggcagtctttcttgtggagcttaatattcaccattccagtttttctcacctccatggtgttcatgtacatcccatggctgaaggctggactggaaaaaaaggttttcaacatgatgagcaccggtgaactattgcggtggattttgtcaacacctgtccaatttgttattggtcgcaaattttatgctggtgcttacagggcaatgtgccgtggctcaccgaatatggatgtgcttattgctctagggacgaacacagcttacttctactcagtttactcggttcttcgagcagctacctctgagacttacatgtcaactgatttttttgagactagttccatgctcatatcatttatccttcttggaaagtaccttgagatcttagcaaaaggaaaga

SEQ ID NO: 26710 - DNA, 651 bp, Setaria italica
  misc_feature (47)..(47): n is a, c, g, or t
  Peptide Sequence Number=SeqID_92684
cgttcagcatgccggtgctcgcgtactctggtgccacataaccaaangttcccatcaccctggtggtggacgtagttgctgtccgaacccaggagcttagcgaggccgaaatccgagaccttggggttccacctcctgtccagcagaatgttgctggacttgatgtccctgtgcaccaccttcggctccagccctcgtgcaagtacgtgatcctgaattcattcccaatctcagagacgcgcacatcaccaattcagagcagaggtagtacatgagaagaacgaaaagcactgggaaattcatttcaggcaccctttcgccatgccgagcacgatgttcatccggatgtcccaggtgagcgggctcacgggcccgacgtcgccgtgcagccactgctcgaggttgccattgtcgacgtactcgtagacaagtatccggtgagctccctcggcgcagtagcccagcagccggacaagattcttgtgccggacgcggccgatcgcctccacctccacccggaactccctctcggcctgccccctgttgttgaggaggttcttgacggcgacttggtagccgtcggcgagaacgccgcggtagacgatgccgtagccgcccttcgtccgtacgtacgttgtcttcgggggtcgt

SEQ ID NO: 26711 - DNA, 1463 bp, Setaria italica
  misc_feature (1)..(37): n is a, c, g, or t
  Peptide Sequence Number=SeqID_92685
nnnnnnnnnnnnnnnnnnnnnnnnnnnnnnnnnnnnnactttacggtaattacttgcacggtttcagccacgtttcttttgtacatcagggaatgaatcaacgagtagccaaactgacctgagataagagcagacgagcagttcactatacaaacagttgggcatcaggcaaagctaggtcaatcacggtagatgagttcaaaacccagggaggcaaccacgcctccgcaagaagatcacacatcgacagggcagatggtgagagggagaaaccagatcaaaacgacaccgacaaaacagagttgcagcatccccgtgcggcccgcaggcggcagaactcgatcagaaagaagcccggcaggtgcgtgcgtggtagcgctggctacatgtcctgcactaatctggacggcgtgctggcggtggtcgtgttgccctcgtagcagctgctgtcgcacgaccccgccaccggcggcttccccggcgtcctcgccctctccagggggctgccgttgcccggccgtagagttcgacgatcctctcgatacgggaagtcgtcgacttcgagcatatggattacatgccccatcttcggccgcttctgcgaatcgggatccacgcacctcagcgccacaagcagagccttcttcagcgccttggaggaaggcttctccggcagttttgggtccaggatcgcttcgtagtccctattggtcaccttgttcttgagccactccacaaggtttacctctccgttgggtctcgcgtagtcgaccggacttcggccggagatgatctccattatgaggatcccgaagctgtacacgtcgctcctctcgttcagcatgccggtgctcgcgtactctggtgccacataaccaaatgttcccatcaccctggtggtgacgtagttgctgtccgaacccaggagcttagcgaggccgaaatccgagaccttggggttccacctcctgtccagcagaatgttgctggacttgatgtccctgtgcaccaccttcggctccagcccctcgtgcaagtacgtgatccctttcgccatgccgagcacgatgttcatccggatgtcccaggtgagcgggctcacgggcccgacgtcgccgtgcagccactgctcgaggttgccattgtcgacgtactcgtagacaagtatccggtgagctccctcggcgcagtagcccagcagccggacaagattcttgtgccggacgcggccgatcgcctccacctccacccggaactccctctcggcctgccccctgttgttgaggaggttcttgacggcgacttggtagccgtcggcgagaacgccgcggtagacgatgccgtagccgccctcgccgacgacgtgctcgggggcgaaggcggcggtggcctcctcgaggtcccggagcgtgtaccagtggccccacccgaggtgcgacacctcgggccccacggcctcgcga

SEQ ID NO: 26712 - DNA, 509 bp, Setaria italica
  Peptide Sequence Number=SeqID_92686
gtcaagcgagaagttatggccactggaatagcaactaaaagagaatttgcatttaacacaccaatgtttggagcaaagacatttgtgacatacattgagccagttttcagcaaaggtggagaaacaattggtgtgaattatgttgcaatggacataacagatcaggtcaaaagaagagagaaaatggcagacataagggtgagagaagctatccaaaacgccaaggaaacagaacttagcagatctcttcacataacagaggaaacaatgcgagcaaaacaaatgctagctaccatgtcccatgaaatcagatctcctctttcgggtgtccttagcatggctgaaattcttgcaactaccaaactggataaagaacaacaccagttgctagaagttatgttatcctctggagatcttgtattgcagctgatcaatgacatccttgatctttccaaagtggagtcaggggctatgaaactagaatctacgacattcagacctagggaagt

SEQ ID NO: 26713 - DNA, 690 bp, Setaria italica
  misc_feature (643)..(690): n is a, c, g, or t
  Peptide Sequence Number=SeqID_92687
cggcagcaacagcaagtggggtctttcttgaccatggtccatcactagctgcatacacacacacacacagacacacacacacacacatacgaaagcagcgtacaaacgtgctgtacgtgtcctccttgcacaggtaaaagtggacaccatgcatgcatggcaacttcatctaccaaattaaacttttactctcccttttcgatcgatcgaccgagagctccaaagtaattccggctagctgttcatcgttttcacctggatcggatcctgctgcacatacacagtacatgggcgtatacatacgccatgcataaagacgtgagattcaccgtacatatatacatgatggtggtattggaggaggaagggactgtctcgcgtagatactgtgtgttactgctacatattacagtggtatggtacaagcacaaagacatctagaaagagagagaatgtgctccgcgggaatttctttattttttgggtatacttttgggcctttctttcttttttttcttccccttttttaattaagaagagttactgaactgtccattatgtaatttattataaattcgttattacatatactgtggttatattgatgactgttaaactatatgtacacttaattaggtaaaannnnnnnnnnnnnnnnnnnnnnnnnnnnnnnnnnnnnnnnnnnnnnnn

SEQ ID NO: 26714 - DNA, 307 bp, Setaria italica
  Peptide Sequence Number=SeqID_92688
gggtgattgatgtgcagcggggcagatcatttcagggactcttcaggaatgccttctccctactctgtgttcatttgtgttcgattctttcgttccccttttagaaatcaatctaattcttttggtaatattgttggaatttgctttcttgattttcccctttattatcagtggatcgttgtttagactaaaattagccgttcagaatgattgtttaatggttatggattggaatttggatgcttcaaagtacctgcagcagccaggcggccggggagatcgctcccatcaagcgacgtctagcgcg

SEQ ID NO: 26715 - DNA, 620 bp, Setaria italica
  Peptide Sequence Number=SeqID_92689
gttagcttcgtgtcatttcattaagaaggaaaagcacagagggaccggttagagccggacccaagtacaggactcacaccacacacacataacaaaagctcacaggcttgccacagggagcttatcaccaaaacgacctagctaaacaccacagcctaaacagctctggaaagcgaccaagcaaggagctcttgaagtttagaagctcctgccatcccccacagactacattcatcagctacagaccggagcaaaactggaatgctaggccttgcttgatcaaacacacgagagtttctatgtttccagattttccgagccaccaagatgattagggaattcaaccccttactcaaattcttaggaacaagtctaagagctttcttccaccaactggaaaatctggaatccgaagttgtgggcactagatttagtgctgatatgactgaatgtgttactgctatgctccattaaatttgaccatctgtaggtacaaacacatgtcctagcactgctatctcaaacttcatgcatgtactctgtagaatgacttgctgccatttgaaagtgttgattgacagttcatgttaatttaattattagtattcattacctcaaga

SEQ ID NO: 26716 - DNA, 355 bp, Setaria italica
  Peptide Sequence Number=SeqID_92690
tgaagcccaagggctccgccgggatggacgtcgtcccgccgctgtgcccctcgccggccatgcagagcgcgcggctcgccgggcggaggcgcaagggcaagcagagcgccgccgggacggcagcgggtttcgaaggctgcatcccgctgaggttcagcttgggccgggcgatgaagaggtgggtctaaacaaatcaagaggagcgccttgccataaaattagatgtgtacatgtgtcgtagtacaatgatatagtatgtgctgacaacttgcaaaggatgtaaagcatgtatgaaactttaaggcttaattgtgtacatgaatcaatcaggttgtgagataacatccagatttag

SEQ ID NO: 26717 - DNA, 653 bp, Setaria italica
  Peptide Sequence Number=SeqID_92691
cctcaccaaaagcagcttgagacaagcgccgagcttctgcatttgcccaatcaccaaactcttcttgcctcccatcaacatatggctgcagccggtcctttagactctgaataagtgtttgctctctttcagtttgcaagttctttatcttctcttgaactcttgtccttgcctcaggggtagttgattcttcctcaatctctactgaagcaacagatgctagcgcaagttgaccaacataatcttcaaaatagtcactcccaaaaagcatcccaaagacagcagttggatcgatcatgttatcttggggaagaccttcctttccatacttatcgtaagcctcctttttcaccggatcacttaagacttgataggcttcacctaattcctgaaacctccaggcggcgtcagggttgtcgggattcttgtcggggtgcaccagcttggccttgaggtagtaggccttcttgatctgggccacggaggcgtcagtgctgacctccaggacgtcgtagtacgcgctgtccttcaccatttcagcgctccccgtccgaccttcccccttcttcctcctggaccggagcccgggggcggatgaactccaaggaaaacaacgacgccgcaacggggatggctccgagatcggatcctgg

SEQ ID NO: 26718 - DNA, 372 bp, Setaria italica
  Peptide Sequence Number=SeqID_92692
aattacatacgcgcccgatttagtatgaggcgaccacccctaaccaaccaccgctgctaaccatcagatcgagcagcggccagacaactaaggccttttacgcctgccaacatccagtgatcagcttcatcctgtgcaaggagaagcgcctgatccatcctgggcaaggcaccattaaaaactatatcattcctcatcttccaaaggatccaagcccctatcacaaccagcgagttaaatccccgtccagctttcttgcattgttttaggtcaaccttaaaaaaccaaaattacaaaggaacttagactagacccaatttaagtaagtaccttagtaataactaaagttacttagtaggtagaactttagta

SEQ ID NO: 26719 - DNA, 385 bp, Setaria italica
  Peptide Sequence Number=SeqID_92693
gtcagtgtgtgtgggcgggctgcggacagggggcaggcagcagcgcgaacgaaacccacgcttctctgaacaccacctgctcgactaaatgcgcctgtgacgccgaactcatggccgacacgattgaccacgcgggcatgtcgccagggtcgccagggcgcgttcccggagcggattgctggatcaacgccctgcccgacggcgtcctccttcgtgccatctccttcctggacgcccgccagctcgtgcagacttgcgtgctgtcgcggcggtggcgccacctctggcgctccgtgcctcgcatcaacgccacgcgccatgagttcgacggcatggcttatagcgaggaggagcgcgacgtgctgttcaagaagtttaccagcgg

SEQ ID NO: 26720 - DNA, 405 bp, Setaria italica
  Peptide Sequence Number=SeqID_92694
gatgctcgtcccacatctcgaccaatgtgactaggttttccagttcttctgttgatcctccaacatcaaaaaagtacatcgacaacggttgtgagcacgccatttttggtcccatagaatgcgagcatccgacagttcaggagtgaatatggtgccagcagcagagaggtagaagtacgccaacttctgccgtgcgaatggtaactggtccagcctgctctcttttacccagctgtcgatatgacgaagttcttcctggtaagtaaactgagaggaactgaaatctctgacacccaatgctagaatatcattgttgttataacaagacaagtatgatgtttttagcatttggtgtcctgtggcatcaaaattttcgatgttcctcctgtggtcaagacgatccaa

SEQ ID NO: 26721 - DNA, 628 bp, Setaria italica
  Peptide Sequence Number=SeqID_92695
caaggtgaaggacatgatggtggagcggggtttggagccaaatgcagtgacatacaatgttctgatcaattccctgtgcaaggaaggatcggtgagggaggcgatggctctaaagaaggagatggtagagaacggggtggcgccggatgtcgtgacatacaacaccctgattgcaggtctttctggcgtgctcgagatggatgaggcaatggggttgcttgaggagatgatccaaggagatgtggtggttgagcctaatgtgattactttcagctcggttttacatggactatgtaagatcggtcggatgttccaagcagtcaaagttcgtgagatgatggctgagagggggtgtatgtgtgacttggtgacctacaattgtctgattggtggattccttagggttcacaaggttaagatggctatgaagctactgaatgagctggctagttctggattggagcctgattcattcacctatagtattctgataaatggcttcagcaagatgtgggacttgaccgtgcagaaaagttcttgtgtacaatgagacaacatgggatagagcctgagcgagttcactatattcctttgcttgcagctatatgtcaacagggaatgatggagc

SEQ ID NO: 26722 - DNA, 723 bp, Setaria italica
  Peptide Sequence Number=SeqID_92696
tttctttatttccattttcaggaggcacgctgaaacctactcctactcccctgttttctccttcctttgatcttccaatccttcctcaacatcgttcttaactgaatcagggacatcacctttgtctgttgacatttcagtttgttcctcaacatcgttcttaactgaatcagggacatcacctttgtctgttgacatttcaggttgttgatcactgcctttgcaatttcgcctgtcgcagttagcaccgagactctgaacctcttgcttcacaggtactccatgttgatcagaatctgcatcttcatcttcagtggttacattgatttccatcttcacctttttaactgttcgatattgtcaatcatgctgaatcttcccagattatttctgggactgttttcaccatatgattttatcgctctaaaattatgaacacttatcaaatctactgccagtcctccaaacacaatgcgatcaatctcttctttgataagcccctcactgtgaggcatttcagttgtgctcttccaagaatttaaagtcttggcaagaaaacttgcatgcacttcatctttgatgaaagtattgataagatgatcaacagaatcagcagccattcctttcagtaagtttttgactattgtgctatatatttcaatttgtacttctcttctgatgtccacctcatctctttcttcagttaccctctgtacattcagc

SEQ ID NO: 26723 - DNA, 527 bp, Setaria italica
  Peptide Sequence Number=SeqID_92697
tttacaaatatcacagatgcacttcagaagctcaagagctgcaagaatctcacctccctgctcattggaaccaacttcaaaggtgaaaccataccgcaagatgaagcaattgatggttttgagaatcttcaggttctgaccatagatgcatgcccattagtagggaaaatccctgtttggctatcaaagctcacaaagttggagatactagacctatcaattaatcaacttactggatcaataccatcctggattaatggactgaaatttctcttcttcctggacatatcaagcaacaagctaacaggggatatcccaaccacattgatggagatgccaatgctacaatcagagaagaatgctgccaagttggacccaaagctccttgagttacctgtatattggacacaatcacgtcaataccgtgtgctcaatgctttccctagtgtattaaacctatgcaacaatagattcacaggcatcattccccgagagattggtcatctgaaaatgctcgatgtcctcaa

SEQ ID NO: 26724 - DNA, 577 bp, Setaria italica
  Peptide Sequence Number=SeqID_92698
agtgagaagctgagcagcatgcttgagaggaaggattcaccctcttggcccagattttctggaatactttgcttggtttgtttcccattctcatacctttgcaagcgatgcctccattcagataatgaaccttcagaacagaacatatgtgaagagggcatgtttttctgcagcctatgcgaagcagaggttttaaagaacagtaagcattgcagagtgtgtgacaagtgtgttgatggctttgaccaccattgcagatggcttaataattgcatagggaaaaggaactacaaagggttctttgttctaatggcttctgcggttatcctacttgtgatgcagtggttgtcaggagctcttgtgttgattctctgtattgttaagagaggagatttctccaggcagattgtcacaaagttgggaagcagcttctcaactgtagcttttttaatgttgtggcaacttgcaccattttagcaatggttgcgaccataccactcgctcaacttttatgcttccatattcttcttatcaagaagggaattagcacatatgattacatcatagctttgaggga

SEQ ID NO: 26725 - DNA, 941 bp, Setaria italica
  Peptide Sequence Number=SeqID_92699
tgttgtgcatgcactttgcaagaggctcaagatattgatgatagatagcaaatggagctgagtaagacaatagtggaagcagatcagcaaccaaactctctacctcatggcccggggcagcaacaattaaactgctaaagccgtgttctttccaatatttcatcttctctggtgatggtgcttttccaggtttagatttggaagcaactgaatcaccatcaccgtctttgcagtctaatgaagagttttcatcttgaccatccaaaggcttcgagacctccatatcagttggttgttctgttgacaattgtgccttctcatctgctgtgtcaactgcctgtgccagagatgcccgtgcatcctcatcttgtactacaacagaatcaaccacttccccttcagtgctaccattgagaacggaaggagtattcccagaactttgcattgagcataggtcactaagcggcacctgaacaatcctgctgaccatatcactgctcagattgtacattcttataatgtctatggagctgggtgaaccaagatatgtgctgcaaacatatcctgtacctcctaaacgttcagcaacagctccaacaattaaacctccaaccatatcaaccacaagcacatctgaatatgcaccaatgtttgccatagataataagagagatagtgtgtcaactcgcataaaccctattcgacctggacttttcttgaagtatgtctcacaaatgcttcgggtagaggggcgtcgcaaaagaactttaggtgcatatttcttttgtttctttaacttgtatttctcttgtgagaatgcagttttctttccaaatgtcgagctgtttgctatcaaagcttcaacaatctcgtcaccagttgcaccatccctcttcattgcctctatgtcatcactagataaattctgggctgtattgtta

SEQ ID NO: 26726 - DNA, 901 bp, Setaria italica
  misc_feature (898)..(901): n is a, c, g, or t
  Peptide Sequence Number=SeqID_92700
agtagtactaaacaaaaaactttacttttgctctgtagctcgtctcctcagctagtaagccatcatggcccccaccgcgatggccgccacctccgtcgctccattccaggggctcaagtccaccgccggactccccgtcagccgccgctccaccagctccggcttcggcaacgtcagcaacggcgggaggatcaggtgcatgcaggtgtggccgattgggggcaagaagttcgagaccctctcctacctgccgcctctctcaaccgacgatctcctgaagcagatcgactacctgatccggaagaactggatcccttgcctcgagttcagcaaggttgggttcgtctaccgtgagaacaacaggtctcccggttactacgacggccgttactggaccatgtggaagctgcccatgttcggctgcaccgaggcaacccaggtgtacgctgagctcgaggagtgcaagaaggcctaccccgacgcctacatccgtatccttggcttcgacaacgtcaggcaggtgcagtgcatcatgttcatcgcctacaagcccccgggctgcgaggagaccggcgtcgccaaataagtgccaggaactgtgaagcagctagccactaccccatggagtatatatcagtagttcagcttatttagggagctcacgcctttgatttttctttgtgccatttgtatctttgtccatctgagtgttgtgtatgtcctttcggctgacattgcgttaagtctacaactactattgttgggtgaggaataaacatgttgggctggctactagggctggagccagctcggctcggtctggctagctagcctaactagccagctcagctcggctcgttaaccaaatgagaaaaattgttggatcggaatggctagnnnn

SEQ ID NO: 26727 - DNA, 677 bp, Setaria italica
  Peptide Sequence Number=SeqID_92701
tggactcccttgccttgggcttctttaaaacaggtggcctgccagtgtgtggcttcggtgtggcctccatcccagcagcatggacggtcgaatccgacctctctaacaccctagaattatctatctcctttggttttctgggtgcagccgaggacggtgtaggaggctgtggtgatagctgtgctacctcagcttcaatctccggccacttctcctcaaacatgttcagcagctgctcggccatgaagtgcacgtcctgccccttggggttgtacgtcatggcattctggaacgttagacgcacatccccggcgaactcccgtggtgacttgtactgtcctgccgctagctttgacttgacagtgccgaggtccatgggcttggtgatgatggtatggtagtcgtgcaggccaagcgcactcgcatctaccggcttgttgaacacccagctatgcttgtgcttcatgagcctggcaagcaccgcggcgcaggtcttgaacacgggcgcgtagagcttgcgccgcgcctccgccgagaggtgcgggtgcggggctcccccgccttcttggacttgtgcttggacgccggcgggtgcggcgggagcggcgtggaggggtcgctggcggagagagcggaggagggggcgggagccgggagggagctgaggcgcttggagg

SEQ ID NO: 26728 - DNA, 174 bp, Setaria italica
  Peptide Sequence Number=SeqID_92702
gcgaggtggtcctcccgccgcttgagacgcagctccaccctccgggcggcttccgcgctgtgcagcccgtgtccatcagcctgccagcgtcgcccggcagcttcggcgtgcccacgcccaccgctgtgactgccgactccggcaacctccggaggcaggccatggcgaacagcg

SEQ ID NO: 26729 - DNA, 402 bp, Setaria italica
  Peptide Sequence Number=SeqID_92703
cctgcgcattcgcattcaaagttccgattcttggactagctagctgtcaatcctgagctccgatactgtcctcaatcctcaagcttcctcccggcctcccaagcttcttcttcccggcctcccggggggagggagagggacagagctcctcaccagttgtcctcttcactctcctccttgcttgctcacctcaaaaccagaatcttgctgtacgatgatatgacgctatagctccaggcctccaccccgaatccaaggtcccgccttccggcgcccccgtgctctagcgccgcttggattcgggccaatgggcgcggctcagctggtggccttgttcttggcgctcgccgccaccgccgccgggagggcggtgtcggcggcgggggcgcggccgagcgaggt

SEQ ID NO: 26730 - DNA, 456 bp, Setaria italica
  Peptide Sequence Number=SeqID_92704
ccttaggcttcgacatgtcaaatcccttccagcgaatcatattcttaagcccttttcaattaaatcaacaccttctagaacatttgttatgtcgtatatcctcctcttttgcacctccaatgtctcagctgctttatttaaatcaagggttccattttctgctccttgaagcaagttgatgaacttctttgtaagcagacttagtgagttgtcatagcggcagtggtatattgaatgtaatgaaggcccagaatctccttcaactgctccagaaccatctgcggtgcccgtgctgtgtttagaaacctttagtttcttcacccgtttgataacttttgctggttcagaggtagtatccttatcatgtccttgagtagtctctcccatgttgatttcagcttgagaattttctcctccattcttttgctcattcggctgtgagttgggcatgggcat

SEQ ID NO: 26731 - DNA, 349 bp, Setaria italica
  Peptide Sequence Number=SeqID_92705
ttgctcttctttaaattcccttgtggaggccttcatgttgttgatatgcttacagaaatatttcattctctcagttctgggaaactcaaatctccacagtaaggttccaacttcattggaagaactcatgttctaaatgctgatactagaagttgagatattagttggtgctgccatgttgaaatgaccctgcgctattatctaaattgtctgtaactaaaaaaatagcccataacacctgtatttcatctacaatattttcttgccaaaattgttaccattaatttagtttttgtgctgcttatttcacacgacgtgttgttcttgcctatctttatctacttattgg

SEQ ID NO: 26732 - DNA, 1733 bp, Setaria italica
  misc_feature (1692)..(1733): n is a, c, g, or t
  Peptide Sequence Number=SeqID_92706
cccggaaccgaaggccaagccggaagccgtgaccccatcgccatcacgcgagccgcaggcggagcctgaacccgacgcccctgccgccgccggaaaccaggagctgcagccgtgggagcagcacgccgcggtgatcaacctaccgcgctacgactaccgcgcgtcggggtccctcctcctccgctcccactccggcttcctcatcacctgccccatcaagcgtgagaaaagtgcgaccaaggaagccatttccattcttgaagagtacattggtcatgcaaagtgccatgtttccgaacaagtggaaccatgtgatgtggaaaatgcactgtactgtgcattttgctcattggcatcagaaaatttagaagcagcagtaacgggtgggaatagtattagtgttgcagaatcaactggaagcattggagagtcaagttcacctcagtccaagatgagtgaaaatgttgaccgggcttcaaatctctcactggttaagctatcaagaagtggtttgctcttctttaaattcccttgtggaggccttcatgttgttgatatgcttacagaaatatttcattctctcagttctgggaaactcaaatctccacaatggtgtcaccgcatatttcctgttcaagaaacttgtgttctatcagaaaaagacctacatgccactgtgtcaaagttattccttgacttcttgaggagcaagaataaccaggatgagcctataaagtgcttcaatggttcaatgtattacgtagcacttgtgcagatatccttgctgttcaggtctcatacactgattcatgtatatttaaattgtctcctacatttgtatgcactaccaggctcacttgttttctaatctattccatcacccttcattattatgcatcaaaattctgcattcttttgttaacgattgaaattgcaatgtgcacttaaagaaaatcattagctgtaatgctctctgcactatctcatgaaaacaatcgatcattacatcatcataagatactattcatattttatactcgacaagtgttacagtttgcagttgcatataatagaaggggcatcgatgagacagagacgaaggcacagaagaacagtaatgaaggttcaaatcagcaggctttgatggacagggagcaatgcttcaaagtcgttgctgctgctgtcaaatccattgctgagaactcagtggttgatcttaaatctcctgaggttgccgtactcgttgagatgctccccgtttctggggtaccccttggatcttcggtggctggggtgtccgttctcccagccgaactcatctccaccaagcctcgcctttctgtcaggtctttggcgtctgatgccaaagcaacaaagaagaagtgaaatctcggccgtgcttgacaccaaccagagtagctgtaatgtggaacagcgggttcaattttttcacctgctcattagtactactagagtaccatcatcttaaaccttgtttttttagatcaagaggagagaccatgatcgaggcgagtttgtaacaagcatagaagacactggcgtgatgccttgcacattgtatcatccatagcccccacaaacagtcgtctgtctgcctttggggaggtgaaattgtgtcttgtagcaacactgaagagttcatacagttcttggaggctagcttctcgtcgnnnnnnnnnnnnnnnnnnnnnnnnnnnnnnnnnnnnnnnnnn

SEQ ID NO: 26733 - DNA, 211 bp, Setaria italica
  Peptide Sequence Number=SeqID_92707
tttgtcagtgatataaggcttatactccactatgcaaaactaaacaattttggcaccaactgtgaagtgtgtatcttcacacaacgtattccatggatatggctgctaggggggcggagccttgggtgcgaaagagggccatttggatggtgcaccttacgaatcttacacacatccaaatctaatggaccgtcttcaaagtgcatccaca

SEQ ID NO: 26734 - DNA, 766 bp, Setaria italica
  Peptide Sequence Number=SeqID_92708
agtttctctctttacttggtatgataaatcacactctgcattggcggcggcattgctaatttccgctttgggcaagaggggcgagagcgcagtcactgcttgtgggcccaacagcaggcgtagatgctgtttcgtactgatatttattgactggaatttaaacttcgctgatttcttatttctttactaatgctatgtttgctgatagctagaaaatcatcagagtagtaatacttgttggaaaaatactacatccgttccaaatcgccggctggagcatgatcagtcaaaacaaaacggtctcggtctacgatttgaggagtagaaatttacttgaacttgagctgtgttggaggcataataattaagaaaaatgccattgtacttttcatgtagcgtggcacaaataaaaaaagaagcagcagaaagcttgattgggagaggtgagaggtaaaccgcacgtgccgaatttcaccaaaaggtgagcagaacctctgcgctgtctgtccccaccccaaaaaaatgatggaaaatgatcgaacaaatttaaaaaatgtcgtgcgatctagtgtcatgtcatcactaatctaaggacagatatcgaaacacaaagaactcttatcaacacaaaacccgaaccgcagaacaagaaaaagaaatggccggaaacaaggtaaaccggtgacattttgggctctgtatcagagcctctgatgcatgcacctgaccggccaccaccccacccgtgcgtcacatggctggtcgg

SEQ ID NO: 26735 - DNA, 490 bp, Setaria italica
  Peptide Sequence Number=SeqID_92709
aaggccacctcgtaggagaagaccagcggccggttgccctgcacgcgcatgccgaccaccgacgggtcgcacccggcggcggccttcgacgcgatctcgtcgtacatgctcttgtccctgacagccgcggcgtcgtggtccacgctgcacgggacgacctcgaacccgacgaccgtgtagccaccgccgccgccgtccttgccgccgttgaggctgagcagctccgccccgtcggctgtcgccatcaaggtctccaccctggtggtgccgttctgcttgttcaccagcacggtgagcttgaggtggttgtacacgtagtactcgccgtcgtcggcgcgcacgccgacggggaagccggtggagcggaggagcgtgtcgggcgcaatcgggctcttcacgtagcgcatgacggggagcgtgtcgaggaggaggttgacctggtaggtgtcgtcgatgcgggacttgatgagctcggtggcgccgggggtcg

SEQ ID NO: 26736 - DNA, 256 bp, Setaria italica
  Peptide Sequence Number=SeqID_92710
tggtgcaagaaggccagaaagaggggatctttgctgaattcgtaggctctgaactggtgcaggagttgggagtgtggccattgcctgattggggacataaggtgggggttgtccccagaccccagtgagctccacaccggtccctgctgttctcccagtcaaaattctgtatcctatgatgctgagatcaaggggaaaatatacagcagatttagctgtgtaggtgatcaattgctggtctctttgtcgtagttta

SEQ ID NO: 26737 - DNA, 602 bp, Setaria italica
  Peptide Sequence Number=SeqID_92711
aagagggcaagaaagaggggatctttgctgaattcgtaggctctgaactggtgcaggagttgggagtgtggccattgcctgattggggacataaggtgggggttgtccccagaccccagtgagctccacaccggtccctgctgttctcccagtcaaaattctgtatcctatgatgctgagatcaaggaattaggcataatagtttggttgtcttggtttcctgctgcataaagttgtacatattttttctctggattcaagatcctccctatcctttctaggggaaaatatacagcagatttagctgtgtaggtgatcaattgctggtctctttgtcgtagtttacataacatcgttgatgccatttccatctccaactgtattttgctgaattaaaggacattggagcatatctgaccttcccaaggaagaaggctcttgaccctccagattataaacatgggttggctgagtaaaatatttaaaggttcagtaaatagagtttcaaggggacattacaacgggaactcccatgaaggctattcaactcaacacactaaatcatatcagggtgcgcatggtaatgaggacgaagacatgga

SEQ ID NO: 26738 - DNA, 405 bp, Setaria italica
  Peptide Sequence Number=SeqID_92712
ccccggcgacgagcacaccaccgacggcgtcgagaccctgctccagttcaacatccacctcatttgagccgctccattgcaagctcttgtccttccgggttacgatgctttgcagtttcgtgcagcgtttgaattttcaagtatgccacttttctgccagcatgtatgtaatgtgataggtgcttcgatcgcatcagcaaattgtgatattgtatggagtaaattaagtatctttaatatgaaatctcccagaaaggcagtgaaatgagactccgaaatcctcaaatggaactgagtgagctgcaagacacaatgtaaaacagaaaaaagactggttatgtagatactaaactgttcactgaaaggctacagttttgataacaactcgaacatgtaattctatgg

SEQ ID NO: 26739 - DNA, 902 bp, Setaria italica
  Peptide Sequence Number=SeqID_92713
acatgcctgacattcctttgttttgtaattcaaattcatccttctatttgattccaacaagctactgctttgtttgtgttgttcctaaaaataattttgcaatacatctaactgacagttcatatgtactcgatattaataagcaataccactagcattcgagatctatgcatatatgaataactatttttcatacaggagtttaatatcatatctagtcaacctttgcatctatacctttttctgttttcggatcatgccaagctctatattcccctaatgaatatgttattttctaaatccctatgaagctaatcatagtgtcattttaatgcagttgaccccaagctaactattttcgacattctttaattctataatatgagcatgagatatgttgttagatataatttgtgttctatactatttacagttctaacattagtcatttacagtagtttagaaactgtaaatatatcatttagtcctgtaaataaagatattttagttgggcttgctaactcaatgttggaaaataattctggtctgcttggggttgctacatcaatgtaagtaaacactattgaatttagattttcatctgagaggtttccactttactaaaataattttattatttgactgaccatagaaaaaaatctgttaagctgtttaatttagatttttatcatattttagatctggatttttgaataaggttagagtttttactcaaacaaagtagtatctagttttcctcttcactattttctggttatgttttgtactttcaatttggatgtgttccaattattgataagtataggtaaatttcaatgtagctttcattatcagatataatttttatcctatgctatttacaatgttaactttattcattt

SEQ ID NO: 26740 - DNA, 289 bp, Setaria italica
  Peptide Sequence Number=SeqID_92714
cttgacgacgatgggcacccagcccttggccccggactgcacgaaccggaccatgaggtggccggcgtcggcgtccgggccggcgcggcgcaggatcttctcccgcttggactcgagctcggacagcacggtggagaacttgtcgagcccccgcgacgcataggggttgtccttccccttggccttgccgccggccttcttcgccttggccgccgcgtccggcttcccgccggcgccggcgccctcctccttgtcgacgtccttgaagctgcccgtgccgcagacacca

SEQ ID NO: 26741 - DNA, 1007 bp, Setaria italica
  Peptide Sequence Number=SeqID_92715
aaaaagaagctatacgattcatttttctacagagcactttaagtgctggaaagcaagagcatgatatatcttactgatgcattccaggtcatacaagaggacaaaagaggagtgtgaagaccaaacaaattggaacacatggattccaatctgaaagcaataagacaagaggcctacaattatttgcagctgcaaaaggagaggctaagatacatggaacaaagacaaaaactatgagacacgcctgacaactgcatttctgctgagtacaccttgtatgattggctaaagaatcattgcacgcacgttaaaaactggtgcaaatgtcaatctgtgggaaaaaggcagaacattatatacgtcatgctttagcctgaaaatgagagaacctggaagtgccatggcggcaccactaatgatcctaacgaatatatatgcagatctgtagtgctatctccaatatgtttggttcctttcattcgaccatgatggacaagctcatgtaccttttgtttgtatcaccatttgagctgctatgaaatcatcaaagttctttctggtttaccaatgctttgcaagccattgatcttagcttgaacgtggagttacctggcaatctggcaccattgtattgtagagttccaaagcagagtgctgattgcttgaggacagtgaagctccaaagatttactgccaagcactgatttgtcaacagcttgtatgataacacgagatgcaagtgcaacagaacaaacatccagccacaatttccatgtagtaccttcaactgataaagctggaactgcaacaccaggcaagaagacacctcagactgcttgccatcaaggatggagtttgaacaaagaagcagagatgcactgcagacctcatcttggttgaatcatctactctgtaagcatggtttatcttcttgacaaaccccacaaatagtacttctgcacccctacaggctgctgtgaatctgtgatgcatgtactgagcaagaa

SEQ ID NO: 26742 - DNA, 695 bp, Setaria italica
  Peptide Sequence Number=SeqID_92716
cccgtttgaacagcaaagtttaacaataaaccctctcaacttcgataatagacattattttagttggcagagccaacatacatactgctgaaggctgctgtactttcacacacacgctatttattcatcgatcgagattcatcggatgacccatctcctagaagatggtggagagcgtcgggagcttgagctcgccggacttggtgagcggcagcgtgaggttgccgacgacggggaggtcgacggtgagcccgacgcgcatctcgtagtcgatgtcccagtccctccccgcgtccctgacgaggctgacgaggaagtcgtagggcaccttcacgggcacgtcgaggcgcgtggtgtccctggcgatgagggaccccgggtcgggcatcttccccgacgccacctcccgccccgcgctcctcagcgagtagctgatctcgcacaccgggatcgcgtgcgagtaggggttgcgcacgtcgatgcgcccggcgagggtcgcgccgtcgcggcccacgtggcccaccgacaggtcggcgagctccgcctccggcttctcgaccttcgccaccttgtcggccacgaaccccttcgccttgtccaccagcttcgccattgcggctaacccttgctctttgctatagctacctgagcagcgctcctactacgtacgatcgcttgcaagctagtcaccggag

SEQ ID NO: 26743 - DNA, 560 bp, Setaria italica
  Peptide Sequence Number=SeqID_92717
tgggtcttccgcgccgttcttcatcgtcgtttccgtcgccgcagacgccgccaggacaagcccaaggtgacgtcgttctctggctgcctttgggattggtctcctgggacgtggatggcatcttgacatagattttttgggttcttgttctatgttaaactgtaggctatgaactgattaatccagctgtgtgtgtggagtaagaaggtggtcaaaatttgtgttcattaacacctaagcaagcagcgaatttgtccggctagtcatgtcctgagtccaattctggcaaactagacagtaggcttctacttcttcatttccaatacggatatgtgcttcttaatttcagaaaatgatgcagacttcttggtgcaacattggatggcaatggtgcaacattggattggtctccttttcttgcctgaaggagctcggaattgacaatatcttctgtatttgtattattcagatttttaatttaactccaagtggaatagatagcattactagcatattaagctaaggtctttgtgtttccgaaaacaaattagaaaagtttg

SEQ ID NO: 26744 - DNA, 420 bp, Setaria italica
  Peptide Sequence Number=SeqID_92718
cttgaccaccatccccctcgtccttcgtccgctccagaaacccctccgggagcagcgcgtccaagttcggctccgggcgcgagaggaagaacttgctcgggtcatcgggcgggctccgcaccacccacaggaagcgatgcccggagctctccaggccgcgagcgatctccttcagctgcgctgccgagacagcgcccaagctgccgaagcagaggaacaccacgctgcgctccggctgcgagtccagccacgccaggcacgcgtgccgctgctcccctcccgccgccgtcgcgtcctggcccttgacgatcaacggcccgatggggtacaccggtggcgtggggcggccggggacgcagacgccgttcctgagcgcgcgaacgacccgcgcctaccaagaccaacttagtaaggtagtta

SEQ ID NO: 26745 - DNA, 320 bp, Setaria italica
  Peptide Sequence Number=SeqID_92719
ggcggagaggaggccgtcgacctcggacgccgacgacggcgaagagggcgcggcggacgggtggtgcggcgcctgcggggcggggacggagggtacgacgccggagtactcgaggagcgccgcgagggggcctgcaggaggctggaagcggagaagttgaggccgtagcggcggaggccggagggtgcagcgccagcgcccggtccgctcccccggcgatcgggggaaccccccgccggtgggtccatcgccggcggcagcggcgatggcgaaaacctatatgccggcagcgcacgcggcgcggagaccctctggaatgg

SEQ ID NO: 26746 - DNA, 258 bp, Setaria italica
  Peptide Sequence Number=SeqID_92720
tgtggcggtacgcgctgccgcgggagcacgccatccgcaccgacgacgacgacgagccagggcggaagccacggatgctgatcatcgcgcggcagtcgcggcggcgcttcatgaacctccccgagatcgtggcgctggcggaggaggtcgggttcgacgtgacgacgtcggacgtgatgtcgccgcccaagaagacgaccaccagtggcgccggctcagggtcggcggcggcgggggacgagggtcacgcgcggatgg

SEQ ID NO: 26747 - DNA, 609 bp, Setaria italica
  Peptide Sequence Number=SeqID_92721
cgccaaagtatggcaggcacggacgcggtcgctgcggctacccgacccgtcggtgcccgtgacgctctgcttcttcgccaacgcgcgccacgtcctgcccaaggacgacggcgccggcgccgcggggttctacggaaactgcttctacccggtcacggtgaccgccgaggccggggcggtggagcgcgcggacgttgccggcgtggtgggcatagtccgggacgccaaggcgcagctggccacggagttcgcgaggtgggcgtcaggggaactcgcggcggaggaggacccgtacgagctgtggtggaggcatgagccgctgttcgtttcggactggaggcggctcgggttcctggaggcggactacgggtggggcacgccgttgcatgtcgcgccgttggcggccctccagttcatgcccgtagccctcatcgttgcgccgccgacgccgaggaggggcgtccggatcacgacgcagtgcgttgaggaggagcacatgccggcgttcagggaggagatgaaggcaccacgggaatgactctgctcggtgagtggcggtaagtttaggcagcatccatccttgatgctgggctggacgatccgtgtgct

SEQ ID NO: 26748 - DNA, 441 bp, Setaria italica
  Peptide Sequence Number=SeqID_92722
taccccattgtatcatttggaagaagaacttcagacttcaactggccgaggaacatcatcttgtcctcaagatccatccacctggtgtagggatggagttacattgttggcactagctccgcccacctcccaccagccatcatccaagagggtcttacttgaaaccaatggtgaataggttcctgcttttgatgtttatttgacaccatgtacaccagcggggagctgtgttgcttggcaacctgaaaggtgtcctacaaacaatcaccatcatatctgatgaagaaaaggatcaagtacgtaagcttggggcgggaaagctactgtttctattactgtcaatgccatagagagtggggccgtacattgctttatactagatgagattggtgtagtctaccggatgctattgatgcccctagcactgtcctaccaattatc

SEQ ID NO: 26749 - DNA, 659 bp, Setaria italica
  Peptide Sequence Number=SeqID_92723
tcaagtggaagacaattgccgaatctatggtgactattgaggctgatgtggcattcttggagaaatcgtctcatgattgggttcatgctgccttagccactgatctaggagtcctcaagctactgaatggtgccactgaatccatctctcagatgaagatcatcaataggccaaaggtgccttcagtggaaccaccaagaacgagcctgtccaagaagcagtcacttggagcttctgcaaaggtccaatctaaggtctcaccgagctctctagcaagctgcacatggaataacactgagagcatgtacgagacagttgagctttctaagaccttgtggcgtgagatgcatatgtggttcctgaattttgtggacgaggcactggatgtgggcttccacttgtttgaagatcaaaacgttgcaagtaggggaaagcacagcaacagcataacaatggttctatcacagttcaagaagatcagcgactggttggatcaagtcggtaagattgctgaggaagagggaaccaaggagaagattgagtgcttgaaacggaagatatacgggtttgtcattagccacatggggtctgcattggagagctccgtctcagtttcctctaggagttgagggacgcttcatgctctgaagctctacttt

SEQ ID NO: 26750 - DNA, 797 bp, Setaria italica
  Peptide Sequence Number=SeqID_92724
gtgaatcatgcatgtgtctcatgtggcctgaccagaaatttgaacatcatccactgctgtgtaccatatgtgaccgggtgacagagacccacagcccttctatgttaggctggagtagtgtctctggctctgggtcagagaagaggggggcatcagcgatctcaggtaagccttgggcagcgccatcagcttcttcgtcttgggaacgtatgccctcttggtgaagttgtcgtagtcgttcgcctcgatctcgtccaggatctgtcggtacagaagcagagaagcccacaccggccatcggctctcctggttgagctcggtggcaccttcctcggcctgcctgaagaacgatctcgccctcgtgatctggtcccgcatgaagcctttccatccgtcggtgacgcggccgttgaagatgtcggcttccgagagccccgccatctccagctcgtcctgtgggaggtagatccttcccctcctcgcatcctcgccgacgtccctgaggatgttggtgagctggttggccaggccgagggccagcgcccccttgcagaccgtctcggtggccgccctggattccggcgagatgcccatcaccgggacgctcatgaggcccacggtgccggcgacgtagtagcagtagaggtacagctcgtcgaaggtccggtaccgggacttcctcaggtccatgcgcatcccctcgatcatgtccctgaacggctggatgtcgacggggaagttggcgacggtgtcggagagggcggcgtcgagcatgtcgtagggccggccggcgaaga

SEQ ID NO: 26751 - DNA, 1585 bp, Setaria italica
  Peptide Sequence Number=SeqID_92725
gcgagttgttgtggacaaaaagagaacgaaggcggaaaaagggaaaacaggaagaagccacagccgaagcagcccgcccgcccgccattcttgccaagtcgagtccacgcccccggccgcggcgacgcggcgccccccttcggttctcgcctcgggagtcgcggattggtagaggaagcgggtggatttgagcgggcgcggccatggatacgaccaccagggccgccaagatcccgtcgctccaccagacggagatcaactgggacaacctcgacaagaccaagctctatgtggtgggcgctggcatgttcagcggcgtcaccgtggcgctgtacccggtctcggtagtcaagacccggatgcaggtcgcctctggggacgccatgaggaggaacgcgctggccaccttcaagaacatcctcaaggtggacggggtgccagggctgtaccggggttttcctactgttatcatcggggctgtcccaactaggatcatcttcctcacggcacttgagacaaccaaagctgcttcgctcaagctcgttgagcccttcaagctgtcggagccggtgcaggctgcctttgccaatggccttgccggtctgtctgcatctacgtgctcacaggctatttttgttccgattgatgtgataagccagaaattgatggttcaaggatattctggtcacgccagatataaaggtggaatagatgttgctcgaaaggtcataaaggctgatggggttaaggggctatacagaggatttggactgtctgttatgacctacgcaccgtctagtgctgtgtggtgggcgagttatggatccagccagcgcataatttggagtgcccttggccattggcaaaacaaagaagaggctcctagccagttgaaaatagttggtgttcaagcgtcagggggaattattgctggtgcagtgacctcttttgttacaactcccattgatacaatcaagaccaggctgcaggttatggataacgaaaacaagccaaaagctgggcaagttgttaaaaaattgattgcagaagatggatggaaaggtttgtaccgagggttaggtccaagatttttcagctcatcagcttggggtacctcaatgatagtatgctacgaatacctgaagcgcttgtgtgctaaagttgaagaggtctgacttctgggtctccttaaacccgaatgcagttcctaaatgctggaagttttgtatgagcaaaagtgaaataatgttgtacgtcaacaacagtgacacccacccgaaggtccagttcctgctgacataggcgaaagcattaagcatggatgtttgatggtgttaaagacttcatttgatactagacaatagtccttacaaacttggttctctgggcagtatttttaaaaatgcagggcccttattttttttacctcttctgctgatatgggttaggaagattattttagatgacatataaacgagatcagatgtacacacttctcttattactttaaacctaagttttatagcaggctggatgattgtagaccggttgtaatgagatggcgcaatgcttccagcagatgctt

SEQ ID NO: 26752 - DNA, 286 bp, Setaria italica
  Peptide Sequence Number=SeqID_92726
ggtgttgctgctgcaccaagctcctccctgaagaaagacgatccagctttgggatccggagccggagcctctctgcaagtggtaagcaggcgggcttccatccaagcacaccgcgcccttctcctgcgcgccggcgacgagcgtaagctccacgagccccggagaagaatccgccgccaccgccaccggtgagccggagaaggcggcggccaggagcacgaacagtggcgccaccgccaccgcgacagtgtgggtgtgccctgcaggccggtgcttccggacgacg

SEQ ID NO: 26753 - DNA, 395 bp, Setaria italica
  Peptide Sequence Number=SeqID_92727
cgcggaggcggcggaggaggaggcgacctggaggccgcggcaggtgcggggaacgaggaggaggaggagaaggtggcggtgttctccgtgtccgggatgacgtgcgccgcgtgcgcggggtcggtggagaaggccgtgaagcgcctcccgggcatccacgacgccgccgtcgacgtcctcggtggccgggcccaggtcgtcttctacccggccttcgtctcggagaacaaaattacagaagccatcgaggatgttggttttgaagctaagttgattgatgaggacgtcatggaaaagaacattctactatgcaggctacatataaaaggaatggcctgcaagtattgcacaagcacagttgagtttgtcttgcaagcttctcctggggttcaaag

SEQ ID NO: 26754 - DNA, 274 bp, Setaria italica
  Peptide Sequence Number=SeqID_92728
ctcttcccctcaaaagcgcccaatccgcgggcatccaagaagctgtactccggcacgatgcggctgcaatcaagcaatcaaagaaagcaaagccagtatccatgtgattatgtgaaatcaaagagccaattgaggtaacagagagccggtgcggactggatacgtcacctgcggttgatgccgttggcggccgcgatgatctcagccgcctggtacgcgcgctgcgtgatggacggccatatccagcagtcgtcctcgcacgcgccgaggcgcg

SEQ ID NO: 26755 - DNA, 961 bp, Setaria italica
  misc_feature (1)..(41): n is a, c, g, or t
  Peptide Sequence Number=SeqID_92729
nnnnnnnnnnnnnnnnnnnnnnnnnnnnnnnnnnnnnnnnntaatagatatgaaactttgacttgcttactcagatgtgacacacaaaacatactttgagctataggcaatcatcaagacaatatttctcacgggtacatattcatatacatgtatacaatatatgaactgcagtgacaggaagtgaactatttacagcttggcggatttgtacacttaaaaacagcagaagcaggttgcttgtattcaggtatgctactgggatcaactggccggacctcaccgggcttaaaaaataagctgctatgccttcgcaggtctagcccgatcaatccagcttgaagaatcgacaggttgtcagaatctggagaaacgatgacaacagtttcccctgaatactgggtctctagtattgacatgagctgtgtcacccgaacaaatacgtctgctacgctctcattaggagtaccatcactgataggaggcggcttcatgtctggtgaaatgttatctgacgcatacacctcgggcaaggtgtctaggctcttcccctcaaaagcgcccaatccgcgggcatccaagaagctgtactccggcacgatgcggctgcggttgatgccgttggcggccgcgatgatctcagccgcctggtacgcgcgctgcgtgatggacggccatatccagcagtcgtcctcgcacgcgccgaggcgctggagctcgagcgcggcgcgcgccgtctggcggagccccacgggggagagtccgttgtcgacggaggtcttggcgaccgggttggtgcggaggaggccctgcccctcgtagacggactcccccgcgcgcacgaggaagtagcggttcgccagccgctgcgggggcatgcggaacagcccgcgagcagcggcgggcgcgggcgccgcggcggaaggggcaagctggagggacagcgccgcggggaggaggg

SEQ ID NO: 26756 - DNA, 618 bp, Setaria italica
  Peptide Sequence Number=SeqID_92730
acctagactacggaagacctaataagcagtgcctgctcatttgcatctcttacggcatcagttttgcattcgtttcttgaggagcatgacaattccataaaaggagggtcatgttcatgtctgtcagcagatgattcctactgctctgtctgcttgggagtattgctgccagcctggcatcgagaagagggtgtagaaacgtcccatggcggttttcacattgacagcatctcttcaatgatatctcaagtagtgcaaaaggagagttacctagttgacgagttctctctagaaatttcactgcctccagtcatagctgctaatgagcgtgcggttagattgtacatgaaacaaaaatttggcaatgagaattggttcaaggacaaaatgtttccacaacaaatcatgtcagtgaaggaagccttgcgacttttgatggtgccatcactcgagaaacaaatgaatgccaaacatgataactgttcgttttagaattcgcttgacatatactcatgatgatgcttcacagaagcttcatagtttattgccgaatgagcacggccgtaaaaggaaaacaagattcaagaaatggaagtgatacttcaaatgaggctcaat

SEQ ID NO: 26757 - DNA, 334 bp, Setaria italica
  Peptide Sequence Number=SeqID_92731
tgtcaacatcccaggggataccaagaaccacaagttttgtagccattataacactggctacagatgaatatcaaagaaaaccgttggacctttattctcctgtgtccaggaaaactctcagcaacgcagttctgaagattaacggcttataattcttaaacaccttacgtagacttggcaatcttcactggatctggtgagggtgctcgtcgccggggaagggcccggcggagacgtgtcgaagggcgtcgccgctcgccaagtcgccgtcgccgccggaaaggaagggcacgagagagggggggaagagagcagaacgggaggaagaaaaaga

SEQ ID NO: 26758 - DNA, 484 bp, Setaria italica
  Peptide Sequence Number=SeqID_92732
tttttaagtttttttaagtttactttttactttttagttttggttaagttcctttaccttaacttaaattattctttcttgccaactgcttgagaggatccataataccctcttccataagctgatcctggatggtcatacagtgttggtgcacccaaagctgcatacctggtagcagctgaaatataagcgttatatgcaccatagccaccctgagactgcgatgccctgcttggggggtacctgacatcttcatcctttggagttgcacggtcaacaactacagttgtaccatcaagctcatgtgactcttgcatgatgctgtccacagattctgcactcgttggcatgtaaagatcaagaatttctccaaaagcttcaaaatgcctacgaaacatcgactcgtcaacagattgtggaattcgagcaacaaatatccttgtagctttctttgttccttgtgatttacaatttacttacctta

SEQ ID NO: 26759 - DNA, 1661 bp, Setaria italica
  misc_feature (1)..(29): n is a, c, g, or t
  Peptide Sequence Number=SeqID_92733
nnnnnnnnnnnnnnnnnnnnnnnnnnnnncgcacggcaatcgcttatcagtttttgcaaaagatttttattattacagacagcaattccacacaataactacaaggctgccttcatattttagcaccaatgtgaattgcgacagagaaatagcaccaaagcatttccatgtcaaaaattacaacatgaacaaatagataagttccacacgccccactttaggattaacataccacttcgaggtaccacttggcattctcaaacaagcatttccgcccgcgccccccacccccctagaggtgaactaagacagcacttgacagtaacgagacgcacagcatgttcagtatggtcggtatcgccaatcccctcttgatctgctgcttccgctgctggggccatacccataattgtaatctagactgccacagaacctgccaaaagatcgcattgaaccataagcaccataaaggtccatgggatcaatgtaagcaccaccagttgaatcgttctcaagcggtgcagctgtgtctattgcaacctcatgccccagaatttcatggcttctgcgagctacccgttctgccacaccctcatcagcgaaggtgacaaaaccaaaacctcggtggccacttcttttagggtcctttggaatatatgcatctacgattcgaccaaatctgccaaagtaatgccttaggtcatctgtgtttgcttcttgtggaagcctaccaacaaatatcttcttgccaactgcttgagaggatccataataccctcttccataagctgatcctggatggtcatacagtgttggtgcacccaaagctgcatacctggtagcagctgaaatataagcgttatatgcaccatagccaccctgagactgcgatgccctgcttggggggtacctgacatcttcatcctttggagttgcacggtcaacaactacagttgtaccatcaagctcatgtgactcttgcatgatgctgtccacagattctgcactctgaaacgtgataaacccaattccacgatgcccttttgaaccatgttcctttggcatgtaaagatcaagaatttctccaaaagcttcaaaatgcctacgaaacatcgactcgtcaacagattgtggaattcgagcaacaaatatccttgtagctttctttgttccttgtgatttcatttcttcctttggagtagctatcttcacttctaaagtccgggtcccaagaacatgttcagattcaagaacattcttggcatcatcagctgatgagaatgttacataaccaaaaccacgagatcgcccagaagaccgctccttcatgacaacgcaatcatctagagttccaaacttggccatgtactcgcgtaatccttcagtgtcaacatccccaggggataccaagaaccacaagttttgtagccattataacactggctacagatgaatatcaaagaaaaccgttggacctttattctcgtagacttggcaatcttcactggatctggtgagggtgctcgtcgccggggaagggcccggcggagacgtgtcgaagggcgtcgccgctcgccaagtcgccgtcgccgccggaaaggaagggcacgagagagggggggaagagagcagaacgggaggaagaaaaagcgaggagccgg

SEQ ID NO: 26760 - DNA, 276 bp, Setaria italica
  Peptide Sequence Number=SeqID_92734
aggatctatatgtaattacgcaattcttgttggaaacattgtgaaaagcccagcaagctgtcgggagggaaaccggaaccggaagtggattcaggaaggcacttaccccatccggaggcgggggcaagcagcgcttggggcgcgagcggcgccgtcgttggagcggacggcttggctaggggaggggcacgagcagtgcggcggcttcagaggtatcacgaagaacttggcctccttctcttaatccctaatccctaagtttactcgattcaatcc

SEQ ID NO: 26761 - DNA, 345 bp, Setaria italica
  Peptide Sequence Number=SeqID_92735
cttgtaaggagcattaggaaatgcccagcaagctgtcgggagggaaaccggaaccggaagtggattcaggaaggcacttaccccatccggaggcgggggcaagcagcgcttggggcgcgagcggcgccgtcgttggagcggacggcttggctaggggaggggcacgagcagtgcggcggcttcagaggaggctttttggaatcacgatttttgaagaactgtctgctgtatagcaaaattaggttcctgatcacattatggaccagcaacctcaaagtgatgctgattttcttgagccatcagtactattagacgagacacattaccaggagggctaactaaaag

SEQ ID NO: 26762 - DNA, 938 bp, Setaria italica
  Peptide Sequence Number=SeqID_92736
aatagtctatttccccctgtggtatgtattcattgaacttattattctcgagcagtgcggcggctttagaggaggctttttggaatcacgatttttgaagaactgtctgctgtatagcaaaattaggttcctgatcacattatggaccagcaacctcaaagtgatgctgattttcttgagccatcagtactattagacgagacacattaccaggagggctacaaaaatggttatcatgatggcctatcatcagggaaggaagagggcaggcaggttggtttaaagatgggtttccaggtcggtgaagagctgggtttctatcagggttgtctggatgtgtgggcctccgcaactcgcattgatcagaacgtgttctcagctagggtcaggaagaacattgagcaactagctgcactggtgagcagctatccgctgtctgatccggagaatgaacaagttcaagatgtgatggagaagataaggctgaaattcagggttatcactgcaaccttaggggcgaagttggagtatgaaggtcgcccggcatcatcgaaacaggacgttgaggatctgtgagggcgatagaaattttggtctctctgtctttgtcatcttgagttctccaaatcctgtcttcagctcgttggtatcatgaagaatttggcgtgaggaaacaattgtcgaagcatgaatcagtaatacaattttagctgtcttcagctttgtcttacccgcgttatccgatatgttgtccatgatcagtctctaagatttcaccagagatccacaagtacttgcttaattgtggaatatttccctttcacaagtcaaaaacatcccttataaataggttcaagccttccttacctctttttttaagagcatcgtgttatcctatgttacggactactccctctgttccaaattgaagttctttt

SEQ ID NO: 26763 - DNA, 598 bp, Setaria italica
  Peptide Sequence Number=SeqID_92737
gtgggataggcgaaaaggagagtacttctacagttttcagcaaaaattctctactatgttcagaaagggggtcaggagtggtctaactcttggatgagcactgcaatttgtgcaaaccacatccaaggatgccgtgaagttataacaacaaaaggcccatgatttgaatgaaagaaacaataatggtcatacccatcagtcgaatcaagtgtagagggtgagtcgttcagcgacagtgcctcgaactttgatgtatctggaattgtagggccaatctcattgctgctcacctcagtgacatcctcctcaaccagtaagttggttggtggccgtgctcgtcctggattacgtcgagatcgcctcgggtgatctgaatacatggaactctgccgaatacgcgtttgagctgcatgttttggtctccggcgagaaccagttccacgggaggaggtccctctcacgccgcatcttcatcgaccggtcggcgtaggattggattaccatgccatagtcatgcccagcgatacagagatggacgaagccgcgactcgaatcgcgatccatggcgaaggcgatggcgaaggcgagagcaatttcg

SEQ ID NO: 26764 - DNA, 315 bp, Setaria italica
  Peptide Sequence Number=SeqID_92738
gagagctcaagaagcagctggagaagctgaggaagaagcacgagatggagctggagacgatgaaggtgcatcttgcggagagccggctgccggaatcagcgctgggtggcttctaccaccacgataacaaggagactccggagtactcgtgcgatgctgcgtcgacgcaagacgacgaccagtcctggcgggcggcttttgcatctgcctacgagtgaatgaagtttacctgattgaatggttgggagttgagactcgtcaactgagcctggttgacaaattggtaaagggtcatttcttcttttttacatgtat

SEQ ID NO: 26765 - DNA, 225 bp, Setaria italica
  Peptide Sequence Number=SeqID_92739
ggtgacaaaggacatcgtccttgggaacgacgacttcttcccggtgaagccggtggactatggcaagttcatggtggtctccatcggctgtgggtcgaaccggaaccgcaagtacagcgccaaggccgcggccaagtggggcattttcaactggctcatcaaggacggcacggcccccatcatcgacatgttcaactccgccagcggcgacatggttgacatcca

SEQ ID NO: 26766 - DNA, 226 bp, Setaria italica
  Peptide Sequence Number=SeqID_92740
gtggaagacgatgtgagtctagcttcgccggagttagagacggcgcggcgattccggctcaacaaaccaccaggggaacaagaggggcggcggcgtggagatggggagccctctcggtgggtggccgtcgtacaatccgcgcaacttcagccagctcgtcccggccgacccctcctctcagccctcgaatgtcacaccagccacttacattgcaactcacaggaca

SEQ ID NO: 26767 - DNA, 1574 bp, Setaria italica
  misc_feature (1)..(52): n is a, c, g, or t
  Peptide Sequence Number=SeqID_92741
nnnnnnnnnnnnnnnnnnnnnnnnnnnnnnnnnnnnnnnnnnnnnnnnnnnnttcaaacccattccatttacagagacggcacgtcaatttctcatgttaatgtcaatatacaaaaacagtaaccatcagcaaggaacatgtctctgagctcgccggaataaacacatgctataatacttgcaatggaggcgaaatgcgattacaatatcaaaaccttacactttcaatggattagaacacaagcagtagtaacctagtcaaacaaatgaacttaaacacacgccgtcgtagacaacacgtgaaatttttagcactacgcctctacagagttgggccctctcgggctaccggcactgctctgctgctcgtactcctgacttgggaaaacctcgggcagcaggctcgtggagatgttgttcgcgtgaagccacgtcagctcccacaagctgtcacccccaatcgtgctcctcttcgcaaggatccccttgttcttcatcacgagtaggatgttcttgagcaggtcagggatcacttcttgcagcttgtcgctccgcttgcctcggaccttgatcttgatgtacttctccatccggctcaggactcccagccacagtttgcagaaactgctaaggccgaaaaggtccggcaacagttgaagatatacttttgcgactagtttcatggcaagcacaagggaaccctccatgttcctgtagtccttctgggagtgattctggctgatctccagcaaatcatcgagcaaggcaaatatgacaagatcaaaggcatgagaccatgttgcggactggaggcagatttcttctgttgctgttaaacatcgttggagcaaagctagtgcatgatttcgcacctcctctctctgatctaggcttaatttttcagtgactgcagcaatttgagccacatctccctgatcgcctccagccttttctcaccttcttcacctgctccttttatctcttgggaccacaatgcaaggcttctgacagagtcagacatcaaatccagggcacggatagacctatcagctaaaccaaccctggactcagcaaactgcctggatgcgtcgatgcagaagccataatttgctagtgaaaggtgagccccctctgtcatgataaacatgatagcctcaaaacctacttctgaagcatcaggatggcgagctgtcatggagagcagcattaatactgttctccagcccatcggtgactttatatgcgctgcatttgctttgacaaggcgcgcaacctcctgtgtgatgttctcgctgtatgcatctcccacacgtgcgtcgagcttcagaactaactggagtgacctcagtaattcatcagcaaggttctccttgtatggtagtaacctctggcatattctcaggagtccaaaaatagctttctccaccagagcacatggcatgactgtggactgaactatgttggcgatatgctcatatacaccttgccagaggagcacaattcggtctcgattattaagtgttatggcaatcagcagttccaagcagaaaactgctgtatcctcatcatctggc

SEQ ID NO: 26768 - DNA, 344 bp, Setaria italica
  Peptide Sequence Number=SeqID_92742
aaccaagaagatcaaaatgaagcttgatttgcaataccggagggcaatagctgtgggatcatagatgattcggtacgtgtctggatcacggtacgccacgaaaaatttcacaataatgtctataaggaatgcaatctgtccagctatgtccaggaagaagagctttcttgggagccctctgaagaagccaaattccaggggcgtgaagaaagagctgtacaccgcccaaaccagtatgaacttggtccataaccgataccacctgttgtcggggtggatgacgaggtcgtggaagaacccctcggcggcgccttccccgccgagcgggcgacgcctgcggcggc

SEQ ID NO: 26769 - DNA, 259 bp, Setaria italica
  Peptide Sequence Number=SeqID_92743
gccgcctccatgattgtcagctcgcaaatgttgccaaagaaggtagtggtgtggttaggttaggggtagatgaccggcgaccggcggcgatgcgtgtggcgcattggcctctctgtgcacctggcggcgcagggcaggaccagaccgtaacgtggtgtgtaggttcatggcgttctcaggaacatgcccgtgagaggtacaggagttgttcgcagttgtatttgcatgccactgatgaagcggcggatcggagggggat

SEQ ID NO: 26770 - DNA, 296 bp, Setaria italica
  Peptide Sequence Number=SeqID_92744
gtagcgccgccgcagaaccagagtcagagccagagcaacgccacggcgacgacggcagcaacgactccgagcacattctcctcggcgagcccggacgtcaagagcgagccgggttgctccgggtccgagagctcgtcgtccgcggacggcgacgtgtcctcgaccggctcctccgacgtggttccggagatgcaacttctcgacttctctgaagcgccatgggacgaatccgagagcttccacctgcgcaagtacccctcgctggagatcgactgggactcgatcctttcgtaacg

SEQ ID NO: 26771 - DNA, 368 bp, Setaria italica
  Peptide Sequence Number=SeqID_92745
agcggcattgggggaagtgggttgccggagatccgcctgccgcgcaaccgcacccgcctctggctcggcaccttcgacaccgccgaggaggccgcgctcgcctacgacagcgccgcgttccgcctccgcggggactccgcaaggctcaacttccccgagctcaggcgcggcggcgcgcaccttggcccgccgctccacgccgcggtcgacgccaagctccacgccatctgcaacggcacggacgtagcgccgccgcagaaccagagtcagagccagagcaacgccacggcgacgacggcagcaacgactccgagcacattctcctccgacgtggttccggagatgcaacttctcgacttctctgaagc

SEQ ID NO: 26772 - DNA, 628 bp, Setaria italica
  Peptide Sequence Number=SeqID_92746
ttcagagtttctctgttccggacttggtttcggcatctcttggaaaccgaggaagcacggcagtttcagggaccttcacttgggggctatcatttatcaaagcatcctaacctgtgccagcctgcaatattttctgggtttttggccttttgggcacagtgtttgaagcgtagaagaactgcgtcggctgtcattgattggttgtaagcttgtctcattagaaggaaagttatctgaccatgttctcagctatcatggcaaagaagagttacaaacagcattccaagtctgagaaaatccaggtgggctgtatgtctggtctggttcgcatgcttgatttccgtcgcagtccaaaacttctttcagatgggagagtcaaaagagaaccaaaaggttttgaagatgtccatgaaaacatatcatcaaatgataacaaagaccatagggttgaattgatctttgctggtagggcaagtattaaaactttgatggaagaagagatggccagcagcacacagcccttgaagcaagcacaaagaaatgtaactgggatatgctctgaagatattgatctaaacttggctgcaagtctcatggaaatctacagaagctgtactgaaagccaaag

SEQ ID NO: 26773 - DNA, 277 bp, Setaria italica
  Peptide Sequence Number=SeqID_92747
ttttttcttttttcctttcctgtgtgccactaccactcatgttaaaggttctaaaaagagcgggtattctattctatatatccaaggttgctttcttgacagcgtgtgcgactgacccctcctcttctcctctatcaagagggaaaaaatatagacgaaggcgtgatagtgtgtcatcgatctgaattctgattagcgaagggaaagccccacagctataaatacccggcgtccagccagccattacagccaccggttcgggttggagtcgggagta

SEQ ID NO: 26774 - DNA, 334 bp, Setaria italica
  Peptide Sequence Number=SeqID_92748
tcccccgcgggggcctccgaggacccggcggcgttcgacgagtccgcgctcctcgcctcccgcctccgccaccaccagatcggcggggacaagcccatcatgctccacctcagcgacctgcacggcctcgccggcggggaggacgccggcgccgcggggttcctgccgctgccgctgttcaccgaccgggcgagggaggacatggacgccgccttcaagtcccccaatgccgctggaggcgagcaggccctgtacaacgggttcggagccgccgggatgcatggcgccgccgccgccgtgcaaccgccgttcggacagggcggatcaatgccgg

SEQ ID NO: 26775 - DNA, 329 bp, Setaria italica
  Peptide Sequence Number=SeqID_92749
tacggtcgctgaccaactactcggtggccgcctcgccgtggcggggaggggccggggacgtcgtcgccgagctcgccgccgccgcgcgcgcggagggggttgggctggggctgtacctctcaccgtgggaccgccacgagccggtgtatggggacaccgtcccgtacaatgagcattacatgggccagatgacggaactgctgaccaggtatggagaggtagaggaagtttggcttgatggtgcaaagggcgatgccaagaagatggattatatgtttgatgcctggttttcacttatacatcagctacaacaaagggtagttattctt

SEQ ID NO: 26776 - DNA, 272 bp, Setaria italica
  Peptide Sequence Number=SeqID_92750
tcgatacttcccagcaagctacaagctcctgcctccgccccgcctcatcatcccatggccgatccccagccccaggccgaggccctgacggagcccgcacggatcaacggcgctgcggcggaggccacgctctcgggcggcgagctggcctgtcgcccagccgccgccggcggcggcggcagagaggggcaggagcggcggcttgagctggagtcggaggtgcttgggtgccgggtcgaggggaggaagctcagggtcgcaacctttgccgc

SEQ ID NO: 26777 - DNA, 713 bp, Setaria italica
  Peptide Sequence Number=SeqID_92751
gtggatagtgtctgtgtccttattacaagcaatgagagatgcttgtcaccacacacacgcacagatgcacgacatacatatagttgagaccaacagatggatcaactagaggtcaccccatatggtgaacaatttattggagataaacattaacataacttggccatagcttgaagcatagcaacatatgcctatgaacggcgttcatgctatcattttaggcttgtccgcttcttccatcttagcaagcacttccatttctaccatcttagaagcaactgaagttgtgagatgggaagtgaagtcaacaaattacattaacggaaatgcatggaaggccacacatacgtattagtccacgatatgctacaaagcttgtatgtacatataacaaattaaatgcattgaatagagtgagtttactaaatttaccagaatcggacagaacacatgggaaacagcaagtgttcttgcagagtgagtcggagccacctgcagtaatacaagcaaaacaacatgcttttgcccgggcggatacgcagcagctgcactgtgccgcggtggccgggttaacattgaggctcaagatgaccaggcacatgatcaccatcaaagcggtagtcctctttccctccattgcctcctcttgctgctaacctttacctttagggtttaaccttaagacttaaaagttttaatttaggtttttagta

SEQ ID NO: 26778 - DNA, 803 bp, Setaria italica
  Peptide Sequence Number=SeqID_92752
tggatagtgtctgtgtccttatttcaagcaatgagagatgcttgtcaccacacacactcacagatgcacgacatacatatagttgagaccaacagatggatcaactagaggtcaccccatatggtgaacaatttattggagataaacattaacataacttggccatagcttgaagcatagcaacatatgcctatgaacggcgttcatgctatcattttaggcttgtccgcttcttccatcttagcaagcacttccatttctaccatcttagaagcaactgtcaaattgagatatggaaatcccattagcgcatgagttaattttacagtgaaaatagagtacaagatgtcttcatgatgtaagtaacatgcctgaagttgtgagatgggaagtgaagtcaacaaattacattaacggaaatgcatggaaggccacacatacgtattagtccatgatatgctacaaagcttgtatgtacatatagcaaattaaatgcattaattgaatagagtgagtttagtgaatttaccagaatcgtccagaaaacatgggaaacagcaagtgttcttgcagactgcgtcggtgccacccacagcaatacaaccaaaacaacatgcttttgcccgagcggctgagcagcagccgcactctgccgcggtggccgagttagcattgaggctcaagatgaccaggcacatgatcaccatcaaagcggtagtcctctttccctccattgcctcctcttgctgctaccttccttggttacctagctaagtttattggttttgtgttgagagggtagg

SEQ ID NO: 26779 - DNA, 180 bp, Setaria italica
  Peptide Sequence Number=SeqID_92753
tgtgaacgagactggcaggtgagggcgccgggcaggtgtgagtgtgtgtgagggacgagactcctccgcagtaacagcagagggagtccggtggctgacaggtgagcctgttgcccgccaagcccacctgtcggggacacagtctctctgcagttactgtgtgagaggagagggagcggg

SEQ ID NO: 26780 - DNA, 213 bp, Setaria italica
  Peptide Sequence Number=SeqID_92754
cagttttgcaccccaacagccatgcccgtgagcttttacaacatgcgtaagagtcagcagtgacgacactgaactcgccgggcttcctgtaggaaagtgcagccgatggactaagtgatgaccgcatgaacagccccaccaaaacttggacagcaggaattgtcgacagcgatgacaattctcacgagaaatttggtggcatcgtgcgaaaat

SEQ ID NO: 26781 - DNA, 465 bp, Setaria italica
  Peptide Sequence Number=SeqID_92755
aaaaagattcgccagagattaatggctctgaagcatgaatttatcgaaccacccataggtgaaagtactggaatcacacacagggctgctctaggagctgccaaagctaagttaagtagatggcttcaagacctacagaaacttcgtcaagctagaaaagaaggcactgccagtattggtttgattgtcggtgacatgacaaagtatttagaaggaaaggatcttgaactgcatgcatcaagacaagttggtctgcttggcttcattgcatctgctttacctgcatcacacacttcaaagcctggagcttgtcaagtcactgtctacctcttgcgcctgttgagagtattgctctcacttccagctaatcgaacatattttctagtacagaatcttttacctccgattattcccatgctatcagcatcactggagaattacattaaggtggcagcatccaactct

SEQ ID NO: 26782 - DNA, 382 bp, Setaria italica
  Peptide Sequence Number=SeqID_92756
gccgtcgacgcagctactgccagtgctaccaaggcctaggcggctatggtgcggccaccgtcggcgcagatgacctgcccggtgatgtaggacgctgccggcatgcagaggaaagcgacgagcgacgtgatctcctccggctcgccgatgcggcgcatggggacccgcgccatctccgcctcccacatcttccgctccacctccgggtccagcttcagtccgctgctggcgacgatgtcggtgcggacgccccccggcgcgacgcagttgacgcgcaccttgtcctgcgcccactcgacggcgaggctccgggtgagctggttcatggcggccttggtggccgagtacacggacagcgccgggtaggagacgagcccgccgg

SEQ ID NO: 26783 - DNA, 429 bp, Setaria italica
  Peptide Sequence Number=SeqID_92757
gaagattgtcgtcacgcaagcgaaattcaacgcaagcgaaatttagccagtttggcatcttgatggcaccgtcagtttcaggtgacagtgcttcgtatccgcagcttctctgcatcttctacgatcatgctatctttcttcgtcacaaattccagccaccgacgtgccagggttggccgatggtgatggctcatcttgaattattaataccgtctgccaacctagaaaagcaagttagtttccttgccatctctgcatcactcattgtaccagcaaacatggccccacgatcgcaaatcttgccttacggtttatcacaggcatactgacagtgattgactgcaggcaacagtcttaaatgcccaccaattaaaacatggaagatattgcaacagaacacatgatcaaagtctgagactgagtacttgt

SEQ ID NO: 26784 - DNA, 225 bp, Setaria italica
  Peptide Sequence Number=SeqID_92758
cccctcccctccctctgtaactacgccacacgcagggagagattccagaggctcgactcgaccatggagctcgcacggcaccaccaccaactgccgcactgacgtgcgtacgcagctctagcggagcccatcccgcagcttcgcgcgcgcacgtaacaccaccaccaccaccaacgcaacacgtgtctctagcgaggcgagaagcacgagagcggcgtgaccacc

SEQ ID NO: 26785 - DNA, 402 bp, Setaria italica
  Peptide Sequence Number=SeqID_92759
aatgtatgtcgctcatctaatccttcaaaaattggaatgtgttataaactaaaatttaatatttcacaaaagaaacatgtgcttgttctgtgttttctggttttaatcatattgtttggttgtaaatgagaactgttggaatgattgatgcacttttggcccaactcccctgtattactgtgtttactgaaattaggaactgatgtcatcaattatgttctccacaaagctgatatatagttgaataggtgaccatctaagtgtcgagcttacctgaaatgtagttttaatttggcaattcccttgtaacttccagctttgtcattttcatccttgtttgcttggatcaggggggacctaggttgcccgtcatggcgccttcacctgttgaacaagaagcac

SEQ ID NO: 26786 - DNA, 408 bp, Setaria italica
  Peptide Sequence Number=SeqID_92760
ctgtattatggaggcggggggtccccgacgttcgtgttcggaggaggcgccggcgagagctcggagatggccatcatcaggggtgtcggcggcccacaccacaggagcaagctccacggcgcgccgtcaaagaatctcatggctgagaggcgccggaggaagcgcctcaacgaccggctctccatgctccgttccattgttcccaagatcagcaagatggacaggacatccattcttggggacaccattgactatgtgaaggagttgacagagcggatcaaagtcctcgaagaggagatcggcgcctcgcccgaggacctgaaccttctgaataccttgaaagattcgtccaacagtagcaatgagatgatggtgaggaactccaccaagttcgacgtcgagaatcgg

SEQ ID NO: 26787 - DNA, 154 bp, Setaria italica
  Peptide Sequence Number=SeqID_92761
aaaaggcaagttagcaccccgctatgttggcccttatgagattgtggagatatgtggacccgttgcttaccggatccaactcccagagcagctatcagccatacatgatgtttttcatgtgtctcaactaaagaagtgtgtccgagttccagca

SEQ ID NO: 26788 - DNA, 1221 bp, Setaria italica
  misc_feature (1164)..(1164): n is a, c, g, or t
  Peptide Sequence Number=SeqID_92762
tggtcgtcgggggccgccgggaggcagtgcgcggcgcccgcgctggcgtctcccaggaacacgcgccgggcgaggcggaggctcgagaaggacgttgaggccgaggaggacgccgctaggagggcccgcaggaggaaatccaccagggcggcgccgaaagctgcagtggctgtggacaaggcggcggcggtgaacgaggaggatacaagcttggctttggtcccggcttgcccagatgctactcgcggaactgacttcgtggagcaatcagggtgggaaggtctctgtgaaaggattgctgagctggtgatgtggaggaacgtggctaaatcggcactgtggttcgggtttggatctatgttctttttctcatgctcattttcgagagagatcaccttcagcccaatctcggctctctgtcacctcggcgttatgatcttgggcttggcattcttcaaagattctgttcctcagaggccgcaggtggagagggggagaagcttccagttgactgaagaagatgtgcttcgtgcttcacgagctgtgcttcccattgcaaactccatgatatctacggcacaagtgatcttctctggtgaaccctcaatgactctcaaagtgctgcctgtacttctgtttggtgctaaatatgggagtctggttacagtgtggaggcttctagctgcaggatttttcactagttttacagtcccaaagttatatagcagctattcaagtcaaattcatagaagagttgagattttgagagatcgggctcaagaatcatggaagtcttgtccacgcaagaaacttgtcgcagccacggcagtgacgatgtgctggaacttgtttagtgtgaagacacgtgtcatggcagcttttgtttcacttgtaatactgcgttacaatcagaagtaccgcaaggtggacatcaacactgatgttgaaatttgtcaagacaatgaagggcagcaaatggagacggacgagtagattttgcagcacacttgtaccaatctcaggcacagctcatggctcatcagagggacggcagcagtgtcttcttaacctgctacgattactactacttctgtacaataatattcagttccacgcctagtggttctgttagctgctatgtatttatgaacgcatcgaggggancttctactatgccgtaattatgagcactcgtagagtgcgttctgcatgctgataaat

SEQ ID NO: 26789 - DNA, 351 bp, Setaria italica
  Peptide Sequence Number=SeqID_92763
ttaacgtaactaacgcacacaagatcagcaactgcatgcagctacctccaccttctccctcgaaagaaagccactaggcactagcacgatcgtctctcgattggccagagatgcctgatagggatttcaacttccatcacattgggcacacctacaacggcccacctcctgcccagcagggcaacaagcatgaagaagcccatcaccaccaaccggtggcgcactactccgaatactcaacgtacaccgccgccgcatacccataccgccctcctccgccggcatacccacctcgcaacaagccgccgccggtgtatgggtaccctcagccgcctcagccgggctggggcg

SEQ ID NO: 26790 - DNA, 521 bp, Setaria italica
  Peptide Sequence Number=SeqID_92764
acgaggcggagtatcgcggcatacacggtgctcgccgccacgcgacccccgcgccgagaacaggacgctgcacatcaggccgccggccaacacgctgtcgcacaacgagctcctgccgatgtgggaggggaagaccggcagggcgttcgagcgggtgcacgtcgccgaggacgccgtgctcaaggagaacccaggtaataagaagctttctttctagaacaacatggcttctcacttctctgtgctgaaatttgaactgatatgtgttactcctatatgagtggttgacgattcgatcggccgcagaggcttcgtttccactgaacttcatactgtcgatcgggcacgcgacgcacatccagggggagcagagcaagctggaggtcgatccatcgtcaggggtggacgcgagcgagctctacccagacgtgaagtacaccaccgtcgatgactatctcaacaggttgctctgattgtaatggatgtgtacggtctttgatatggagatgatcatgcgttcg

SEQ ID NO: 26791 - DNA, 442 bp, Setaria italica
  Peptide Sequence Number=SeqID_92765
agacgactacgactaacctggagaagctgtacgggaaggagataacggtcgcggaccgggagatggtggaggagcgcgtcgaccaggtgctgctcgaggccgccgacgcggacgttgccttcctcgtggtcggcgacccgtttggggcaactacacataccgatctggttgttcgtgccaagaaaatgggggtagaagtgaaggtgattcacaatgcatccgtcatgaatgcaattggagtttgtgggttgcaactttaccgctatggagagactatctcaataccattcttcacagaggaatggagaccagatagcttctacgagaagattcaaaataattcccggcttgggctgcacacgctttgcctacttgatatccgtgtgaaggaaccgacatgggaatctttagccagagggaaaaaagtctatgaaccaccaag

SEQ ID NO: 26792 - DNA, 360 bp, Setaria italica
  Peptide Sequence Number=SeqID_92766
aaggatctggtcaagctttacagctgggagcaagctccatatagtacagcttcgattgaaagttttaagaggactaggcaaaagatttttaagcttctgcaacagtttaataaaattttgagaaagccagtcatcgatctactaaatgaagtcacagcaaggaaagttccatgttggcttgatcctcacttgcctgaatcacagtttcctgttgacactgaaaatttcaacaaaaggtttttgtggtacagcaagtgggcaagtgagacttctttatcactacaagctttgcagaatacaaatggtactactgttggaattcctacagtcaaagaatactcagatactgtacagaatgtg

SEQ ID NO: 26793 - DNA, 409 bp, Setaria italica
  Peptide Sequence Number=SeqID_92767
ctctaaagacgaaccaaagcaaagtgcgaaacctattacaatggaaagggttgattcctggtgcgctggagtagagaatgacaagataggttctatccgttctattcttcaagcttttcggcaagcctgccattatggtgaagaccaaggggataattcagctccaaagttcagtgtcatgtctggtagtgtacttgataaagtaatgcactttgttttgaaacacatggatagagtcctccgtaaattacttggtgccccaagctctggagggaagaaagagacaatcagtgagctgatgctgagtaagacatggaagcggcatggcaatcttatgaggatctatcttgccaatgcgcttcatatgataacagagatgactgatgagcaaatgagtctatttactata

SEQ ID NO: 26794 - DNA, 356 bp, Setaria italica
  Peptide Sequence Number=SeqID_92768
tccgtttcggcttttcagccggcttataagctgaagcgaacatgcccattggggagggacaataaagattcttggcgcctttcctcttttcaatgatcaatattcgttgttttgtcgctaaaaagagcaacttgccagatacgctttggctacattcctgctagtgttattctcttcattcttctcatgtggatcttgtgccatcctgtaccagagccatactctgttcatattctatcgtcccagtacctaggaccatttccctctgtcgactgaatctcgtggagtaggaccgtatacagataagcatagcgcatttgaacttgaacatagataaagtctctgaattatccaag

SEQ ID NO: 26795 - DNA, 315 bp, Setaria italica
  Peptide Sequence Number=SeqID_92769
attctgttgccccgccggttaccgtaagacccggacgttgcatccttgagactgccgttgggcgcacggggcgtgagagcgagcggtgcgccctcctgtggcgtctggcgcagctcatgagtactttgtggcgaattagagggagctgcggccactgcagctcgtgccgcacggccacacatcggtattcggggccgtttatgttgggggcgccgctcccctttcggcttgacaaggccgcggcgcatttatggcgaggtacgaattaaggggttaccctaacgtaagtaaattaacccctaaattaaccttaaa

SEQ ID NO: 26796 - DNA, 254 bp, Setaria italica
  Peptide Sequence Number=SeqID_92770
gggggcggccgaggaaggtggagatcgcgtccgtggagcggacgggcgcggtggcgctggcggagagcggccgcgacggggacggcggcatcgaggtcgggctggcactgccgcgcgcggagatggaggcgttccgtacgttttgcctcgacctgttcgccagcctctgctagctgaatctgcagagtatggcaacgccgtgcaaacactgcaccattatcttttaactgcgtgagcgtgtatttccattgttg

SEQ ID NO: 26797 - DNA, 275 bp, Setaria italica
  misc_feature (22)..(22): n is a, c, g, or t
  Peptide Sequence Number=SeqID_92771
tgatactatatgattgtaaaanaaaaaatacctcagaccccctcaagaggagcgaaacctttgagtatacaggttgctagttgctaccttgcaagatagttgccaagatttcaaagtaaagcagactgatcatagccaaactgtttcaccactttattcagtcatttaacatctttgtcgctagctagcacaaaataacataggaacaaggcagtaccatgataatactgcaataattcatgtatattaagctcatggatcaaggaaatcgatgg

SEQ ID NO: 26798 - DNA, 1826 bp, Setaria italica
  Peptide Sequence Number=SeqID_92772
ccattttattcccatggaaaccggcactgagatggctgccgaacaggagggaggagccctgccgaggcagaacggccgtgcgagtgagccggcggcggccacgaggaagaagaagccgcaggggtggaagtgcatgcccttcatcatagcaaacgagacgttcgaaaaggcagcctcattcggagtggcagcaaacctgacaacgtaccttgtgaaacgcttcaacatcgggcaactccaggcgacgaacgtaaccaacatcttcttcgccacgctgaacttcacaccgttgctgggcgccttcatctccgattcctacctgggaaggttcaaaacactagcctgtgggtgcttcgcaacctcctggggatactgggagtgactttgaccgcatcacttccagccctcaaaccggagctatgcaaccaaacatcccaattaggtggacactgcaatagtccatcaacactccagctgggagtgttatacctttccctagggctcctaactattggaggtggagcaatacggccctgcagcttgccttttggagtagaccaatttgatcagactgatgaaaagagtcgaaagggcctaaatagctattataactggtactacagcacaagtactgctgccctggtgttctctatgactgttctcatctacatccagacaaacatcagctgggcaataggatttggcatacccacattcttcatgttttctgcaattatcatcttcttcgccggtgccagactttatgtccatgtaccaccagagggaagcattttctctggaattgcgcaagtttttgtggcatcatttaaaaagagaagactcaatctttcatgttctcatgacataaacaaaccagagttgatgctctacaaccctcccacaaggggcaaccgcattttcagactgccactaacttcacaattcaggtttctgaacaaaggtgcaattatgcgggatgatgatataaacgatgacggttctgcaagaaactcatgggaactttgcagtatccagcaaatagaggaagtcaaatgtttgataagaattgcgcctatttgtttttctggcatcctatgcttcgttgcaatggctcagcaattcacctttataatattgcaagcgtttaccatggacagtcacctagggccacactttgaaattcctgcaggctctgttgtatcgatatcacttatcgccctaactgtgttcatccccatttacgaccaacttatggtacccttgcgagaaaactgaccgggttggaaggtggaattacacttctacagagacagggtgtgggattggtgatttctcccatttctatggtggtagcaggacttgttgagcataaaaggagggattccgctttgtctaatggaggtatgtcacctatgacagttttgtggcttgcacctcagctggttttaatgggtattgctgaggccttcatcgcagttggacaaatagagttctacaataagcagtttccagagcatatgcaaaccctagcaggatccctattgttctgtgctatagctgcagcaaactacttgagtactgcactagtaaacatcaccagaaaggttaccgccagacatggtcacacaagctggttaacagacaatattaacaatggcaaacttgactattactattattttattgccatcctgggagtactgaaccttttctacttccttacatgctctcactactatcaatataaggccatgtcgctccatgttgacgagtccataaaaaaacatgaccaaggaagaagcagctacagagatcgagatcgtcaa

SEQ ID NO: 26799 - DNA, 716 bp, Setaria italica
  misc_feature (1)..(29): n is a, c, g, or t
  Peptide Sequence Number=SeqID_92773
nnnnnnnnnnnnnnnnnnnnnnnnnnnnnatatggaaccctgaaaaccgacctgaattatccacttggtggattcagtatactgtaggcacaaaacttgcactttgtaactgcacactggtgacggctgccgtcttctttacacgaatcgattcaaaaggtatgtactgaatagctctctcatttcatgtgcagcaaacgagacgttcgaaaaggcagcctcattcggagtggcagcaaacctgacaacgtaccttgtgaaacgcttcaacatcgggcaactccaggcgacgaacgtaaccaacatcttcttcgccacgctgaacttcacaccgttgctgggcgccttcatctccgattcctacctgggaaggttcaaaacactagcctgtgggtgcttcgcaaccctcctggtatgtccatcagtcacgccacgccacgacaaaagcttctgctcacttcaccgtagaaagtcggggaacaatcactggtgcgccacggactttttcaagagcaaaacttattcgcaatggccgccctagcattacctttccatccatagcatccttggcacacttagcttcatgatcatttgagaagtgaacaaatccaaagcctcttggccttccggaatttttgtcataaattattctaactgtagcaatccaaggaccaatgcaagtctccattgcatcaaccatgctataacctcattct

SEQ ID NO: 26800 - DNA, 221 bp, Setaria italica
  Peptide Sequence Number=SeqID_92774
tccaaagttgatgatggccaagagcttgagggtgatgctctctctgagagatctgccttactgtcaaagttggcatttgtgcttaagttgatgagtgagatactcctcatgtatgtgcatgcagtagggataattctgagacgggatacagagatatcacagtcacgaagttgcgatcaaggtgctggacacagtggtctactgcatcatatattctatct

SEQ ID NO: 26801 - DNA, 348 bp, Setaria italica
  Peptide Sequence Number=SeqID_92775
gaggtacttgccgtagcgccggaaccctccgaagcacgtgtgcagcgcggcgttcacggcggcgcccgtgtcgacgcgccacagccccgcccaggtccctctgcaccaccacgtcgtcctccaggagcaccaccctccgcagcgccgggaacatctccgggaggtagaaccggaggtagtccagcagcgccacgtccctgttcccgtcctcgatctgcctgagcaccggcgagtaggtcgcgttgaggaacgggaagtcggaggcggaaaggagctccacgtgcgcgccgagcggcggcgggcggcgtgcgaaccagacgcggaacggccgggaggtacatgggcgcg

SEQ ID NO: 26802 - DNA, 991 bp, Setaria italica
  Peptide Sequence Number=SeqID_92776
aaaatgcactctgcagcaattctgcctattttttgttgtagtatttttatcttcaggaatagtcactccagactccatgctccacccagacaggttccaacatcataaattcttagttacagatccctactttcggtgtctgaactttcagctctgaacacaaacgacaccccatgtacaaccctggagcagtggtagcaatgcctaaactttcctggagcattcaaacttgtcccgcagtcctgctcctgcactatgcagttactccagtgcacatgctagttctgtgcctctctctctagacgtctgcagatgagaagaaactttggtcatccatggagctggagatgaacatcacagatgaaacccatcctgatcaggcctgatgctcagatgttcaggatcgatgactgccctgtacgctgtttgccctgcattgtggaaccatccatcgaaagcgcgaggcatctgagaaacatgctccctgaacgagtctctctcgttcagttggtcctgcatgactgttctgaacccatttgaactggccacgctatgaacgccttcctggaccatgcctgactgcgccactgagaatccgattggagcagatgaaggagcactggggtagcggataagatcttttgaaagaagcccttctatgttgaggccgagctgtggattgacagccgcaagcttcatcgataggaactcgacctgcctttgcagggactggacgtagttgatgatctcatccagcattaccgccttcccggtgactttgctgcaaccaggaacaaggtcttgcagaagcttcatcctctcgctgatcttctcccttctcaacctctctgcgaggctgtgcctgttggttgcctgccccttccgggccctgacatggatgtacccttcgccttcctcgtcaggctccttcgatcccttccgtttcctcttgccggccgccgccgtcgctgcggccaggccattcttttcg

SEQ ID NO: 26803 - DNA, 366 bp, Setaria italica
  Peptide Sequence Number=SeqID_92777
acgtcagtagaactgcgcattggacgtgtatgtgccgccgaaccaccacccggcggggcgacgtcgacggcggtgacgacgcggccgtcgtcggccctgagccggaacgagaggctctgcccgttgaggaaggcgttgctctgccagttggcgccccagttccggctcatgggcatccagtccgtccgcgaccccttgatccacgcctgcgccaccacgccgctgccgccgacgttggccaccgtcaccagctcgaagtagctgtgcccgttgacggtgaaccggacgccgccgctcctccggcacggcacgcggcggtagttcaccggcacgatcccggcgcggtacacggcgatggtctcccac

SEQ ID NO: 26804 - DNA, 586 bp, Setaria italica
  Peptide Sequence Number=SeqID_92778
tcttccagggagatcctataattcaagtcgccgagcaaaactacttgatcatgatcaaggatcttctctggcaattcctgagttgaaccaccagggaaccatgtcctagaaagtatgtccgtgacatccaaattcctcagcagaacatccccttctttgccaccagaggccaggtgacaacagacaaagcaaaagctcgtctgatgcaacacaaatcggatcgaaacagaacccttgttccctaggcagcccatgatacctgaaccaatgcatgacacatctagatggtgaatgaattgcttaaggcttcttctcacccatactgacgtaaagatgccaaccatctgcttgctcctgatgcatctgaagccttctccctgcacagtgccctccagtgcactgctatttgtagattcttgggtcaactttgcccctttcttttcttttcttttttgttgagtgcctccccgattagcgagttccactttgcagatataccgttctttgtaggaccaagcacatttctcgcattgagtggcactatctcctggaaccctaaaacatagatgtcccaggtgctggccct

SEQ ID NO: 26805 - DNA, 224 bp, Setaria italica
  Peptide Sequence Number=SeqID_92779
actgtgggcacagttttgtataggagcttgggggtagcagccagaagaattgcctcaccgacttaccacgcttcgtcctctctgtagcatcttcttccgtgctatgtttgcagtaggttgcttgagcgtccatgcggcttgaattcttttctgttaagcagaaacagactcgaaacgaacacggccgttggatgtttcattccatcccctgccaaggtctcatg

SEQ ID NO: 26806 - DNA, 508 bp, Setaria italica
  Peptide Sequence Number=SeqID_92780
actgatgttgagaacaccattctattactaatgagatgcagacaatttcagatcgaaggatcagaagcagcactcaggaaaatgttacctctggtattttctcaggataagtcaatatatgaagcagtggagagtgcattcattactatatacacaaggaaaagtgcaacagaaacggcgaaaagtttgttaaacctagccattgattgcagcattggtgacctggctgctcttgagtgcctagttagctcgttagtttcaaaagcagaaatttcatctagcacggtatcggcactgtgggactatttttgctttaacatcagtggagtgaaaccagtgcaaagccgtggggctttatcaattctttgtatggcagcaaagtcgtctcccagcattttgggtactcacttgcaagatattattgacattgggtttggacgctgggctaaggaggagcctctgcttgctagaactgcatgtcttgctctgcagagattgtcagaagaag

SEQ ID NO: 26807 - DNA, 293 bp, Setaria italica
  Peptide Sequence Number=SeqID_92781
gctcccgccccccgaccgaccccgcgccgctgctccccccgcccgagccccctccacccgccgcagcagccgccgcgtcctccgccccgctcatctctcggtctctcccgccctggccctcagggcgcgtcgcgtggtggtccgaaccgaatgaatctgatgatgagtgggcgggcagaggttcttcgtgtgtgtgtcgcttcctttccggaaatcctattattccggtgcgggggattgattgattttaactctccctcgggccgcgtgcatgagatctgatctgcgagctg

SEQ ID NO: 26808 - DNA, 295 bp, Setaria italica
  Peptide Sequence Number=SeqID_92782
catgaggcagctctggtattgcctgggtaggtcctcgtaacagaactgtaccatgcgcctggcattgctgacgctgctagagtacctcaggccaagcatcaacctttccagttctgcatcgcttctatggggattagcatacagggcatggaggaacatcttggtggcaaaggagtcccagagacatttcttgaggattgcactgataccgcctggtagttgatcaccgccaaccaactcagctgctaccttgcgtatgccaacaaggttggaacagaaatgcacttggtagcgg

SEQ ID NO: 26809 - DNA, 769 bp, Setaria italica
  Peptide Sequence Number=SeqID_92783
gaccagttgggtagccaaatatcttgtagaacgaacagacaacaaaatcagcaggacacacggttaagtttggtggttcagttgtacatccttttgcagcatctatcaaaaccatccagcggccctgttgctgtgatgcactcaaaaatttcctttccttgatgagcttgaccaagcttagattgaacttgtgtcctgagaaattgcactctgaagggaatgcaaatagatttaaattgtttcctgaaatagctgtcaggcttccattctgatagttatgcaaaagcacatcatcacctcttctttggtttgagtgttttgaaatgttaaacaaactatcacttccaagattctttgatggatcagtaacctcttcaacatcaactgccgatacagtagctcctttgctcagagcatactctcttatcccaagcacactattgtgattttccattgtgtacatgtagcagctttctctactccatggaaaacattcgccaacaagtttttagagctgctgttgccccagaggtaaatatacatttgtagtcccttggagatgcgttgaagtattttaggacctgatgccgcacagaagtaacaagatcacttgtagccatgcttgaatcactctggctatgaggatttccatagacattcgacataaggtctttggcaacattcgccatctgtgcctctgagtacagcgccgcaccagcatgatccaggtaaaccatcccttccagccgcttgaaatcggcggcccgca

SEQ ID NO: 26810 - DNA, 446 bp, Setaria italica
  Peptide Sequence Number=SeqID_92784
gtagatccgtctgcactcgattcgatttcaaatgcgttcgcgtttgctttcccctcattttctgtcaggaatttcatctcgttttgctcagttcttgacattttccaggggggggctccatggaggagcgcgccggccccgatcggtgccacgccccggccggggagtgcgagtggcgggaggagctgcggcagcagcagtcccaggtggacgcgctgcgggagcggctcgtggaggtgaaggtcgggatgcggtgctccgagggggactcccggcgggagctcgaccacctgtgccgcagggtgaagaccatcgccacgctgctggcctacctcaagtccaaggccaggattatggccataccgcacctcgcgcacacctcctgcggaacctcccctgcaggacccgggcccggtgcccttgggccaatccgccagcggcacgcc

SEQ ID NO: 26811 - DNA, 499 bp, Setaria italica
  Peptide Sequence Number=SeqID_92785
gggatttggtggggaagcgaagaaaggggaaaggcgatggcgatgacaagcaactagccgtcgaggagccgaatgtgggcggaggtgccgcggcggcggatccagctggtggcggcgccgcagtcggggctggcgcatcgccctggaggaagaccacgccgccgccggcggctggcgaggcggcggtcatgggggccgagtcctggcccgcgctggaggaggcgaggcagaaggtcgccccggagtcccccgcgaaggcaggggcgggcaatgctgttggtggggacttggccaagggaccgcaggggtcccctcctcctccgcctccatcccaggtggctagtcgtgcgcacaagtttgatggccatggaaatcccaacagaaatcaccaagcacaccataaaaatgggcccaagcggcgttttcctgctgtgaatggtgcaccatcctaccctccagcgatgcagtatcaccaacatccagggcaaccttatttttt

SEQ ID NO: 26812 - DNA, 916 bp, Setaria italica
  Peptide Sequence Number=SeqID_92786
aattttagtgatttcgttgctgcgtctttggttcatgctttgacccatccaatgaaacctcagcactgcattcacaacataatttagtgatttgtgctgcgttctttgttcatgtctttgcccatccaatgaaacctcagcactgcattcacaacatgaattaagagcagcatcagctaattcttcgcaagcattgcgatcaacaaaccatccgtaggagaaaccctgtgaagtatcaactctttgcccctatgtgcatctgtggctggactattttccacatcatctgctagattagggtttctaaaagaattcccttcagcagatactttacataaagaatctttagaaatatcaagcactaagcttcggggagtttcagtactttcatcttccaagctgtgaaacatatggccagcaatctgactgtaaatcaaaccagatttttcataatgatccacagacccaagttctctcgcatctgtttggacagttccatttgaagtttctccgtctttattgccctcttcactcccagatggtcttgtatgaaccataggtagactaagcaaatcgattgcaccaagacatctatttgttaaagtgctgcctgcagtcatgtgcattccctcattagcaacctcctcacagaaatccttttgtccattaatactgcatctctttgaagcagttgcagtttcccctgtcgctgaaataccgttaccaatgtaagtacatttgtctaatcttgatgttgatgtcccaattgacaagtcagaacacccttgggcaggaatagcagtagcatcattgcttgagaacctctttaaagtgttaacaatgtttcccatgaaagcagatccaaacaaattgctaaggttgcctaacagaaacttctggaaggaagctggagttg

SEQ ID NO: 26813 - DNA, 1050 bp, Setaria italica
  Peptide Sequence Number=SeqID_92787
aagtgagaaatccggttttctcacaagaactatttaagttcaagatgagtttcttcagaagcaatcgaaattgaaaacatgttagtgcataccagcaaccctacaaatattcatatccgtgggcatttaacgccttacagttacaggagcagtgacaccagcgagtaagccagtcagcatgtcatgcatacaaacacacctgcactaggggtgcttcgatagttaaaacggtgcatgtagaatgcagcatgctagcagcagcatttcatcagaacctcattagaatctgagcaatctcttgtgatctgctgaaaaacgccgagacctcctctttgaaggaggctccgaactaatccctttaggaaattgtgcttcgaagttggttatcccacaaatacggccatccgggtcatatataatgttttgggatcctggatccagtcgtggaactatcagccgacctgatctggatcgtttcacgttgacagattcaggagtggaaatagatggtgcctttgacttactgccagtaagtggagattgatgcacatatgaaactggagttttagtcattcttgatctaggagtaccctgcaaaactttatctccagaacttcgcttcaccattgggcttgtaggctgtttttcaatttccagacaaatcagatccgaaggaattgaaattccagtattttcgtttggtaccaacatctggcttgatgcttcagtagttcttttccgttttgctcgtcccttcaatgaaggagttcttttctgctttgcttgtcccttcaatgaagacttagggttactgacatctaaattagcagacgctgttattacttcaattggtaccgcatcataatttagtgatttgtgctgcgttctttgttcatgtctttgcccatccaatgaaacctcagcactgcattcacaacatgaattaagagcagcatcagctaattcttcgcaagcattgcgatcaaacaaaccagccacagatgcacataggggcaaagagttgaataactttacaacaagggtttacta

SEQ ID NO: 26814 - DNA, 242 bp, Setaria italica
  Peptide Sequence Number=SeqID_92788
gtcataaaatagctatctgaatggcaaccagagtttccactcaaaatagatggcaaaggatggggcagttaatctcaaaattgtgaattcaaacactgaaatctgatcctatttgggccagcattacaacagttacaaagatattcaccctcctatattgctaaccgtgtgtgcatattcgataaatctgatctgagtattctggttatatgttacagatgctgtctgaacaaacttacttt

SEQ ID NO: 26815 - DNA, 321 bp, Setaria italica
  Peptide Sequence Number=SeqID_92789
ctcggactccttgaaccgctcgaagttctccggaacggtggcgaggcccagggggtcgaagccgaagtccccaggagaggagccgtcgaggtgggcggggcggggctggccgggcatccactcggcggacatggtgacgcggccggaggtggtggcgttggcgcagaacggcagccggccggagcgggacgacggcgccagtaggctgggcacgcccacggcgctgcagctccggagcccgctcgacgacgccatcaccattgccgcttgctgatcctgaggtgacggggagacgagaggagggagggaggacatgagaca

SEQ ID NO: 26816 - DNA, 482 bp, Setaria italica
  Peptide Sequence Number=SeqID_92790
ctctaactccacgatcttctgctgaagaacagttacacatttcttcttttctcctttagttttccagagagctgacgctgctgtttctctgatgtcatttgagaatgtgccttggaatctaactgaccttcaagctcttttaccttttcttgcaagttcttgcaaagttgctctttccctttggctttggtctcgaaattttgcaagttctcttctagctttctcaaagagtcatccttaagtctgacttcttgcttagttctttcaagcatctgtttggtcttttgaagttcaacagtatcaacttgcttctttgctggtcccaattcaatacgccgaacacggctggcgaagtttaatgaactcaaggtttctgatacatcactatcggatgggctaatttgcacaaacatcaatgctttagagtctcctcctagagaatcttgcagcaagtgtgtcaacttggaatttctgtagggtat

SEQ ID NO: 26817 - DNA, 487 bp, Setaria italica
  Peptide Sequence Number=SeqID_92791
cgtcggtcctccccgccggccaccccttccgcctggcggcgccgcccagcgcgacggcggcggaggcgagcgaggcgaggcacccggcggcacggtgcgccttgagcagcagcacccacctgatctgcttggcgttcttggtgcggccccccttgcggcgggcgccggcggccaagatttcctcgtcgtcatcctccggcgaggagatctcggagatggaccagtttgggttctccatcttgaccaccaccggcgtgccccggtaggcgtcgccgccggccttgccgccccacaagccgctccacggcgccatctatggccggtccaagaagccgccgcctcccccggccaaggccacgcctctcgtcctccccgctcccaaaatagcctcccactccgccacacgctaatcctgggcctccctttccttttgccaaccccccagcaatccctctcacacgaaaccccatgcttgctacttctagcc

SEQ ID NO: 26818 - DNA, 548 bp, Setaria italica
  Peptide Sequence Number=SeqID_92792
aaacgagtggggcaacgccatgtaccccgtcgtccccgggcacgaggtcgtcggcgtcgtcacggacgtcggcaccggcgtcaccaagttcaaggccggggacacggtgggcgtgggctacttcgtcgactcctgcggcgcctgcgagagctgcggcacggggcacgagaactactgccccaatctcgtgctcgcctccaacggcgtggacagcgacggcgccaccaccaagggaggcttctccgacgtcgtcgtggtcagcaaggactacgtcgtccgggttcccggagagcctgcctccggacggcgccgcgccgctgctctgcgccggcgtcacggtgtacagcccgatgatgcagtacggcctcaacgagccgggaaagcacctcggcgtcgtcggcctcggtggccttggccacatggccgtcaagttcgggaaggcgttcgggatgacggtcaccgtcatcagctcgtcgccgggcaagcgcgaggaggcgctgggccgcctcggcgccgacgcattcttggtcagccatgacgccgctcaa

SEQ ID NO: 26819 - DNA, 822 bp, Setaria italica
  misc_feature (786)..(786): n is a, c, g, or t
  Peptide Sequence Number=SeqID_92793
ccgccgtgactacaacgacgacgaccaccaccgcggtggtagcgaggcgggccgtggcgagggtcaccagcccgagagaaggtgcgcccgcggcggcggtcggtggaggggaggtcaaggaggtggtcgtcgtcgaggtgcacaaggcggccccagaggaggaggaagccaagggcgtttcggaggaaccagtggaggaggagctggacgacggcgtcgacgaattggacgacgaggagttggagacggaggaggaggaggagaaggagatgctggatcaggatcacatggccatcgacgacgacgaaactgctctgcaccaagtggacgacgacgaccaagacctcgagccaccgacaaaagcaaggattaagccgacgctgtcggtggaagatgagagagctgctaacccagagccagtgaagccgcctccagagaaaaaattagcctcggcgatcgatctccgagcgatcaacccggagtctatgacccctccttcagtggagaagaagacgacacccattgtagttcaccgcatgactaacttcgagacggcaaaaccttctccagagaagaaatctttgccggcgattgctcgccggattccgaagcaagagcctgtcagcactcctccagttgaagagtatgaggaaattcagggcagaccatctcagcccagcagaagccatgaaagaatgcaaaatattgtgaatttggtgatgtggagagacgtgtcaaagtctgcactggtgtttggattagggactttcttgctgatttcctccncttacgccaaagacctaaatttcaacacaatcacag

SEQ ID NO: 26820 - DNA, 557 bp, Setaria italica
  Peptide Sequence Number=SeqID_92794
tggccaaaccgagcaagccgctgatctccaccgcctacgacctgtcctcggtgctcacagatgtggctcgcgtgggcttctcctcggcgacaggctccttcaactcacggcactatgttcttggttggagcttcgccatggacggacctgctccggccattgacatctccaagttgccaaagctgcctcgctttggtcccaagcaccgagccagattggccgagatcgtaccgccggtagccaccgcagggctcatcttgtccgtgggtgccattgtggttctgctggtgcggagacggttgcggtacagtgaggtccaggaagattgggaggttgagtttgggccacatcggttctcgtacaaggatttgttcaatgcaaccgaaggattcaagaacaagaacctactcggtgtcggagggtttgggagggtgtacaagggtgtgcttccagggtcaaaaatggagatcgccgtcaagaaagtgtcgcacgactcaaagcagggcatgaaggaattcatagcagaggttgtcagcattggccgcttgcagcaccgt

SEQ ID NO: 26821 - DNA, 346 bp, Setaria italica
  Peptide Sequence Number=SeqID_92795
ccctgcggccgcgcgttctcggcctccggcacggaggacacgctcttccggcgctccggcgtgggcccgcgccgcgcggcgggtgaggacggcgacgaggcccgcggcgcgcgcgacgtcttgtagaagaaggactccccctggaacgacaccgagaggctccgcatcgtggtcgcggtagctgtcgccgccgcggccgcggccgctgccgacgcggtggtggtgggcgacgtggagtgctgcggcggcggagtggacgctcgggtgcgctgcgccgacagggagcgccgggacgaggacgaggaggacgaagacgtggaggacgacgtggaggaggccggggacg

SEQ ID NO: 26822 - DNA, 535 bp, Setaria italica
  Peptide Sequence Number=SeqID_92796
acatcgattgaccagggcatcgcgtacctgctgatgatcgtggccttggtgctcacctaacctgatccaccctctcgacgcctcctccccgtacaagctcttctgagcagaacagagcagagttttttccttcctccttttggtagggtggtagtggtggattatttgaggcatcattggtggtcggtcggtccgtattcatttgtgatggattctattgggttttgcatgtgtataatgttactgctacttcttcatgtacatgctttcatgtcagatgttccaatggctgtcagatgtattgcattttggagagtttcggaaatcttgcttgtggtgtgctagtgtatttttgcaggatagtcaaattctgaactcgccatttcctgctagccatcagttcggtgttcgggtcaggttggatcagatcggccttctgcattttgcaatgcagttgctagcgacaaataaagaaaaactctcccttttttcccccagaaagaacaaataaaactttacctgtttgttctgagca

SEQ ID NO: 26823 - DNA, 1150 bp, Setaria italica
  misc_feature (1)..(61): n is a, c, g, or t
  Peptide Sequence Number=SeqID_92797
nnnnnnnnnnnnnnnnnnnnnnnnnnnnnnnnnnnnnnnnnnnnnnnnnnnnnnnnnnnnnccttattaagagtggtacaaatcactactgtactatcttaatttacattgctgcattgctgttctacagtacaaagtacaagcacattgcattgcttgatgatacagccttgtagtttccttttctttacaagtacatatataataaataaaatcaaaaataaattcctaagaataaacctaataattaacaaataagtacaaattaaataaagagcagaaatgagcagattaaacaacttccaagtctaaaaccaccaaaagtcaagaagtatttatctcattttcccccttacttggttgcttttttctttcaaaaaaagctaaccaagaataaggtacattgatgacttttagttgctcttttccgtactcttgtcccccttcttcttcccggccggcgccggtgctccggcggcggacttgtcgtcggttgacctgacgacgccgtcgttgccggcgagcatgaggtacttgtccttcctggtgagcatggtgcacccgtacccgagcgcgtcccccatcctcctctgcacgaggttggccacgtcggtgctgggcgcggcgccggtccttgccggcgacgtgtccaccttctccaggaactgcacggtgtagcacatcctcggattcgccatgtagtagagcgggtcgaagcacttgagcccgccggcggtggtggcgtagaacatggaggtctcgacggcgacgccgacggggacgacgtcgtcgctgagctcggtgaacagcgggctgaaccggaggaggtagggctcccggcaggtcgtcccctcggggcagacgacgacgaggtcgccgccggcgagaagccgcgccatcaccgcgccgtcgctgcggcggtcgcgggtgagccgcacggtccggccgatcggggagatgagctccgagaggcggctgaggctgtaggagacggcgcggacctggcggtcgagcgcgacggagacgtagacggggtcgatgagggtgcggtggttgcaggcgaagagctgcccgcggccgccggaggggagcgccggccgcccgcccttgagccgccacgacatgccggtggcggcgaggatgggcgtgg

SEQ ID NO: 26824 - DNA, 373 bp, Setaria italica
  Peptide Sequence Number=SeqID_92798
cccgttttctgcgtcgcgccgccgtcgtctccgtccttccctcctttcctcccacccggcgattgctcggacgccgtcgtcaccgcccaaatcatcctctgccgcgagtcacaccgcgagcctggacggggaaggcggggatttggaggatgggaggcggaggcgacgccagaggctaaggaggcggtagaccgagggaaggtatgtgcggcagcgggaaggaggggaggggaggagcgggcgccagcgccgctgggatgtcgccaccctggccgccaccgcctgcgtgcggcgcccttgcaactgccagcagtgcccctaccatgtgcttgccaacgcttgcgcgagctcgccctgttcgcggcccctccct

SEQ ID NO: 26825 - DNA, 972 bp, Setaria italica
  Peptide Sequence Number=SeqID_92799
ggagcaagaaatcaaccgtgccaattatcagctacacctccttcccatctatagcatccaggcaggccttcaagaacctgattgggcaaaagcagagggctctctggattgcacataacataccatccttgctttacctgtttgtgctcaactattttcttttcttctttctaacagaactaccccccaactccatcaacgatctcttgagcagcaagtgcaagaaggcctctctgtgcttaactagtcatttggaaagcacccagcaacttagagaacattgtctcaaactctcttttccttacccttctaaaaggaattgcccacagaaccccatctatcatcgagggaccgcgaagcaaggacaataggtcaatcttcagggagaacaatctattcacccaaaacgatattctccaagtactcaattgcatggtgcatgcggccttcatcaaaccctttaaacaaggcattatgtgtgcaatcatctggatgaataccattctgatgcatctcaaaatacaatctcattgcatcttcccagttgccttctctacagttcccatatatcaaaaaagtatatgtacatctgtttggtattaatcccctttccagcatctcatggaaatgacgataagctagttgagttctgcctgtcctgcatagtgcatgtatgagcacattatatgttatttcatcaggttcaactccttcctccagcatcttccgaaaccaaccatatgctgaataaaggtttcctcttctacagtatgcatgaattaaaaaggtataggtcacagctgagggtgaaaactgatctgagatcatgttaccaagaagttctattgcttctcttaggagtcctctttcacaatgcgcgtgaatcaagcaggtatatgtgataaaatcaggctgtaaaccatcagtaaccaaaaataaaaacaaaaaagtaaaaaagaaaaaaacaaaaaa

SEQ ID NO: 26826 - DNA, 679 bp, Setaria italica
  misc_feature (631)..(631): n is a, c, g, or t
  Peptide Sequence Number=SeqID_92800
ggaattctcgccgcctcccccgtcgaggcgaggagagggcggcggcgcggcagcgagctcgtcctcgcaccattgggccgggagccggccggggcggtcgctggccgccgttgctggaggcagactcaggcaggttgatccaaattcgagcgcctccgatttctgagagtatttgggggcgtgctcatggccggctagatcggggagttttcagctgctctggttgtgatggcagctgattccagcatggggtttcaccaggggatcaccgcctcgatgtacaaccaccacatgctctccttccagtccaacagcgacgttggcatcggcggcggcgctaccggtggtatggtcatgcccccgaggagcgtgagtgggagcagtagcaacgctgggctcttcctctcctcaaacaccggcggaaccggcaacgcatcgggggttggcccgtcgaggagctcgtcaggggatgggttccgaggcaccggtgctcccccaagtacaggtttgtcacgggttcgccttgggattggactgaccatgagctggccatactgaaggaaggcttgcaagatatgctcgtgaacctatatcatgaggtacattaagatagcagctatgctgcctaacnggaccatcagggatgttgcgctgcgatgctggtggtgtacaggtaaag

SEQ ID NO: 26827 - DNA, 414 bp, Setaria italica
  Peptide Sequence Number=SeqID_92801
aacgatcaccttggagctgagtgggactagaccagcaccaatgatcacctgagcagcatctcctatcgccctcaagaaccgcagcttctaaaggccgcgcctggatcccgatgtcgtcggactcgacggtcccacaggaaatcttcttgcagcggtgcccgctggcggcggatgtggaggagcctggacgagtttgcttcgcagccaccgccagccacacttcatttgtggcgccgccgcaattgaggcgcagaaactgggcgccacaaccacggcaaaaacatgaagggaaaatctgccaccgcctaacctccgtcaccaaccaagcagcagccacagactcgtgtggcgtggcgatttgcggcgggcaaccaagcagcagcgcaggcggggcggcggcaggagggagaagaa

SEQ ID NO: 26828 - DNA, 279 bp, Setaria italica
  Peptide Sequence Number=SeqID_92802
gctggtcaaggcgggcggcaagatccggcggcgccaccgccgaccgaacaagagcagcaaagcggcctctttttcccaggaggaggagggcaggggcaaggtgcaggagcggctccgcgtgctgggccgcctcgtcccgggctgccggaagctccccgcgccggacctgctggaggaggcggtcgactacgtggcggcgctgcagatgcaggtcagcaccatgcgcgcgctcgccgacgcgctggcggcggcgcagctgtccgacgacgcaggggcggc

SEQ ID NO: 26829 - DNA, 209 bp, Setaria italica
  Peptide Sequence Number=SeqID_92803
tggccgaggcggggagctggttcatggagttcttggaggccgcgctggagaccgggttgaagaagagcaaggcatcggccacgggagacgggcggaagcagagcagctgcagctgcccgcagtcgctgatgctgcgggtgatcaactgggtggagatggagcagagcggcggcgacagcagcggcaggaaaccggcacacccgagagct

SEQ ID NO: 26830 - DNA, 467 bp, Setaria italica
  misc_feature (459)..(467): n is a, c, g, or t
  Peptide Sequence Number=SeqID_92804
tgcgcacggtgcctgaaaatgaacctgtgtaccatgaggccccagaggcgcagaaagagaaatgagggaaagagcagggcacccggctacgagaaggagaaagcagaggccttcacgtcggcagctagcccttggtgtattatgagtgcccgctccggtggccacccatgctcctctgcacctttgcgtttgtaacagaaactgtagatcatggacgattccccgctgtttttgcttcttgacgtgtttcgtgtgttgttagtaaaatgaaatgactgtttgctgagtgcatcgccgccgtgttcctttgcctgtcggggtggggtgtgttgtgtttcggcttggctctctacgccaccagctcttgcatagtgctccatctgtttcaaattgtagattgttttgattttttgtcataaattttttcatagaggttttttactagatagtcagatgacnnnnnnnnn

SEQ ID NO: 26831 - DNA, 275 bp, Setaria italica
  Peptide Sequence Number=SeqID_92805
catccctgtggttgccggcgagacgagcctgctgcgcatcatcaacgcggccatgaacaccgagctcttcgtcagcctcgccggccacaagatgaccgtggtcgccgccgacgccatgtacaccaagccgttcgagaccaccgtcatcctcctcggccccggccagaccaccgacgtcctcgtcacggcgcacgccgccccgggccggtactacctcgccgcgcgcgcctacgcctccgcccagggcgtccccttcgacaacaccaccgccaccg

SEQ ID NO: 26832 - DNA, 470 bp, Setaria italica
  Peptide Sequence Number=SeqID_92806
tcgatcaccctttcaaccgtcctgatcccaaagtatcctctcttatggcttccatcctcgagctccctgccagcccatgccggtatctcagaacagacatcgaggatcacacacttttttgttttgatgaaggtgccggccatatgtgcactctgcatcttgagaaccacctggaagctggagtttatgtacacggtgacgagcttccagtggaggatgccctgcctggtgcgtttgagaagctcgccgcccctggacacgaagaccaacggcgatatgtccctctccggctccctgccgtcaccgggcaaggccgtcgcctgaatctccttgtgaagcctcgccctcagcatcgcagccccgcgcaaagccgtcgccgcgccggcggtaagcgccatgacgtcgccgctggtctgcgcgttcacggccgagtggatggcggccaggatctggtcgtggctggcgccgat

SEQ ID NO: 26833 - DNA, 477 bp, Setaria italica
  Peptide Sequence Number=SeqID_92807
acaacacagattggaaaaaaaattcctaaagacaaaaagaataataatactaacaggagagaagctagtctacttgtcctacgctacaataaaatattatactggaactagtctcgtgttccgtctgagccatggagctgcatgctaactgcatgctcacactgtctgaccccgtcacgttttcttccgccgccgtcaaaagcgaaagcaggggcccgccctccagcgacggcgaccggtcaacagcggggcgctgctggatgcgcggcggctaatccatcaacctaccgcagtaacgccggctgctgcgctcagaggacgagagccgagacggcgacggccgcggtgaccgcgacggcgacgagaaggttcgcggcggcggcgctgctgggctgcgcgttgccgccgaagaagaccatggtggtgccgttgttcatctgctgcggcagcccggcggcctgcgggttctgccccgtc

SEQ ID NO: 26834 - DNA, 322 bp, Setaria italica
  Peptide Sequence Number=SeqID_92808
ccctgcacaccaacatcttcgccaatggctccggcggcagggaggtgcagtacaggctctggttcgaccctacccaagacttccacacctactccatcgtctggaattcagacgagatcctgatcctggtggacaacatggcgatccggcggttcaagaaccactgggacgccggcgtgcccttcccggtgtaccagccgatgaggctgaacggtgtgctctgggacgccgacggctgggcgacgcagggcgggcgcgtcaagacggactggacgcaggcgcccttcaccgcctacttccggaactaccgcgccagcggctg

SEQ ID NO: 26835 - DNA, 2744 bp, Setaria italica
  Peptide Sequence Number=SeqID_92809
tttttttttttttttttttttaagtttgaaatttttcgtttgtgaaaatgtggcagctgcgcaccggtgtgatttgcgtatgcaattctgaacgtcccagcaaaatctaccattcagttactagttactacatctagttcttatcgtacatcagacaccccagtcctaggtttacggtgaacacagcttacctgcagctagtgcaggcatcccattctcatgccatcaactcactccccctctaacatgatgatacagtccttcctctcccctcatattcgagtaaggaagtcccagtagatctccaggtgttgtagacatctacttgattcacttgcaccgattcgataccaatctcccaaatttctatcactaagctaaaaccttatctattcatttggttgccatttccccttcacacgatagaatcctatctatgtctgagaaatacggccatgtcttcatgctctcctcatccttcttgctctcctcatatttctgaaccaacgatgtccacagagatttgcactgtgccggcgtacgacttattccctggttcatcaagctcccagaaatctcctcccacagaaccattcttcctttgacactctgaaatttctcattcatttcgccccgcatctgtattaagctcttaatttcctcaggtttccacttgttcttttttgaagacttgactggagcaggagctgactgggtggggtccttacccaatatgccgatcttgccaagattctgtttgttccctccgttaacgattcttgcaatttttacagcagtaggggatttgaatgactcccaaaagtgctccagtgttttaggctgatgcaaatctgaagagaagaatgcttcaccattggagcttgtggttgcatcatcaggtgttgtgctcacagcctcaggaagggtctcttcagcctcaacgtctgggttatctggatgtgttttataactgccttcaagactcctagctggactcctgctcagatggctagtagctgatgaaggtccaaagttcccagatgatttagcttcaaggtgttctgagaaacctgcagtggtgttctccgtagcaaccgcaatgacatcaggcctcttcccactgtacttccttaccattttcctcaagatttctgctaccatcctctccatgtgactaagtggacaattcacaggacagctggataatgcagcatgcgctgctttgtagagtgcgtccaataatcttccattatcaagccatagacatcttgttgtaattttaaatttccctttcaaacctgactgcgttgaagcatgttccttctgaggtcggatgatctccatactaacaaaaataatgccatcagatgcgattcttaatctctcatcaatgcagagatcagtggatgtaccaaaagccttatcaccatcgctatacatgagctgaaaatcctcctttcctaatgaaacaaacccactggacagaactcttctgtttcttagatgtgacacaccaagcatctctccgtttttaattacagttgtgtgccttatgccagttgatcttccaagtaattcatgttctttgagaaacaggagttctccatgaacaggcaagaaatgttgtggtttaacaatccgaagaacttcctccagctcatcgcggtaggcatgcccagaggtatggaggccagaatctttacccatgataatttttgggccaagatcagtgaggcgattcatcatcttcatcaccctcgtttcatttccaggaataaccttagccgaataaaggaggacgtcctctttggataatttaagagcatgacttcccccatacgatgcaagatttagagctgcacgtggctctccttgtgaacctgtagtgacgactagaagatctttaggggcatatgcatccatgtcctctaccttgaccaaggttgatggatccagtggtgcctttccatccttgaatgcagcttcaaggtatgtcctgagtgacattccaacaaacaccatctttcggcctgttaaatctgcagcagctttgacgctcccaattcgatgtatgtttgaagcgaattgtgtcgtaattactcttccttttgcttctgaaatatgtcgcaacaatgaaccagcaacaacagattcgctgattgatcttccaggggacagtacatttgttgaatcgctcatcataagagtaacaccttctttggatagctcctccaatgcttctcggtcaaatatctttccatccactggtgattcatcaattttccagtcaccagtatggaaaattatgccatcaccacatcgaagcactaagccacagcagtcaggaactgaatgagttacacgaatgggttcaacttcaaaaggtccagcctgaaatctctttttaattcttaagaccttaagccgcgatgagaggaatatcccaaactccttcaaacgcttctttattagctccatggtgaaagatgatgcaaaaatcggtgtggttgaatccagtgctgggatgacccaaggcaacgcaccgatgtgatcttcatggccatgtgttatgatcactgcttcaattttatggctccatttcttgatgaatgtggtgtctgggataatcttttgcacaccaaactcatcataatctgggaacataacccctgcatcaatcaagatatatcggtcatagttcccccacaagcatgcaattcatgccgatttccccaagaccacca

SEQ ID NO: 26836 - DNA, 466 bp, Setaria italica
  Peptide Sequence Number=SeqID_92810
catactgtgtaaaattggtaagagagtgctatgttaactaatttacttcctaccatgtgatatacgtccaaaaagcaaaatgccttttcagatcttagagcctgccttgtacaaacttatgcatatgcagctccacatttttaagcatatgctctaccctaaccttctagatcatgctcctcgaaagttttaagttttgtctctactacaaacttctgaagtagggagtgttgccaagtcagagaggggaaatggcttatagtatgcagtaagagagtaaagaaaagggcatcaccagaatttaagtttctttcaaaaccatggttttgtcacttctgctgctgtatcaatcagtcatctctatagcatggcagcacctctttgtttcgtctctctctctctcttcttttttctcatggagaagcttcagtgctctccttaatttttgacttcatacactccctaa

SEQ ID NO: 26837 - DNA, 1377 bp, Setaria italica
  Peptide Sequence Number=SeqID_92811
tttttttttttagtttctttccttaattttttttagctccaatacagcctcaaaattaatgtcgtaatatttttgtttgccacaggcagtacaaacttggctccctttgcaatgcaatacaaacgcggttccagaaaaaaaaaaatcaaagccgtatggtatattggtatacatgactgatacagaatgtcctctctggccgtaaacatggatgaaaaattctccatcttttttttagtatgaacacatggtaacttcaatcccaatgttgctccagaaaaaccacaggctactttggaattggacaggaaaacagaaacttagaagtccacggacaagatttcaaaattatcaaattcagagtcgcgggagtcttcatatgaggaaatcatcgagaagcttagattgtgtgcatccgacgaatcacttcaggatccaattgtccactgctgtaactggatggtacagcggaaatttcctgcgtccctagccactctttacctggctttaaagtaattggcttctcaatagctgcagcccctacgcatagcatgtttttgtattcatcatccccgaaatctggcattgctttggccttcttgtcccaagggttccaaacgacaacatctggaagtccctctttcctcaaaactaacgttcttttcttctcatgatcaatgatgacaatctttggtggagcactcaaatatatcttgtccacttcagactcaaatacaactgcatctccttgttcagtacaacgattcttggattgcaagttgtcaagatagtccaaggtctccaaaccttcaacccgcacttcactgatatcagataccgaaaagtaggtatggtatgcaaatgtaaattggaatggcttgccatcagagctgacattttttattcgagatgtgaggataagatctccccttggactaagagcaactctcagacgaaattcataactatggggccagatcttcaaatcctcttgagacgacttgagtatcaagtcaatatggcaattggaagtagcaactggaaaaggaggtggactttcatcgacactccagtattggttccttgcaaatccatgctgttcaagagctccatggctacctaattgagggaagcaaatttggatgccaccacgaattgcttttggcggtttaaaagtagccttgttactgacaaaaagcagttggtgaccgaagttatttttccaaaatgtcacttgacctccatatagatatacataacaattgttggagttgaacagcttacacactagtaaggtcatactttgtgttagacaaagaaaagtaagctggtgccaaaaagcaaactatgaacaaaatgggccttattactagccat

SEQ ID NO: 26838 - DNA, 1043 bp, Setaria italica
  Peptide Sequence Number=SeqID_92812
cctaacaccaccaccacgctcgccgagctccttggcgccaacaacctcgccgccgacacctccccctccgcgcccatcgcggccgaggccatcgttcgcatccccttccgctgccgctgcgggagcaacatggtgggccagtcggccgatggccccatctacgtcgtgcagccgcaggacgggctggaccacatcgcccgcgacgtgttcgacgccttcgtcacctaccaggagatcgccaccgccaacagcatccccgaccccaacaagattaacgtcggccagaaggtgcggatcccgctgccctgctcctgcgacccggtggacggcgtcaccgtgatgcacttcgcctacagcgtcgccaagggggacgagacgtccggcatcgccgccaggttcggggtgaaccagcaggcgctgctgaatctgaataagctaaccgaccccctaaagcagggccagattctggatgtccccctccctgtttgccgttcgtcgatcagcaacacctcggctgatcacagtctgctcctcccgaatggcacctacgcgctcaccgcacagaactgcatcaagtgcagttgcaatgcaaacaactacgagcagctagactgctccccagtgcaagacagaaggtgcccggcactgcagccctgcgatggaggtctgaagcttgggagcacgaacggcaccggctgcgaatccaagatgtgcgcgtacaccggttactccaacaccacgtcgctcagcatacataccgctcttgtaactgcaaacgagacagcgtgccaacagaagggaggagccgcgaggtcggagtttgccgggtccatgtggagaatgtccgctatctccttccacatggtgctcatcctgatctgcttcctttgatgctatagaggttagaactctatagatgttattatacgatgtgagtcacggtgagattgttgttgtaactttgcgtgtatgttaggtctggtttatctaagattttgttctccattggtatagatgtttgaataaatgaaggaagtgattta

SEQ ID NO: 26839 - DNA, 449 bp, Setaria italica
  Peptide Sequence Number=SeqID_92813
cgcccaggagcgtcaccacgtgcccgccgccgggcgcccgcggccgcgccgcggggaccgtgcagcgacgacgccatgaggcgccggtgcgactgcgccaccgccttcgtccgccccgtcgtccccgatgagtagctgatgaccgccacgtcggactgccgcacctcgaccggtggtggtggtagctcgtctgcccacgccagttcgtggccgtggaggaaggactcgaactgcggcgagtcgagcagaacgacggtcatcttccgggccgcggggaccttgcctacggtggcggcggtagcgaagacgacggacgggttgcacaggccgacggcgcgggcgacgtcggcggcggtggacagcgggctgaccggcgagacgatggcgccgatggacagcaccgcgaggtacaccacggggacgtcgaggctgggcggcgcgaggacgag

SEQ ID NO: 26840 - DNA, 414 bp, Setaria italica
  Peptide Sequence Number=SeqID_92814
gtcaagcatgcatttgaggaagactggagctgcatagcagatcttggagaaagttggaagtacagaagccgtttgtggtatggtgtcggcattccacccaaatctgatatatttggcggtggtggaagtggttgggaatcctggaaatctgttctagagaaggactcaaatgggatttggattgaatttccacttgtaaagaaatcagttgctgtgctgcaggcacttctgttagatgaatctggacttggtggtggtcttggtattggagggggatctggccctggtatgggggttatgactgccctctatcagttgctagacagtgaccaaccatttctttgcatgctcagaatggttcttgtttcgatgagggaggatgacaaaggtgaaggtgatgcttttatgaaagac

SEQ ID NO: 26841 - DNA, 1502 bp, Setaria italica
  Peptide Sequence Number=SeqID_92815
cgggcttgggcttggacaacaggtgcagcttcgtggcatcctacctcctagacggcgaggccagcgaggcggacggcctgatcagcatgtccaacttcagggtgctatgcacgttcagccgtggtgttgtcacgcaggccgccatgttcgctgtgaattctacgtggagcaagaagagcatcgaccacatagctccaagttctgtgctctcacggttgtttggtcgcggtggtgattcgtggtacttctacggtggagacaatacactgatcagtctcgatggctccactggcgaattctcttcgtcggtgttgccagccatcgaagattgggatgtcctcatattgggatcccgatgctttgtcactgacgggcgagatggcaagccacgcatcttcaccgtggtcaagaacaccatgaaggtgtttgcgaggctcaacggcggagagtggactttggataagagagttttgctgtcggaagcaacacgtcgtctgaaggcataccagccttcttctttcagccgtagcccaagcatcctgacaagtggtgcggggcttgtcgtcctttctccacagtatggagggatatggccgttctccatcgatcttgacaccatggattcggctcctgtgacacgtgacatggggaagatggtgtatcggtgcgagctgccatggccacctgctttgcacacctgtctttcatagtctatgcactgtactgagacgagggtgtttaatctgcaagtggatggagacccagtagcatgacagctggtagcaggatgagttctgtctgctgactactctcaggagtggatttgtcgaagaaaggggtttctgtggttatgtgatgttggcgtctcaaattgagtcaaggattatatatgaacatgagtttgctgtatgacttcatgcatccatttgtgagtgcctgatctactaacctttgcagtagtgctctgtttcgctagtggagtcgggggcccaacctggctgtccaaaaatatgtctgaatttctgttcagctctagtatgcaatgcaaccagagaaagctctttatttctgatcgagtgaactgaagaattcctacttttgacatgtgagggagactctacttttggagagaagtgaggaagacataacgaggcagtgtttaatttgcaagtggatggacacctggtagcaggacggctgggagcaggatgagttttgctgtgtgtttgctgagtttacactcaggagtggacttgtagaggaagaggtgtgatctctgcgattctgtgacgtttggcgtcacaagttgagtattctgaacattagcttgctgtatggttgcatttatctccttgccgagtattctggctgatggaactgtacctgatgtattaacctctgcagtagtactctgtttcgttagtgtgattggggtcaccctggctgcccaaaactctgtgtgtattctgttcactgttgctactatgcaatgcaaccagaaa

SEQ ID NO: 26842 - DNA, 276 bp, Setaria italica
  Peptide Sequence Number=SeqID_92816
tcctctttacttttcccgttgaggaggcgacggcgatggacgccgcggcggcgccgttgccgtcgagtgctccgagaacaccagcgacgcattgccggcgtgcacgaacgccgagtggccgaacttcttgacggtgccggagtcgaccacgccggagaacctgttgtacgagacgttcaatgaccgcaccccgccgagcggcggcaagtcaccggggaacctcccctgcatcgcgttcccggacaggtcgaggcgctccacccgcgccagccgccg

SEQ ID NO: 26843 - DNA, 531 bp, Setaria italica
  misc_feature (14)..(14): n is a, c, g, or t
  Peptide Sequence Number=SeqID_92817
gcaagatggttatntggggaatgaatacagttcctctgtacaagcagcttatgcttatcagcgaggggagcaacgggaaagctcagatcattcagctgggaagaacaactccgtggcagctccagccaatccagttaagcaagatcctaatctgattgaggaagccgtcgcgagcaaaatggattcctcgcaaatcgatgcagtacattgtgatgtttatgacgggggttgggtgtttgatgagacctatccactttacacgagtgattcatgcccatttatagatgaaggattcagctgtggagcaaatggtagaatggatgacaactacatgaagtggaggtggcagcctaagaattgcaatatcccgaggttcgatgctaggagaatgcttgagatgctgcgaggaaagcggcttagttgttttattcggggactccataaataggaaccagtgggaatccatgatgtgcttgctgagaatggcagtctcagatcctgctaggattcatgaaactcgtggccggaaga

SEQ ID NO: 26844 - DNA, 1116 bp, Setaria italica
  Peptide Sequence Number=SeqID_92818
aggaacattcttgtaaaccatcttcactgccacaaattcatttcatgaagagatggatgtggacacctcatccaatgtggagaagatatctcctgatgatgcatctaataacaatggccacaatgggatgtgtgaagctgctcccacaccctctcgtaaaaggaaaggagctgatccagctaacttttcaatgcgattgagatcaagaaaggaagaggtggttgtcctggatggagatgcaccccatccagattctgttgaagaaacatccaataactgggatgcaaagaagctatactatccttcaagggaacaccctaattctgttgagatatcttctggcgacatcagatgtctccagcctgaatcattgctgtcctcacctataatgaacttctacattatgcatctgcaggggccaatgttatcgattattagaccaagaggcgattatcacattttcaacacatacttctttagaaaacttgaagccatgacatcaaaggaggacaagaccacttattttttgaagttgagaagatggtggaagggtatagatatatttgaaaaggcatatgtattgttgcctgtgcatgcagaaacacattggagtctcgtcattatatgcatgccagcaaaagaagatcaaacaggtcccatcatacttcatttggattctctgaagtttcatagtagcagattaattttcaatgttattagcagattccttaaggaagaatggaactacctgaatgagaatgtttcatcagcagaatgtcccttacaagaaacggtgtggaagaactttcctcgtaaaattgaaaagaaagcaattgaggtgccgcagcaggaaaatgattacgattgtggcctgtttgtgctgtactatatgcagcggtttattcaggaggcgcctgaaaggcttcagaagaaagatctttctatgtttggcaagcggtggtttcgacctgaagagccatctcagcttagaggtgaaattcgccgtttactccagaagtgcagggaagccgagcctaagacctatgcaactgagctgtgtgtggaggctgaacccaatgatgtgacccagccaaatgtcgtcggagcacctgcaag

SEQ ID NO: 26845 - DNA, 238 bp, Setaria italica
  Peptide Sequence Number=SeqID_92819
tatgcttcttgtcagaattgcaacagccagggaggaggtgagacgcatgcaaaattttgactatgtggttgtaaatgctgaagggaagcttgaggaggctgttaaacaagtggagtctatcattgatgctgagaaggctaaaattcacaagcggcctgtcaatatctaacctaaagctcatgtgacctatggctaatatattcatctgtttgaaggaaaattgtctgtacgactgaat

SEQ ID NO: 26846 - DNA, 816 bp, Setaria italica
  Peptide Sequence Number=SeqID_92820
cgcaagtgaaaaatgtacgcgtccaagtcatttgttcccgtgcataatacaagtagcgcgttgaaaggcaggagtagtacgatcacgggcgtgtgatatgagaatacgagagacgatcatgctgtgacccttaactctgtcatgcgccggctttttagatgaggcagaaacgcaaaccggttgagccatgatcaagattcaagacagcgttccgcggcggcgtcgacatgacacacctactggatcgattgctgcgccactggcctgtctaactgaaacaggaagcgtttctactgatgttcttctaaccatttgttggtgctaactgtccagctacttgactagttagctgtttgtcacgatctcgttgaaggagacataatttgtaggatgaactggatttagcgaatgcagtactgcggtgatgtctccttttacctctcttgtttgcttgatttgtaggtttttcacgaaactcctgaacaagatggtcaaactcagaagagaagtccctttctacgaacgtaaaaggtccattctttcttgtatggaggggatgatgttttgctatgcattctttgatctctgctctttttttatatatatatgtttttatagtttgggcagcttagagctatttggcattcaaattcgagatgaagagctgtatcacttttaccaatcaccgaattatttactgattagttgttagctttaagcaaagcttctttctatcatgtgaaggtggtcagaccgtcagagatctaacaaccgcagcagcgtatgtgtaaaatccgtagtaaagtacttaccatt

SEQ ID NO: 26847 - DNA, 347 bp, Setaria italica
  Peptide Sequence Number=SeqID_92821
ggggcgaagactagaagaagacgagcaaaagccagggccggcaccggacaaggagaggctttcgatctccctctctctctcctctctcactctctacttctctcgtcacgtactcccttgtgaaactagaagaggagggatcgaaggtggtgagagaggggccggggggagagagggtgagatcgatcgtctcgtcgtcgtcgatcgacgaccatgacatggtgcaacagcttcaacgacgtgcgcgccgtggagaacaacctggtcaccgccgctgccgtcgccgccgccaagaagcagcagcaggcgtcgtcgcacgtcaacctcatcaggacctgcccctcctg

SEQ ID NO: 26848 - DNA, 2476 bp, Setaria italica
  misc_feature (2456)..(2456): n is a, c, g, or t
  Peptide Sequence Number=SeqID_92822
ctttagatcatttgtttgatcaccttgattctgtagttcttcaaacaagcaggggctgattaattcatcctctaggtaccatacctctaaattttgttctgcacataattctgagagctctagcaccaacattatgtaatctaatctgacattcttgtcttcccaaatgaccttaacatctgattcatcatctggaaaacatagggttctttggagatcttcatgcagctcacattctttcttgtttatgaagtcaggactgccaaaaccttcaaagaatgactcaagaacagataccggactgggctttccttgcttttcctcgctttgctcagaaccaccatctgagattaatttggttgatgctcttgcttctggtgtttccggctcttgctgttccaacttttcaactatgctctcaggagagtctggggtcactttagaatgttctttttcttgttttgattcttctaatatttcctgatgttcatcatctatgctttgttctgctggaacagactgcatgctgcaagtgttttcacagcagtccaatttgtcaattccttcaatgtacatgttgtccggctcatcagaaacatctttgagtccattttgtgcttcattcatgcaatatccttcctgaactgtcacctgatcatcaactgttgcactagtacaacatgaaatgcttcctaagtcgtcctgtgactggcatctctcttgtgtgcattcctctctctcaaccttgcatgccaggcaaacatctgtctcatcaggtgagaggtcaaggcagcccttttccattgggctactcttaggggttgacacattgcaatgagggagagaaagtattccttccaaggattttgagacttgaactgctggatggtttacagatcggtcattatcgtttagcatctctgataaatgcctcttggcctgttcatagaagatagatgcaccgtttggtgctactgtacggccattgatttcacttatgctgccattttgttgcttttgcttactgctgttgaaaggtatggtgccgttcttaaaacctgatgcagatgcgtctgccaagctgccttctggtccatgtctaaaatccttcttaattgcaataacagagtctttgtgcctacgtggatctcttcggagctcttctgcaggtggcacatttctttctgttctactctcaccagtcacaattctgaatcttttcttgacttccttaattgaaaactttgaggtctcccttccactgcattcaggagcatccgatgcacatgattgttgatgtaaaggtcttgcactaataatggctttttgatgaatccctctttctggattgggctttagaataactattttgctaactgtctgaggtccattagttgcctcaggcatctggcttctatttgatttacccttcctccagaagaacatatattttctctctttagcctgctcttttgtagccaacagatgctgatttgagcctcctctccctccaaaattggtctgtccaggaatgttgctgggctctaacccagaagccaccttactgttttggtgcttttggatattgtctactatttgtggatttggcttctgaagcagcttcaggaaaagttccttgtttgaacccagtatctccaatgcatccttgaactgtttggattgagctgccatagtgttaaaaagattattctgctcagattgctttccatcattgctctgttgaggttgcccacgaccaatattgcgaggaagattattcaagtcattgacctttttatggattagggacttcaacgaagggcacagttcattcttattcttgcaatcaccgtgtgggcattcattgtggcaactatagatttcacctaggaaatctgccaggacagattcaagatcatattcttcagcatgattcaagacctcagaatccactagtggagtgaaagccgcagagacacctgtctgatgatatgagatctctgttaatttatttgtatgctctgatttctcatcaagagatacaccattttccaggtcagctaatcttctctcatcatttggaattttcttcagtactactttccccaattcatcctccataaggtttttgactgttggtttctgcgaagtgcactgttctatgataccatcttcctctatctcatcaaaatccctggacctctgtgttgagtgccccctctcattgatctcccggaacgcatgcctcccgctcaattgcttggtatccaacaagaacttggggtcacgacggaaataaagcatgcgcatgaggccccacacacagcccacattgtcctcgtcttgcgatgcagaccgccggtgacctcgttttcccattttcagatgatctgttctctctgtagcagaaatgacccttttgtttcttctattgattgctcagttcatgggggganatcacaagcagctggacccg

SEQ ID NO: 26849 - DNA, 1163 bp, Setaria italica
  Peptide Sequence Number=SeqID_92823
accagaagcaagagcatcaaccaaattaatctcagatggtggttctgagcaaagcgaggaaagcaaggaaagcccagtccggtatctgttcttgagtcatctttgaaggttttggcagtcctgacttcataaacaagaaagaatgtgagctgcatgaagatctccaaagaaccctatgttttccagatgatgaatcagatgttaaggtcatttgggaagacaagaatgtcagattagattacataatgttggtgctagagctctcagaattatgtgcagaacaaaatttagaggtatggtacctagaggatgaattaatcagcccctgcttgtttgaagaactacagaatcaaggtgatcaaacaaatgatctaaagcttctgtttgactgtatctgtgaagctctaacagggatccaagagagatattttagactctcttcttggttatcttttctgagacatgacatacggacgcctccaataggagaaaaccttatcatagaagtcgataaatatgtctctgggtatatccaatatagtcttcccagcactctagaacagataattaagagggatttggatgttcagacatggatgaacgttaggtcaaagactgaagggatcattatggaaatatgggagtttgtattggatgagttgatagatgagactgtttttgatttgtggatttgaagttctggttagatcgcttgtcgatgataccttatggcgagtacagtgagtaggtagatactgaagttttcgtgctgacaataacccattctatgcggaagaataacatgggctacaactagtgtgtaactgcagtggaatcattctcattcatgaaagcaaaagtttcagttctgcagatctctgagttgtgtagtttgcgactttgtgtggatggagttgggcaagcactgccagactgtcacagaaatcacagccatgcctctgaacagtgaattgtacggcagcctgaagtgcattgcaattttcctcttgtccattgagagtttgtgtgcatatgtgtgaggcatacactttcagcgggatcagaccacgcttgtatatgcttgtttttgtgtgtaaatgtgcaaaagtaatcatacatgattaatcaaataacactattttctgagttaaaaaaaaaaaaaa

SEQ ID NO: 26850 - DNA, 1404 bp, Setaria italica
  Peptide Sequence Number=SeqID_92824
gtccgttggtactaggtttcttgtaattgtattcttgttggggtctaaattggtatttgattattcagcagcaacataacgtggagacctggtcactgtgttcacccctggtaccgggaccgcatccttgatgatcagcaggttctcgataaaagtcgcagcatatgaatgaacaacattggactcatgtgtgagaaacctcacaacgcttggtaacagcgccagtgcagtggctttggggatttgatccctgaactccttcaagaacctgaggacagttgccttcaacattggctcagactgccaatcaggggcctggagctcaggcacaatcacagatgtaaagaagctctccatgtcaaccacgggtgtgccgccacctgttgcaccaggcttctgcataagagcgataacaaggtatatcgcagcatccttttccttccagttattcgcccgatcagctgcatatgcagccaacatctgctggacctgtgctgacacgagtgcagccacctgctcccggtagtttgctgcaaggcctcgcagcaaccggcacgctgcccgtctgagcgtatccgcatcactcccctcagagtcacgcctgacatattccacccagttgccctcaaataactcctcatcctcatcccgcagccgcaggttaggcacgacaacactatcacatatctgcttcatcgcctcaggactcccgaacaaggcatggtgcacactctcagcgactgtggtcaagaaccttatagcagtcacagcgagctgcgcacgggatggtgaaacggtctgcgccatgaggagcccccacacagcctcaacaaattccttcaagtatcccctgaactcctcctcgtacttctccatatagagctgcaagttatcacagacagcagcacgcagggcgtccggggcaccatccgcctcaacaggcggtgggtatgatgtggtgaggaaggcacggaactctgtcatccactggcgcatgttgtcctcgaagaactcaggcaggtcgatggagttgagcgagtagaagatctcgcagcagaggcgaaggcactcaaacacggggcggagctcaagcgggttggctgtggtagcggcagcctgaagacggcgggaggcgaagaggaagacctcaaggagtggggcggcaaagatgtcgaggcaatacttgaggtcgaggcggagggcattgttgtcgaaggcgttgcggaatcgggagaagagcgacgccgccgcggcgaggagggaattggtggcggggacgtcccccgcgttgacggcggtgccgagggaggatacgatggacgggaggagcgactcccatctggcggggaagtcggacgccgcggcggcggcgagggcctccgagagctgcgcctggataagagg

SEQ ID NO: 26851 - DNA, 1884 bp, Setaria italica
  Peptide Sequence Number=SeqID_92825
agaacgaagaacattatctttgtggaggatttctctatgtgttttggccgaggattttttttcattcagtttaagcacggttttgacccaactggggaggacgccaatgcatctgcagaataccatttcccgtgctaggcaggcacagataaaattacagcatgttccaacaatcataaggatccaggaccgacagacacacatctcgaccagtaccaatacactttcccccaaaaatggacctgcctgaaaaaaaaaatcctcggccaaaacacatagagaaatcctccacaaagataatgttcttcgttctacatgtttcggcatccaaggatccatccttcccatgataaccaacggtgccactaaacaaggatgacaccagaaaagcttgacagataactcccagagactcatctttttgacaaaacccattggaaacaagcaaatgccttccctcacagttgtctcctagacgacgttggcattgtaggctgcacaaagttgaagaagcacacttttgttagctggatccacatgctgctcaatgacaggaccaaaccgaccaggagattgtgcagaaagtgtggccaaagatgtgacaaggaactgttttggatcatttatttctttcaaaaggtcatcttcactctttccagcatactgaagccgtacaaatgagacagaataacctgatgtcttctgaatatccactgcatcagcaccatcattttgctcttgttgtgctccatcttgattcgttctggataacagcgtgacgatactgtcaagtaatttgccccacaactgggctgcagcagcatccaacagcaccgcagactcacaaagcaattttgttgaagcaactgctgtcagcttaacttcaagggcacctttgatcaatttgagattgggaatccaaaaacgctgaaggatttgggtgaatagatttggttgaattgcatcaacggaactgacaagaacgcctgatccatatttgaccagcactaaggacatgaagaccacaagagaattcacaaacttcactgcctgtctagactgtagccgagtaaacaaagcactccatatctcacttatgtaagggttcataatgtccaaaccaacattttccactagcgtgttcagcatgtagaatgcagaatcttcagtgctgcttcgtgagaggagactacgggatattgccaagatatttggaagcctgccctcttggtttagctcatttggaattttcctaaggaatgctcgcagcaaacgaaccaaggcaggaacacatggtggccggtcccaagtggcattgctaaggaggacaccaaatagctgcatataattctgcgagagaggtggtcggctcaaattgagaagttgtgcaaatatctgaaacgcatatggccagaactctgagatgtcttcaaccaatatcctctggagcactgggaagaggcaggcctcaaaagcagggagtaatgctgggtcctgctcaccagtacggccaataattgctgccagagcctcaaacaagtaatggttgaagtcagggttcttggggttattgcacacttccatgagaatgcccacaagacgagtggtgatctcgtgaacaatttgaccagctatattagcaatcccaaggacccgcatcaggcacttcatcagataggggttttcgtatgaatcaggaaaacttagtgccgtggacaggttctgaatgatctgtggggcaaatggattgatatcagcagcaacataacgtggagacctggtcactgtgttcacccctggtaccgggaccgcatccttgatgatcagcaggttctcgataaaagtcgcagcatatgaatgaacaacattggactcatgtgtgag

SEQ ID NO: 26852 - DNA, 261 bp, Setaria italica
  Peptide Sequence Number=SeqID_92826
tgcggcggcgcgacagcgcgtcgaagagctcgccggcgaactccggctcccgcatcccgatgcactggccgaacttggagcggtgtaggagtccgttcggcgcgagcttgtcgaagcgctcctccacggcctcccatcccttggcgccctcggccttgctgatgaacttgagccccttgagcgcgtgcgccgccgcggacttggaccggtcgagcgtcctcccgcccccgccgtggcggttgatggaggcgaggcggcgga

SEQ ID NO: 26853 - DNA, 1321 bp, Setaria italica
  Peptide Sequence Number=SeqID_92827
cgtgcagggagcgccgaccatccatggccgacatcgtcgagcggctcgtggtcctcagcaaagcagtatctgctaaggtgtggaacgggctcgccgacgggcttgcggtggtcgggaacccttgcgctgtcgttgatgttcagaggaccatctcaaagcgagcggctgccagcagcagagctgaatcagagcgggaatcaacttcagcattggcgtttgacgacgatgaaaaggaggaggcagatgcagatgccttggaggaggatcaggtgccattagttggtgccaggaagtcaccccggccactgaagaacgggatagtgctatctgaggccggggctcgggagaggagaaatctcttggagctgatggctcggatcgatggtgttgcaggccaaagatttggcattagcagagccagaacagttcgtgcgactggtgaccttattgaaaaggatgcagttttgcttctgaggaggaacaagactgtaagagttattggatctgaggcactcccaaaatccgaaaaggtttctcactttgatgtgaagatcaaacacaaagttgggaaagaacaagagaaggcagaggaagttcaagccaaggcaggggaagtccaagagaaaaaagagaagaaccaagagattgcatgtggaacccaagaaggttccaaggaaatagtaggcaaagcaaataaattgctagaagagacggaggcaaaccttgacaaagaagagaggattcaagaaaagaaagggcaaagccttgaaaaagcagaaagtgttaaaggcaatgaaggcaaaaatccaaggcaccgtagagaagatccgagaaagtgaaggggaaatccaaaacaaagtagagaaaatccatttgaagagcggggagagttaaatctgtacaatgttcttggggtcagcttaatcaattgttgcctggcagtttatctcaaggacaatgatcatgagatagaaatctcattccccaggccccagctatctccatggtaatgggattccaccagaagtgtttgtgattggccaatacagccttgatttcagatccaagcaatgtgatccatttgggaatgccagcaacgaaagctactactcagctattgaatctcgggtgatagccaatgcaatggcttactgtggggatatcttcggattcgatttaagcaactggtaatcattttgctgcttcaaacggagtcagttggagctacaaaaggctgctagttgaagtagattgttgtagtattctttcgttgattatttttcctgcctgcatacaagaagaagcatcaagtgtcaaattg

SEQ ID NO: 26854 - DNA, 380 bp, Setaria italica
  Peptide Sequence Number=SeqID_92828
agagccagaggtaggtgcgcgctcgtctccgcccgcccctcgttgcttccggccttttcccccgccgcggcatttccctccggatttgctccggtctcaactgccgctacgcctgacggttactagaggattgccactttcaactcattgaagcatctatttgtgatggctgctgctttgaaatcaagcagcagtttttatagcacacaacagcaccagtggctgctgtcaaaaaagggatcaaagtttacatggttcttcacacgcaaatgccaaacaatgcaaaagcaagaagataacaaagcttgccccactttgtgttaaagctacttcctcgaaagtggaattagattttaacgatccatcctggaagcagaaat

SEQ ID NO: 26855 - DNA, 307 bp, Setaria italica
  Peptide Sequence Number=SeqID_92829
ccggaaaggctccgactcagtgtgagtagtcctctgcgcaaacgcgaaggaagaagaggaaggaactcgccgcctagggtttccgccgtctctgccgacgccaccgccgatcaggtgggagggggacctcgccgcgatgccacagtcggtgctggtggagcgcgcgacgagcgagtcgctcatcgggcctgattggtcgctcaacctcgagatctgcgacatcctcaaccacgacccctcgcaagccaaagatgtagtgaagactatcaagaaacggattggacacaagaactcaaaggtccagctt

SEQ ID NO: 26856 - DNA, 2434 bp, Setaria italica
  Peptide Sequence Number=SeqID_92830
aaaaaagaaaaaaaaggaaaaaaactaaaaacgaaaccgaaacctaaagggtttaccgaccgtactactagaccgaacgccaaccgccgatcaggtgggagggggacctcgccgcgatgccacagtcggtgctggtggagcgcgcgacgagcgagtcgctcatcgggcctgattggtcgctcaacctcgagatctgcgacatcctcaaccacgacccctcgcaagccaaagatgtagtgaagactatcaagaaacggattggacacaagaactcaaaggtccagcttcttgcgttaacgttgctggagactttgattaaaaattgtggagattttgttcacatgcaagttgctgagaaggatatacttcatgaaatggtgaagatagctaagaagaagccggactatcatgttaaagagaagatactaattctgatagatacttggcaagaagcttttggtggtgcccgtgcaagatatccacagtattatgcagcatatcaagagatgctgcgtgctggagctgtatttcctcaaaggccagagagttccgtgccaatttatactcctccacagacacaacctctaaggaactacccacctcctgctttgcgcaacactgattatcgacaagatgcgcccgaatcatcttcagcaccagaagtgcctacgttaagcttgacagaaattcagaatgcacgtggggtcatggatgttctttcagagatgttgaatgctattgatcctaataacagagagggtctaaggcaggaggtaattgtggaccttgtggaccaatgccggtcatacaagcgaagagtggtccaactcgtcaattcaacatctgacgaggatctgttgagtcagggcctttcattgaatgatgatttgcagcgtgttttagcaaaacacgatgcaattgctgctggcatagccgttcgggtagaaaagccaaaagcactcccagcccgtgctgacagttctccaacaaatccagaggtgacaaaagagacagatcaaaggccttctaaagattccagtagcgtgacgccatttgagcagttagcacttcctgcaccgccatcatcaagtggttcgaaatctcatgtagaaccagctgttaaacctaatattgacctacttagtggagatgattttttcaaaccagaacctgttcattcccaagccattgttcctgtaagcaatcagcctgcagcttcagcttcttcaagccacagtactttagaccttttagacatgttttcagatagcaatgctatcaatagcaccagccagaacccttccatgctgcctatgccaaacacaaatcctaatccctccgcagcacaagcctatcttgctccacagcaacctgttccaccacagcaacctgttccgccgcagcatcctgttccaccgcagcatccttctccatattctaatggcttaaattcgaatacattggcaccctatgatcaaggctccaacttaacctcagcaagttcatggaatgggcagtttgctcatggagcgataccaccacaacagtcaccaaattacggtcaagatgaacaaaccagcgaccttccgccaccaccctgggaagctcagcctgcagaaagcgagcaattccatgctagccatcctggtggtttgtcagttccaccacaattcggagttagccaaccccagccagttcaaattgcccagcctgggcagcaggttttaccttcgcaaccaatgccaacaggacaaccaggagggcagtttcagcctggactaggggttcaacaacaatatgtgacgccaaatacaccatatggaggaatgtttccgccggtgcagggcaaccaaccaggcatgtacccccagcagatggcaggagacatgtatcagcagcagatgtatggtggccagatggccagttatggctatggtcagcagcctggtggctactatgttccaaatgctggatacgcatacaccagtgcaaacgagctgcctcagaggatgaatgggctctcgatgcaagacagcggtctgtatggcacagggtcttccctccagcagcgcaacaggccaagcagaccagaagattcactctttagtgatcttgttagcattgccaaaacaaagcctagcaaaactgcatcaaataagcctggtgacttgtaaagacgagtgattgcttactaccagtttcggccatggtgatagctttcgctcagagtatataagttatttttcaatttttccctattggaaagtagcaggtgagagttatagattctgaggattcatagcgagtgttcggcataattttatttgtttgattcttgcaagcaattatgttttctttactagtattctgaagttctatgtgtgtacatataaatatccaaccaaaggaaggggaaaaaaaacacattcttagt

SEQ ID NO: 26857 - DNA, 616 bp, Setaria italica
  misc_feature (597)..(616): n is a, c, g, or t
  Peptide Sequence Number=SeqID_92831
caaccgtgacatctcggcatcacacgcgcattcacacgcacctcccttattccattgccagcagcatcctctcgatcccctctcgccgccgatcgaccggccggtagccatggacaccgccgccttcctgtcgctctcgccggagctccgcgacgcgctcgtcaaggtcgccgtgttcgtgttcgtccagggactggtctacctcatcctccgcagctcgtccgacgtcttctccaaggacggcaggctcaggtccctcagcttccggcccatgcggtccatgagcgtcaggcgcgtgctggcgccgctctccgacgtccccgtcggcaccgacgagccctccacgtcaccgtcgctgtcctccgcggcgtcgcgccgcagggctagccgtgaggattgagatgcccggagcgggtgaaggtggtgcacctgaccgggcaagctaggtagtttggtcattctgaattgtaatttgtttgttatacggttgaagggaatagtatgagttttaatgtaatgtaaggggaatagatgtaatcttgtagatatattgattaaaaagaattggagaagtggattatttgattctttaaaaannnnnnnnnnnnnnnnnnnn

SEQ ID NO: 26858 - DNA, 400 bp, Setaria italica
  Peptide Sequence Number=SeqID_92832
ttccggaggccgaatttgactgtgcctgaattgcatgtgccggaggtggaggagattcaggggtgggcgcacttggcgtacctgacctggatgtcattccgagcagactacatccggcggccgatcgagttcttgtcgaaagcttgcattttgctattcgttgtccaatccctggaccggctcgtcttgtgcttgggttgcttctggattaagctcaagaagatcaagccgaggattgaaggggatccgttcaaggagggttcagggtatctgcacccaatggtgcttgttcaaattcctatgtgcaacgaaaaggaggtctacgagcaatcaatttcagcggcctgccagctagattggccaagggataagtttctaatacaggtgctcgctgagactg

SEQ ID NO: 26859 - DNA, 342 bp, Setaria italica
  Peptide Sequence Number=SeqID_92833
gggggaacaagctgcctcggcatacaatgtgcaacaactacagatggaggaaacaacggcaggatcttgggaacaccggagattcagaaccttggtgggttcatcggtgtgggggcccacgtcggccgcacggcttcggcgctcttcggcgtccggcgcgacccgaagcagcgcgagctgtgcgggagcggcggagtgccgaagccacgtccgcctggccgctggtgccgcgctgctcctccccagccgctgctgccgcactgctcctccacgcttgtaggcgatgaagtgccaggcgccgtcgtacgtcccgaagcagcgcgaactgtgcgctgccgccga

SEQ ID NO: 26860 - DNA, 931 bp, Setaria italica
  misc_feature (913)..(931): n is a, c, g, or t
  Peptide Sequence Number=SeqID_92834
tttcgtttcacgaaaccaagctagctagcgactagcgttgttacggccactggcaggtggcagcagcttagctagctctctagctgtggcaccgatagatcgacatggccccctccacaacctcgagcttcctagccgttgcgctcgtcatggccgccgtgctcctcggcggcggcgccgacacgtgccacgcggcccgcctcctcgccgacctgccgatgcccgagttgccaggcctgccgacgcttccgatgcctgaagtgcccggcatgccgcaagtgccaatcccggaagtgcccggcgttcccaaggtgcctgaagtgcccggcgtgccgcaagtgccgatcccggaagtgcccggcgttcccaaggtgcctgaagtgcccggcgtgccgcaagtgccgatccctgaagtgcccggtgttcccaaggtgccgcaagtgcccggcgtgcccaaggtgcctgagctgccagcagtgccggtgcccggcgtgcccgcggggccttaggtgcgccgcgcgggtatcgtggatgctgtccgccgctcccggccggtgtggacgagcccgcgccgtcatctcttgcgccgcgtccccatcggccccgacgtgtgcacataccggggcacgggggtggtcgatgacgacgacgtcgtgcactcttggtgttatgtgtgcgtgtctgatttcgtcgtgatacctacgttgtagggtacatatatatatgtacatgtgtacgtggagtgcgtgtgtgatcatgtttgctcggtacggtgtcggtatgagtaattttacatcgtttatttacatgggctgccaaaacagtgtagcatatgcatgtagtaatagtatgcatggtactattgttattacccgatgatgcttaattaacctgatgtgccttcgtgtttaannnnnnnnnnnnnnnnnnn

SEQ ID NO: 26861 - DNA, 364 bp, Setaria italica
  Peptide Sequence Number=SeqID_92835
gaacatccatcacatcttcctgctgctgctgcccatcatccattctaatccgaaatagagcttaaagagcaagcattcagatggaatgggatgacgaggagcgccagcgacggctggatgatcatgaaggacatcacggagagcgagagcctgatgcaggcggccggcgatcactgtcgctggacattgataggaaatcagtgcagaagcaccggctgccgttgtcgtcgtcatcatggcgggctgcagcggccagcttcagggagagcctgtcgcgctccctctccctcaatcagtctaactacgatcaggagaatgacgatgaggccgagctgaaatgggcagccgtcgagaggctgcccac

SEQ ID NO: 26862 - DNA, 888 bp, Setaria italica
  Peptide Sequence Number=SeqID_92836
aaaagcacacgagctttgggtgatttttgtctaaaggatttcgggctaatctgtgtgcctgaggtcacctacagacaaatcactgagaaggatgaattcattgtccttgctacagatggggtatgggatgtcttgacgaaccaggaagtcgtggatgtcgttgcttcatgttctgatcgttccttcgcagctcgttctgttgttgacttagcaaatcaaacttggagattcaaatatccaacgtccaaaactgatgattgtgcaatgatctgtctttttctagacaaagaggacagtagtgctggtggtttatcaggatcttctctaactagcaagggaattgggtccagtcaaagggcaccagtccggtcaaggaagcccaggctcagtagtaaaagggtaataccagaagatgcagatgatggaagtgactcaaatataagtggagatgagaggtccttggagagcttcaccaggttgaacacactattggcactaccaaagttcggtgacacaagcccaacaaagaaatgaaacatattgaatttgcaatcagcagtatactcactaatgttttctggaggagagtgttgtcggctttattagcatgcccggtgagctcccatccatatcattgtttcatctatggacgagtggggttgctatttttgtaaatcccaactcgcattctggttacagagtaatgattatgcagcatgcgttcaaaatccgtttttaatttgttgagagtcagttttcccatttttgtgcggctgctcatcaagcatttcagttgaacagtgtctgtactctggtttggtattgtgaacaaatccttttctccaagtgacatcttaatttttttattgtctccagacattattggaa

SEQ ID NO: 26863 - DNA, 1101 bp, Setaria italica
  Peptide Sequence Number=SeqID_92837
ttttttttttttagttctgaatgtatgcacagaaaaatccattcccagccggcaatgtaggttttctgttcctgacagaatcgcagacgagacacacggcaacacatcacagtactatcacacacactctggtcaaagggcccgtggagcggaacgcgctcaggggcgtgggacgagcacatgtacaagcagtccatcagtcaagcaccactcctagtctgaacgaaagaggagaccacggatgaatcacatgcgggtcatgccgatgccgccgacgatgggcggcggcacgtcggcgatggcgcgtgatctggcgtagaagaggtagtggagctcggtgaagagcgccgtgaggaaggtgaaggcggcgccggcggcgaagacgcccttgcggagcatcgcgcaggcaggcgggctgtcgctgggcctcgggatgtacttggtgtggtatgcgttccggaccgatcccgccagcaagcacaactccgcgatcacgaatgtgagccagcagacgacgaagcagatgccggaccatgcccgccagcgtcccggcgagagggcgcggccgcagcagaagcagcgggtggcgaccatggcgaccgcctggccggcgagcagcagcagcagcgcgctgacgccgtacaccgtggacgcgtcggagctgtagacgcagaaggccctcccgtacgtgtccacgctgacataggtcacgtagctccgccggcgctcggcgccgatggcgaggacgaaggcgaggacgtccaagacgaagaccacggcgatgatgatgatggacgccatgaggaattctctggacggacggacggaggggactgaatgatgcagctgctagcagcctagcacggggttcgcttcgctttcctctccgtcgcgcgtcggcacaaaaaaactaaagagagggatggatggattaggccgagcgaggggcgatgatagctagcagaaaggcttagcttagcttagcttagcgaggtgtggtgtggtgaggcgatgcggcactagcgcgctgctctgatgttgacgcgttagcggagcgggtgcctctcgactggttgacgggcggcccagcccggattcttg

SEQ ID NO: 26864 - DNA, 527 bp, Setaria italica
  Peptide Sequence Number=SeqID_92838
cgggcgggatcatggacagcttctacgcgccgctgctgtccagctccctcgtgccggggctggaggagctgcacgtcaaggcggaggccgccggcgccggggatcaccagcagaaggcggcgcccggggaccagcagagcggcagctgggagctgccgacgccgtcgtcgtccaacgtcgacgccagcatcatcgcgtcggacgcgctcatggcggcggccgcgtccatgaatcccgcggttagctccacctccacggcggcgacaaccgccccctcctcgttcatgtactggggcaacggcggcattggcggcgctgccgcggcgtggccagacctcgccaactgcggatcctccattgccacgctcttctagccgcctgggctgtcctgctggctcgttaactttaattttttttcaccttgattttctggttaattttttcttgactacaataacatgtaatttgtgggggaaagctgagatgagagagagagcactgtggaaggagagagatcatctcatctc

SEQ ID NO: 26865 - DNA, 463 bp, Setaria italica
  Peptide Sequence Number=SeqID_92839
ttgtcaccgcaatgccggaccagattatacagctgaaaaatgtatacagctcaacatagagccggaccagattatatcacacagaacacacatcccatacagttactcatagcttgaacactcatatccatgggccatggtttgcaaaattttcgtgcaccatgaaaactcataggccacaatttgaccaacacctagccagtatgaaagtgattttccccataactgctaaaattgcccgtctaacagctcaagagtgggttttcccccactcatggcagacatcaatcagtcattggataatggtaagttagcgacatttcatcttaataaacgctacacaattgcaggagcaagttaccgatatacaggtacagtataagacgacacatggaacaaaaaccttgtggctgtcaactgctatcgttagtgagggggatcaacgcctgctataaaaacaagc

SEQ ID NO: 26866 - DNA, 341 bp, Setaria italica
  Peptide Sequence Number=SeqID_92840
caggggcagcacacgcagtccaccgacgagcacaacaggaagaactaccagcagcagcagcagcaggtccagcacgagcgctactagccgtgccgtcgtccggcaacaacaacaactacctgccgcgaatgcgacgtccattgatatgttttctgccgttaatcgtgtcatcgttttcgtatgtgccgtcgtcatggcgtctttattcgagttcgttgcagtctgctgttttgaactttggtgggtgcagggtcctacgagtccatccattccgcttttctgctgaattgcctcagcattgtgttttgttcttcatgtaataaaatgtaggccacaccccc

SEQ ID NO: 26867 - DNA, 1270 bp, Setaria italica
  misc_feature (25)..(25): n is a, c, g, or t
  Peptide Sequence Number=SeqID_92841
ctagtctctttagtttttttttttnttttttttttttttttggtacttcaaattaccacagctttaattgccaggggcaaagtggttctgttgtacaaagaatcacaaagttcatataaactaaaaacgtaatcaacattccatacaacatggtccaatgactgaagtactcattcagctatgttgacaagagattcctactccagtgtagctacataccatgatagtcttgttttggacatgatacaatgatgtttactccatgtgcctttctttattttatcaagaaaagcgtatactgaaacccttgtcagttttggtgacatccatgctaccgaactcatcaaagtctgaatccgagccaccatccttgtaattcccccattcctccattgagctgtcatcatcctcatcctttgataccgggatttgtaaaccttctataggtacaggcaaaggttcttccgtgaagtatggatcattcagcaggtcaacagcactggccctctttgctgggtcatagcaaattagctgctttatgatgctaacctcagaaggagatttgttaggcagacatgcttcaaggcccatcggcttcttaactttgttaaagaaaattttgttgtaatctggcaagtttgaacagcctggaaaggtttcttctgagatatcgccaaggacattgatgattctactaatctgatcaatatcggatatccctgggaatataggctctaagttcaggagctctgccaagatacatcctaatgaccagaggtcaatctctagcccgtagtttgtggacccatataaaagctcaggagccctgaaccaccttgtaccaacacaagaagtgaaggcaccagagtcttcacctatgccttcgacatcatatgagtaggatgatcggaatggatcgtcttcgatgtctcctgtgctgcatgtggcaagacaggatgcatctccatcctgcaggctcattttgtcaacatcgctggatttggctcggagttggtccagctcatgcaggtagtcagctgcagttagggtctctggctcttggccagcaggaatgtctgattcataacatggagattcctcttctgccccttgtagcactgctggtggttgtgaaacccaaggccccattcttgaggtttgctcatgtgggtgcatatcttggtatgtaggtgctgtctgctgaagtatcctcgcctgaccaaaatcggctaccttgagcaccccgtcctcggagatgagcaggtttgcg

SEQ ID NO: 26868 - DNA, 249 bp, Setaria italica
  Peptide Sequence Number=SeqID_92842
tcaaaagttgggaggaaaagaagcatccattgtctaaatcaggcaagaaatctagccatacaaccatgctgaagagacagtctcttatgaagcttttgatagataaaatgagcagggataaaaacggagaatctttcccatttgatctgaatcctcagctccagtttattttcaaggaaatgcatccgttggtattttcatttggagatgaagatttagtaccagctgacaaaccagagcaagatggtg

SEQ ID NO: 26869 - DNA, 439 bp, Setaria italica
  Peptide Sequence Number=SeqID_92843
cagctgggtggaaacagcaggttatctctagttctcaattgtgatgacgatgttgtacaaatttaccctttattttgaatcatatgtttttttcactagcaaattatatatacctgtaccatttatcaaagtctacccaccctccagtggcgtagccacaaatttgcaccttggtattcatctaaaaaatatggtattcacatgacgtgagtatgcaactactatgtgggtatagttaattttcttgaaaaatctttggtattcacatgaatacaggtgcatacccctgcctatgccactgccaccctcacaatttcttttataaagtgatcagcattgtgctatttctttagttgccatctatttatgtacgaagttcgtgtggaccaggaaacgggaaccatttttacccatcatcagaaaacagttattgtggatg

SEQ ID NO: 26870 - DNA, 472 bp, Setaria italica
  Peptide Sequence Number=SeqID_92844
cgggtcgatgccggagctgacgaagctgtacctgggaaagaaccggctgaccggcggcataccgccggagctcggttcgtgcgagaagctccagctgctggacctcggcggcaacgcgttctccggcggcatcccggcggagctcggggcgctaccgtcgttggagatttcccttaacctcagctccaaccggctctcgggggagataccgtcgcagttcgccggacttgacaagctcggcagcctggacctgtcgcacaacgagctttccgggagcttggaaccgctggcggcgctgcagaacctcgttacgctcaacatctcctacaacgccttctccggcgagctcccgaacaccccgttcttccagaagctgcccctcagcgacctcgccggtaaccggcacctcctcgtcggcgacggctccgacggatactcgcggcgcgggccatctcgtcgctaggaaggtcgg

SEQ ID NO: 26871 - DNA, 985 bp, Setaria italica
  Peptide Sequence Number=SeqID_92845
ctttgggaactttgtgccatttcaaggtctgattctggtcgacaagcattattagctcttggctactttcccgaggcaatatcagttctattgaaatctctctcttcatacaaggatctcgagtcagtcatggcgaaggaatggaggatcgcctttgggtctcgcaatcttccattcggctgcagaaattcttgaagttttggtagcagactcaactgcgtcgtcacttaaatcatggattggattcgctgttgatctgcacaaggctctgcattcatcctctcctggttcaaacaggaaagatgcaccaacaaggttgcttgaatggatagatgctggtgttgtttatcagagaaatggtgcacgcgggctccttcgttattctgcaattctcgcatccggtggagatgctcatctttcttctggaaatgtgcttgtgtcagactcaatggatgtcgaaaatgtagttgcagattcaaatagtaactcagatggtcaggtcattgataatcttcttggtaaacttgttgcggacaagtatttcgatggagttgccctgtgcagcacttctgtggtccagttaacaacagctttccgcatcttggcatttatttcggatgataaggctgtggcatcgtccctttttgaagaaggtgccattaatgttatatacatagtcctgatgaactgcaagtctatgcttgagcgcttatcaaatagttatgattaccttgttgatgaaggggctgaactgagttctaccacggaattacttctagatcgaactcatgagcaagctattgttgatctcatgattccctcacttgtcttgttgataaatctacttcatacgctccgtgaaacaaaagaacaatatcgcaacaaaaaacttcttagttctcttctgcagttacatcgagaagttagcccaagactagcagagtgcgctgcagatttgtccttcatgtttcctacttttgctgtt

SEQ ID NO: 26872 - DNA, 644 bp, Setaria italica
  Peptide Sequence Number=SeqID_92846
gctaataatagcgtcaacacgcagactcgccaagaaaaaaaaaatcaccaaacagtgtgcaggaattggagatctgggcatggagaggaggggtaagatgacggagataactgtcgccggtcccgacgtggcgccggcgagcggcagcgttggcgttgccatctacgaggtgaataagcaggcgggcaaggaacccagcacaccgggcacgccgtctccggccaccgcgtggcgcggcagcgacggcagaagagctgagggtgacaacgtgggaccgctgcctgggtggaaggtggactgcctctgcggggagtccagcttgccgccggcggtcaagggtggcttcctctgcttttgaaacactagctagaaagcgtgcgtgcaattgctgtaatagtatttggtttctttgttgtactaattaccagtgcttattgtaatgggtgatgccaatatgccatgtatatactactttctttttgctggatggttttatcatgcatgatttgcagatgtagtaagagtggaagaattgcttatatggtttagaaaggtgccactgctgaagctttcctgggttcgcttcaacaacacacctttcagaaaatcttattgaatttaatgtaaaatgttcgatattagag

SEQ ID NO: 26873 - DNA, 325 bp, Setaria italica
  Peptide Sequence Number=SeqID_92847
catcctgactgacgagaagcacttcctggggagctttgagaatctggagaccatacgcaattctggtgtgaattgccctcttctctgcaaggattttatcattgacatctggcaaatctactatgcgcgttcgaaaggtgccgatgcaattctcctgattgccgccgtgctgccggaccttgacatcaagtacatgcttcgtgtttgcaggagtctcggcatgacagctcttgttgaggttcatgatgtgaaggaggtttgggagcgtttacaggtgagatggcacctgaacaccataaaggaagaatagtggcctcgcgggact

SEQ ID NO: 26874 - DNA, 564 bp, Setaria italica
  Peptide Sequence Number=SeqID_92848
gtttgcagtatgtagatatattattacatcttctaatgctttgagcagtttgttgaggcttcttgatcagcggtaccgaggggttgctgttggagtcggtcaatcggagatactgggaagaatacatgtagctccaataaagattgggcaacaattctatccttgttctttcactgtcttggatgcccccaatatggaattcctatttgggcttgatatgctgcgaaaacatcagtgcatgattgacctaaaggcaatgttcttagagtgggaggtggtgaggtttcagtgcccttcttacaagagaaagacatccctgcacatatacgagatgaagagaaattatctaagctagcatcctctctcggccaagcaaccggagaatcatcaaaggcacgcgaggggactcctgatttgccacaacggacccctcctgcaggagccccagttgcaaatcctccaccaggtgaagtcaagatcactttctgtacctgttaattcaatgcttgctttagtgtcttactgaatagcatctatcctaaccattactaaattcttcttagc

SEQ ID NO: 26875 - DNA, 542 bp, Setaria italica
  Peptide Sequence Number=SeqID_92849
ctgacacggtggactccaactccgctcgactcatctcgcccgcaaccccccacctccctctccctccgcgagttcgattccagccggcggcggcgagatgaaggtcacggtgatgaccgccgacgagcagattctcactctcgacgtcgaccccgacgaatcagtggagaatctcaaggcgctcctcgaggtggagactcgtgtgccgctgcggcagcagcagcttcacttcaatgggaaggagatgcaaaactcggagaagcttagctctgtcggggtccaggatggtgatcttgtcatgatgcttccctccaatgatagggcatcccaggatgttgtaaaggtaaatcctgatggatcagctgcaaatcctcaagcttttcaacaacatgttcgaggtgattcacaacttatggcacagctccttcagaatgatccgcaactagcacaagctattcttggagatgacatcaatgagctacagaatatcctgcggtcccgccaccaacagagaatggaactgaaacgtaaacaggaagaag

SEQ ID NO: 26876 - DNA, 1211 bp, Setaria italica
  Peptide Sequence Number=SeqID_92850
gtttgacagtatgtagattataattaattaacaatacttactaaatagactttagaagacaagtttagttagaaggacttacttagatgattcacaacttatggcacagctccttcagaatgatccgcaactagcacaagctattcttggagatgacatcaatgagctacagaatatcctgcggtcccgccaccaacagagaatggaactgaaacgtaaacaggaagaagaacttgctttattgtatgctgatccttttgatgtcgaagctcagaagaaaattgaagctgcaattcggcagaaaggtatcgatgaaaactgggaggctgccttagagcacaatcctgaagcatttgctcgagtggtaatgctgtatgtggatatggaggtcaatggggtacctttgaaggcctttgttgacagtggagcacagtcgactatcatatcaaaaagttgtgctgaacgttgcggtttgttgaggcttcttgatcagcggtaccgaggggttgctgttggagtcggtcaatcggagatactgggaagaatacatgtagctccaataaagattgggcaacaattctatccttgttctttcactgtcttggatgcccccaatatggaattcctatttgggcttgatatgctgcgaaaacatcagtgcatgattgacctaaaggacaatgttcttagagtgggaggtggtgaggtttcagtgcccttcttacaagagaaagacatccctgcacatatacgagatgaagagaaattatctaagctagcatcctctctcggccaagcaaccggagaatcatcaaaggcacgcgaggggactcctgatttgccacaacggacccctcctgcaggagccccagttgcaaatcctccacagggaggagatttcgaagcgaaagtcacaaagctcgcggaacttggattcgaccgagcatctgttgtacaagcgctcaagctgtttaacgggaacgaggagcaggctgctgcgtttttgtttggtggttagaaccccgagagcagcctttcctttctgtttgcccaaccctttcccagggttgaatatttgacagatacaaaagtgattcaagagatggcttcccttcggaaaactagctccattgctcgtccaatgcaaaggcttgcatttatagacgctccatattttcttctttttgtgagaacaaacgttctttctttct

SEQ ID NO: 26877 - DNA, 423 bp, Setaria italica
  Peptide Sequence Number=SeqID_92851
cgtggcgcgtccgcgccgccggccattgctggagctgcatcccgacgatgacgtgcgcggggacggcgtcgagggggcagaagaggagccgtgggacgacgtcgtgctgcgagacgacgtggcagaagttgccgccccaccgctcgcgcaggatggccctggacagtgcctcgttgccgagcaatgggctgccgaaggtgacgcagaggaccgaaggagctgacccccatgtcgagcttgacgacgagatgcagaggtagtgcagcgccgcgagggcggcaatggcgccaccgagggagtggcccgtaaacacgactgccttgcccctgatctgatccagtagcatctgcattgtcaagcaattgcgatgagttacaaattgtatgttttctcagtggcatctgtaaaagttacaaatttact

SEQ ID NO: 26878 - DNA, 1512 bp, Setaria italica
  Peptide Sequence Number=SeqID_92852
tttttttttttttaacaactagaaaattgtttacttgactttgttattcgagatgatttagtcatatcagaaagctctcgtgcaaactgatcagcttgggcatggcaagttcacaaaaaatgtagtgaaaaatatagtttcaactaagaatacccctacacaacagtccaagcaaataaagacagcaaagctaaatgcaaacaacatattcttttccctctttgcggtatagtcaacagtaaaaatgagagtataacagtagaaaggaaagagggggactgttccaactgaggagctccgtaatatgccttatgcagctgcccacaatttctccatcttcctcttcaaacgttccatgaattgaggattagtcttaagtcttccttttacataagcatttctggcatcctcaacaagtttgtcggctttcattgcatcttctatgagagtatatagtgtccttaagcaatcttttctgttttcctcccgatgttcaaacctttcactggttattgtgagctcatctttcccagaattatacctctttccaacaatctcacgcaatcgacggcaagcatgtcgtgaaagtcccaattccttcacagttacactgagtttgacttttctgtttttggggtgatatgcatcaccactaggagcaaacacaatccgtgattcccaccttagaacaggtccctcgccaggtggatcatgtaactcaactttcttaattcctgtttcagtaagttcatcagcttcagttggcatctcctttgccattagttcggtgcactcagcaaccatcttatcctcaaagtctttgaataattcatatgcctgctcaggttccatctctcccctttcgcacaagtctcccaactcattaaatttggcctccaccttttgcttaatctcatcaggcagtagcttgtcccagtggagcatgtcctcgaggatatcctcacaatccttcatgttagtgaggtgccccttattcgtggcctccttgatcatagcatcccacttggtgtcatccatattaaagaactcatcgctcttgatcttcttctcaacatattcacttgcattgtagagatcattcagctcctcatcagtatcatgcatctcctcaaagtcggactcaaaatcccggtcacggacctcagggagcggcttactgcgtagctcctcaataaggtcatcatcggtctcactgtggacatcagcaagcttccgctcaagaactgcctcagtgacagatggcaacactgcctcttcatccacaccatagtatgtctctaacctcttcttcaactccgcgttcgggacgtcggcggcaatcggaggcggcggcggcgctgcggcagggggagaggcgtcttcggagaggaggcgacgggggaggaggaaggggagggtggtggttggggagggtttacgaggttgggggatggaggacgatgtgggattggcgctggaggtgggcaaggaagcgcctcatcgcgccggcgg

SEQ ID NO: 26879 - DNA, 573 bp, Setaria italica
  misc_feature (544)..(573): n is a, c, g, or t
  Peptide Sequence Number=SeqID_92853
atttaacagcctcggcggcttggcgctaccgccttgcatacgcctcccctcgtttcacctcctccctcccccaatctcttctactccctcgcacgcgacctcaccaccgtgttccgggccctgccgcccaagaagcggatccgggcgggctgacggccgagcggccttccgggggccgaccggcgatccgcgccgccgaagctcaattggcagccgattacgggctccatggtaccatggtcgtcgtcgattcgtccgtgggtccgtggagttcttgcaagccgtgactttctcctcgccctcttcttctccttcctctcttggtttgcacggccatggcatggtacagagctctcgtacaaataatgctttggtttatttttttatttttcctctgtttatttaggggggttgtgtggagtagaaattgtagaattgggatatttataggtgatgatctgatgaatgggaaagtgaaaagtttgtaagagaattcccagagatctgttcattatttattaaactatagctcacagcttatacnnnnnnnnnnnnnnnnnnnnnnnnnnnnnn

SEQ ID NO: 26880 - DNA, 301 bp, Setaria italica
  Peptide Sequence Number=SeqID_92854
ccacatacacctgcgaagaacaaggagaagaacagtcgtccacctttatcatttcgattgaagccatttacttcatctcacagccaaggtggcaatagtgaaccagcattctgccaaaagaggggtaggaaaagaaagaaacacatgcgtgaaagagaatacaaggaaatgatagaccaatgcattggaaatatccagtatgaaatggagagagattctgactttaagctagatgtacagataatgaactgtaacggacatgcttaccaaggaaggggtattttacatggcccgcccttcc

SEQ ID NO: 26881 - DNA, 291 bp, Setaria italica
  Peptide Sequence Number=SeqID_92855
gcctcagcttctgcgagtgcgacatcttcccgggcacttcctgcggcgaccctcgcttcaccggcggcgacggcaacaccttctacttccacggcaagaaggacgacaacttctgcatcgtcaccgactccgacctccacatcaacgcccatttcatcggcaaccacaaccccgacctgaagcgcgacttcacgtgggtgcaggccctgggcgtcaccttcggcgccggccaccgcctctacgtcggcgcccgcagggtcgtcgaatgggacgaggacgaggaccacatcc

SEQ ID NO: 26882 - DNA, 259 bp, Setaria italica
  Peptide Sequence Number=SeqID_92856
gacacgtcgggccatttctgtcacgtaacagtgaaaccattcaaaaactcaatagagcattagggagctcgtgtcagaaaggcagacacaaatggcgttccacagaacaatagcacggcgcctatgggcaggcaagaacgcggccgccagcggcgcagccattcccaagcctccggcggccgcccccgcaccccctgcacggcggccgctgccggccgtagacgactgcccgacgctcgcattcctgcggcccaggccg

SEQ ID NO: 26883 - DNA, 1766 bp, Setaria italica
  Peptide Sequence Number=SeqID_92857
aagaagagtcgcggcaagtcaaatgcacttcttccttcagtgtacgctcccttctcccgtttacctctcccccactctctcgtggccgtgtttcctggcggcgacggctgggcgagacgcgccgcccaagtcttcgtcggtcccgttgccggcgacgagcacccaccaggccttccccatcccttcctccctcgctctccctcagccttcctttcctagcggcgacgaccccgtggccagttcttcgccgggcgcttcgccgccgccgagcatccgacagtggggtcgtgtgaccccacaggacccagatcagataattgccatcaaggatggaatctgggagttcgttctacgctggtgaaggtctctccatcgatcctaagtggcttattgacccaaagcttctctttgttgggccgcgcatcggtgagggcgcacacgcaaaggtctatgaggggaagtacaagaaccaaaatgttgccatcaaggttgtgcacaaaggggacacccctgaggagatgaccaagagggaggggaggttcttgagagaggtgaccatgctgtcaagggtgcagcacaagaatctcgtcaagtttatcggagcctgcctagaacctgtcatggtggtggtgacagagcttctagttggtggctcattgcggaagtacttggtcagtctcaggcctaggagccttgagccccgtgtagcagtgggctttgcgttggacattgccagagctatggaatgcttgcatgcacatgggatcattcatcgtgatcttaagcctgaaaatttgttgctgactgcagaccagagaacagttaaacttgtcgatcttggtttggctagagaagagacattaacagagatgatgactgctgagacaggaacataccgttggatggcccctgagctgtacagcacagttacgttgaggcatggagaaaagaagcattacaaccacaaagtggatgtttacagctttgcaattgtgttgtgggaactcctacacaatagactgccctttgagggaatgtctaatctgcaagctgcatacgctgctgctttcaagaacatcagaccaagtgcagataacttgcctcaggagttgtcagaaatactaacatcctgctggaaggaagacccaaacgacagaccaaactttacccagatagtgcaaatgctcctacattacctatccaccctctcgccacaagaaaccttggcccctcgccgcacattcagttcagagaacgcaatcctgcctccagaatctcccgggacaagctcactaatgcattctcggggtgatgacacaccaaagggcaagaaggaagacaagccaaggggcttatttttctgcttcagcgagtgctattagaacaaccccaacactactcaagaagctgcaaatactgaaagaaaacatcacccccagatgcgctgtgacaaccgatcgatcgagtctcagcacaaccatagtccatacccccgaagaatggcggaagttgtagtcgaactgttgtttctgctaatcaggtctcccgcatcgctgacatgttgacatatcagcagggtaaatcgagtaaccttttgactccagaatagtaacggtggaaatagcttatcccccctgtattttcggtgaaccatggtatcatggagttactgctgcgcgcttagattgcccgtctcgcgcgccaatcgtatagaaataaaccaataattcgcattttcatccaaaaaaattcttatttcttaaaaa

SEQ ID NO: 26884 - DNA, 319 bp, Setaria italica
  Peptide Sequence Number=SeqID_92858
tttttttttttttgtagccgagtgcaaagccttcatttggtgatgtttacaaaatgggcgagccattaggccacatttttgctagtcgggcagcagatcacagattcacaggacagaaagaaaagaaaccgaaggaattacgagataatcaacggcgtaaacacaggaacaggcgaacagcacacaacctcgccgctcacgtcggcctccgccgcctgcatcagacccaaggcgctcgcttgtttgtcgcggcggcgtcgccatgcttctcggcggcctccgaacacccgtctttcctgtgccagcccccgtggtggag

SEQ ID NO: 26885 - DNA, 380 bp, Setaria italica
  Peptide Sequence Number=SeqID_92859
attatcacctttcctccttcctctcttggaggaatagctttcctgcaattcttcagtatcctaacacagtcctcgtcgccccagtcatgcaaaacccacttgaagaacatagcattcgccggtgggacgctctcaaacatgtcgccggcgatatactgcacgccggtgccactaggagccttggcgacgacgtggtccagatcgagcacgctgcacttcacaccggggaacgccttggcgatggcctgcgccgccgccccaagacccccgccgacgtccaccagggagcttatcccctgaaaggcacccgcgcactccttgaaggcgatgtccatgatgaagtggctgtcggagaccatcccgtgttgacgagcgcgtcg

SEQ ID NO: 26886 - DNA, 460 bp, Setaria italica
  misc_feature (422)..(460): n is a, c, g, or t
  Peptide Sequence Number=SeqID_92860
ttataagcatacagaggctttagcctacaatgttcttcagaaggggcctgtgttcgatgaaggtttttctggtagaactgtgttttgaagccctaaattttgagccttcgtctatttgtttggctggtcagtcagtcttttaggaatgctccatgtgagatgtatgtgaacttataaaagtccaacacgagtacttgcgattgaaaggaaggtctaaagatattcaggtttacgtttggatcttgtcataaagtttggactttataattgttttgtaaagcggtagctctgatccttcaattaggatccacaaactcctgctctgctttgtgtcaacaatgcctaagactaaaaattcagcgggcatctttcacggaccactttgtcttcaaatgaaatctttctttaaaaaaaaaaaaaannnnnnnnnnnnnnnnnnnnnnnnnnnnnnnnnnnnnnn

SEQ ID NO: 26887 - DNA, 238 bp, Setaria italica
  Peptide Sequence Number=SeqID_92861
ctgctacattccacaacccacatgctcaagtctcctcactgagcattacatcaaagcctcagatcagcaccataaatcctgaacaccctgactgttttaaagtttgttcacacaaactcccaaataggaggtcatagagttgattccaatcgaaacaccagaacattcatattatcaaatagctcatggccctcagatttgacaaccttgtttgacctccatcagaagctaatgcagg

SEQ ID NO: 26888 - DNA, 450 bp, Setaria italica
  Peptide Sequence Number=SeqID_92862
agggcttccgaaggagctccgagatggcccactccacggtggtcgccgtgctctccgtgccgccgacgatgaggtcctgcgtgaacgccttcacgccgacgcggccgatccggatctcggaggccgggtcgtcggcgagctccatcagcacgtccaccatgtcccgcgccacgaagcccccgccctcgcgccgccgccgcccggcgtgctcgtcgaggacgtggtcgatgaacgcgctgaaccgcttcccgatccgcttcatccgccccacgtacccctgcaggtcgagacagtccagccacgggatccagtcgccgacgttgagcacgccgttgaggaacatcagctcgtccatcatccacttgaactcgcccagcgacgacacgggcccctccgccgccgccgcgccctcgccgccgtcgaagagccgcttgccgagcaccatccgcg

SEQ ID NO: 26889 - DNA, 705 bp, Setaria italica
  Peptide Sequence Number=SeqID_92863
cactagcactagcagtttagcattatgaactgttggtaacttattttctgtgatctcagatatgtgtaactattattttgtagaagtggttcgtcacatgtgataagctgcaataatccttctggaaccataacaatcttagctaattctgtatttgccaaatgatttttaatgatcatgttatttatttgtttgagcatctcattgccctttacatgtccatttgtttgctaggcatagtttgaaggaagttttggataccccaggcatcatggcactgataaaagatacaaaagcagcacaggaggtccgagctttgcaggatttcttcaatatgcttactaatgattcagctcgtgcttgttatggaccaaagcatgttgagattgcacaagaccgtcttgctattcagactcttttaataactgatactttgtttcggaacgccgatatagctacgaggcaaaagtatgtgaagttggttgaaggagtcaagaaatatggtggtacagtgcacatattttcttcaatgcatgtctccggcgatcgtgagttctatgcacttatcttatgattttgatctggttgctcattttccattatgatcgatgaaaaatttatgcactaagctatataatgttggatttgctttaaacagtaatagtaaatatgacctcttttaatctcattttcaatgcaataggt

SEQ ID NO: 26890 - DNA, 1552 bp, Setaria italica
  misc_feature (1465)..(1552): n is a, c, g, or t
  Peptide Sequence Number=SeqID_92864
tcgccttccgaccgcgcctcccccgcctcgcacgccgccgtcgacgcaaagccgcgcgctagacctcgatcctgcggccggggcgatgaagctcgtccaccgcgaccttgtccgcaacggccccggatccgtcaagttggtgccggaggaggaggacgacctgtggcacgcgtacaacctcattgctatcggggacaatctccaagcggtcactgttcggaaagtgttgagagagatggcatctggagggcgtgatgctgagcgtgtgaagcttaagttggaaatcgtagtagagtctgtagactatgacaaagagggatctgtcttacgtgtgcgtggaaaaaatatcactgagaatgatcatgtgaagttccatactttagagctcgagctgaagagaccttttgttctacgaaaggaaatttgggattggttagcccttgaaaccatccagcaagcatgtgatccttctgcaagtgctgatctagcagttattctaatgcaagaaggacttgcccacttattcctcattggcaaaagcataacagcgaccagggcacgtattgaaacatcaattcctcggaagcacggccctgcaattgctggctatgagtcggccctcaagaagttctttgagcatgttttgcaagctttgctgaaacacattgattttgaagtagtccagtgtgttgtaattgcaagcccaggttttacaaaggatcaattccgtgattatatgtttcttgaagctgcacgacgagatttaagggtaataattgagaacaaacaacgccttgttctggcacatgccacatcaggttacaagcatagtttgaaggaagttttggataccccaggcatcatggcactgataaaagatacaaaagcagcacaggaggtccgagctttgcaggatttcttcaatatgcttactaatgattcagctcgtgcttgttatggaccaaagcatgttgagattgcacaagaccgtcttgctattcagactcttttaataactgatactttgtttcggaacgccgatatagctacgaggcaaaagtatgtgaagttggttgaaggagtcaagaaatatggtggtacagtgcacatattttcttcaatgcatgtctccggcgatcagttagcgcagttgacagggatagcagctatacttcgttttcccctgcctgacctagaagacatcgagatgtgatcataccaacccctctgcagctgtttaacatttttttggtggtggtctgtttgcttataaccgacatcatgtgtaactttatgcagctgatttgatatagtcatataggtaatcctggaaagagattcacctactttttaagatatccaagttgtaaatggtttgttgtgccatatttgttaattcttttctcgataaagggcccttggttcttagagtttaaaaaggcaagcatgcataaaagcctaggtnnnnnnnnnnnnnnnnnnnnnnnnnnnnnnnnnnnnnnnnnnnnnnnnnnnnnnnnnnnnnnnnnnnnnnnnnnnnnnnnnnnnnnnn

SEQ ID NO: 26891 - DNA, 751 bp, Setaria italica
  Peptide Sequence Number=SeqID_92865
cctgatgctgccttttttttcaatgaagaatgcagccgcagatagacctgatgctgcacgtgcactgcttgaattcatcgatcttctttacgatgcttcttccttccttccatggcttcacatctgatttcatttggctcctgcctgactgaatcatgtgttccttccgaccaaacttctgcgactgcctatgcacgagatgaaggagatttcataattataatccttcccttcctgccatagggtcacttgtatttttgtttctctgaattcatgaatagccaaccaccatgaactatataacacaagatatatgttagagcagcctgaaccatgatcccaggaacgggaagactgccaccaacaagcgcatcaagattggcgcttgcttgtacctggtactacccagtcccgttgttcttggcattcctcgtcgtcgtctcattctcatccttgctgggggagctcctagtccctgtcctgctcccctgccggcagcagcagtatcagtgtcttcctccccagtcaccgcaggccgctgtctcttgctgtaatcagcattaccagctgagaatgagctgctgctgctcttctcctgggtggtaacattgtcataatttagtagttcatcccatcctccaaagttggcactgcttttgttgccttcgccaccttcactgctgctgctcttggtgctgttatcaccgtcagcagcagcaccagaggcagcatcagcaaaatcgttagaaac

SEQ ID NO: 26892 - DNA, 224 bp, Setaria italica
  Peptide Sequence Number=SeqID_92866
atcacgccgggaggcattccctcaggaggtagctcagcttaccaatccaactgccaggactgcactccagagctacgcttcttcgaaagcatatatccagaccagattacgatgaaatcgacgaggagatgaggtgagctgatgctgtaggatcggctgcagctggtgtcacttgcaaatccgtgttcttgcttgtgccggaagcaccagaggaagtggcctgc

SEQ ID NO: 26893 - DNA, 690 bp, Setaria italica
  Peptide Sequence Number=SeqID_92867
ggcgccagatggagccccacgactcgcgcatcgccgtccaccgtccgccgccgccccgacgagatgattccatgaggtccacctgcacgacgtcgccgtcgccgttctcgtactcgacgagcacggcgaagtagacctgtgtggagccctcctcgacgtggaagccgaccttgaggccggggaactcgcagggcactctggcgaactggatgtcgatgatgccggctcgccggaggtcgtcgttgcggccgggcttggccagcttgccgaaggcggtgccgctgaggtcgaagtggtatggcgccgccggcacggggaagtagttcatgtcggtgatgaccaccgtctcggtgcggccggagcaggcggggtgcttggagcacctgatcttgtagcaggacccgcatcccttgccgtcgcggaacagcggctggttgccgcaggacgtcatcgacatgaacgggtactcgttcaccttcttgaaaccgcaagcgccgccgttgtcgtagggcccggcgccgttgggctggccgtaccaggtggccctggcgttgccccactgcatctgcatcaagctgctgctgctgctgctgtcgttgtagctcacggaggaggcggcggcggcggcggcctgaagcagaagcaggagggagattgatgacaacacccccattgtttccagctacgacc

SEQ ID NO: 26894 - DNA, 482 bp, Setaria italica
  Peptide Sequence Number=SeqID_92868
ctgaccatgctccatgcatgcttaattagcttgcaacagaactcgagcctccgctggctattgccttcacttccttaagctcctccaccacctcagccatggtcggcctctcatccacgtcctccttgaggcatcggaccgcgagcctactgatcctgtcaaggcattccatgtgatgatgtgatcgggcatcatcatcaccagacaagatctcttcgtcgtacaacttccttccattgccctcctccttgaaggacctgatgaagtctatgtagaggctattgtccccgtacttggccggcttcctggtgacgagctccaagagcaccacaccaaagctgtagacatcactcttctccgtgaagcggccggactttatgtatattgggtctatgtagctcatgtccccggacacacaccacttggagtacctgctggcgacggacacgagcttcgccgacccgaaatcagagaccttgggt

SEQ ID NO: 26895 - DNA, 268 bp, Setaria italica
  Peptide Sequence Number=SeqID_92869
ctcctcggagacgagacggcgaccgagcgcggcggcacgcgaaagcgacgcggccgcctcgcgagcaaaaccctcgcctcctcccatgtcgggcccgaggcccgcgcccgctgccagtcagaaccctagcgtgccccaggccccgcctcgtcctcctccccctccgccgccggtgtcggcggcggcgagggcgcgtgaggagggcgagctctcctccggcgccgacgacgacgaggctctgcaaactcggagggctgcttcatccatt

SEQ ID NO: 26896 - DNA, 1188 bp, Setaria italica
  Peptide Sequence Number=SeqID_92870
catattttagatcggttccgtgaacaagcacacccagatgtgcttgttcacggaatggagaggcatctttggatggacctttgatctgcatgctcttcttttcagatcatggaaagagcagattgtaacatattttagatcggttccgtttgttcttgctagttctgagattggaaaccctattgggatggtttacatcgatgtagagaaggcggcccaaccattacctcttacaactgtgtttcataaacttatcccaatcgagacgactccttacacattgtttcaaactatcattggcaatggctatcctatcgcattattggatgaagaaaagatactacctattggaaaggaacttacagcaataggactatgtcgagcaaatgacgaaggaagtgttgagatcagctcgtgcccagagctcccctttttcttatctgagctgaccaaggatgagatgcaagctcagctggcttcgcgtgctaggatactcttttggggtagtgttgttttgggaaccttgtcggtttgcttagtggggcatgccatttacaggggctggaagagaatcaaactgcggagagaggctaggcaagcacaacagttatttgaggagggtgaagacgctattcaagaagatgactccagtgatgaagaagtaggagatgggcagctatgtgttgtgtgcttaaggaagagaaggaaagcagcttttattccttgtgggcatcttgtttgctgttgcaaatgtgcattaagaatggaacgtgagactgaaccattgtgccctatgtgtcggcaagacatcagatacatgatgaggatttatgactcttgaggtcccttgctgataaaatctgacactagcagatccttttactagctctccctgcaaacatgaggagcacaactgcttatcctccatggcatttccccagtctagactactagctaactggctaccatggatttgtgaatatataatgtcttaacccttccaaatcatgctcttggtcgcttgggactctagcttagttgaactcaccaagaattacatgtctttttgttagcattgcacatatgtttgcccttcatgtaagcattgagttggctgtaaagtactaaagatttggctatttgttgtcctgtgatctttcacgtctagtggtgaaatgtgtgggttgc

SEQ ID NO: 26897 - DNA, 522 bp, Setaria italica
  Peptide Sequence Number=SeqID_92871
agacgggaactaccctacaagaccggcgggccgccctgcggccaggtgcgcgtcctcgtcgtcggcgactcaggtgtgggcaaatcttcattggtgcatctcttattaaatggttctgcagttgctcgaccagcccaaacaattggatgtgcagttggtgttaaacatattacttacagcagcccagggagttcatctaatagcatcaaggctgatgctgaaagaaacttctttgttgagctttgggatgtttcaggacatgagcgctacaaagagtgccgttcactcttttattcacaaataaatggtgtcatctttgtttatgacctctctcagaggaagacaaaaacaaatttgaacaaatgggcagtggaggttgctgaatctgggaccttttcagctcctcttgggtctggtggtccaggtggccttccagttccttacctagtgattgctaacaaagtggatattgctccaagagatggtagaagagtgagcagtgggaatcttgttgatgttgct

SEQ ID NO: 26898 - DNA, 297 bp, Setaria italica
  Peptide Sequence Number=SeqID_92872
gtgttcaccagctcgccggcagcttcagctcgctgctcgcacacactcatatagccagctcagaaaatggcgagcatcgaggtgtccaagccgtcgaagcgtctgtcccccaagcgcagcggcagcttcaagctgagcctgcccggcctgttctgcggccagtgcaaggccacgtcggtctcgtccccgcccgactcccccacgggcgccggcgcgcggtcgctgtcgtcgtcgtccgcgtccgcgtcggcgtcgtcctcgggcacgtcccgcgggcgcgaccgcacggcggagaac

SEQ ID NO: 26899 - DNA, 534 bp, Setaria italica
  Peptide Sequence Number=SeqID_92873
tcctttatgaaagatcaagagaagcataatgattctgtgaagaaaagtttggatgatcttatgaagatattgacaagcaagaatgaaaagttgggtacttcaacactggaaacaaaggacccaacacaaaattaagccacctcctatacagagtaagcaaattcccccaattcattccaatatggcacaggttcacaaatccacacacttcatggataattcaggcatggcacaaaaacaattttattatccaccatttacttcaagggctcaaatagatgatactgagtcacatgaatggtctagacatgcttttggttcagttcaacactttactgaaccggtacccagaaatggatttagaggattgtccttggaatgccaaagagttgggagtttttttatgagttggctaccgaagaactacagcccaaaaaacaaccaaaacaattgcaacaccattttccaccgccacaacaaaatatggcctgaattcctactttccctgaaccacccaaccaagtcagcaaccaa

SEQ ID NO: 26900 - DNA, 1083 bp, Setaria italica
  misc_feature (1046)..(1083): n is a, c, g, or t
  Peptide Sequence Number=SeqID_92874
gaaaaagacgagcgcgccgaccataaccaaacatccccctcgggcttttatccgcgatcggcgatcccccagtgccgtgctgccgctgccgcgttttctgactcctcgccttcgccattcccatggccgattccgccgcgctctcctccgcctcctcctccctcccccgctcgctggcgtccaggaggcccctctcctcccctctccacgccaggtcccggcccctccgccgcggcaggtccggatcgcggtcgctccaccggttgcgagctcgggcggggaaggacgatccggaggacctctacgggccgtacccctgggaccagtccctggatctcaccaccgggttcgacattcagtgggtgccagaagacagggtcacactgttcacttcggatgggctcgtccaaattgggggttccttggttccccgtcgagttagttcttctgagaagaggcaacggaaattaaagagtacacaaaagttgcgtcgtttccaggagagctcttacatggatcctaatcaaagtctttgtcttggagcactatttaacatagcagcaacaaatggcctagacatgggcagaagattatgcatctttggcttttgtcgttccattgaaatgctaagtgatgtagtggaagatacagtattggagcatggtggtgaggttgtcaccgcagagaaggcgagcaatgacggcctccaggagaagctaacaatgtctgttgcagtaccattgctgtggggtgttcctccagcgtcagagaccctccatgtcgcggtgcggagcggtgggggcatcgtcgacaagatctattggcagtgggacttattctagatgtccagagccgaaacattaacaaaattgattctacgctgtatatatactccactctaatccgctgcacgctttgtgccaccgattgtgcattgtgcagaaactgtgaactcaatctctacctgtacagacccggtcaccattgtgcatatactcaattgtcatttttagtttgtacctagttttaaaaaaaaaaaaaaaaannnnnnnnnnnnnnnnnnnnnnnnnnnnnnnnnnnnnn

SEQ ID NO: 26901 - DNA, 277 bp, Setaria italica
  Peptide Sequence Number=SeqID_92875
tgtctaggtgcagaacctgtccagattcagagtgtctaggtgcagagtctatttacttagcatatttccagctgctagttagtgagaataataagccaatcaaggtagtgatggctgtagttattatctttcatttacaggccctattgtagctctcggctgtgtataagtagagaagaaaacagaaaaggcagcaagcaattgcagcaccaaaaagagactgctgtgtacgtgtgtgttctgtgcgtgagcacctgggctacctgtgaggctttag

SEQ ID NO: 26902 - DNA, 354 bp, Setaria italica
  Peptide Sequence Number=SeqID_92876
gatgattttgggtcaacggctttgataggtgaaggttcttacgggagagtatactatgccgtccttgataatggaacaaaaatggcagtgaagaaacttgactctactgaaaatgaacccaccaccgaattcttgacccaggtttcattggtttcaaggctgaagcatgaaaacttcgtagatatgttgggttactgcacagagcgtaatcttcgcattgtagcctatgaattcgccaccatgggttctctgcatgatgttctacatggaagaaaaggagttcaaggtgctcaacctggcccagcgcttgattggatgcagcgagtgaaagttgctgttgatgctgcgaaagga

SEQ ID NO: 26903 - DNA, 654 bp, Setaria italica
  Peptide Sequence Number=SeqID_92877
ggggctctctgggtttctggagtcgtcgactgcttcccatttccatttagctcaagcttcgtcagtgctctgctgtcccagaatgtcttcaccagatcctcaagaggcggggttaccaactccccaattgattggctgctcggaaccttaatctcacgccttctcggtgttgaacaagtcacttcatccaccgtgtaatcatctcctagacatctgttggcattccctgtgattactgttgtcttctcacagtgaccatgttgtaagtcatggagttctgctctggatgtcatcgtgatagatttcacattctcacaagtgccatggtccaattttaatgcatcgtcgatagaacaaaggagatatttgcttgaaacatcattatcttcaaatccagccatgacagcagatgaaaatcttgcattaagttggttgctctcctcagttccatcacttatgactgaattggtggcttctgcatggcttcttccaagtgccagtactgaattttgagcagtactccattgttctgagcatgattgtacccttgtcttgcattgctcaagattctctgccaagaagcacttcttctgttcaatagaagatacattttgatggaatgcctcttcagttctctgcatgtaggcttcccat

SEQ ID NO: 26904 - DNA, 1091 bp, Setaria italica
  Peptide Sequence Number=SeqID_92878
attccttcagggtatgaatgttgcagccaactttgcttgttagtttactgggctcacattttcccccaaaattttaattgcttgcttatacaaaagcatttagctgggtggagtattcctgtcataattggtgtgtttttccaaatgctctgtgattttcagaggtggttgtggtgacacatcatagaaagcttgggccaattcttgtagtgcgtcgacaggctattttaggcgtttagctattcacacatcgctattgcaaatgcttaaatgataaaattatcctgctattgtgtggtaccaatgctctactttcttcacttgtggtgtgttgacatgggcctttcatgaggggattgagcgataccttaagataacagtggcatcaggaaggtgaagaggaaaatgcagagatgagggaaattagttggttgtttcaacgaagaggaagtaaaaagtgaggaaaacatagaacaaagtgcaaacatatgcatttggtttatgtattcagtattcaaaaagctttcctcattagttaaattacagtaactggagtgatgtaaaggttgagcatcacataaattttactaagagtgcctaagggactcatgtattatccatggccattgaaataaaatattaactgtaaaggttttttgtgatatttgcaatcatatggaagtttttgaaaaaatggaaaatttaggcaaagcctttattggttagtggtggaggcaaatgcctcataaatcactctgctttgtgttccagttgtgtgtaaaatttattgcacatgtagttgtttttggctcttctggaccaacatttatagttcataactgttgaggactcacatttttgtctagcatagcatacagtttgacggattgttatgttttacgtttccttatttgttgggggcaattctgcaggtcattttagttctaaggtggtacattgcatgcccatagagtagggaaaacactctggtccgaatttttttgcccacaagaaaccttacctacttgttagtatatagtgtgaaactgaatatttgtagagaaaccgtagctttttgtaggtgtggtcat

SEQ ID NO: 26905 - DNA, 423 bp, Setaria italica
  Peptide Sequence Number=SeqID_92879
ttttattagtcagctggagcttgtataaactggatccgtcgactactttggtagaatttctgctccaatgagggcacaaaagtatgccccaacatgcaggttatgagctatgattatgatgacgataatctagctcagcaacattttggatgatgtggtggatacagaaaaatggcctgcaaagtggcaaagctgcagcgcacgcagcagcaaatgttgtgtttgtgatatagatacgtctgtaccagactactgattgacattttagtttctttcaaggttcaaagagctgcaccctaactttgtattcttggtagatgcttgacacactcttgtaataatctgagaccatgttggtcgtctacagaacattatcgaagacaaaatctgatttcttgacactgaacccaaaaaaaaaaaaaa

SEQ ID NO: 26906 - DNA, 260 bp, Setaria italica
  Peptide Sequence Number=SeqID_92880
cacataactgaaatccagcgcaagaaattgcagtagactgctagaatctataaaatctgagaagggattgattggattcagcggatttcttctagggttagaaagggagaggaattgattggattcagcggatttgtttgaccagatatatagcaaaccacatcggaaaaacgcacctagccgacgtgctctacctcaccggcaacagcggcaactacaccaagaaccggccgggagagggaaaggaagagagggcggtg

SEQ ID NO: 26907 - DNA, 308 bp, Setaria italica
  Peptide Sequence Number=SeqID_92881
cgtgccgggccatcctgcacggtgacgtcaagtccatgaacgtgctgttcggcccggcctacgagccgtaccccgctgacttcggcctcgcccgtgtcctctccgccgccagctccaagctcgacaccggcaagcagacgcgcatcgccggctcctacggctacatggcgccagagtacgcgtcgatgcagcggatcagcgagaagagcgacgtgtacagcttcggtgtggtgttgctggagatcctgactgggcggcacccgctggacccgacgctgccgggcggcgcgcacctggtgcagtgggtg

SEQ ID NO: 26908 - DNA, 724 bp, Setaria italica
  Peptide Sequence Number=SeqID_92882
cggcgtcaaggcgccgccgactgggcccgcgctacgagatcgcgctcggcgtggcgcacgccgtggcgtacctccaccacgactgcctaccggcgatcctgcacggcgacatcaaggccatgaacgtcctgctcggcccccggaacgagccgtacctcgccgacttcgggctcgcccgcgttctttccggcgccgtcgcgtccgggtccgccaagctcgactcctccaagcccacacgcatcgccggctcgtacggctacatcgcgccagagtacgcgtcgatgcagcggatcacggagaagagcgacgtgtacagcttcggcgtggtggtgctggagatcctgactgggcggcacccgctggacccgacgctgccgggcggcgcgcacctggtgcaatgggtgcgggagcacgtgcacgcgaagcgggacacggcggagctcctggacccgcggctgcgggggaagccggaggcgcaggtgcaggagatgcttcaggtgttctcggtggccatgctctgcatcgcgcaccgcgccgacgaccggccggcgatgaaggacgtcgtggcgctgctcaaggaggtcagccggccagccgagggcggggaggaggggaaggagcagccagcgtgcaactcggcctccgccgctgccactacgccaccggccgtgcaggcgcagcggtcgccggctcggagcccactgccgaagggcggctcgtcgag

SEQ ID NO: 26909 - DNA, 485 bp, Setaria italica
  Peptide Sequence Number=SeqID_92883
ggctctgcggaggatttccttcatggccatgttgagcaagccatcatgatcctgggaccccatgatgaggtgggttttggcggtggcaccacaagtgattacgcatgcgttgctctgcccatcgccgcagaagatgtcatccaggaggtgtttgacctcgttgtcgaagatgagggtgtaggaatcatccttcgtatagcagtaatcgagcttgtactcgcaatccttgcgcagggtcagagtcccggcggcagcaggagtggcctccttgttgatggggatgaacgagacggaggcggaggcgggagacgaatcggccgcatcggagacgcgggcggcgacctgggaaggagcctctggagcctccgccggggcagatcctggcgacgactctggacgggggcggcccgaatccgtgggagggtgaggaggaggaattggggatagcgacggtggcgcctgctgctctccatcgtcgcctgcct

SEQ ID NO: 26910 - DNA, 723 bp, Setaria italica
  Peptide Sequence Number=SeqID_92884
ctctgagctccaaccaatatcccatcccttaaaaagagcccaaacttcacctttctttggatatatttcataggagtttcttgtcttgcttttctcaaaggatatagttctggagaacatagcagtttctttggctgtctctgactgtccatgcataaagcgtccacaggcaacaggcagacctccgtaagaccatgccctctccgctttatttgtgggatcaagctccagccaaaacaaaatgcagcataaactttggggtagtttttaccttcgtgattcgagcataaaatctaggcatacagtcttgatcatcatagacagcccagatctggttggctctaaattgatttacacctcgaagttggtcaaaatcaaaaaattcaggatccataaatgtgtagtattgattatcacctggagcatcatcatcatttagaactggaccattgtcgctgacagaatcaaatgcctttcttttcgatcatttagaactggaccattgttgctgacagaatcaaatgccttttcttttccatcatattttttccagcatgcattgttcctctcttcatttgctcaattccattggatgttttatctccacatgactcacctcctttccctttatcttctgtgttcctgcagtcattaacaccatttgtcggaccattatggtcagctatgtctgtgttcggctttgctgctgtattgctgtgatca

SEQ ID NO: 26911 - DNA, 263 bp, Setaria italica
  Peptide Sequence Number=SeqID_92885
agccggcacaagtacactacctgcatatcgctgcacagtgcacgggcgcgggtcgacatgggctctatcgccgccgacgctgaccggccgcacgtcgtgtgcgtgccgctcccggcgcagggccacgtgacgccgatgctgaagctggccaaggtcctccaccgccggggcttccacgtcaccttcgtcaactccgagttcaaccaccgccgcttcctccgctcccgcggcgccggcgcgctcgacggcctcccggggttccg

SEQ ID NO: 26912 - DNA, 1264 bp, Setaria italica
  misc_feature (1221)..(1221): n is a, c, g, or t
  Peptide Sequence Number=SeqID_92886
ttggcatctggttgaatctcagcacaagttctagtgttagcttaatggggaagaaaagaggaaaatcctataaagaagttcttgaaaaaaagaaagagaaaaaatggaaaataagaaaaaatgatttgaaaaaagtaaaaaaagtacagaaaaagatgaaaatatagagaggaaaaagagatatcatagactaggaattatcccccaaggtagccagcagagaacgtgtcaggcacattcctggtactgatgtggcgtgatatcattagccatttactggcacagttcataggcatgacatgtaagtttgacctcacatttatgctgagtatactgtaatcattgtatgcttgtgttgaagcttcgaccgttgggatttacacttgatgtttcttctgcagttttgtattgatgttttccctctttcatgctgaaacattctctttggcacttcttaatccattttttaaagaagtcaacttcaatccattagtttgccttgtgtgtgatctttgaacacttcttaagcatcgaagtgtatccttttgtcttatgggtacatggcatagtgccataatataaacagtaaatatagcagggtgccaaatcatattataataagctaaagccccagtgcttcatgataatttatgtatgtcatgtggccctgatgagaacttctctttatttgtggttgaaggtttcataatttgaccaactatatcctagaaagtagaaacttctcattaacttctggtcaaactccattttgtgtcagaaaaaattgtcatcttctagagaagatattcatataggtgtactggatggtgctagcaatggactgttttgtctttgttgtcattagacataatgcttgtggactatttctaactgcgggttcttagtttgttttatttatgtacaacctatatgtttatcattcaaaaaccttcatctatgtaattagtgaatcgcctggcacatcgtaaatacatgttcctttttgaggctatgcacatgtttctggcaagtttgcattcattcatttagctcagctatatgctggaagatgcaaagtagatgttctgtaaagttaaaatagttccatattaatcttttgactgtgacatggtgcccttaaattttaatagttattttatgtctgggaatttgctctattgtgcagtggcaatgtggtgttaactttgtaaccactgtagngcaagtttagggacttggcagggataatgaaactagctgggac

SEQ ID NO: 26913 - DNA, 854 bp, Setaria italica
  Peptide Sequence Number=SeqID_92887
aaaggtataaatcatatcaacaatcccagttaaatacggtgtttccgaaacaaccgttcttgggcgtaatcttcctgacactatcctggagaaactggagcgtgcctggagacatgtgagccctgtccattgtgttaaccttcggcgcctctagtatcgactttggcggggacaaggcacactgcattgcccagattgcaagggggcgcatgtatatcaatgacctgtagtggccatccactgtccatgcttctggagtttgaaaccagtacccatagccctcttcagaccatcctgcaatataaatgccttctgcagtagtgaaggcctgatgctccattccatgaagcagcatcgttgcagctaaactatatgttactcctgtccatatttcccttgactgcatacaggtttcatctaccttcccgttcggatgcataccgttcacggctcccatacgtcctcctttcaccctcatcacattatagtcaaatattttctgaagcgtgcattttatcctatcctcatcaaatagaggaggcaaccctgacgatgcagtataccattgtccagccagctggtctgcctggatggaacggctactgtaacttgttccactgtcataattgaagtatgaaccattccataatctggcttcaaatacggatttagcttttgcaaatcttatcatgcacctctcagcatagtcaacatgtccaaggctgcgggccagtgcggctgcagcttgcagggcagcaagccaaaggcaaccacagtacgcacttactccttgaactgtccaagcatcataagtttgatcagggaaatccatcattttcaatcataccatcacc

SEQ ID NO: 26914 - DNA, 2463 bp, Setaria italica
  Peptide Sequence Number=SeqID_92888
ccaactacaatctccatagtgaccaaacccatataaaaatttaagttgatgttcaagttctcgaaacaccacttattccggtctcttctaaatcctatccaacacgtctacattagccatcacacagctcgttgtacaggccgctggaacaaaatctcaaaaattatcggcgttgacatccgatgttcgtgacactagatacgctacaaagttccgcgcgagcggacggctgggggtttcctcgcctctttctcatttctgctggccagactcaacgggctcaggctcgaccacctcggcttcaactgtatcaggctcgacatgcggggcagcagcgtgcggtgggaacgagggctcgacgtgcggggcatcatgctctgggaacgcgctggcgaacggtgcctgtgactgtgaggaccatttgccggcgatggcagagctcatcatgtcgtagatcttcccgctgagctcggccggattgtcaggcgtgaaaccactagaaatcatagcagtttcaaagaggacatcgagaacctttagagcttcagggtcatcagggttgcttctgcatgcaacattcaagcccttaattatttcgtgctctgggtttatctcgaatactttcctcgaacgcatgaaatccaaagaagatgtgtcacccatagactgtgccctcatcaacctctccatattggcagaccagccaaacttggctgcaacgagaacacatggtgatgaactgagacgattagatatgtcaacacgtgcgaccttgtcgcctaagcgtttcttgatccagtcacaggtttggctgaactcctgctttatctccttttctctttcttcgttcttatcacctaaatccaaatcttccttgctaatgtccacgaatttcttatccttgtaggaagccagattctggatagccacttcatccatagggtcgaccaaaagtagaacctcgtactccttttcagtgagcttctctaagaaaggagcatttttggcactgctcagactgtcagcagcaacaaagaaaatgtccttctgctcaggtttcatgttctccacatattcatccaagctaattaattcatcattgctttgagaagagaagaatcgcaacaaaggagcaattctcttgtggttttccttgtcttccatggcacccagctttaaaaatttgccataattctcccagaacctttcataatcatctctgttttcactgcaagaaatgccaagtatcatatcaaaggccttccgcacaagcctctttctcattatccgcacaattcgactttcttgaaggatctcacgagaaacattcaatggaaggtcatttgagtcaacaacaccctttacaaagctcaaatatcttgggaacaattctccgtcaaagtcatctgatatgaatacacgcttaacataaagcctgatattcttggtcttcctgtcagttatgtcttccttctttgtagccggaacaaaaagaatcgatctgaattctacctcaccctctgtagtgaagtgagaggaggccaacggatccaagtactcattgaaggttttcttgaaaaattcattgtactcctcagttgaaacctctttagggttccgaagccagataggttgtgtttcatttgtaagctcccaatcccaatacttctccaaaactgtcttggtctttttcttttctctgtttgggcttcagcatcgccttcttttttggtttctgctggatcctcgtcaacctcaacctcttttgtgaagcccttttcttgccacgtgtaaatggggaaggaaacaaactgagagtagttctttacaagtttttgaatcctttcagggtgagcaaaacccttatcatcacgtttgaggtagagagtaaggcgagttcccctaggaatgagcttctctgggtccttttcctctctaacggtgtaagaactggaatctgcttctccttcccaaacatattgcttgtcagattttgggctctttgttgacacaacaaccttatccgcaacaagaaatgcagaatagaatccaacaccaaattgaccaatcaagttgctgtccatgccggcttcttgactctccttcagtgccttcaggaacttagcagttccactgctcgcaatagtcccaagcgaatccacaagttcttgcttcgtcatgccaatcccagaatcagtaattgttactattccattatccttgtctgtttggatgcgaatgtcaagttcaggaccatccttcagaagctcaggatcagtgacactcagataacgcaacttatcaagtgcatcactagcattgctgaccaattctcgaaggaagacttccttgttactatacaagctgtgaacaatcaaatccatgagcctatttacctcagcctggtactcatgcttctcagccggcggcatgtctgtggagtcaactgcagccgcactcgaa

SEQ ID NO: 26915 - DNA, 784 bp, Setaria italica
  Peptide Sequence Number=SeqID_92889
ttcctcatgaaaatctaccggttcgggttcgatcgacgccgaacctgcaatgcgaatcatttaatcatgctgatgatacagttatgaatagggtggatacaaacatgtgcatgtgtaactgaatggtttaagaggcataccatcatgaaagaaatgatgtggatcagggaggcaagtactagccagaaaccgaggctgaatatgtggtgaatgtctcgagccaggtaagcgaagacaataatgaatctattcaccgtttaagaaggatcattagtctaatgaccaataccaagacgtactgatgggctggaacacatggccaacaagtatgaatcgcgcctaacatcccaatgtggtcaaggatctgcatgaacagccgctctcgaagagtgactgcgaaggccctgaaggtcgtgctggcggtttgcaggatccaccataagcacagagcggcgtgaatgcagcatcgcaggatctcgggaaatatcttcaccctcgccgtaactgtatcaggtccgaggcatgtgatcaaaaccaacgagccactcagcgcgaacgaagccatgtctgacattcctcccccctgcatcatgcaataggtgaggggaacactcatcaaacccctgccattgaaggcttgaccacgcaaatccgacaaagaacatagcatacctgaccaaaagcgggctggactcttactggcgccgccgccgcaccgtctcccgtctcaccgagacgacgtctccttccccagaggcacaagcattcaagtcacatgtaataa

SEQ ID NO: 26916 - DNA, 724 bp, Setaria italica
  Peptide Sequence Number=SeqID_92890
aataaaaaactaaccacctctaaacctcaattcttcttagatccagggctgataaccctctggttccagccaattgccagaggtgggattcgtccctgaaagcctgaagagctccctgaaggtttggatcagagccatcgaaaacacaagcattgcggtgtttacagataatccaagctccaagcatgacctgggagttaaagccctttttatgctgcttctgaacttttctcagggattttcaccaccattcagcaaaggacctgatccttcagctaggcaccaggctggacaaattcagtggctgcagaatctcaaaccagaattgccgagcaaaaacacaagaagtaagaatatgttgaactgtctcaccctcttgatcacaaagagggcactgctctgggtgagggagccctcttttttccaatcggtctgctgtccaacaacggtttcggatagccaaccaaatgaacattctgcaattaccaggtgcccaagatttccaaatttgcttccgtggttcaaaggtgatggagccaacaaagaaggacctgtaagccgatctggtggagaactctccagaggcttcaaacttccaatggtgcagatcatcagcatggttcagcactatggatgctaatgcgtcccaaagctgtagatattctgttagaccaacatggccaagcgctcctctaatgtttagctacccaagcatgaccaagta

SEQ ID NO: 26917 - DNA, 1012 bp, Setaria italica
  Peptide Sequence Number=SeqID_92891
gtttatcttcagcaaaaatgatagattctgtaggtgtatatatatgcatcagaagtgagagacatccttgtaaatcaatggctaaagcatgatcctatgaatcaatgaaaatattgtcacagtctgtcacaatgacctgatctgttcaagctgtaaagtgaaacaatggaaggtaaatgatattttgttaagacctatctcaatgatctgatcaaagtgtaaaagttaaagcgacttatcatctaatctataaaaagtcttgcactcttttgttctctgcttctctttacacacaaacgtgcagtgatggttatgtgcagtgagaattagaaatcttatggcaaggcaaaaccatcttccaggcactcagttcttgtctcatgcataagctgctgcaggagggaagggttgctggtcacaatggcatcgacatgctcatgcagcatcttctccatggacttgttatcgtcaacagtccatgcaaagactttcttaccatgtctgcgcatgaccttcacaactttctcatggatcaaaggatgatatacaccagcaactttagccccctcgagccgcacaaactcggtttttctaccggtggacttatcaaccataacaatataaccaaccacaacatcttcagacaacttgattatatctcttgctaggttatcagtttttgcccacacaagacaatttttgcaatttgttctcttcagaagagacaatacatcttcagctaaacctttgtcaaatgaaggtgggccaactttcacatccagaatcacctgcctaactgatcgtgatatcactgccagagcatcttctgctttaggaacttcctcgttttggactcttttcgatagctggaaccttagtgcttttatctcatctgtgctccagtggccaactttggctgtggaattaccagacattttttgcagatccctgtcatgaagcgcgaagagcacgccatctgaggacctcgagacgtctacctccacgcagtccg

SEQ ID NO: 26918 - DNA, 955 bp, Setaria italica
  Peptide Sequence Number=SeqID_92892
tttttttttttaaaaattaaaaggttcctaaattgtctaattctattattgtaactcattgactttgacaagaaaaactcttcacatgtactgttatcatacgaaaactgtttgatggattgaaattacattgaaggtcttgaacacttttttatcaaaatctagcctccaagtatctctcattctacatgtattcaccgagacatgccccccaccttcaatggtcatgcaaatttctgctaatctaagctctattcacacgaatgggttgtccttccaattccgcgttattgaaagtagcaacagcagcttcaacttcttcctcggaagagaaggtgacgaagccgtatcccttggattttgaagtcccaggaatgtgggaaaccgtggcactgagtatctgccccttttcagcgaagaaatttttaagaacttccgttgtcacagtcttcgcaagattaccaacataaaccttgtactgactatccacaaatacaggctccggttctggtgctgatcgatcaatgttcggtaagaagctctctgtgacgttcactttaatttttctaccaccaacctcagtctcattgagagcctcaattgcagcattggcctcctccacggtgctcatcgtgacaaatccaaaccgccggctccgattggtgtacttgtcatacataacctcggcccgctcgacggtgccgtgcgcggcgaacatgtcgcggagctcgtcgttggtgacggtccgggggatgttcccgacgtagagcttccgcgccgccacctccgccggcgcctcgagcaccgccgaggaggcggccacccgcagcgccaacccccggcgccaggcctgcggcgccgcggcggcacggaaggagaggcgggcgggggcggagacggagacggaggccgaggcagggctccggcatcggagatggagggccggaggggtaat

SEQ ID NO: 26919 - DNA, 450 bp, Setaria italica
  Peptide Sequence Number=SeqID_92893
ccgtcagctcgccgtcccacagcttcacgacgctgccgtcgagcgccgccatgtcgaggtggcggtaccaccccaggtcgcccctccgcctcacggccatctccctctcctcccacggcgccgccgccgccagggccttcgcccttcttctctccggcgccgacgccgtccttcgcaggaccgcgtctacctcgccgtcgaccctgtcgtcgtcgtccgcgcatctcctgacgccgtccacaactccgtcgtcggcgtctcccgaaacaccgtagtacaccgtgaaccggaccttggacggcgtgctcggctcgccgctcggggacgccggctcggccggagccgccagccgcggctcttcgatggcaggagacggcgaaggagactgggccttcgacttgtcatcgacgatggcgctgcctctgcgaacgccggcgctgaccgcgcgga

SEQ ID NO: 26920 - DNA, 308 bp, Setaria italica
  Peptide Sequence Number=SeqID_92894
tggcgatgaggagaagcagggcagaatggcagatgcaatggcgcgggccagggacatcgacgaggaggcaggcgagggtgaagacggcgacgaccacggacatcagcgtgctgagggcgcaggggcagcgtcgccgccgacggcaggggccgcattacgcgccctgcggtagaagcggacgggaactagaagcttggcgccgaccgcgacggcgacgggcgtgttggtgtggccgggacagaggcggagcgcgtcgaggccaccgtccgcaccgaaacggatggcgacgaggaggacgcagacggcgg

SEQ ID NO: 26921 - DNA, 649 bp, Setaria italica
  Peptide Sequence Number=SeqID_92895
taagtttaacgaccttaccaaagtacaaagtttaaccaagaaagactgcttccaccataaaccgtcgaaaagttgttcctggaaagatcatagattgaagtctcgaagtttgtacgaggaagattcacgtgcagggaggaggagtacaagcaaggtttctgatattagagggatcaagggtcgatcaccgctcagtaacaattctggagcatcaaaagggaagaagtttgatgcgtctacagaattcaggcgtacaaaaaggggtggagcgaaggatgttgctttggatgaggaagttgaagataacaagaaatcagatgactcaggtcatattactgaagaagagaaacctcgccctcgccttactcgagtgctggaccagagtgggaagaagttaaagcctgctaagaaggatgtcgttcctgatgctgaggaaccttctcctcctaagaagagaaaacgaatgaagcttgatccttatgacacttcaaacaaacggattgaagattctcctcctgtccaggatgtttccagagcagagaaggttatggtgaagtgtgcacctgaagagactgaaatgtctataaatgcaaaattccgtgctatacagccagctccatcaatcctttcatatgttgaagataattta

SEQ ID NO: 26922 - DNA, 278 bp, Setaria italica
  Peptide Sequence Number=SeqID_92896
gtggcgactgtggagcggcggagcttgtggtgagcagactgcgcggcggcggctcggctgaggagctcccgcatcctggccacaatggccttcctgcgctcggccagcctcgtcatctcctccggcaagccctcgccctccgcctgctccggctccggctcctcctcgatgacgggaaggactctgcacccttgctgatcaacagcagcagcaggaccactgccatgccccataccgaatcaaaacgtactccgtggtaaacagagttggaagctgtg

SEQ ID NO: 26923 - DNA, 331 bp, Setaria italica
  Peptide Sequence Number=SeqID_92897
tttacgtgaagaacatgtttggtgctggaacggagaccacgtcgaccacgacagaatgggccatggcgctcctgctgaaccacccggagacgctcatgaaggcgcaggccgagatcgacgcggccgtgggcacctctcgcctggtcaccgcggacgacgtgtctcgcctcacctacctgcagtgcatcatcaacgagacgttccggctctacccggctgtgccgctgctgttgccgcacgagtcctctgccgactgcaaggtgggcggctacgacgtgccccgcggcacgatgctgctggtgaacgtgtacgccatccacacgggaccccc

SEQ ID NO: 26924 - DNA, 451 bp, Setaria italica
  Peptide Sequence Number=SeqID_92898
tttctatcagcattcactcctgaaagtacacaattccatcaccacattatatgtgccagtgaactgaaagaaatagtgtaaagtattgtcccagatcatctatgttccacataaaactgtcagtgcattcatgcacaaattttacataaacattgcatgttgtcgtctcaagaaataacttactacaatgttaaagtacgtacttgttattgctgaacgctgtgcccggtcttccacttcaatggctacttggacaagtccaccttccagttgtgtgatgcaagggggtacaggagcatcatgtggatttgtctcagctgcaactgaactcagtgctccatcaacaacatatataaaagggcgtgctccagatcctcttctgatcggtaacaaacaaaaaggtcacatcctacacagctcatgcggaactgcttttcaagtctttccttca

SEQ ID NO: 26925 - DNA, 1027 bp, Setaria italica
  Peptide Sequence Number=SeqID_92899
agtgcagaaatcatccacaagctcatcagactcaacactcaatatcgtgcagcaatctttacaacacgcaaagcactttgcatcacaattaaggaaataaccaacagagaaggtgcaacagaaacaatgaatgggaaatgggatactgtccagattggctccggtctagttgtacttcagcggtgttttcaacatagtttcagcacgtacgttctgctcttctgtcgcgcaatgagtgggaactttctcttgtgccatcaaaagagaaatatccaaacgcatgacacattggtcagtttcctaaggctgtacagcttctaggagcttctcgtacacctgccgtgcagacaaatcctcgacaatcagaagctttgatttattattccatcctctttgaagagtcatctgagtcaatcttaggccaagaaccttgcccataaattctagcaactcactgttcgcttcccctcgtgcagcaggggcagctactgttactcgaacatcatcagcattcactcttgttattgctgaacgctgtgcccggtcttccacttcaatggctacttggacaagtccaccttccagttgtgtgatgcaagggggtacaggagcatcatgtggatttgtctcagctgcaactgaactcagtgctccatcaacaacatatataaaaggggcgtgctccagatcctcttctgatcggtaacaaacaaaaaggtcacatcctacacagctcatgcggaactgcttttcaagctttccttcaccacgtttcaacattacttttcccgactccttcacatttagccttgagagatgcttagtcttgtctaaaacatgtgctctgtcagtctttcgcttgggcattttctgcaattgggtgtcggtgatgaggacgtgggaggcgcagtgcttgcagtagtagacgaagaggtcagactcggggccctccggcagcgcgtcctcgctcgagtacgtgtgcgtcgtccgcttcggcatcgcccctcctctccaccgccgccgccgg

SEQ ID NO: 26926 - DNA, 417 bp, Setaria italica
  Peptide Sequence Number=SeqID_92900
acttcaagagcaagtccgactacgtgcgccgcgccgtcgggaaggcaggatgggacgccctcttccagcaactggctctcgaagaacggcaaccaggctccgcggcgtgcgcgtcgtgcccgggggggcagcgcctgggtagacgccggcacgacgctgggcgagctctactacgccgtgggcactgcaaacccggggttcctgttcccggcggcgcgtgcgcgacggtcggcgtcagcggcttcatcagcggcggcggcatcggcctgatgatgcgcaagtacggcgtcggcggcgacaacgtcctcgacgcaaggatcgtcaatgccgctggcgacgtcctcgaccgcgccgccatgggggaggacctcttctgggccatccgcggcggcggcggtgagagcttcggcgtcgtcg

SEQ ID NO: 26927 - DNA, 470 bp, Setaria italica
  Peptide Sequence Number=SeqID_92901
ctacgctacctgctgtgtcaggtcaggtggtgctgcaggttgccacaaaaaggatgcaccacgagtgacggcgctagcttctacgttgtacttgcttgcagctagctactctggtactagcgcgctcgtgtgcgtgtttatatttcgtggcttgttgttaagttcttgtccctctcttttttttacctcgcgggagatgtggaacagaacagagccagaacagcagctcgagcacaggacaggatcggaggagacgccaagccggggagcagagcacacgcacgcggtttgacgggcgggccggaggaatggacggaacgagaggctgcgacggggggagttggagagataagcttcggagactctaacgcgcgcgtctcggtttcgctctgattttcgctcgtttgatggtttttctcggctcggtctctctatctatcgcactctcccactgacttctcctttggccg

SEQ ID NO: 26928 - DNA, 1264 bp, Setaria italica
  Peptide Sequence Number=SeqID_92902
aaggggatggcggccacggcgacggcggcgcgcccgacgacaaccgcggggaggcgctgttcgtgctggcgcagctggggaggaagctcgagagcctgccgtccgatctcgcagccgccgtcgacgccggccgcgtcacgggggacatcgtgcgccgcttcaacgacctcgaggcctccgcgctcttccgctggctgctccagttcaggggattcagggagccgcctcctcgccgacgacctcttcttcgcaaagctcgccatggagttgggcgtcggggtcatcgccaagactgcggcagagtacgagaagaggagagagaatttcgtcaaagagattgatattgtcatagctgatgtgatcatggcgatagtcgcggatttcatgcttgtctatcttcctgctccaactgtatctttgcagccgccacttgcaaggaatgctggagctattgccaactttttccataactgcccagataatgctttccaaattgctttggctggaaggtcattctcacttctgcagaggctaggagctattctgaggaatggtgcaaagcttttcgcagtgggaactagtgcttctctgattggcactggtgtcaccaatgcactgatcaaggcaaggaaggctgttgacaaggacctcgagggcgaagtcgaggatattccagttgtatcgactagtgtcgcctatggtgtatacatggcaatttctagtaatctcaggtatcagattctggctggtgtgatcgaacagaggatgctggagccgctgctgcataaccagaagctactactgagcgcaatgtgcttcgccgttcggacaggcaacacattcctgggctctttgctctgggttgactatgccagattggtgggcgtccaaaaggttcaagaggcctaaagctgtagcatcttgtttgcatgttcttctgttgcatgttcttctgttgcatgttcttctgtttgcatgttcttctgttgcatgaaatattctaaatgctgttcccttcattggaagcctataggataaatttcaattttgtttggaaagccggaagtagagagatctgtcgaattcttgtgagcaacgtcgttgtaccttgatttttaattccaagcctgcaacttgcaagggctgtcaatttgggaaatatataatactgagcattccatgatactgccaatgagttttggccttaggaaccttcacttgtcctgttccatccgtatgtactattttagccctctttttattt

SEQ ID NO: 26929 - DNA, 429 bp, Setaria italica
  Peptide Sequence Number=SeqID_92903
attaggctctggataacgccacctttcgcaaaaaaaacaaatggatactacttgccacattttttatgtttgtagttcaagaaccccttacctagataacctgcaggattggatgcagccctctcaaaaaaaggaggggggtgtttcttttccatccatcaacatctgaagaaatcttgttgtgtatgctattgggtaagaaagcacagtttgtacaatagcgtttttttccatcactgtagttcgctcaacctaagtctctttgttcagactgtcagcttattatcaacaattagtagttttcagctaaattgatatctgtaccttggaaataaaataattaatatcacggcttatatttcatcattataatacttcctaaattcgtcaagaaggtattttgcaaactatgcatcgacaaggtactct

SEQ ID NO: 26930 - DNA, 470 bp, Setaria italica
  Peptide Sequence Number=SeqID_92904
ctttgggggtataaatgtgggaagcttctctcctctcttttgcttaagaagcttttcacctagcttttcatggccaccaatttgatcgacccactccaagacagcccgatcatatgtcctggatctcaaagctccataaaaatccagagcttggtttggaaatgtatctacaattcttgatacttcctcaatagatatcccgtcctttgtatacatgccatgaacaatattaattatatcttcacgatcaggctgccagtagaatttttccattctcccatcacgaatcaagggggcatatagagttgaaaaatcgtttccagttactattataggaactctgtttgtaatatcattttctctccatttctggccagtgctcactctggtaggattatctgccaggttcatcaaagttccagcaacaatttgattattgactgtcatctgtgtgtttccaaatcttcaac

SEQ ID NO: 26931 - DNA, 457 bp, Setaria italica
  Peptide Sequence Number=SeqID_92905
aggtcagccgggatggaaatcttggccatccaacaattagaattgggggtatgaatggtggcatggtgaagccaaagcgtagccccaagtgggtactaattggtgctgctgctggtttggtgatttttatctcaattgctggtgctgtttatttctgcttttatctgcgacggaagaataatattccagctaacatgaccaaggacaaccctccggctacaccaatggctactaatgctcgtgcctccccgactcttcgcacaactggaacatttggtagctgcaggatgggcaggcaattcagtattgcagaaatcaaagcagccaccatgaactttgatgaatctttggtgattggaattggaggttttggcaaagtctacaagggtgaaactgaaaatggcaccccagtggcaattaagaggggcatgcacaatctcagcagggtgtgaaggaa

SEQ ID NO: 26932 - DNA, 1486 bp, Setaria italica
  Peptide Sequence Number=SeqID_92906
tctctgtggccctggtactacaaagccttttcctggggctcctcctttttctccaccccctccattcaatcccccaacaccaacttcaccaaaaggtgcatctagcactggagcaattgctggaggtgctgcggctggtgctgcattgctgtttgctatacctgccattgcatttgcattgtggcggaggcgtaagcctgaagagcatttctttgatgtccctgctgaggaggatccagaggttcaccttggacaacttaagaggttctcactcagagagcttcaagttgctacagatagtttcagcaataagaacgtcctaggaaggggtggtttcggaaaggtgtacaaagggagactgacggatggttcattggtagcggtgaagagattaaaggaggaacgcacaccgggaggagagctccagttccaaacagaagttgaactgattagtatggcggtgcacaggaatctgcttcggctccgtggattctgcatgacacctacagagcggctgctagtctatccatacatggcgaatggaagcgtcgcgtcgcgccttcgagaacgcgggccaaatgatccgcctcttgaatgggaaacaagggctaggatcgcactgggatccgccagaggtctctcttacctgcacgaccactgtgatcccaagatcattcaccgcgacgtgaaggccgccaacatcctgttggatgagagcttcgaggcggtcgtgggagactttggcctcgccaagctcatggactacaaggacacccacgtgaccacggctgtccgcgggacgatcgggcacatcgcgcccgagtacctctccaccggaaagtcctctgagaagactgacgttttcggctacgggatcatgctcctggagctcatcaccggtcagagggccttcgatctcgctcgtctcgcgaacgacgatgacgtcatgctgcttgactgggtgaagggcctgctgaaggagcggaagctggagcagctggtggacccggacctgcagggggggtacgaggagcatgaggtggaggcgctgatccaggtggcgctgctgtgcacgcaggggtccccgatggagcggcccaagatgtcggaggtggtgcggatgctggagggcgacgggctcgcggagcgttgggaggaatggcagaaggtggaggtgatccggcaggaggctgagcgcgccccgcgccagcacaacgactggatcgtcgactccacctacaacctcaacgccgtcgagctgtccggcccgaggtgaaaccaatcgggctctctctgtatgtgatcgtcgtcgctagttgagcgagcgtgtcgccgcgagaaaattcgttctcgcctgtgcatatgacaggtagtagtcgtttggttcatgatagctgagaaattgtaggtgaaatggtttgcacctgaccgcagtaagttttttttaattcgttagagaatatgaacagtataaacaaaaaaaaaa

SEQ ID NO: 26933 - DNA, 436 bp, Setaria italica
  misc_feature (423)..(423): n is a, c, g, or t
  Peptide Sequence Number=SeqID_92907
ggtggtttcttggggatgaggaggaggaggtggaggagtggcggagaggggaggatggcggggaggaggcgaaggggtggtggtggcggagcaggtgctgcttggccggcgagtgcggccggcggatcgacgccattaatgcctgctagattaagcttgtcttggtccctggcaagaagaaggggccaaattaatgcccgcctcctcctcttggctcgggtgaggattgaattgaggggaagagcagaggaggttgggttgggagatgctggcctggaagggaagggaagggaggggaggggatcagcaacaagtagtagctctcaggaagggagaaagaggaataatcatggcgcgaatgacggggatgttgaagtcagcaggagttggctgcggcaggcccgaatcagacggaggtggtanagagagagagaga

SEQ ID NO: 26934 - DNA, 191 bp, Setaria italica
  Peptide Sequence Number=SeqID_92908
gcgcgcggcggcgcgcggggagtggcagtggcggcggcggtgggggcttcggtgacagcttgccggggcgcaggtccaggagccccgccgccagcggcagctccgccatggctcacctcgagtcctcgctttcctctcgctagagagagagagagagatttgaattgaactgtgagcgaggtggagaggag

SEQ ID NO: 26935 - DNA, 687 bp, Setaria italica
  Peptide Sequence Number=SeqID_92909
atcgccttttcaaggatgctggatggaccattaagccccgcaaaaggaatgacagggctaagatggcatcttacttcactgccccaaacagggaagcggttcatacctcgctaactcaggcttggaagttttgtggtaacaagttatatgaagcttccgcagattcagaaaggggaaggtatccaaaggagtggtctgatgttgacgcattttggaaggacctcacggatacaatggcctatgttgatagaatgcttgcaaaccagcacaatgcactcacacttcttcagcgctggcagattttggacccttttgtagctgttgtcttcatcagtaggaaaatcactgccctgcagcaacataaaactcttagagctgtcaacagttcaacctttgttcttgatggcagcacagatatgtcatcagaaagtaagaccatgcacaaagccggtgatttgttggcaaaccgaatgattcagcccactccactaatcacagactctgattgcagcacgcttgcaactgagagctacaatgggcaccagtatttacagagctgtcatgatgtggaagacagcaacaatagggatatgaatccgaagctttgctgcaacgagagtctgaattacgatgcaagtggccaaacagaacatcacattcacacaggtgatgatggaaggcagacct

SEQ ID NO: 26936 - DNA, 565 bp, Setaria italica
  Peptide Sequence Number=SeqID_92910
agggaaataagaatacggaaatagacgggttacgaccgaccaagaatcggagtgcgggtacgtggccagatcggagtacggcgggacggcaccctcggagtacgccgccgtaccattgtctctgaggagggatgagaggtcggaggctggcgactcctcctccacggtcacggcggcgaccgagatgcggatggtggtgcgacatcgcactctcgccgaaatcgtggcggccattgaggaatacttcgtcagggcggcggacgccggcaacgatgtgtccgagctccttgaggccagccgcgcacagctcgaccgcaacttcaggcagctcaaaaagacggtgtaccactccaacagtgtgctatccgcattgtcatcaacatggacgtcaaagccaccattggctgtacgatacaagttggacaccaatgcgctggagatggagtcgacggaagggaagagccatggatccactctggaacgtcttttggcttgggagaagaagctctacgaggaggtcaaggcaagggagagtgtgaagattgagcatgagaaaaaagctatc

SEQ ID NO: 26937 - DNA, 395 bp, Setaria italica
  Peptide Sequence Number=SeqID_92911
ctcaagtttgccttgtcctctcatcacagagtagaaagaagttcctgaaagccacaagaccaaaacaccaaccaccaacaccaagaaccaaaccgagaggaggaagcagctccgaggtcggcccgaaacatatcaccttcatctgcatgagaagatgatccctttcataaagatgaaacactccctccactagaccctccggaacacaaggagttcaccgaagccaccaatgggtctgcaacacggcggcggagctcggcgggccggcaccggcggcggcaaggcggagtcggagcagaggaagctgcggcgagtcaggctccccttctggtcctgccctccaaaccggcctccaggcacctgagaggctcagctggccggtctcttgtctcccc

SEQ ID NO: 26938 - DNA, 511 bp, Setaria italica
  Peptide Sequence Number=SeqID_92912
ccacatatgtgaactaaggacatcactctccaaaaatattttacatcacactacagtgtcaatggaaagaactgccagggtcaatgcagcagctcctctatcattgttcagcagaaatgaagaaggtaaatgctgttatacaaccatataatggaggtacccttcaaaagaatgttgttcaacataataataatttagagatcaggagggagggagggaggcaccagctgttgtgcagcaatactcaatggaagcagttgtcggatcagatgccgcgtgaatacttgcaatctttatattcttgtcaacagcatcaatagcagtaactgtagctcccatccgagcaagaggctgccatccagcaccaagatacgtatatgttattattcttttccagatccatcaaaaataagggcagaagaaatgcctcttacagtgcaatattctactggaaacacccaaaagggattattgcatcacttttgaacaaatctagttatcatatattatg

SEQ ID NO: 26939 - DNA, 583 bp, Setaria italica
  Peptide Sequence Number=SeqID_92913
atggattacaaacttgtcctgccctctcttcgacagaaacagaagccttttgcagcattagggcaagctccttaggggtcactagtttggaccactcatgtgtgcctttaggaagccatctgaggatatactcagcagcaactattgcggtggcatatgctctcattgaccggttgattgtggaaaccacagtggcaccattaggaactgtcaaagccgagagagactcgcagaactctaaaggattagcgacatgctcaatcacctcaagagaaattacagcatcaaacagccttttctcttttaccagttcctcagctgttgtgcagcaatactcaatggaagcagttgtcggatcagatgccgcgtgaatacttgcaatctttatattcttgtcaacagcatcaatagcagtaactgtagctcccatccgagcaagaggctctgacagaatgccacctccacatccaacatcaataactttgagaccttcgagtggcttagatgaatatgaatccctcctgaaatgcctacaaaagtgtggagcggataaaaagacagtcgggttggattcatcaaatgc

SEQ ID NO: 26940 - DNA, 558 bp, Setaria italica
  Peptide Sequence Number=SeqID_92914
agaatagaattctgatacaaacccagaaccagcaggtttgatgattctccagcatgattttttttaaccattccagtcattcgaatgcaaccgtctagttgttttgtatgaaaactcataatttcattttttacacataataatttatactttttgctcttctggacttccctcctctacattctccagtagttgtgatattttgtctgctatcagtaggtagcatcatgatatagcttctgttacttacagttcagcttgctaagcataaaaaaaatctggcctgtgttagtatctcataatgtaactcttttttcttttaatgtggatacttgttagctgcccatgtaacaacggggtattgttggtatggctgatatcgtccacacggttcacttagcatgttagcacttcatggtattgcaatcgcagatgtttttcagtgggctgaatttgaaactaaaatttgatacctccaaaaagtcttggttgggattgttcggttgttccactggaagttgaatagcacgagcatattcacataaccattttgtgtcg

SEQ ID NO: 26941 - DNA, 240 bp, Setaria italica
  Peptide Sequence Number=SeqID_92915
gctggtggtagttctgaaagcaattgtgactatgatactagccaatcccatcatgaagttcacctccggaatgtacacttgcccctcgtacttttttgaggtgtgaatcactcggaccctagggaagcagccaagagagattgccttggagaggatggaaaatgcgccagagagcattgcttggcttgcaatgatcgctgcgagaatggcaacaacggaaggttggccagaacatgatcc

SEQ ID NO: 26942 - DNA, 237 bp, Setaria italica
  Peptide Sequence Number=SeqID_92916
cgttgtgcttctagagctggtcacaggaaaaccggccatcgtgcgtgacccagagcccaccaacataatcgattgggcgcgccggcgcctggcacgcggcaacattgagggcgtcgtggacgcacgcatgcatggcaactacgacgtcaatagcgtgtggaaggtcacggacatcgcgctcaagtgcaccatgcaggcgtcctcgcagcggccttccatgaccgaagtggtagggca

SEQ ID NO: 26943 - DNA, 701 bp, Setaria italica
  Peptide Sequence Number=SeqID_92917
tctgcttcaataaagtaacaaaaaatagaagggtttgcagaagaaaacaaaagcaagacagaatctatgttgatccttgttttgctgtccatcaaagagttggaacttgtgtgtgcacattcatcaaaacacatcaaccagtttttcacagttaaggatccttcagtagatttaggcattgcctgggcgtccatgcgtgcccctaacaacacaggatgccacaaggtcttagttatgccttgtcacctagtgggtgagtggtttcctgcatctaatcgagacaggcccatcggatgcagcatccgcaagtttggttacctgaacaatggtgtaagcctgtccctgcggaagcaaaaggtgcctcagagcctggttccgcagaaacgaaatttcgtttcgtttctcacggacctggctcgctcgatgcaagggcgcgcatgcggaggttgtgtccgtgactggtagtgacagaattcaacgtaaccaaacataatctctgcagcacctggcccaatataaccagcaaaccaatctcgcatagggtgcacacaccaaaccaggctttggctggcctgtctctgatgttcagccaggcccgagacaccttgggtaccaatcacgcccctaggagatcaggcatgcccccaacaccccaggatgacacaaagcctaaaaaacatggctgggcatgcacagaaggg

SEQ ID NO: 26944 - DNA, 400 bp, Setaria italica
  Peptide Sequence Number=SeqID_92918
ggcgggagtgatactgagggcgttgtttgctgctcgggaacgggggcgtcctcgtaggaagcgagcgggaacgtcggcgatcctgtcgatgcgaggcgagttcacggagacgtcaggggactccagctgctccaggatgctgatgctgctgcgcttgggggtctcgaagaccggcagaggaagcgacgccctgcgggcaagtcgagcgctcctgttgtcaactggtgttgttgaaaactgctcaatatgacttgtcctatcataggatgcttgcggagcttctagccggttcttcagagttgtcatcatcttccatggagttgtctttggggtcctcatgatactcgaggtccttgatgctacggttttacagtaacctcctcaacctgactgtcatcaa

SEQ ID NO: 26945 - DNA, 605 bp, Setaria italica
  Peptide Sequence Number=SeqID_92919
gtccaccgtgcttgagatccatgtccgggtccggcgcctctccgaccgtgcccgtgatcgtgaccgcggtgcataagctggcggcctatgggaacttcgagggcgcccgccgcctgatcgacaaaatgccggatttcgggtgcgtgcccaatgtcgttgtttacaccgcgttgctcgatgggatgtgcagtttcgggaacgtcgatggcgcggtgaagctgattgaggagatggaggggtagtgggttgggtccgaattgtgcacccaacgtggtgacctatacatgtttggtgaagtgcctctgtggggaagggagggtggcggaggcgcttggcgtgccggataggatgtcagatagaggggtgatgccgaaccgggtctttgtgcggacactggtcgaaggggtttgcacggagcggagggtggctgacgcatatgatgtggttgagcgtgtggttggtgatgggggtgtgtcgagcgggcagtgctacaatgttctactcatttgcttgtggagggttggcatggcagctgaagctgaaggactggcgcaaaggatgatgaagaaaggggtgcagttgaccccgctttgtcttggtctagt

SEQ ID NO: 26946 - DNA, 239 bp, Setaria italica
  Peptide Sequence Number=SeqID_92920
gtttgcttctccaccccacctccttgccaagaaaactaacgcctaagcatcagcacacaggaggcaggtagtagcctatcactagcaggcgcctagctgctggccaatggcaaacttctcgcacctctcccaccagcacatggagcatggcctcgccaacgcctcccacggcacgccgagcttcttgttctgccatgggacggccccggcagactcatcctcgctggagacctcatctt

SEQ ID NO: 26947 - DNA, 266 bp, Setaria italica
  Peptide Sequence Number=SeqID_92921
cgctcctcgctattcctcgcgcgccgcggcttcccggagcggagccggctgccgcgacggtggccggcgagaggggggtttcggtcggagtcggatctcgttggaatgggaaggaggcgtcggctagactctgccggtggcgtctcccccaccgggaacccctgccgcggtgttgcgctcgctcttcgtgggccgggctgtattttaagcctaatggacagcggttaagtaactgcaactttgcaaggcctttttgcgtgcccgtg

SEQ ID NO: 26948 - DNA, 193 bp, Setaria italica
  Peptide Sequence Number=SeqID_92922
ccccgttcctcctcgaccgaacaacccttctcgaagcttcggctccctgcctccgtcccttccccttcctggggacacgaaacgagaagcgcgtgcgccctgcgctgctgctgccgccgccgccgccgcttgtctcgatttccttccccactggccgtccggctcgctttgctgctggtggtctctcttcggg

SEQ ID NO: 26949 - DNA, 235 bp, Setaria italica
  Peptide Sequence Number=SeqID_92923
ccattgacattgccctctggaagttcgagaccaccaagtactactgcaccgtgatcgacgctcccggacaccgcgacttcatcaagaacatgatcaccggcacctcccaggctgactgtgccgtgctcatcatcgactccaccaccggtggctttgaggccggtatctccaaggatggccaaacccgtgagcacgccctccttgccttcactcttggtgtcaggcagatgatctg

SEQ ID NO: 26950 - DNA, 243 bp, Setaria italica
  Peptide Sequence Number=SeqID_92924
gcggcggcgcgctccagctgctcgccgcagacgagcggagcgggccacagcagcgatgaagacagcgcgtccgtgccgtacctcggcggcatcgatctcaacctgtccttaagccctcccagccaaccgtcctcgccggtcgccgccgttgccaactagcacctataggcatagtaggcaagaagcggcacgataagatgagagcctgaggcactcctagtctcctagacggagaggatttcg

SEQ ID NO: 26951 - DNA, 386 bp, Setaria italica
  Peptide Sequence Number=SeqID_92925
cagcgagcattttacgggacacgatattagattatactagtgttcgaaaataactagtataaaatatccgatggtcaagattaattgtatattattaaaaacttcaccttcacctgtagtatattagcatataagaacacaaatgacatcactatgatattttttgacactggtataaagtttacaagatcattctatttggaatctcacttttacaacgtacctcctcaatttcaaattataagtcgttttggcttttctagattcatagatattacatgcacatagcatagtaaaaactatgcacataagaaggctaaaacaacctacaatttgaaacggagggagtaataattattaaattacccaaaggttaaatcttctct

SEQ ID NO: 26952 - DNA, 1324 bp, Setaria italica
  Peptide Sequence Number=SeqID_92926
gtcctttggtctagttcttctttagtttttttttttttgttttttttttttagtcaagggtatcattagtatataataatataatgattggctaatatataattctcctcattaatatttttatcatacaaaactcaaattataaacaagagagaaatcatggcatattgtgcattttgacatatttcatccattcatgagaaacaaaagaaagctatttttactaaacgttttttcaaaacgactttagctctatcagagaagctgcatgtgtaggcctggagccatgaacatatgcatacgtcacaatttacaagcagtgcacgtaagcacgtcataatttacaagccaggccacggagctagagacattcttcgattacttaggagtttaggacttgggagtggcgaaaatggaagaaacaacattagcccaacgtaatccacaaatctgccgggtcaccgtcaaagccccgcatctggccctgcagaaactttgttttttatagcacgcagatcaactaggtggcgcatcgttggcctcccatgtgggcagttccatggggaccttaatcctgttagatttttaagtatctttctcatctcggcttttgtcagtggatcgccaatcataatagacattcggcaagcccttgaagccaacatagcacgaaccctcgaagggcaaacagaatcagttttatccagcttgtagctactgattatcgaacagtctccttgactatcagcaagcatggagatcagctcctttacatcttgaacaccaaatgtaatatttttgctgaaaggcaccgctttcaaaagataatggttaccaggggaagcatgcaaatcttcttccaaaacaaagccatttgttctgatagtgttcatgttcatagaaactattacttcttcctccggtgatagatcaagcctcagtggcctgcatttgaatataatcacaaatacccaacagaaagaggtatatcgcaaatggcacacataaatacaatgctacaaattatggatccatacttggaaacactcaaacatcacagagttattgagcgagttcaatgtatagaaatagcaggtgaaaacgatgggttcgcttactcactggagaagaggctgtatgttcaaagttgttgattgcgaaaggccctcgaagttgtacttctcatcagcagcatgctgatctacaataaacagatcctggtccagctttccaatgataaaaccaagattaaattgcccaacaacctccagatgacatagttcatctttactgaaaagcctgtccaattcattggtagctgcag

SEQ ID NO: 26953 - DNA, 214 bp, Setaria italica
  Peptide Sequence Number=SeqID_92927
tgagcttgaagaagtatagtgctcatctaagtttctatatatgaacataaacattgaaatactattgaaaagttaagcataacgctagtcttgttaagcatgcatggcaatacagccttcgacatggcaagaaagtagcatgaaaaattacatccgtcagaaatttggggctaatttctttttcatgaatcttcatgttccaaggtcagcggtg

SEQ ID NO: 26954 - DNA, 374 bp, Setaria italica
  Peptide Sequence Number=SeqID_92928
atgctcctgaacaccttgtcactcccggcttccatgttggcgatgcattcgtcgagtccttccaacctgtcgagcgccgccatctccttgtcctcgtcggaggaggcagcagccgccttgctgctcctcgtgaccagagagatgaggctcgctggcttcttggacgaagacgcgacggcggtggtcgcggccgacgagacggactcgacggccgagaacacggcagcggaggccgacgcgatggcggccacggcctcggcgagcacgccggagacctcgacctcggcgagggtggcggaggatccggcgagctgcgggaacttggcggcgttgcgcacggaggaggcgaggcgggcgaggtccttctcggcgtg

SEQ ID NO: 26955 - DNA, 1161 bp, Setaria italica
  Peptide Sequence Number=SeqID_92929
tgtgctgtcatcgggaatagcgattcaacatccttcagggtcaaaacaggctcatctttgaaatttttggatttccggtttatagtagagcagacagctctgctcctgttcaatttgtagatgctctcttctattgttttcttcactataaaacggtgaacaaatgtgctcttgtcttgcccaactctatggatcctgctgatagcctgtgcctcagccgcagggtttagtaatggttccactagaataacatgctgtgcttccagtagattaagaccatttgctccatgttgtataagcatcagcagtacttgaacaggctgcattttggagactgtccttttcgctttatctacacttatattgctcaactgacctttgaattgggagagagctgcctgtgatttttcttccacctttcatgcgaacatatgaaattttgttagcagcaagggagtgctctaaaacatcgagtacatcattccaacttgagaaaacaagaactttagctactccatcagttgaagtgatcctcaatattcttcttgtgacagcttcaatctttgttccatatgaaccttggacagaaatagtgctttcttgatcttctgtgcttttttcagctttgtcactgtgtttctcaactacaaaagcaacattctcaagatctgtacgttgacggcatgtagggcacatgatccattttttagccttcccaaattgtgttgcagcttgttctgtcatgtaaagacagcacttgcagcatacaaaatgaccacactggaataccattttctggtcaaaaaccttctcctggcatattgggcatggttcattattaatatcagaaatggtttgccctgtgacagaacatggagtagctgtatcaacagcaccacttgtaggcaatgattcgccatgcttgttaagtgttttcttgttgcacagcgccaatccctttaaaataccggagttgaccccttacacgggctaaagatgagagcgacatgaatttttcacttgtgaactggacactatatggtatgagttcctctctagttacaatattgacagcgctaggttcaccatctttctctttgagctgcattcttgagatagacatcttgatctcgtcatgagcacgcaataattgattttgag

SEQ ID NO: 26956 - DNA, 587 bp, Setaria italica
  Peptide Sequence Number=SeqID_92930
tctccgactcagtcgcactagtggccttcccaaattgtgttgcagcttgttacttgcagcatacaaaatgaccacactggaataccattttctggtcaaaaaccttctcctggcatattgggcatggttcattattaatatcagaaatggtttgccctgtgacagaacatggagtagctgtatcaacagcaccacttgtaggcaatgattcgccatgcttgttaagtgttttcttgttgcacagcgccaatccctttaaataccggagttgaccccttacacgggctaaagatgagagcgacatgaatttttcacttgtgaactggacactatatggtatgagttcctctctagttacaatattgacagcgctaggttcaccatctttctctttgagctgcattcttgagatagacatcttgatctcgtcatgagcacgcaataattgattttgagcaattgacaaaaaccttgcttgagaaaactccttgcgcatatcctcaaaaagaagtaaatgctttttagcaattgtaggatattgccttccaatactgtctttgaatgatttcggataaccctcaatgtgg

SEQ ID NO: 26957 - DNA, 220 bp, Setaria italica
  Peptide Sequence Number=SeqID_92931
cacatgcatgtatccaaccgcatcgcccgttcttgctcggtgccatcagccgcagtggcctggcggcaggaacgggagctcgcagccgccgcgtcaggcctccctctgctccacagcctcctgagcgagctcagcctcgccaagccctgcgccttcgccgcgccaccttcacgcggcgtcggcgccacagccggtgccgtctcccggtcccggacctcga

SEQ ID NO: 26958 - DNA, 512 bp, Setaria italica
  Peptide Sequence Number=SeqID_92932
ggcgtggacaacctcgtggtctcgtggcacggcatctcgctggaggccctgcactcgggcatcttccaggacctggcccgcggcgaggacgagcccatgtcgccggcgctgaaccagagcctgggccagtccgtgttccgcgtgctctccgaggtgcgcttcttccggagctacgcgcaccaggtggccatcagcgactcgacgggggagatgctgcgggacgtgtaccagatcccgtcccggcgcgtgcacgtcatcctcaacggcgtggacgaggcggtgttcgaaccggaccccgcgctggggcgcgcgttccgggaggaggccggggtgcccaggggcgccgacctggtgctgggcgtgtcggggcggctggtcaaggacaagggccaccgctgctgtacgaggccttctccaagctggtgctgcgccaccccaacgtgtacctgctcattgccggcaaggggccctgggagaaccggtacatggacctgggccggaacgccaaggtg

SEQ ID NO: 26959 - DNA, 558 bp, Setaria italica
  Peptide Sequence Number=SeqID_92933
agcattgctcgttgaaacatgagctggagcaatctctgacagaaactcttgcgcaacctcaaacaaattgaaaatcataacacgcccttctcgggaataaatgtttgcctgatcaacaagaagtgaaagtagctgatttgcatcttctttagactaagtttttttcaggtatgatccgcaacttcggacacttgtgagggtaaccaggaaagcatgttacatcaagaatagctgaaacatttagatcttcaaagcccatgccatcagaataaggcctgatacatatgttaaatcgggtctgtggtgattctgattttactttgaagtcctccccaaaaattgaagtcagggcggtgagctcctcgtcgagggcggtctggtcgccctcgagctgcccggcgtggtccttggccgccttgcgcccggccgcgccccgcttcttcttcttcctcgagctgtgccccatcgatcaagccagccggagagcgagcgcgagcggcgcgggcgggcgtcaccctcgccgccggagcaaacgggctgcggtgcggcggaaggcga

SEQ ID NO: 26960 - DNA, 263 bp, Setaria italica
  Peptide Sequence Number=SeqID_92934
gcagcaccatccagtgcatcatcacaagctcttctccaacacaaagctacttccaaattaataggccaccgcctcctcctcatctttgatcgtttaagtcttagtgctttcagttctatcccccttgcccattgcgatggagtgcgagaacggccgcgttgccgccgccaacggcgatggcctgtgcatggcgacgccgcgcgccgacccgcttaactgggggaaggccgcggaggagctcatgggcagccacctcgacgagg

SEQ ID NO: 26961 - DNA, 374 bp, Setaria italica
  Peptide Sequence Number=SeqID_92935
accggtcagcgaggctcggccccgtgggcgtgatcgataccaccgggcggtggtggtggtggtggtcgtcggcggcgaggccctcccactcccacggggacggcgccgccaggcccaggaacaccagcgccgcgcgcaccagccccgccaggatcgccaccgacaccgccgtgttgtagaggacgaaccccatcaggctgtccttgggcgccggcatgctcgagatgcccatactcgccggccgatccgtcgggctcccgcgatgaattcccgaatccctcgctgggttgcggatttgggggtggacgccagggacctgattgcaatttgggagtttttcggggaggtgggtgcgatgcgggaggagaagattg

SEQ ID NO: 26962 - DNA, 482 bp, Setaria italica
  Peptide Sequence Number=SeqID_92936
tcattagctctgtcacgggatttagtactactagctcttttggtccgcttcagcgtgggtcatggtgtactccaccaagactactccttgaagatcagtatgtctctcatccggacatgccacagaattctgtgggcaagaaggcgaaggaagatgaagcaaccaaaagaaaatctcctgtaaaaatcagtccctggacactggctcgccttaacgctgaggaagtctcaaaggctgctgcagaggccaaaaagaaatccaaagttcttcagccaatcacaagacgtgcggaggttgctaagcatgacaagaggagacctgacaaaagtagggtgttcctacctgaacaatctcctgatagccgtgcaaggacatctgcgagtggaactgatagcaactatagcgatgtggccatggtaacacctggtagtttggccccattgcagcatgaagcaaggagtgccttcaaccaagcattgcat

SEQ ID NO: 26963 - DNA, 2945 bp, Setaria italica
  Peptide Sequence Number=SeqID_92937
ggggtttggctgtttaaaaattctaaaaacctggacgccctgccatactatagaagaaagtactttacttttggccgggagaatcgaaaagatttcaagttttatggcattgctttagagatatttttctccttcctcagttccgtgataatctttcagataatgataccgatatctctgtacatcacaatggagttagtcagggtggggcaatcatacttcatgattggagatacacgcatgtatgacagtaattcaggctcaagatttcagtgtcgatccttgaatatcaacgaggacctgggccaaatacgatacatattttctgacaaaacaggcaccttgacacaaaacaagatggaatttcagcaagctagcatctacgggaagaactatggcagttctttgcaagtcactagtgacttttcacatgaaataagcactacagagtcattgagacaaagtggcaggaagcccaaaatcaatgttgattcggcactgatggcgcttctgaatcaaccattgattggggaagaaaggcttgctgctcatgactttttccttactctggctgcatgcaacacagtaatccctgtcagcacagagacttctcacgacttgacgaacgaagtggatgagataggtgcaattgattatcagggagagtcacctgatgagcaggctttagtaactgcagcttctgcttacgggtatactcttgtggaaagaacaaccggtcacattgttatagatgttttgggggagaggttaaggttggatgttcttggtctccatgaatttgacagtgtgagaaaaaggatgtctgttgttgtaaggtttccggacaacaatgtaaaagttcttgtgaaaggtgctgatacatcaatgttgagcattttgaaagtagagattggtgatgggctttatgattcattgcatgccaaaatcatagaagctacaaaaaatcatttgtcaggatattcatcagagggtctacgaaccttagtgattggttcaaaaaaacctaacggatgcagaattcattgaatggcaggaaagctatgaagaagctagtacctccatgcatgagagatcagcaaagctccgtcagacagcaggtctagtagagtgcaatctgactcttcttggtgcaaccggaattgaagataagttgcaggatggtgttcctgaggccattgagtccctccggcaggctggaatcaaggtgtgggttcttacaggcgataaacaagaaactgctatatcaattggtttgtcatgtcggctgttgactccaagcatgcattcaattatcataaatggttcctcagagtttgagtgcaagcatcttctagctgatgctaaagccagatttggaataaagtcggctgattttcgaagggattcacaaggtgcagaagatttgtacaatggtgatatttctaaattgaggtcctcaaacggccacatgtctgaaagtgctactccaaactttgaattaactggagtcattgctggtgacaagtcagagtacagcgagaaagtgacaaattttgatggcactgagctagcactgataattgatgggagctcccttgtttatattctagagaaagatcttgaatctgagttatttgacttggcaacttcatgtaaagtcgtcatttgctgccgtgttgctcctctgcaaaaggctggcattgttgatttgattaaaagcagaacgagtgacatgaccctagcgattggtgatggggcaaatgatgtttcaatgatacagatggcagatgttggtgttggtatatgcggtcaagaaggccgtcaggcagtgatggcttcagactttgctatgggacagttccgctttctgaagagattacttcttgtacatgggcactggaattatcagcgcatcgcttacatgatcctctacaacttctatcggaatgctgtttttgtgttaatgcttttctggtatatcttatatacagcttattctgcaactctggcattaacagattggagtagtgttttctattcccttatatacacctcagttccaactgtagtagttggcattctggacaaggacttgagtcataatacccttctatattaccctagactatatgaagcagggcttcgaaatgagggctacaacctgacactcttctggatcacaatggtagataccttgtggcagagccttgtccttttctatgttcctttcttcacatacaatatcagtacaatggacatatggagtatgggaagtttgtggacaattgccgtggttataattgtcaatattcatctggccatggacattcgacgttgggtgcttattacccatcttgctgtgtggggttctatagctgctacgtttttgtgcatggtgttaatagactcaataccaattttccccaactacgggacaatatacaacatggctgcttcaaggacttactggcttagtgtttgtcttataatagtccttgggttacttcctcggttcctttgcaaagtaatatatcagaccttttggccatcagatattcaaatagcaagagaagctgagcttctaaaaaagctgcctcagccattaggttcaaggcctgaaagtgacatcagctaacaacagtttcacatggttattttgtcaatcatctttgaggctgtgttgattcatttgttgagctgatttttgtcgaagttttgattatacgcagaggaattggtaaggtgtacaaatttgggtcgcggaagagacttaaagatgcgacggaacagctgacaaagggaactgactgtaatggtagtgacaacaacggcttgggccttcgggggctagtaatcaatcaaatgacaaatgtacagatatgggagaaacgatacatacactctgtatttttaaggttagtaggtttgtggtagtttgtgcttta

SEQ ID NO: 26964 - DNA, 1086 bp, Setaria italica
  Peptide Sequence Number=SeqID_92938
gctcgtctcccggggctccctctcctctcaccgtgaccaacaccagctgctcgaggataggagccctcttcagcaagtacgcgacgagccgccgctcgcgccatgtccccctgaaattcacaaccttgatgaaagtcagctggccgaggacgatctcgtgggggccgaatctgatctctgcatcgtcgtcgtcctcgtcgggctccgagctgcttccatttgcaggattgctggcgagacggataaagagccgttcgaggactggaagcgaggtgtagttgaagaaatagtacacgcgctcagggaatcgagggtcctgtgtgctcatttcttcttctagggagcccatcagcagctgcaactcttggaggttgggcatgtcgatatatgcgctatcatcgccgtttaagtgtgcataaggaaaatgatcgaagtgattatcatcatccgagtccagtgaaaaaatcggtaccaccaagccgacggagcagagcgtcaagatccgggcttgcgggacatggtacacgaaggggtagtagtagtcgatgttgcggtccagggaaccgcagcagtccatttgcgacaggtacacgtcccgcagcgccggcgcggcgccgaagtcgacggcgacagagtcgaaccagtcggtgacgctcaggatgacgttgccgtacagggcgaacgactcgagcgcgggcgcggcgacccggagctcgcgcacggaccggcagcccaggagctccaggacccgcagccgttcgctggcgacgctcaccgtggtgaggagggagcagcacctcaggctcagggactcgagcgcgccgcagttggcgagcacgccccggagcgcctcgtcggtgacgtcggcgtggctgagggagagcgagcggaggccggcgagcccggccgccgggagcggaacggcgcggaggctgagccggccgagcgcgagccgctccagcgagttcctggcccggaacaggtcgcgggggagctccaggaacgccgcgcttccggggtcggcgtcctcctgcgacggcgtcaggtccacctccacctccctagcgcccctcgtcacggcggccg

SEQ ID NO: 26965 - DNA, 612 bp, Setaria italica
  Peptide Sequence Number=SeqID_92939
ggaaccaaacgtaacttcatccaggccgtcttggcaggtcaaagaatcagcagcaagaaggatgtcatgtcacgaggccaatcagtcgaggactggaacaaccctccggccgtcgccaagaaagaagcttccgaaagcgaaccccgttggcgattcgacttgcacggcgctttccagagcgcgtcaacgaactaaccatcgggccacatgacatgacatgactcaaaatgctcccccactactctcccatggtccatttcgtgtctcgcacaacttgtgcacgaacacttacaaaacaattaacaattgacacggatcgcaaatgaatttgacacaaaaaaaacgaagtgttgctggtcgatcgatcatggcagctggtggtagaggtcggacggctcgatcccggcggtgacgttgaagtacctgaacgccgccgcccagcggtagttgtccttgagcatgtgcacggcgacggtgtccggccggaagttgtccatgtcccagttgaggtcgtacatccttggcttgaggtcgtaccggttcctccccctcccggcgaggttgagccacttgccgaccatgaggtcctcgggccccagggtgtacgttaga

SEQ ID NO: 26966 - DNA, 376 bp, Setaria italica
  Peptide Sequence Number=SeqID_92940
ttgggctcaggatggtgcagctggttctcgcgaacctgctgcacggcttcacttggaggctccccgacggcgtggtggcggaggagctgagcatggaggagaagttcgggatatccgtgtcgcgcgtggaccatctcaaggccatccctgaggccaagcttccggatcacctctactagtttggaccgtgacctatgcgagcatgctaggttatcggccttgctcctgctattcacattattgtagtgtagagtgcatctatatcgtagatcactgtcactgtagcaagtgtgtgatcatagttatgccaattgtatccatataggatatgaataatttaaatagttatataatgttccaattgtttacaaaaaaa

SEQ ID NO: 26967 - DNA, 346 bp, Setaria italica
  Peptide Sequence Number=SeqID_92941
aaggccaagatactggcaccaacatctgcgatagctagatcaaatccaacaaatagaaggacaagcaaaccgatgagaacaatgaagacaatgcccttgaggatgcggaacacaagttgaaaccttgtaacaaacttctctcttcccattgaaacaacctttagtgacacaagagcgactgctataaccagccatgacagtgcatatatcatgaagcttttgttctcgtgcactatgtgcaagtggtaaacaataccatattgatagatcaagaaccggagggagaggatgaactccaagagcaagctacgtattgttgcattcttcaggtggtcatgttcactca

SEQ ID NO: 26968 - DNA, 266 bp, Setaria italica
  misc_feature (62)..(62): n is a, c, g, or t
  Peptide Sequence Number=SeqID_92942
gcgagctatcaccgtcagccgccaccccagctccgccatggactcgctcctcgccagctacncctcttccgacgacgaagccgacgaggaggaggaaggggaggaggcggacagcggggccacggcggcgtccgcggcggcgagtaggaagggcgccggcggcgcgctctcgtgcatggacggcctcgacgacgcgctccccatcaagaggggcctgtccaacttcttctccggcaagtcgcggtcgttcgcgaacctgcaggacg

SEQ ID NO: 26969 - DNA, 544 bp, Setaria italica
  Peptide Sequence Number=SeqID_92943
ccgcgggtcgcgtccacctcgctcaccgcgctgccgcccttcctcccgccctccgccaccggcaccgacgacggcggcgccggcagtggctgaagaatactcctacatgggaaggatattatatatatacaaatcgaggacgacgacatggtgggtcgatggatcctctgtaatagttcgggatccgatcgatcgtctcgtcgaccatggtggtacgtgctacctgctgtgatcccattggagaaatggagagagttagctagctcctccaacaagctaacccttttgaaggagatgaactaatcaagtgcacagctactactttttggtgctaataatctgttcatttgatgttagtgggttgcatactctagttctaattaaatcaatattcctacttttagcaaggagtaggattattagtacagcacggtagttggcaacaaaattaaaacacactttgtaaccacccctttgtgctgaaagagcaacatgaggccatgcttggttggtgtaattgtacggtaattccttcctctttatc

SEQ ID NO: 26970 - DNA, 1173 bp, Setaria italica
  Peptide Sequence Number=SeqID_92944
ggcgcggggtgacaaaggcggcggttgcgtggggcgccgggcggggctgttcgtgctggagacggtggaggaggccgcggaagaggagaggtcgtccattggcgcggcgtcggaggacgaggaggaggaaggggaggaggcggacagcggggccacggcggcgtccgcggcggcgagtaggaagggcgccggcggcgcgctctcgtgcatggacggcctcgacgacgcgctccccatcaagaggggcctgtccaacttcttctccggcaagtcgcggtcgttcgcgaacctgcaggacgcggcgtcggcggtgagcagcgcccgggacctggcgaagccggagaacccgttcaacaagcggcggcgggtgctccggtgctgctccatccggcgggtcgcgtccacctcgctcaccgcgctgccgcccttcctcccgccctccgccaccggcaccgacgacggcggcgccggcagtggctgaagaatactcctacatgggaaggatattatatatatacaaatcgaggacgacgacatggtgggtcgatggatcctctgtaatagttcgggatccgatcgatcgtctcgtcgaccatggtatacaataccctgtgctaggcgttgatttcttaatttcttttagccaccagcaatcaagcactcggttcttcttcctccgtagcttaattcgcatttacattgacctccagctccaagagaatatgagcaccaagctgctgtgattttatccctaacaggtggtacgtgctacctgctgtgatcccattggagaaatggagagagttagctagctcctccaacaagctaacccttttgaaggagatgaactaatcaagtgcacagctactactttttggtgctaataatctgttcatttgatgttagtgggttgcatactctagttctaattaaatcaatattcctacttttagcaaggagtaggattattagtacagcacggtagttggcaacaaattaaaacacactttgtaaccacccctttgtgctgaaagagcaacatgaggccatgcttggttggtgtaattgtacggtaattccttcctctttatcatctgcttaccttgagggcaacatgctatgtatctctcctttattttagccacttgcagtgaaaatagaatgcttcggaca

SEQ ID NO: 26971 - DNA, 464 bp, Setaria italica
  Peptide Sequence Number=SeqID_92945
cgacgtcgtcgtggacggacgacggcgaggtgctgcagctgctggacaggttccgggaggagctccggcgggtggagaagcaggtggcggagaggaacagggacccgcggctcaagaaccggaggggcccggccaaggtgccgtacacgctgctgttcccggacgtcggcaacgtcggcggcaaggagaaagggatcaccgggaaaggaatacccaacagcgtctccatatgatccgatcggactatacatatatatctacgtacatgtatctatatatgtgatgtgacgaagatttatttcttttggttgtttggcgtttattttgtttgagaggatgtgattactaccattgttggtttaaatgtgagcatattcattgtgtaaagtattgcaacggattggtttggaaacttcgaatttagttgttgaatgggtttcaaaatttatcgtattgatgtagtt

SEQ ID NO: 26972 - DNA, 561 bp, Setaria italica
  Peptide Sequence Number=SeqID_92946
gggtggaggcgtcgcggtggtggggctggacttcgagtcctgcgacgaggcggccgtagacgcggcagtggatcgggcgtggcgctgcttcgccggactggacgccttcgtcaactgctactcctacgaggctgtctgccatggagctcggcaagcacaagataagggtgaatgcagcttgtcgcggtctgcatctgcaggacaagttcccggtctctgtgggtaaggagaaggctgagaaggcaaccgcacaggtaatgcccctgcggagatggttggatccggataaggacctggcatccacggtgctgtacctggtcggggatgaatcccgctacatgacgggcacaacaatatacgtcgatggcgcacagtccatcgtgcggccgcgtatgcgctcctacatgtagccaggcgaggacataatggtagatcaggaacgtgcagaacggcaggatttcttcttcatcgtgaggagccgattgctcatctggatgtatataccatttgtgtagttatgatttgcatagggtggattgattgggtaaccagttatgaagt

SEQ ID NO: 26973 - DNA, 400 bp, Setaria italica
  Peptide Sequence Number=SeqID_92947
aggggctcgctggccgcgacggcggaggaggtgcggcgctgcgggggtggaggcgtcgcggtggtggggctggacttcgagtcctgcgacgaggcggccgtagacgcggcagtggatcgggcgtggcgctgcttcgccggactggacgccttcgtcaactgctactcctacggagggggaggtgcaagattgcctcagcataagtgaagatgagtacaagaagaccatgaaagtaaatgtgactacaccttggtttttaatgaaggcgattgcaaagcggttccgggatacaaaatctggtggatctgttgtgttcttgactcagattattggtgctgagagaggattatatccaggtgctgcagcttatggtacaagcttaggagctgttcaccaattg

SEQ ID NO: 26974 - DNA, 633 bp, Setaria italica
  Peptide Sequence Number=SeqID_92948
gctcttctgggtatgtgagttaacattatacagttcagaaaatgctcaaaggaacagtggtatactgcgttgtatgcaaaccaaatcgttcaaagctactgactacagaaaggttaaagacagacttcatttctttcacaaaagggaggaagacttagcattatgtttgcagtacagtaagaaggttaaacatgaaatggagaagctgataaagttagccaaaacaaaatgtacatgagcaaccaataactgacacagatgcatttgaataaaagtctgacaatcagacgatactacaacaacagcagcatcaaagcctttcagtcccaagcaagttggggtaggctagagttgaaacccaacaggaatcagacgacactgcagaacaataaaaaatcttgactgaatgaggatgcgtttaaatagtcacgtagcttgaaaaaaatgagaaagggtggcagaccttgacccaactatgaaaaccattagacgtaatataaggttgtgtctaataatcagtgagccgggagttgaggactaaactaacaacaggaaggcaaggtgacaaatatcaatcacataaatacaaaaaatactgaaacaagatgtcatatcataacaaatataagcctt

SEQ ID NO: 26975 - DNA, 465 bp, Setaria italica
  Peptide Sequence Number=SeqID_92949
tgaaagagcatcactgagctcggatcttcttttcctcttgtgaaagagatctgcaaacttttcatggtcgtcaaacagcccggagggatgcgccacgagccttcttccgtttcattttgttcatctgtaaacaatcctacaggtaacgacgttacccctacacagctgtctaccttgagattcttaagtaagccaaggttcagcaggagtcgtgacaattgtatacctgtaatgttgcaccaactaaattcgagttcttcaattgatggtggcagaaagagctcaaggtccgtagcaaatattacagtgcacatgaacattctgaactttttcaatgacgtcaactgttggaagccgtcccacgatcgctcttggcgtctcacggtgggataaccccggatttcaagctcttgcaggttcctgagtttgttcaatgcaaaacaaatctttacaatactaagacta

SEQ ID NO: 26976 - DNA, 645 bp, Setaria italica
  Peptide Sequence Number=SeqID_92950
gcggaagcggctcagggcgatctccgagagtgaagatcccctttctatcttgagggattcaagttgttcgggaaatggtggcgcagatgctggagtgaaagaattgaggcaggatggcgctggtgaattatgctcggataatccaaccaatcccgttcccggggagaacttgctgcaagatgattgcaagcttgaccaggacaagttggaacaccatcctgatgttgcaaaaggttgtgatgttgaagctgagctgtgtcaagggagtaaaggatgcggcaatgacaatgcagagaaaacaggatggagcagtggcaatggagagcagcatcacaacgagggttgctattcagatgggagcacattcttcttgaatcgccttgtgggtcatgaaccacacagtggagttacactgcctcaacttcttcatcccgtggagaatttggtgcgagtatttatcgcaacgttcacctcagatatttcctggtttcttgactattgcaagattccacagcacctgcccgtgacagtagcatgccacaacaaggaacgatgctggagtgcgagcagtgaaaatagaatggcagcccctgaagcaagccaccctaacctgctacttaaacccttaaccttaagttaacttta

SEQ ID NO: 26977 - DNA, 226 bp, Setaria italica
  Peptide Sequence Number=SeqID_92951
ttatgcatgatagtaatctacattgaaaactcaatgcaaatgcaggctgtatttttcctttccaaagtagcacaatgtcaaaaatctatacttggaccctgcctagccaattgcatcgatctgtcgctgaactttcttgcaggaggctatgacttcatgctgactttttaacaaaattcaggctgagacacgcaacaggtgataggcaaggcacacaggggatagg

SEQ ID NO: 26978 - DNA, 288 bp, Setaria italica
  Peptide Sequence Number=SeqID_92952
ttatgcatgatagtaatctacattgaaaactcaatgcaaatgcaggctgtatttttcctttccaaagtagcacaatgtcaaaaatctatacttggaccctgcctagccaattgcatcgatctgtcgctgaactttcttgcaggaggctatgacttcatgctgactttttaacaaaattcaggtcatacgcgggactccatatggtcgttctgctgatatctggagcctcgggtgcactgtcctggagatgttcatacgaagacctccttatcctgacgacaattgggt

SEQ ID NO: 26979 - DNA, 201 bp, Setaria italica
  Peptide Sequence Number=SeqID_92953
tttattggaggaatttagagcatgacgaatctctcagcctggagtgtgtggtcttgttatgtgccagcaaaacagaaggttttcatggccataagatacaaagatgccctttttgttgcttgtttattagactaatgtttcttttttatatttccttatactgcatgagacaataggacaaatttcggtaaagtatcctgg

SEQ ID NO: 26980 - DNA, 499 bp, Setaria italica
  Peptide Sequence Number=SeqID_92954
gtggcttccccctcgcaccgaggccgccggcgacatagtagtcgcgggggtcctcccgcgcaccgtggccgccgtcgacgtactggtggtgggggtggtaggggtacgggtgcggcgcggggtagaccaccgcgtgcggccacggcgagcgcatgtcggcgggccgttccaccacctgctccgccgtcacctcctgccggtgtttcctgtagtcgccctcttcgacaccgccgccgccggcgccttctctcctatctatatccccggcggctgctgctttgtcctcctttgccggcccgacggagaggatctctgcgtgccagagcttgcgcagcttggtcacgagctcgatgggttcgaccatgccgaccaccgtcagcttgctcgccttcatgtcgatggagatcaggtcgaggccagggagcgcggagactgccttgagcaccttccgcttctccttggcgtcgttgtcgtgcaggcccaggaacagcaccacctt

SEQ ID NO: 26981 - DNA, 291 bp, Setaria italica
  Peptide Sequence Number=SeqID_92955
tagtttctctctccctccctccccaacctcttccacatctccgcttctctctcgtctccgcctcgctcgcgagagagagggggcgacgacggaaccctaggattcgcggccgcccgggcggcacagccaccaccaccccgccctccgtgccggggggcgccagccgagctccggggcgcgcggatcgagcaccggcggcggctgttggtagccgcgaccgagacggcgggtaggctaccctcgacgccgcgggacggtatatacataccaaaattccaggacgcggggagg

SEQ ID NO: 26982 - DNA, 645 bp, Setaria italica
  Peptide Sequence Number=SeqID_92956
gcgacgcacgcaaacgcaaccaccggccatcgtcggcaacttcctcccgctgctttgccttctttccctttcgttgccgttccccacgcccggcccctccactccaccaccggatgtctccaacccccaaccgaatccacacccgcgcatcagcagcattagctagcggcggcggcggcggctgttggtagccgcgaccgagacggcgggtaggctaccctcgacgccgcgggacggtatatacataccaaaattccaggacgcggggaggcgccgatctgcggcgacatcgacgagccgctagtctcccgccgcaccgacacaatggcagaccagttagggtgtactatgagatcccatggaatgatactggcaagattgcacatgtatgactggataatacttctgctccttgctgtcatagacggactgttgaatataattgaaccttttcaccgttttgttgggaaagacatgatgactgacttgagatatcctttgaagggcaatacagtgcccttttgggctgttccagtatgtcttattatactaatctttaagtatgttttgatcttgttacatctattcaaaagttcctgtctgtttcttaacttgtttttctgatttgcagatatttggaattat

SEQ ID NO: 26983 - DNA, 1505 bp, Setaria italica
  Peptide Sequence Number=SeqID_92957
cctccaacccccaacccgaatccacacccccgcatcagcagcattagctagcggcggcggcggcggctgttggtagccgcgaccgagacggcgggtaggctccctctctctctgtgctgagctggtgtgcgcgcattctggtaggacgcggggaggcgccgatctgcggcgacatcgacgagccgctagtctcccgccgcaccgacacaatggcagaccagttagggtgtactatgagatcccatggaatgatactggcaagattgcacatgtatgactggataatacttctgctccttgctgtcatagacggactgttgaatataattgaaccttttcaccgttttgttgggaaagacatgatgactgacttgagatatcctttgaagggcaatacagtgcccttttgggctgttccaatatttggaattatactaccttgggccatattttttggaatttacttcaaaaagaagaatttttatgatttgcaccatggcatactggggattctatactcggtgcttataactgcagtgattactgatgcaattaaggatggtgttggccgcccacgtccagattttttctggcgctgttttcctgatggaaacgatgtttatgataacattactactggtgttatatgccatggagagaagagtgtaatcaaggaaggtcacaaaagcttcccaagtggacacagttcatggtcttttgctggccttggcttccttgcatggtacctagctgggaaaatcactgcttttgatcgcaaaggacatgttgcaaagctatgcatagtgtttctgcctcttcttactgcttcacttgtggctgtttctcgagtggatgactactggcatcactggcaagatgtttttgctggcgctattataggccttacagttgcttcgttttgttatctgcaatttttcccatatccttttgatgctgatgctttctggcctcatgcatacatggtgcagctagctgaagaacgcaacagcagaaatgcaaactcctacagtgcgagaccaaccgagatcgaaacagtcaatattcctggccagggcggaatcaccctaagagacactctcaacgacgtggagtctggaaggagttcgtgagatcccagttctggagtggagctgtcttgaataccctgacttccgactgagatttgtctgcatgagaagctctgtgggagctgcttccatatacacaggtagatctattgtagagctgtagactgcttccttcgtatcaatcttctcgttctgtggtctgttttttgttaactggatagctagtttcttaaggcctggctgtaaaaatcacttggtagggggtgttcttactttctgacgggcttttgcttttgtttatactcatggtgttgtggttaaagcttgttggtgtacactctttgtactgatgctttatcgccgtgttaagcgtatgcgatcaaacgtgcaggaaaaatgcagtttcacatttaaatt

SEQ ID NO: 26984 - DNA, 831 bp, Setaria italica
  misc_feature (778)..(831): n is a, c, g, or t
  Peptide Sequence Number=SeqID_92958
tttagtactaaaggaagaaggaacaagaaccaactaggagtctgggtatcatctgatttctctgatgttgccaagtatgcaaagccatccctgactgctacaacttgcagctcatcatagacactgattagttcgccgaggacctgatcaagctgggtatctaaacgggcagcccattgcaggtcccacctctcaatgatgccatatattctctgttctgcgcaataacaaaccaacacagaaatcaatagcatagacaatacagcgtgcaccactacttgtttcaccaaccacaaagctgcaatgctcattcttcaagagctgaggaagctcatcgacagaaaactccattgtgactgtattaagtgtgatcatatacttgcgattcttgtaaacccagtacaagaacccctttgattgcatgctgctatccagaagccaaaatttcttacggcttgaactcgcggggacattgacccacggcagaatcgaccactcattggtgtcggaggagaagaatgtagcccgtaccctggactcatcatgtgcaagaagcaccactcgaaacgacaaggggtcttcgtcggagcagagcaagcaggcattataacacacgacggggtagccgcggtgaccttggagggtgtcctcatgggcaagatcaaagaaccgctcgcttcgccgtgccaagggattcaataccgccattatctcctcttcgtcgttcctgaggaggatgtatccgccgcggcagtcgaggatgtcccagacgtaaggnnnnnnnnnnnnnnnnnnnnnnnnnnnnnnnnnnnnnnnnnnnnnnnnnnnnnn

SEQ ID NO: 26985 - DNA, 564 bp, Setaria italica
  Peptide Sequence Number=SeqID_92959
tttccttttgtttttaatttttcttttaagtttctttcttcagatgcacccgcagagaattgaatgggaagcaggagcccaagtcgccaaaagcacctccccgttcaccaaaagcccctacctatcccacatttgccagtataactcagcagctctcgatgtgtactttgcctcaaccttgccaccatctgtccatccgtgctgtttgaagaaagcatgtgcccggttgttgccaccgaaagccatcatcttcagctgatccggagtccatgagtcaaggttcgttgacctgacgaaggtgatgtggactccgaggctacggtggacggcggagcagtcgaggcagaggaagatgccgtaggtgacggaggcccacgttcttggcgttgcagtcgaagcacatctggcatcatgggggtgaggggacgcgggtggtggtggtgaccttgaccttgttgccatcgtcgtcgaagcggtactcgatgaccttcttgaggccgttctcatcgggcccgacaacgacgcggggagggaggaggaagtcgaggttgccaccatcgtcct

SEQ ID NO: 26986 - DNA, 638 bp, Setaria italica
  Peptide Sequence Number=SeqID_92960
caaatacaaacgacgtaataagaatcctctactatcctctacagggctgtgcaggaattgcttgaattgtcggagatgcaccgcaatcaaaacttgaagcggtattctgatgcagatatgaaaatgctacaagtcttggttcaatagaatgcttaaagcattctgtcgaggtcgctgatgaaattggaggccaaggatgtcagcttctttccagtctctccagctatgtccttgagtgaagacagatcctgggaagcctacaaaaccatggcagcaaatgaggctttgctatgtccagctttcacctaacatctctgcacaatatttgttctcttggtgcatttgcattagttaatattacaactgtcaacttcaatggttggttaaaacagcaaactaggctgctgctagaagctacgtatccaagatccaatcgacaacagataaagatttacaaaagctacctggaaagatattctgttgatgagatctgaagcgcttaagtccagatcagaattgttcatatcacgaccaaaaagatcagcgctcgaaatggatgaagaacccgcaaacttttgaagggatagttgagcctctttctcttctctgttttgagtgaccaaaaaattgagatgatg

SEQ ID NO: 26987 - DNA, 1805 bp, Setaria italica
  misc_feature (69)..(69): n is a, c, g, or t
  Peptide Sequence Number=SeqID_92961
tttcttggtaccttgtctttacattgtaagtattattttggttctaaattactaaaacgtcgttaatantctttttttgcagcttaagtttgtgaccatttctagatcaaccttgatcaggtaaccatcacagtacaaacatccggttcggtttcattgaccacaggcactggacagtatgaaaattttcttgcaacatacgacaagcaacctcaatgtatataagcgtatgcttcactcttgtgaaggaacgaatgaaaatatcttcatgtaagcaggtccagaaatatggtcaaatacaaacgcgtaataagaatcctctactatcctctacagggctgtgcaggaattgctttgaattgtcggagatgcaccgcaatcaaaacttgaagcggtattctgatgcagatatgaaaatgctacaagtcttggttcaatagaatgcttaaagcattctgtcgaggtcgctgatgaaattggaggccaaggatgtcagcttctttccagtctctccagctatgtccttgagtgaagacagatcctgggaagcctggaaagatattctgttgatgagatctgaagcgcttaagtccagatcagaattgttcatatcacgaccaaaaagatcagcgctcgaaatggatgaagaacccgcaaacttttgaagggatagttgagcctctttctcttctctgttttgagtgccaaaaaattgagatgatgaaatcgccttcgcattagagaatttcttccttgcttcatcagtttcctgaatctgagtttttgaagcattgcttgatttcttttggaacccattacccatcccatactcctgaaagaagtctgatgtttttggtggtgctacatgaccagtcacatgagatcccccggattttgaatcagctgatggctcattctccatgtattcaaaacgtgaatgcaaggatggaccactttttgtagttgaagtagtcgtcaaggcaggcacaacaggttttggctcttcaggtttctgctcatacaggctttcatttggctttgtagtaagctttcggacaccaagccctccggtcttgcctccaaccttctttgcaccaatgggcttctttacggaactggcaaatgtgggataggtaggggcttttggtgaacggggaggtgcttttggcgacttgggctcctgcttcccattcaaattctctgcgggtgcatctgagagcttgaattcagggaagtcatcggatggcttgggtggctcagacgagacaggtgatgacggtaaggcattatcatttgtggcactcttagcgacctcctttgaaagtatctgcctgtataactcagcagctctcgatgtgtactttgcctcaaccttgccaccatctgtccatccgtgctgtttgaagaaagcatgtgcccggttgttgccaccgaaagccatcatcttcagctgatccggagtccatgagtcaaggttcgttgacctgacgaaggtgatgtggactccgaggctgcggtggacggcggagcagtcgaggcagaggaagatgccgtaggtgacggaggcccaggttgggttcttggcgttgcagtcgaagcacatcttgttctccggcttggccttgaggcggcggaagacggcgttcttgtcggtgaaggaatcgaacgccatggctgctgttcgccgccggcgcggcgagtggatccgattgaattcggtgggtcggtcgcttgagttgggatcggcgcgtgctgcgccggagatctggggggcggggggagggcagaggaggaaagcagacgac

SEQ ID NO: 26988 - DNA, 267 bp, Setaria italica
  Peptide Sequence Number=SeqID_92962
tatgatccaagtagaggttacctcgtgaatgatactgttgttgtggaggccgaggttgctgtccgcagaatggttgactattggacgtatgactcaaaaaaggaaacgggctatgtgggtctgaaaaaccaaggggctacctgttatatgaactctcttttacaaacactgtaccacataccgtacttcaggaaggaagtattcccttggcgctgcagagccttttctacaagctccagtacagtgacagtagtgtagctacaaaag

SEQ ID NO: 26989 - DNA, 351 bp, Setaria italica
  misc_feature (139)..(139): n is a, c, g, or t
  Peptide Sequence Number=SeqID_92963
acatcttcaaataaggcctcccaaccattgtccctcaaggttttcaagcgttcattcacaaccacaagcaaccccacagcctgaatactgtcttgatcttttctttgtaaacaagtgatagtcttttataatgacaaanaattttaacatcatctttaagatgaacacaaactcaaagctttccattgtttctattgaaaatgatgctcgggaacctcgagagccatgttcatccacaatcactagcacctcaagaactgtgtcccacattgtgtcaatacggttcaaggttgtgtgatgcgagccccatttagtctctccccatttagtttccttcaatgtgctcttgtc

SEQ ID NO: 26990 - DNA, 261 bp, Setaria italica
  Peptide Sequence Number=SeqID_92964
tagaggagttggtagggacccaagaaggcaaggttttgatcctttttatgtgtgtgggtttggcaaggctttgttcctggacacacatgtgtactgggcgtacatacacgtacacacctgtctctttctacagaaagtcaatggccgcatacatacggttggcactgtgcataaacaatgccccttgtgcgccttccctgtgccggccatctcctttttattctctccctcctgtgtttgctggtgcctcggcagaaaaac

SEQ ID NO: 26991 - DNA, 262 bp, Setaria italica
  Peptide Sequence Number=SeqID_92965
ctgcggggctcggagggctcgcggcggcggcgcgaggtcatgtcgctgtcggggaggaggaagggagctggggattgggctggaacggggacgtcgcccatcgccgccggccgcgctgaggcatggggcggtggggaagctgatgccgattggattgtgctacggcgaagtcaatcccccaacgcaacgcgccagagtctcagcattggaggagacgacgacggaggggagaaggtggaggagacgaagcaagtccaattcc

SEQ ID NO: 26992 - DNA, 320 bp, Setaria italica
  misc_feature (287)..(287): n is a, c, g, or t
  Peptide Sequence Number=SeqID_92966
gtacacactacaaaactcccaaatccggcggccgcctctgcttcctcccgccgtcccgcgtgcgcgcgagtcgtcggaatcagccctcccgcggccggcctcgccgctataaaaggcgagctgcttcgccccggcgatgcaaggccccccgtcgtcgagcacgcggagcggaggaggatggcctggcgatgcgccatggagaacgagaagaagggggaggtgggggtggggccggctgttccgattcgcggacggcgcggacgcggcgctcatggccgcgggggccnccggtgccgtcgccagcggcgtggcgcagcctt

SEQ ID NO: 26993 - DNA, 445 bp, Setaria italica
  Peptide Sequence Number=SeqID_92967
tttgattaaaattataaagaggatcgcaaatatttatagtaataaatagatatgctataaaaaatatttaataaagaaattaatgttacttatttggtattatgaatattagtacgttattatataaatttagttaaatttgagatgctttgactatcaaaattatagagaggctcacaaatatttatagtacagaatagatatactataaaaatatttaataaaaaattaattgtacttatttggtattattatttggtattatgaatattagtattttattgtataaatttggttaagcttaagatattttatctctcttataatttggaatcgagggagcacagccgtgcccacggcctacgcacgcgcccaggccccatgccctcgggtcgtgacatttcaaactcccaggataacgaccgcctcggccggacgcgacgcg

SEQ ID NO: 26994 - DNA, 495 bp, Setaria italica
  Peptide Sequence Number=SeqID_92968
taagtttatttgttaaattggtaattctagttgttaagggttctaaattacttgttgtattaccttgtctattgtctgtaccgaccacctcggtgctcacactgttctatttgcaataactgtgtggaacgttttgatcatcactgcccgtgggttggccagtgcataggactgcgtaattatcggttcttctacatgtttgtattctcgaccacattactctgcctgtatgtatttgccttctgttgggtgtatgtgatcaagattagaaatgctgaacatttgtcaatttggaaggccttggcgaagacaccagcttcaattgttctgattatctactgctttctttgtgtatggtttgttggtggtctgtctgtcttccatttatatctgatgagcaccaaccagacaacatatgagaacttcaggtatcgctatgatcggcatttctaatcttgatcacatacacccaacagaaggcaaatacatacaggc

SEQ ID NO: 26995 - DNA, 1913 bp, Setaria italica
  misc_feature (1908)..(1913): n is a, c, g, or t
  Peptide Sequence Number=SeqID_92969
ctccttccctccctcccccacgctccgcgcccgccccgcggcccgcgtccggtccgacgccgccgcacgactccgccccagcgcccctcctcgccgggggacgtcgcgccacgtcgcgtcggggaggcctcgctcggggggagggcttcggtcggttggccggtgcggccgcaggggaggagtacggggggagcttgatctagggctccttccccctgcggcggcgggatgtacgtgccgccgcttcccggcgacgctggtggccgcggcgatgcggccgccggcgagcagcctagggtttaccaggtctggcggggaagcaacgaattcttcttgcagggaagattcatatttgggcctgatgtgagatctgtgtttctcactatgttcctcattattgcacctgtggttgccttttgtgtgtttgttgcaaggcatctcatgaatgattttcccgatagctggggcatctcagtgatgatagtggtggttgtcttcaccgtctatgatttgacgctgcttctttgtacctctggtagagatcctggtataatacctcgtaatactcatcctcctgaacctgaatccattgatggggtcaatgaatctggaggtcagactccacaacaatttcgtttgcctcgtacaagggaagttattgtaaatggaatcagtgtaagggtcaaatactgtgatacctgcatgctgtaccgaccacctcggtgctcacactgttctatttgcaataactgtgtggaacgttttgatcatcactgcccgtgggttggccagtgcataggactgcgtaattatcggttcttctacatgtttgtattctcgaccacattactctgcctgtatgtatttgccttctgttgggtgtatgtgatcaagattagaaatgctgaacatttgtcaatttggaaggccttggcgaagacaccagcttcaattgttctgattatctactgctttctttgtgtatggtttgttggtggtctgtctgtcttccatttatatctgatgagcaccaaccagacaacatatgagaacttcaggtatcgctatgatcggcgcgataacccatataacagaggtattctgaacaacttcctagagatattctgcactgctattcccccttccaagaacaatttccgggcaagggtcacagtagagcaagggttgcaacaaacgcgctcacagtctagaggtttcatgagccccaacatggggaagcctattggagatctcgaaatgggcaggaagccagtgccttgggacgagccaaggacagcagctgacatcagggacttggaagcaggccttggtggcatgtttgaggagaaagagggcagaatagcccatgcatccccagatatgagcagagatgaacttccagtagagtttgtggatggccgagctggcatgcattcgagggagtcaagttgggttcgcagaggcacagacgaatttgaagcctccatggctgcctttggtttggaagctgacggtggcaacagcgttgcccggactggcacacattagcccaaaaaactgaaaaaaaaaactacggtgtgtttcagttgtgcgtcgagtgggtgtttattgatcatgtctcaaagcgaactgccatgtgttatccacgtgtgccaggtaacgccctggatcagtgtaattgtaagcacgcttgctgctgtgtgtctcatcccctggtagcgcatcggagcccagctgctgttgtttgtttggtgttttaagaaagtagccgacgagcttaagctcccgcccggttcggatgatgtgtatctgtatataactaaaattatcaggttgcaacaaatgctgtgtttggtttgaaccaaaaaaaaaaaaggaaaaaaaaagaaaaaaccaaaaaaaaaaaannnnnn

SEQ ID NO: 26996 - DNA, 227 bp, Setaria italica
  Peptide Sequence Number=SeqID_92970
cgaccacagaagcaagtcttctcctattaacaagattgttcaagggatcaataaggagcaaatctagctagctagtaacaaggatgaagcttgttgggagcggcagcaagaggagaggagggctgggcagggctctcaaggagcacaaggccaggctctacatcatccgccgatgcgtcgtcatgctcctccgctgggatgactagctagctagtcgcatctcgcat

SEQ ID NO: 26997 - DNA, 454 bp, Setaria italica
  Peptide Sequence Number=SeqID_92971
atctgatagggtaggatggtagataatagttgttcatggttaatcatgaattttgtgggacctagaggcaaaggatccatgccatgtggcttgaaccatttcaattatgtctccttttatttgggtataattgcataatatgatgtacagcttcatgcggaagcaaccacctacatagtgcaatcctttgttgtaaattatgtgcatatcaatgtctttacatgctctttaggtggaatgcagtcagatttcgctccatttctttggttctgcttagtagaagcatgcagttcattccacaaaattagccattttaaatttactgcattcatcttttcaggtgctcttggtagctcaagctcaaatcttgagcaagccaggggatacacttcttcgcctctagcagccctgcgaccaaatatgtctgcacctggaagccgatccctgcacacaa

SEQ ID NO: 26998 - DNA, 727 bp, Setaria italica
  Peptide Sequence Number=SeqID_92972
cctcctggctcctgcgtttccatctccatccatccatcggcggcggcggcgagctacggagccgacgaccaagtgggcgagcggcaagcgggagaagactacaatggagaagtataacaacaacactcgatttgcacccttgagagatgctccatttgctgtccgtggtgctcttggtagctcaagctcaaatcttgagcaagccaggggatacacttcttcgcctctagcagccctgcgaccaaatatgtctgcacctggaagccgatccctgcacacaagcccgccccctagcagctcctgttgcaaaccgcccattgtcgccccaccttccgctaaagaagccacagttcagcgctacgttctcaatctcacaccgtattttcggtgtcgcactgggagttgccatcatatccgtccctctagccaccaagttcagcctgatgtttggtgtttgagggtgaaatgctgcatcgatgagaaacaaatcctctttccatttccgtgactgtttcatcgtctgggtcatctttagactcgactatttggtgcagttggaataacatctttgtcatgcttgcaaaatttggtaataagtaagactatccaatgatcagtgtaaggatctcattctggaatgtacatggttatggggtctgcagaacattgatttttgtacacaccttacagcgaagacgtggattcgtggggggtcgtgaatttaatg

SEQ ID NO: 26999 - DNA, 274 bp, Setaria italica
  Peptide Sequence Number=SeqID_92973
ttcggtatacgcctattctattctcgtagcttttatgtccatgctagcagcatatgtacagatatgtatcaggaactgatcgaatgattattcgatcgttaggaaactcatctgagatcacgcgaaacatggacatacacacacaatcgctcgctacacgtaacacacacgcagagacgcccccaggccccagtaatcttcagacgaactcgtcctccatctcctgcatggacctgccggcggaggcgatctgggcggttggacgtcatcttcg

SEQ ID NO: 27000 - DNA, 354 bp, Setaria italica
  Peptide Sequence Number=SeqID_92974
ggcggcgggtgatggtgctggccgacggccgcgccgaggcggcgggcgcgctccagtgggcgctgtcgcaggccgtccggagcaacgacaccgtcgtcctcctcaccgtcgtcaagccggtcgcccaagacgcagtaagtgattcctgcgtgaagatgctggggacgaagagccagcagcacctggaggcgttcaagaccctgtgtgaatcaacaaggccagaggtgaaggtggagacgtgcgcggtggaggcggaagagcgcgcgccggcggtggtggaggcggcgaggcggtggctgcaggcgctgtggcggcggcggtggcgcgggggctccaccggcagcggcgggacga

SEQ ID NO: 27001 - DNA, 203 bp, Setaria italica
  Peptide Sequence Number=SeqID_92975
gaacaacatccatgtactcatacattcatgtgtattctacttgtaataaatcgatgggttgcatttggccattgccgaaactctggaggcaattcaccatacgtgagttcctttagttatcccaaagaggatggcaactgcagcaatggcagcagcaattgtgcaggctacgtatccaggtttctctctgtggtcatgtaccc

SEQ ID NO: 27002 - DNA, 591 bp, Setaria italica
  misc_feature (544)..(591): n is a, c, g, or t
  Peptide Sequence Number=SeqID_92976
aggcccgccccgccgcccggattcggcggcggcggcggcggcggcggctatcacaaccagcagcagccgtacgcgcccgcggaaccgtactacgcggaggggtaccaggccgtgccaggctatggtgaagttgtcgaaggacggcctgtgagaatgcggcgtctcccatgttgtggcctcggcttaggctggtgcttgttcatcacagggtttttccttgccgccattccatggtatgttggagcttttattatgatatgtgtgcgggtacatgaccacagagagaaacctggatacgtagcctgcacaattgctgctgccattgctgcagttgccatcctctttgggataactaaaggaactcacgtatggtgaattgcctccagagtttcggcaatggccaaatgcaacccatcgatttattacttgtttatgttgtatatatatctatattataaagtgtgaacaacatccatgtactcatacattcatgtgtattctacttgtaataaaattttaaacgtacaatatagcttctcatgannnnnnnnnnnnnnnnnnnnnnnnnnnnnnnnnnnnnnnnnnnnnnnn

SEQ ID NO: 27003 - DNA, 282 bp, Setaria italica
  Peptide Sequence Number=SeqID_92977
cccgcccgcccgcctggagctcccccatccgcagccgcccggatctttcccgctgcggccgctgcctggagaaaaatcggagaacaaatctgtccatggaacctgcgccagcgtcctcgagcatcctggcaacaggctccctcgtacgctgccatgggcaggctcgcgcgctgctacgcttttggtcaagaagcttgtgcattcgccggaggcctccctcgcaaggacgacgcacgctcgagctcaacaagccaggaggggacgagagatgcagggcgggtg

SEQ ID NO: 27004 - DNA, 449 bp, Setaria italica
  Peptide Sequence Number=SeqID_92978
tcaaaggtgaaaggtgaagaagaaagagagaacaatccagatcaaaggtgaggaatatccgtggatgcaaaatcggttgccagatatatcgtgcggctcgccgtctcgcgcattgtcagctcccaccccgtccaacccactgctcgagctccgcctgctgaatctaccacgtcacccccacctcgtccttttgtcgctggtgccgccgctctggagcatgctggacccgcacgccaacaatccggatctgaagctaaggcgaacatgcctgtccatggaacctgcgccagcatcctcgagcatcctggcaacaggctccctcgtgcgctaccatgggcaggctcacgcgctgctacgcttttggtcaagaagcttgtgcattcgccggaggcctccctcgcaaggacgacgcacgctcgagctcaacaagccagaggggacgagagatg

SEQ ID NO: 27005 - DNA, 972 bp, Setaria italica
  Peptide Sequence Number=SeqID_92979
acgacgaacgacaaaccggaccgaccggacgaccgaccgtacttgaaagcaagagggcgagggccggaggaggaggaggaggggggcaagatgtcgttccgtgcgcaggagatgtacaagaaggtggtgcggcgcgtgggcgccgaggggaagctgccggcggagctgatgaagtcggtgaaggacatgctccccgacagcaaggtcgtcatgggacgggccaagcgcggaatcttcgccggccgccacatccagttcgggaacaaggtctccgaggacggcggcaacaaatcaaggcgaacatggaagccaaatgttcaggacaagcgtcttttcagctatattcatgatcgtcacattagagtcaaggttaccacacatgcacttcggtgcattgacaaagctggtggtatagatgaatacctcctgaagacaccttacaacaaaatggatactgagatggggatagtgtggaaagcaaagattgaaaagatgtattcagaaatggctgaaatggaagtaggcttcttccctcctgaggaagaggctaagattgaacagggctttgacgaggttcgtgctgccaagagagacttccgtagggaggcaagaagagctttggcaaagcaaaggcagttagaagtaggtaaagatcaaacaactgaagtcacagacacaaaggaagagttatctgacgctgctgctaaagtctgagcctgaacctttgcacctgtcttgaatgctaaaaggaggcaacgacacattggttgatcctgggaaaataatggaaggcttactcttgatataaactggggaaaatttcttgtgtggtaactatacccctttttcgggagtagcagtgtatgttaagccaatttctcttagatatcaacatcttggtgttgcaagcactcattattttggtggaaatttgtacaatcattggatacttaagactcgaaagccaaaaaa

SEQ ID NO: 27006 - DNA, 329 bp, Setaria italica
  Peptide Sequence Number=SeqID_92980
agattgccagaaccagtgatacaattaggataacaagcttctgcaagttagtcaggattcttggtcagcttatgaatattgaatccttttttagggcataatttggttctttcaaaaactccatgctgacatgcttaaaacttgagtattcctacctgaacaaaactaataacacacagtatatttctttaaaagataaatgaaaaaaagttcaaatattcgttatgtattgcatgtgtcgtagaagaatatgtgattcgattttggaaattagacatccattttagcaggattacttgaacataaagattgaggaattccatcatgga

SEQ ID NO: 27007 - DNA, 274 bp, Setaria italica
  Peptide Sequence Number=SeqID_92981
ttacgagaaacgctttcgacgttgcctccacgctctccgccaggcgcgccaccgtgcccatgcagatcatctggaggctcaagcgcttcttcaactacggggacgaaaggaagctccgggacgcggtgcgccttgtcgacaggctcgccgaggaggtcatccggcagcgtcgcaagctcggcggcgcggcctcgggcagcgacctcctttcgcgcttcatgggatccatcaacgacgacaagtacctccgcgacatcgtcgtcagcttcatgct

SEQ ID NO: 27008 - DNA, 442 bp, Setaria italica
  Peptide Sequence Number=SeqID_92982
cccgcgccaccggcctcgacgccggccgcggcgtggttcgacggcctgatcgcctccgcgtcgccgtaccgcgctcaggtctcgggcttcctctcctccctgttccccgccaattcgtcctcctcggtgcctccgagcggcgttgcagcgaggcgtggcgggccgaggggcggcggattcgcggcgagcgctccgcaagcggggggcagtatctccagtgcggttcggccgggtgagcagttgggaagcggaggcggagttccggccagcagtgcgggcggcgctcccagcaggggatcacgcgccagcacctggcgatgctactgcggcggtgccgatcggcgcgccacccgacgatgatcatgtgcaagtcggtgccgaagccaaacattccaccggaactgccactgccgaggcgaagggtggtgggcccggacctggc

SEQ ID NO: 27009 - DNA, 455 bp, Setaria italica
  misc_feature (355)..(355): n is a, c, g, or t
  Peptide Sequence Number=SeqID_92983
cactacagtaaattagaactaaatgatgtttgtaacagccagttttgcttgcttccagcttttttgctgttcaaagcgtcatgattggaggtagtaatatatcttctgtcgatagtagaaacaatgtttcagtgaaagcactgaacagacgccaccatttatatcaacctactgtggttttttggtaaatcattctagattgactgatggggcatcatgtcataatatctgaagtctgaactgcacatacagctaactaaatcttgcacttcctttatcgcatttgagtctgtaggaggtatgaagcaaatagcagaaatttcagaacctgggtattgagaatacatagtttacngacctaaaatatctaattaaatctacttatagagatacggaggagcatattaaaggccaacactccattaaccactcaaccagaaattggaccaacttat

SEQ ID NO: 27010 - DNA, 1464 bp, Setaria italica
  Peptide Sequence Number=SeqID_92984
tggtcttccctaaaaagtctacttgtaatcactgaagttaggaacactaactacacagtaaggacaacaacacatgaatatcatgagcaacaaattcacatcacaagtcaccctaaaccaaataccacactacacatgatgtgaacatgtcgaaaaaacaggcaagtgatgtcgtctgtctttgcagttacaagaacaagtgatgactaatgacgtatccataaataaaggagagacactataaaatagctcttctttttccccccatctgatgcaaatgcccctggaagaaacactgcagcagttcgatgcaaagcccatcacagattcttgtcgtgccacagtttaccggaccagccatccaactgtctgctggtcacaaccaagattttacgaaatcgctttcacaagcccctgagcttcaatcttgcaaacctgattcaagttcttgatgattactcatctgctgcctcctctgaatctgagagcggtagcagtgtgctaattccaataacatgtccattcaggcatacaaaatactccacagaatcatcataagcacccagcctagcggaagcacttctcggaatcatattctcctggaacatgttccatagcttggccttacaataagggcacaactcccttggatgaaacctagcccgcttctcaatcaacatcttctttacccttgaggtggcgaatgacttaaagatacctcgaaagaaacccaagtcgccttcttcaccctgatcaagatgctcgcatggatctgacacatacaggacgtctgacttacatggcagaggcaggaaactcttgcctgcagtcctcgagaagcgcgtcctgaacacgaaatggcccggtacatgaatgttgttaaaaagccccccttttgtgcatccattgcagtagataagcagcttcccgagcgctttccagtttccatcaacaatgtggctgccacctgaatgcaagtccagcatcatcttcggcgcccttgcatgacagaactccttccacagcacctgcttggcaacctcatcaaaccacttgcacacgcatgagaggatagctatcagccttgggttccagttcatgtggcggaagacgaggaagagggcatcctcactgagatggcccttggtgcagacgcagctcgccgagtgtgtgcagcggtgttgtttcaccaccaacaccatttccagaaatcaaatcactccaacaacaacgtgcgccttctcatacctccttcaatcctggcacgacgccgcggggcctgccgccgccggagctgggcgaggagccgccgtcgccgtcgccgtcgccgtctccgtcgccgtcgccgtctccgtcgccgtctcccgcgcggtccctgctccggtcgccggcgtggagggtcgagaccgagacggggcgggatcgatgggagggtggggatcggaatcatcgggtcggatcgag

SEQ ID NO: 27011 - DNA, 470 bp, Setaria italica
  Peptide Sequence Number=SeqID_92985
ttataagggtactgaaagaacaaatcaatgcaatgctttattgctgagaagctgcttagctccttctcagcaatttcactaccaattgttagcaaaacagagatgaactccacaatcttcaaacggtgtttcccaagaggcggacgcaaacatccatacgtagtaggcaaaacattttcagaagaagtaatgtccaatagcttcagcaaatcacctaaactctccagcataccatcaactgtctctggactagcggtgaccagcgtcccgtgacttaagttacttctaaatgcttggtatgaggctgatgctagtctttttgggtccaacaaagatatacacactgacagtgaatgaaccagaacagattttggtcttgattcttcaagagcgtgacgaaacaacctaccaacaaaacttgggctgcatatttttgcagcaagagtctagggggggtcgctattcgtagt

SEQ ID NO: 27012 - DNA, 2571 bp, Setaria italica
  Peptide Sequence Number=SeqID_92986
gcaaaaagaaaggtagatgtttcacttgaacaggtaacaattacagaaatagctattcccaaatgaacaaaaaaagggataacgcgggaaaaactcgctgcaaatattacagttcgagtaccctaacaaaggaaataaccaccgtaccaaaatcagaaccaccaaatgaattaatccccatctaaccaccaaactgacattggcaagaattagttctcccaccattacaggataagaagtccatgtgaactgaggaaaaagcttctggggatggggtggggcagtccgatcataacagggcgtgcccacctgcgcgaatatgctcattcattcagtgccaaccaactgcacatagcgtagcagcgcctttaattgtacagcatccttgcattctgaagggtcctccgtggttcctgagcatgtgatgcaaaacaaggtgacattgctcacctgcaaaagaatctggctggcaatactgctcaggtttgtgatatgattccagcccatattcttcattcatttgttgtggcaacctcaaccgtttttccatcatcaacctctgcgggtgagcctgattcatgggcaatctcactacaccctgatgggtcagcagactgattttcagtatcagcagattgaggcaaggctccaggcaaggcattgccaggctcagaagagctgcaaggttcatccgctgctccctctgtacttgaggcttcagctgcacttccaacttgtgtgtcagtctggccatcttgaacatccataggccgctcagaggcttcagcttcctgggatacattttcctcttctgtgcacaacagtttctcatcattgcgctcagcatcttctgctagttccttggtctcctcaacagggccattttcaagagacacgctttccagctgtgactcagtgccaggggcttcaccaattagcacttcatcagtttcctccatactaagggtagtctcttcagaattcggggatggtgaaggaacagaggcagctaagcggtcattgattcctctatcaccatcaaacgtaaaccagtttgaattcgtgaagagggagctgctgtcctgatcatcccccaaccgcaacgaagatattaccacttcagctgattcatcatcaaagtagacatcctcatcatctcgttcatgggatccttgtgcctcttcaatgtcatcgttgctatatatcccatatcgaaatgcctgactaagattatttgcaagtgctgccacatcatagtctctgtctcggaagtcgtcatcatcactatccctcccacgatcgtgtagagaagttggacggccacatgcccaatggtaaacgttctccacctcattgcgtttgaccaggacacctgtctgccattcagcccactcgctgttctcctgcaagtgattctggatcacactgctactatttcccaactgaatgagcttatttgctatacgagttatgtggccaatattcccaattctcgggggttctttcccttctgacggtaatgttggcccattagagtccactgacagagatgattttttctgcggcaaggactttaccgacaaggtcacagtcattaaggacatggtcaattagttgattcttttaacctcgaggcaagaaacaataatgttctcgacatgatgatgcaaaaagttattataagggtactgaaagaacaaatcaatgcaatgctttattgctgattggcttattagctccttctcagcaatttcactaccaataattgttagcaaaacagagatgaactccacaatcttcaaacggtgtttcccaagaggcggacgcaaacatccatcccgtgacttaagttacttctaaatgcttggtatgaggctgatgctagtctttttgggtccaacaaagatatacacactgacagtgaatgaaccagaacagattttggtcttgattcttcaagagcgtgacgaaacaacctaccaacaaaacttgggctgcatatttttgcagcaagagcagggggggcgcatcgagttactgcagaaaggatttctgcagcattcgcgtgtacttcaggggagtcagatgagctaaatttatccacgatcatttccaggacatctgtattctctaaccattgcaatgtatccgcaaaattcgagtatatggtttcatcagcaccaatcaatctcatcaacacctccattattgaagtgataccaatgaggtcaacaagctggacaacaatgtctggatgctcctgaacataattcataagaggagcagtcttccgtagcatcaaacatatcaccaccttactgaagtaaccagctagcaaagtgctatgtggatggtcaggttttacaaatgagaaaagtaaatccattaactcaacatcctctaccaaggttctcaagataatgtcaatttcacaagtaaaaatctcacaagcaataaatggaaacttgaaagatcgtttcttctctgaatcctccggaacttcttccatgatgtaacgaagtaactgctccacttgggctttatctcgcaagctagatacagctatttcta

SEQ ID NO: 27013 - DNA, 360 bp, Setaria italica
  Peptide Sequence Number=SeqID_92987
ggttgaggttgtcggcgaaccagctgtcgcggccacttctgccggtgagggcgtcgatgagggagatgagcatgctgctgatgaatccgccgatgcccatgacgctgaggtagagcgccaggcccaggctgcggaggccgtggggcatctggtcgtagaagagctcctgcaggccgacgacggcgagcacgtcggccacccccatcatggcgtactgcggcaccagccaggcccaggtcatgggcacggtggccgccgggtcgtcgacgaggccgtggtcccgcgccgtggcgaggcgtcgcgcctcgacgagcgcggcgacggagaccgcggcgagcgacgtggccatgcccgcgccga

SEQ ID NO: 27014 - DNA, 458 bp, Setaria italica
  Peptide Sequence Number=SeqID_92988
acatgcatatacttgaattgactttattaatttatttacaaacattggaatgaagagatacttacagttggcgtgatgcaggtgaaccacaaactatctatcacatgctcatgcacactactttcctttccccttttttttttggcgaggtgcactctaaataacttcaaatctaacctcacactacgtacctaggtaccaatggaattaattcaatcattttttccttcacaatgcacaatccacgactgcaggctcctgctctccacgcatcagctagcccatccacccctgcgggaaccccatgcccccaatgttcgccgtgtcatcaaagccggtgtcgtagaagaggccgcacccgtctcccactccgccggagcctagacccatccccatcatcggcgagctggtcacttcctgcgggaagtggccgaggaccgagttgtactgccacatca

SEQ ID NO: 27015 - DNA, 570 bp, Setaria italica
  Peptide Sequence Number=SeqID_92989
ggcttcatggaggaaggccaaccctttggcagcgccaatggcgatcttcagccgtgttgaccatggcaacgacgccgcgtacttttgaagagatgtttctccaggctgcccctggtcatgaactcgtagacgagcagcctgtgctcttcctcgtagcagtagccgatcaatttcgcgaggtgagggtgccgcagctgccccaggaagatgacttcggtcagccattcggtgtgcccctggccgccctcgaggtcgagcagcttgacggcgacgggctgcgcgcgcagtcccggcttggtcttgtcgtcgacgtagcccttgtagacggggccgaacccgccctcgccgatgaagttggtcatggagaagtcccgggtgacggcgcggagctcggcgatgctgaagacgtggaggttggagccgacgagcgagagcgacaggtcctcgggcgacaccatcccgctcagctccgtgaacgacagccggctctgcagcgacctcggcttcccgctcccgctgccgctcccacccgccgccgccgccaccttggctgcttgctcttctcttctt

SEQ ID NO: 27016 - DNA, 454 bp, Setaria italica
  misc_feature (40)..(40): n is a, c, g, or t
  Peptide Sequence Number=SeqID_92990
ctcactctgggctgcttcgggggaggcaaggaggaagganaaagggatacgcacttcttcctttgctgccaaccatggccgccacggaggctggtgaggtccacctgatctgcgagcaaaacttatatgcaacattagggtacttttttttgcgggtaaatattagagtacttaatcaacttcatattcgaaagtccctccttaatctgcaaacgcgagtctgcaaatgttttttcacctcatggctcatggtgtttacgcagttcttcccaaatatcagctgcctccactacttgccttcgatgtggtgactggagcgggcgattgtcgaacatgagcgggcagccgggggaagagctaggcccctcccgagcgtgcgagtaaaagcctcctccaggagccagagcagtaccccctcaccttggaccccttgcccaaccgcatcaggaacggc

SEQ ID NO: 27017 - DNA, 508 bp, Setaria italica
  Peptide Sequence Number=SeqID_92991
taggtaagggtaattactaattgtattcttagaagtacattaaattatcaccaaacattaaaaatgcacaataatcgaaagcgtgtaactgaaagtgaccagctcaacgatcttgcgcctgatgaccatttgattcattagtgcaaagatagctaacatatctctatatattttgatgttatgacctttggatcaaccaagcccccaaattagaccaatgaatcatatagcaccaacttgcaatctaggtaacacaggccaattcctatgacagctttaaatagcacacactggtagacattaaaacgaattacacgacaagcgacaaaaaatattcgaaagtcacccctcaacctgcaaacgcgagtctgcaaatgttttttcacctcatggctcatggtgtttacgcagttcttcccaaatatcagctgcctccactacttgccttcgatgtggtgactggagcgggcgattgtcgaacatgagcgggcagccgggggaagagcta

SEQ ID NO: 27018 - DNA, 566 bp, Setaria italica
  Peptide Sequence Number=SeqID_92992
gcgggtaaatattagagtacttaatcaacttcatattcgaaagtccctccttaatctcatggctcatggtgtttacgcagttcttcccaaatatcagctgcctccactacttgccttcgatgtggtgactggagcgggcgattgtcgaacatgagcgggcagccgggggaagagctaggcccctcccgagcgtgcgagtaaaagcctcctccaggagccagagcagtaccccctcaccttggaccccttgcccaaccgcatcaggaacggcacaacctggaggcagccgaagacgaggacgtccagcttgagccccgtccagccccgccctcctcctccacagctaccgccagcgcgatggagatgtatggcggcgcgcgagcggcggtgggagaaagaggacctaccccggccgaccgcgccgtcgggtcgcagcggcccgcgctgggcccgtgcctcgccagggctaggctgccgtgccgctccagcaccggggccggcccggaccacgcctccggggctgagacggcgggatcgctgaaggggccggagatggcggcgtagga

SEQ ID NO: 27019 - DNA, 305 bp, Setaria italica
  Peptide Sequence Number=SeqID_92993
cccccggagagttcaccatctcgctctacgaggtcctggcccgggtgcacggccgcaacatcgtgccgcagattggcaacatcatgaccaccatcatgcgcacgctctcctccagcgggggctcattcccgctccaccaggcgtgctccaaggtggtgcccgccatcgcgcgctacggcatcgacccttccgcgcccgacggggagaaggccggcatcatcgcctccctctgcaagccgctctgtggcgcgctgatggggaaccaggacggcgccgcgccgggtgcggcactctgcctcaaggcg

SEQ ID NO: 27020 - DNA, 221 bp, Setaria italica
  Peptide Sequence Number=SeqID_92994
tgatatcttcttagacgtttagccttagtggcatctggcttaagagttagccttaccggtgattttggttgttgtcctgcttgagttttgcactcatctggcaagagtagtgtttgaaatagattatgaaggaaccactgatccggcagactggcatctgtgacaaatttgaagaattaaattaaaagaactttgtgcacattgccaataaaaaaaaaaaa

SEQ ID NO: 27021 - DNA, 254 bp, Setaria italica
  Peptide Sequence Number=SeqID_92995
tggccttgtgttaattaaattagatttgcagcaagatcacaagtgccctaagagaagccataggaaatatgaaaagtcgcgtcatcctggcaccatgatgggttaaaattgcacagggaaattacagctgaattttacaaccacagttgccttgtgtcactggcatcaagacctatgtctatacccaagtttttcacaaattggatgtagagcatgtgaccatcgtataagtttcaaccttccactcttctact

SEQ ID NO: 27022 - DNA, 409 bp, Setaria italica
  Peptide Sequence Number=SeqID_92996
gcaactcgatgcccgtcgtcaccttctgcttggcgctgctactaaggatggaggtggtgaagttgaatgcctccggcatagccaagctcgctggtgtggcgctctgcctcgccggtgtcttcgccatcgccttctactccgggcctgcacttagccctgtcaaccatcagcgcgccttccacacccacgcttccgtctccgggcacgcaaacgcctcttccaagacgacatggatcgaagggacgttcctcatggtcctcgccaacatggcatggtccgtatccatcgtctggcaggctgctctgctcaaggagttgccgaacaagatgctggtggccactcggctctgcgttttcagtgctgtgcaatccttcatcgttgcagtggcagccgaggagggtacttctcc

SEQ ID NO: 27023 - DNA, 2443 bp, Setaria italica
  Peptide Sequence Number=SeqID_92997
tggaggggtggcgcttcgcggggggtggcccagggtggctgcaggttctgcagctgatcaaggaacagggcctggtcctggccgcgctgctcggcctctctgccttcttctccatggcagagacttctatcacgacgctatggccttggaaggttcgtgaactagctgaaaaggaacctgagaatggtgttttcaaaatgctccgaagtgatgtcactcgcttcctgacaaccattctcattggcacaactgtggtcaacattggcgcaacagcaattgttactgaggcagcaacagcaatgtttggtgaagcaggtgtcagtgcagcaacaggtgtcatgactgttgccattttacttcttactgaaatcactcccaaaagtgttgcagtccataatgccacagaggttgctaggtttgtggtaagaccagtcgcatggctttcgctgatcctgtatccagttgggcggattgttacttttctgtcaatgggaatgcttaagattctaggcctgaaagggagaagtgaaccatacgttactgaagatgaactgaaattaatgttacgaggagcagagttgagtggtgcaattgcagaagatgaacaggatatgatcgagaatgtcctggaaattaaagatacacatgtgagggaagtaatgacgcctttggtcgatgtagttgcaattgatgctgtcgcaacacttattgatttcaaaaatctgtgggaaattcatcagtactctagagtccctgtttttgaggagcgcatagataatatcgtcggaattgcatatgcaatggacatgcttgaatacgttgaagaggttgaaaagttgaaggaaatcactgttaaggaaatcgcacatatgcctacatactttgttccagattcaatgtctgtttggaacctattaagagagttcaggatcaggcaggttcatatggcagtggtcctcaatgaatatggtgggactattggtattgtaacactagaagatgttgtggaagaaatagttggtgaaatctttgatgagaatgattcaaaggaggaaatccagaagaaaacaggttatatagtaaggcgggaagatggaacatttgatgttgatgcaaatacatcaatagatcaactatctgaagagcttggtattaaaataccagagggccatcactatgagacggtatctggttttgtctgtgcatcttttggctatattccagaagaaggtgcgaaaatgcttgtgattcttgaaaaggattacagagaagaaaatgtggaatatcaggaggaaggttctgatcgccaagatgatagagaaaaaactcaagcttatgaacttgagatactggaaggtaatgcaaggaaggtgggtaaagtcctgttcaagccaataagcagtgagtgtgtagatgtggatgacaagggggtgaaccgtctgatttccaagaagatcatcaaacggaagaagaaagactctggtgatccctgcaacagtgatgacgacgagtgtccagacattacagagaatggctgccctgcagagatactctcacattcggatgataacagtgccgaattggaagatgcaagcagttctagtgcaaaaagatgaccagaaaacaactcccaagaccatcgtactacgggtaataattacagctcaccatcacccctcctaataccccttgttacaacagaagagagaaacatagtagtaggctaaccaaaaaaacagcgagggcaacactgatgagactggcaaggttaacagcagcttagggcgttgcagcatttgttttccagtagcagtagcagcagcagtctagaggtgcagcgaggtgtcgacgtcgacttcaccagggacatgcttggagttgtaggtcttactaggccacagctccaccgcaatggggtcgccgcggagctggaagcttttgcattcgcaggcagtggtcggcacggccgggaataaggcggctgcggtgacagcggtgtcgcgcaggggcctgcacgggtagagcagctccgggtggaagaaccacttgaccggcatctccctctgggcggcggtggcggtggcagcagggcggggagcgagcacgtggagaagcctctcctcccgcttctccctgatcctctccagctccctgaaccgctgctgcagcagcgcgatggaggaggagaacgtcacctggccgtcgctgctctgcacccccatgatggctgagaagtgagaagagccgagctcagctcaggaacagctgctccctctgagtttcccgtttgtgtgtgtacgtgtgtgtctgtctacttcgccgggtgtgtgtggggtttgttgttcgatgagggggtggtcgtgggcatgtgcgtatttataagccgcaaagttttgtcacggcgcaggtcgtcgccttgtggtcgtcttgcaagctgtggggc

SEQ ID NO: 27024 - DNA, 632 bp, Setaria italica
  misc_feature (35)..(35): n is a, c, g, or t
  Peptide Sequence Number=SeqID_92998
gcagcgcatcggacaatggccgtcttcctgacgcngttcagcaggccagggaaagggactccgtccagcggctcaacagcgtggacttatcaggaagaagcaggcaaaagacatgcacatcggagaccatctgggctggagctggattaggatcagctcgcagccctgctgacttctcctctgactgcatactgggcacactaaccaactgcttccagcctggtgactgtgactccgtcgcggccagcaaggttgaagaaggcggcacggcggagcctgacgccattaatgcggatgagcgtgcgcccatcacggtgttgctctccgaaggccaacccgtcgtccctgagcttgaacgctcagcatgcagcggaggcgcagaggaagaaaaatgtgacggccgtggttgcgaagctccagcggagtgttccatatgcctggagcggtgcggcggcgccggtggcggcagcgatgggctcacccagctgcgctgccggcacgtgttccactcggcgtgcctggagcggtggctgcggtcccgcggcgactgcccatactgccgggccgccgtgctccgctcctaacagagactgcagaaactgaatgaggatgaccacataatcaaacggcgc

SEQ ID NO: 27025 - DNA, 729 bp, Setaria italica
  misc_feature (1)..(9): n is a, c, g, or t
  Peptide Sequence Number=SeqID_92999
nnnnnnnnnttttttttttttggtttcaacaatctccactgtttcaagaagaaaactatgaatgaacatcagcacagattataagccagagtagctgcttccaaacaggctaaagatccagccttactgctgtgttaactagctcatttttcctcagactcccaaaacttccctcgtttttcagacctcagtacctgccatactactatgctgctacaagcttggtaaaaggaacattagtggggcaagtgaccacctgatcactaaaaaggtaccctgcctcttcctcgtgttacaagagctatacattgctaccataactcacacttacattctaagcataattccagtaaactacttctgtacagagaaaaaggccatatattctgggatcagcttcggttttcactcgagctcagattcggacacctcttcctctggcagctcgaaggcgtccacatctgcaaaatatgctctctgcctcttcacaaagtcttctggtagcttgggtgtgcttggagggggccgcttctttttagctccatgacaaggtgctgaagaagaaatgggccgagtatcctgagccatagagtctttcctgctgttcttcctcgtggctcttccaagaggagggcaactcgacgttccagcagcagcaacgggctccttgcccttgttgctgttggtggtggtggtggggttcctcctcctcatcctgctccctcgagt

SEQ ID NO: 27026 - DNA, 276 bp, Setaria italica
  Peptide Sequence Number=SeqID_93000
cctggtacggccggcacaacggcgccggccctgacaacaacggtggcgggtgtgggtacagcaacacgaacctgtacccgttcaattccatgacgacctgcggcaaccagcccctgttcttggacggcaagggctgcggcgcatgctaccagataaagtgcaccagtaagaacaaccctgcctgctccggcgagcccaagcaggtgatcatcaccgacgtaaactacgacaccaagatcgccccctacacttcgacctcagcggcacggcgttcgg

SEQ ID NO: 27027 - DNA, 267 bp, Setaria italica
  Peptide Sequence Number=SeqID_93001
gtcgccttcacccacgggactaagctccccacaacgatgtcaacgtacccaacgctgtcgccgccgaagaagtccttccccttagaacactccctcaggcctccctccagagcgcccgccgcagagaaaatctgcatcatcgcctcgtctcgctcctcgtccgtcttggccctgaacacccgatcccacggtggtgctagctgtgcccacaagccatataaatgatttccaagttaagcaacggggtatgcgagattaattagccta

SEQ ID NO: 27028 - DNA, 373 bp, Setaria italica
  Peptide Sequence Number=SeqID_93002
tgcgaaagctggccagcgtgcacctgctcggggcgcgcgcgctcgccgactgggcgtgcgtgcgccgtgacgaggcggggcacctgctgcgggggatggcggaggcggccgcggcggggaggcccgtcgtcgtgccggaggtgctcgtctgcgcgctcgccaacatcgtcggccagatcaccgtcagcaagcgggtgttcgacgcgcagggggaggagtccaacaggtgagtgaggacctgtacgcgtgcggttcgatggatatcataaaaattcaaatttcttaaaaagataattatgtgttgagatcgaacagaaagataaattaataaagtcgcttctagaagtgaataaattaaaaccacatttcccca

SEQ ID NO: 27029 - DNA, 218 bp, Setaria italica
  Peptide Sequence Number=SeqID_93003
tatgatgaggaaatttaccgcataaagcttcccggcagaccaacagatattggtgaggggaaacctgaaaaccaaaatcatgcaataatcttcactagaggagaagcactccaggccattgatatgaatcaggataattatattgaagaggccttcaaaatgagaaatgtgctggaggagtttgagagtagaaagtatgggaagagaaaacccactat

SEQ ID NO: 27030 - DNA, 317 bp, Setaria italica
  Peptide Sequence Number=SeqID_93004
acgcttagatcccagtaccctaggcagtgctcccagataggcccgaacatggaaaccccctcgcagaacaactcaaagaccttgtcgaactctacggaggacgacgacgactcttggagccgcacgttttgcacgtggtgccacgtggacacgagcacgtcctttgggtcccggcacaggtacacgagtcgtcggcagccgagaggcagcgtgcctgggggcagcagcgccggcgggacgtgcgtgcacagcagcctcggagaggggagcgcctcgagctccgctaccgggtagagggtccggtcggggagctcgag

SEQ ID NO: 27031 - DNA, 559 bp, Setaria italica
  Peptide Sequence Number=SeqID_93005
aggaaacgagggaacaattctgtgtcttctctcattctcagaacatatttcctttataaagttccatatcagaccaaagagctgcataagttcagatgataaactcgcccatcctgaggtcaggacataggtgatgaagaaggtagcctgtccaggtacagctctagcaagctggataggaatatccttcgggcttgataacacactcagttgacttatgacagtaccagataacacagtaacaaagaatatgttccaaattgtgaagtacagcactttacagcatgcactcctcttcctttcactgtgcgatgtaggaccctccaatgtagaaaatagcatcataattggtgcaacagtgtacagaaatatttgcagtatgacactgggaaggtatccagttaccagctgcgtcatgtagtatttcttctttaatattcctcttaggaaaggaagcctctgctgcagctgctctagctgagataatccttgtataaatgtcaccggtaccagaaataagaacatgaaacaatagagcctagcagtgtagctataacga

SEQ ID NO: 27032 - DNA, 261 bp, Setaria italica
  Peptide Sequence Number=SeqID_93006
tacagcaaaggcatatattattacagtgttgtattataatgaatgcccttgaagccaaacaaaaaataaagcgtgatagacagaagggtgtatactgctaaaggctagcactaatcttccaacaaagttcaatttatccagccccttgtgttgaagagtgcagagttctgaaaatttataatctacaagactccaaaagctttcatttggcacatggcactaatggcacaatggtaaatcttgtatggaaacactatttag

SEQ ID NO: 27033 - DNA, 307 bp, Setaria italica
  Peptide Sequence Number=SeqID_93007
ttggcctaaaaaaggacgagtcaccatgtttgagttgctctgatgttaaaaggtttgaatggtttgcagattgtgccagcaagtttgtaagggatatggagtctggctgttcactccggcaatacaccttttgcaaccctcttgtcaggcatcttcttcaagggaaaatgctcgaatatgaagtagtgcaaagggacctcctgcgccgttttcatatatggcccataagtttggactccacaccacgcgcttcagaactagcctatcgctatgatgatcgcaagatgccacacaaaagtttccaact

SEQ ID NO: 27034 - DNA, 704 bp, Setaria italica
  Peptide Sequence Number=SeqID_93008
ctgctgcggaaggaatgtgtggtgactgcaagactttggtggaatggaactgagtcttattcttgatggtggacaattgacatacctgcttgacattgtcataaacagttgaaggttcactgaaatcaaccaccacaccagttgctctggactgaaagaacagacagcgcaaattagccaaagatgccctgaagaagcagccgggaatttacagcggcaaggtctgtacttgtgctatggagcccagaaccatagtgagatcattgagcaccggaagttctagcggttcctccatgccacttatctgaagcgcaatgccagcattcacaaacagtttgagataaagaacacaagcagcagcttcgcgatggaaatgcagagacaaatgcaggggaaataagcacattgaatgaacggtgagcacctgtcctgcgtcttctccaatgcactgggaatcgatggctcctgcaagctccatccccctggctttacacactgcagcaatcgccgtcctcccaatttccttcgtggccccaatgataacaacctggacgtaataacaccggcaggctttgccctcagaacgaagctaacggagacagggaagttggcttcttcaataacacaagctacagtggagtaccttaccttgattgtgctctgggacggtggtggcgtctccatggagcagaagaccttggctg

SEQ ID NO: 27035 - DNA, 538 bp, Setaria italica
  Peptide Sequence Number=SeqID_93009
cctgtattgcagcttgttgaaggagcactgagccaatggataatgttggtgcaaccaagcaacccatgcttgccttctcgcaaaatgctgacagttcagttactgtatctaactcaatttttggaacgtagaccacactgcttaaaccaaatgctgctgcctgcttgacattgtcataaacagttgaaggttcactgaaatcaaccaccacaccagttgctctggattgtgctatggagcccagaaccatagtgagatcattgagcaccggaagttctagcggttcctccatgccacttatctgtcctgcgtcttctccaatgcactgggaatcgatggctcctgcaagctccatccccctggctttacacactgcagcaatcgccgtcctcccaatttccttcgtggccccaatgataacaaccttgattgtgctctgggacggtggtggcgtctccatggagcagaagaccttggctgcatttctcctaacaaattttccgcatgttgtgattcgaacagggtggcataacgaaac

SEQ ID NO: 27036 - DNA, 278 bp, Setaria italica
  Peptide Sequence Number=SeqID_93010
tcgcacacattaacataatgtatcggtagcttaaccaagtaccacagaaatggtcagaaccagctgggcaaaagtacacttatgtcggtataagtgcaacaacaattcccaacatacttgcatccccattctacttctgaaatttcttttgacccctgactgtcatgtggctgtgagacatttctgggcaacaagctcaaatcatgtggaatcaaaggatcttcattagcaaactgtacaaatcagccctgatacattaaggctttcagcatggacac

SEQ ID NO: 27037 - DNA, 443 bp, Setaria italica
  Peptide Sequence Number=SeqID_93011
ctctcttgcaaggtggatcatgtcatgatgcagggaggggacctgtccaacatcgtgcagtattacggtggggtcggcggcgccaccaccgacccggaccaccttgccttcccgcggttcgagaacctccgcgtcgacggctcggacctcgacgatgacaccgatggcgggcaggtcaccccgaactcgatcctcgaggacccgacgcagcactatggcaatggtggtggcggtggcgggggatcgagcgacaatggtgacactagggtcggcaatggtggcaatgcgaggcgcggccaggcggcgaagaggaagaaagggggagggttcttcccccagatcgtcctgtcgctcggcaacaggaggaagggtgccccccacaggtccccctctggcctaagcaccttgtgatgcaccctggtgttcgttatcactggctatag

SEQ ID NO: 27038 - DNA, 267 bp, Setaria italica
  Peptide Sequence Number=SeqID_93012
ccatggctactgatgggtggagggcatatgtgtaaatcacttgttcccccggacttgaagaaagattgtgtggactccaacagtgaagggaaaaaaactgaacggtgttaagcacggattaattaacccgtgttaactttggaccgtcatctcgtggtgggcgttcggcttttgctttcccacccgagaccagaacagcaggcgcaagcctgcgcttctcggaccgagagcctaaaccagagctgaactcctgtggcaaccatagga

SEQ ID NO: 27039 - DNA, 285 bp, Setaria italica
  Peptide Sequence Number=SeqID_93013
agtgccgaagccgatgtccggcgggaggtcgtcgagggaaacggcagggagcaccgcggtcgcggcggaggccggcagcgaggacagcacggcggcgtcggttgccgggttggacatgccggtgagcgtgaccacggtgaccgcgaggccgtggtccacgacgagccgccgcgcgagctccaccagcgggatgaggtggcccgcgccgggactcgcgaacagcacgacctgattctgcggcgacggcggcagctcctctgtgcacgccggcagtggcagctccgt

SEQ ID NO: 27040 - DNA, 618 bp, Setaria italica
  Peptide Sequence Number=SeqID_93014
gtaccttccatctatgtcatcgcttctttgcctcaccgactgatacagcgagcgagccggccggccggccatggcgtcgcggccgacgatgcgggtgaccatggaggtgggcgccgacggcgtggcgctcatcaccatctgcaacccgcccgtcaacgccctgcaccccgcgatctttgacgggctcagcgagaagtacggcgaggccatggcccgcgacgacgtcaaggccatcgtgctcaccggcgatgcaggaaaattctgcggaggtttcgacatcaatacgttcgcacggattcatcagactggaaacatgtcactgctgccggactctgttaagcttgcgtcacatatgatggaagagggcagaaaaccttcagttgcagccatccaaggccttgctctgggcggtggactagagttgactatggcttgtcatgctcggatatctacccctcaagctcaacttgggctaccagaactaactcttggagtaattcctggatctgggggaacccagcgtcttccgaggcttgtaggtcttcccaaagcaatagaaatgatgctgcaatcaaagttcattacagcaaaggaagggaaggaacgtggtcttattga

SEQ ID NO: 27041 - DNA, 565 bp, Setaria italica
  Peptide Sequence Number=SeqID_93015
atcttgggtttactgctcttcggcttgctctccaaacttaaatgctgtagctcatggtccaaaacaagagttatattttgactactggaaggaacactgctactagttccgccaagttcatccaactctgctgatgcacttgggtccatacttgtatccttttcagttacaagaataccactatccatcgtcttctctccagcgacatcaactgaatctttaattaaaacctctgtgtcaacttttctaaaatttcttgatgattttaagcccgtagtgaccatgtcatcaggagatggcgtgtccgacttgaaaggcactatgttaatgtggcgctttttgttgggcatgtatgtcttgtgcagagcatccatggtagcttgcttattccctgttgcatttctattgtcttgggagccatcagagaaaataatagcctctgacttcgtactagatggtgcaaaaagagatcttgccaatacggacactccagaatacttgtttctgcgtttagctccagcttcagcttcactgatattattgaaatcagtgacacatcacgaag

SEQ ID NO: 27042 - DNA, 396 bp, Setaria italica
  misc_feature (393)..(393): n is a, c, g, or t
  Peptide Sequence Number=SeqID_93016
tttctcgcatgacgctgaagaaaagtctcagagctgttggaacgacttcaatgttctgaacaagttggcaagccgggaatgcaaggattggaaatgcatccctttgctatggtatcttacaatggttcagttggaaccctctaagctacccatagcattttcaaaagcagtcctttggggattgtctcatatatctgttttagagcctgggttagctacggagtcgtcggtgcctgtgaatgtttggttatcatcacatgtcggagaagtttcctcaacatttacatggcaagttccaaatggtgctgatgatggtggaagtgggaaggattgtatcaataccctcaaggtgtcactagttttgcgttctcttattgaaagttatttaaaagntta

SEQ ID NO: 27043 - DNA, 632 bp, Setaria italica
  Peptide Sequence Number=SeqID_93017
ggggcagggcggtgaaggcgttaccgtcgagcgcgagggtctcgagggagcccatccgggccagggagggcacggctccctccagcgcgttgccctggagcagcagccactggagctcggtgaggtcggagagggatgcggggagggtgccggataaactctgcttggcgaggttgatgccggtgacgcggccagcgccgtcgcaggtgatgccctggaaggtggcgccgccgcagacgtcggttccggtccaggacggcggtgggttggtcagtgacttggcgagctccaagatgacgcccgcgtcggccgtattggccgtcgccgcggcggcggggccgggggcggcgagggcgaggaggatgaggaggggcaggaggagaaatccctccctccccatggcggattcgccagaccggggcgcaaattcggcggattctttggtggaggattgatttcttgcctgggacgggaagggatggtattttggggcgtctccggcagcgtggtggttgtggttctggttctgttccgttcctccaccccctctccctctcgtttctctccctagcttctctctcttgttgcagtttgcgtgtgtgtgtcggagctttctctctcctggatggatc

SEQ ID NO: 27044 - DNA, 321 bp, Setaria italica
  Peptide Sequence Number=SeqID_93018
aaataaagaactctattgaacgtgaggcttagcttgggatttccatgacaaacgtcgaagcgtagcaccaaaagaaaccaaaaatcaacaaggcaaggtggcaaatgtaacgaagacatctttgcagaaaaaacatatggaaggagaaatattcacttattgctttacactttgttactattttataatgtaaaagagagagtccctccacttcccttgggctaaaccgccaaatggcatcatagataggaactttggaccatcccaatcccaagaaaagttaccagaaattgacctaagcaacccaatggacggctgcgg

SEQ ID NO: 27045 - DNA, 506 bp, Setaria italica
  misc_feature (439)..(439): n is a, c, g, or t
  Peptide Sequence Number=SeqID_93019
cacaatcaaggcaaccggttcatacacaatcaagagattcttcagtctccctgattcatgctgcgcccttattacacaagtcagctgtcaacaacaaacatcgaaaatccccaagaatgaacaatagcagtccagcaaaagctacagaaagcagcattcctgtgggctgcagcgttgcacaaaaacaattagcaaaaggacttatgtctagaccaaggctgctctttcgaatcaggatttctgactggaccacaaaatttgacaattgtaggttgtgcaaagatgcacagtttctgacaacttgtcttttatattagactgaatattgattcaccagaaactcaatactgataaaagatgcaaactcaagacatagcatgtttgaaggtagtgatactggatttactgaatgcaagagagagcttaattgaaaaaaacngaaacacagttttccttatgtggaaacagtttcctccctagaatttctcagcgaagtttctccttca

SEQ ID NO: 27046 - DNA, 628 bp, Setaria italica
  Peptide Sequence Number=SeqID_93020
gtcaagtggaatcagaatcataaggcatgaaaaacacaatcaaggcaaccggttcatacacaatcaagagattcttcagtctccctgattcatgctgcgcccttattacacaagtcagctgtcaacaacaaacatcgaaaatccccaagaatgaacaatagcagtccagcaaaagctacagaaagcagcattcctgtgggctgcagcgttgcacaaaaacaattagcaaaaggacttatgtctagaccaaggctgctctttcgaatcaggatttctgactggaccacaaaatttgacaattgtaggttgtgcaaagatgcacagtttctgacaacttgtcttttatattagactgaatattgattcaccttatgtggaaacagtttcctccctagaatttctcagcgaagtttctccttcacagagtgcttcttggcagcatcccgcactttttcaatgtatccttcaattggtggtgtgagtgtcgccatgtaccggtttgcagggaaaggtgtcatgtcaggtaccatagcagcagcttgcagcttctcagggagcgcagcaatggcctcctttttgagtgtcagaagcgttgactcagctgtttgtcttgcacggtgccgccgca

SEQ ID NO: 27047 - DNA, 1258 bp, Setaria italica
  Peptide Sequence Number=SeqID_93021
tgataatttattatgaaaatttgtttgtcctgggctcctttctacaattgataatggcatttaacccatatacaatggaattcagtgaagaaaaaatgcctaaactctcctcaccttatgtggaaacagtttcctccctagaatttctcagcgaagtttctccttcacagagtgcttcttggcagcatcccgcactttttcaatgtatccttcaattggtggtgtgagtgtcgccatgtaccggtttgcagggaaaggtgtcatgtcaggtaccatagcagcagcttgcagcttctcagggagcgcagcaatggcctcctttttgagtgtcagaagcgttgactcagctgtttgtcttgcacggtgccgccgcataagcacacgactgtattctttggcaagtcgcctaccatcctcgactgtgagctcatacttggggattgcctcctcatcaaccagcccaagactgatatagtcaaggcccggtggacccatcagcacatggtctccatcatctgcaccagtacctttggatttggctttagctttggccttggccttggctacatcaagctcgcgttgcctctccttggatataagtccaagctcctcacgtttggcctcacgaagacgctcctttggggacaagtgccgcaggggagtagaggcattgagacaagactctgaaatctgagtaatgcgctccatggcctcacgacgaccacgtccacccccacccccacccccaccagttgaaggcacccctttctttgccccgatgctggaacgcttcaaaggttgtcctgctttgagcttggcctttcctttggctgtgccactcactggtgcacgctgttgaagctggtgatgctgactggtcacaccagatgccagtgcagggcttatagttagtgtcttgagacgccgaaacatgatattccgtgcacttgaagccattcagctatgtttcccttccttgtcgtcgtgatgctgttggagctcgtgggcgcggaagacaaagctgtacagctagtgttgttgatatgtagacgttagctgtggattcgccgatggccgcggacggagcatcacccgaatcttgcgcggcgcgcgtcaccgtcgtcggagcgtgggacggcagggtatgggcgccggggttcgggcgcaggagacagccacgtcaggtaatggtctcaggtcgtcggccccctctcctagcgacttttcagcacagcagtggcggccggcgggctggggc

SEQ ID NO: 27048 - DNA, 732 bp, Setaria italica
  Peptide Sequence Number=SeqID_93022
cctcgccgtcgacgtcgccgcgcacctcccagggccgtggcacctcgccgtccgacgtccccgacctgctcaccgtcgaggggctcttcgcctccgggtacgcatcctgggtgcgcatccgcctcgagtaccttgcgccggcgctgcagttcctggcgaacgcgtgcgtcgtgctctttttgatccagagcgccgaccgcctcatcttgtgcctcggatgcctctggattaagctaaggggcgtcaagcctgttgccaaggctggcggcaaaggttcggacgacgtcgagtccggcgccggggagtttcccatggtgctcgtgcagattccaatgtgcaacgagaaggaggtgtaccagcaatctattggtgctgtttgcagtctggactggccaaggtcaaacttcttggtgcaggtgctagacgattctgatgatgctgccacttcagctcttattaaggaggaggtggagaaatggcaacgtgaaggtgttcgcatactgtaccgacacctggtgatccgtgatggctacaaggctggaaatctcaagtcagctatgaactgcagctatgtaaaggattatgagttcgttgttatctttgatgctgattttcaaccccaaccagacttcctgaagcgaactgtgccccatttcaagggaaatgaagatgttggattagttcaggcaaggtggtcttttgtgaacaaggacgagaacttgttaactagac

SEQ ID NO: 27049 - DNA, 1461 bp, Setaria italica
  Peptide Sequence Number=SeqID_93023
agggtgtttattgcagttccatgctgaggctgtatcccaccaatatgattttgtctatgggaccgatgatcggtgcggacctctttggtcactggcacagaagcccggccaacatatttttcattccgatcatgtgtaaatgtggacacccgctctccataactcttccacagtaacattttcttctcttttcttgccctctttctagatattacaagacagaaatcattgtccctgcttgtgtcgctgcacaaatggactgcctggactccactgcaagcaccaatgccattttgggaacaaataccactatcataatcaggtttctctagccagttctcatcaaatccactactagagctgcaaaattctgtcgcttcacacggaccaggttcacgttcattgcttaagattaacagagtcttggtatcatggttacagttcacactactgccagcataacatgtttcctgagctgaacctgtaaacacggaattttgagcactgtccaaataccttaagttactgctattacattgtccacgcagtcctggacacgaaattgccgatctagacggttctgtctcatcacagtaggacgcactggaaactgaaccaactgagcagcaacggtactcattatcattgtcactctcaggagcctcttcagaagcttccttaacagatgaactgggagaaaaagtttcctcaaagtgtatgtcaccaacgtgcttaggtgacagtgtcaaatcttcacaatcaccttcatcgactgcaggggcagcactgttagtctctccgcatttagcttcaggcccatccgttggtttcctacaacgttgcctgtgcttcttgcttttctttttgctcttccttcttgaagtatgtcttgcattaccacttggcttggtaaagctgttgactaagaaatcagaattggacgtgctattggaagtggtggatctatcttccagtagccttgatgaattacctggccatcttctgtgagatccatctggaggatatggcaggaaaagaattgatggcgaggttggtgataaggatgatgtatcttctggagatataggttgagatgagggatgattgttcccattctcggtgagcgatggtgatttgaagtcgaaacaacataaatttatgggaataaatgtcacgacaatacacctctgttgttgctgtcttgattcaaggcgtgctacttgacgctcaaactgaaggttgagtgggttcttcctctcggatggtctcccaaagaggcgacgaggtctcctatttgcaacagcatcagcggttccagtaggcattccatgttcaggtggcatgtcgcatgaatcccagaaccagaaggcgaaggaaggatctccggtgcgcgatctcgatatcccgcggaacccaaggaggaggagaggatcctccctcctatctcatcttccgtctgat

SEQ ID NO: 27050 - DNA, 420 bp, Setaria italica
  Peptide Sequence Number=SeqID_93024
ttttttttttttctttttttcaagggaacacatgtgcctttcttaaaccagcattgagagacccattaaaccaggtttagcaaaatggacccatacaacagccacaactagtacaaaacaaaacagagcgatctgcaaaaatgctgtcatttcgggaagtgggggttcagcagcccagagatttcgagaaacccaacacgatcacggcctccaaatatcttcttcagtttgtcgtcacagactataatcttcttgttatctggatcctggaggttgttgcccttgatgtgcgcccagacgagtttgatggcctcggtccgtggcagctccgcggcgccgccgacgaactcccgcagctcgggcgagatcggcttcggcttggtgatcccgctcgccggcctcttccttcccgcccccgcc

SEQ ID NO: 27051 - DNA, 255 bp, Setaria italica
  Peptide Sequence Number=SeqID_93025
gtgttcagctctctcgtcaatcgaccacactttaccgctaattgttcattctcttcatgtgtcgaaaaaatgggtgatgtgaaacatatcagactgacggttcggggtgctagtcagacgaaaattcaggattcaattcactataatcttgtcccagccggtggtgtagactatcacagatacaccaaaggttcagacggcagcagcttcacggtcgaagttggaggccgtgtggacgtcgccaggttgtacgaa

SEQ ID NO: 27052 - DNA, 330 bp, Setaria italica
  Peptide Sequence Number=SeqID_93026
tgtattacgggagagatgactaccgtggtaagaggctgaatgggtacaggaactatgagagcctctccaggtcgcacgagttgttggattcggagtgcaaacaagtggataaaaagagcacattctatgatttctgtttcaacacaagacttgccaggacaatggtagttcattttcagctgagggaccttgtttgggccacatccaagcatgatgtctacatgtcacagaattattcagtgatgcactggtcttcccttcttcaaagaggggaggaagtgctcaatgtgatagaccatgtatttccaaagcagaaggtccgtggagccc

SEQ ID NO: 27053 - DNA, 1262 bp, Setaria italica
  Peptide Sequence Number=SeqID_93027
tagttagtacttaattaattagtttgttaactaagtaacaccaactatgaaaatttgcaactaatgttttttctactccaaaggtgctaaccatgttctgaaaatttgcagctgagggaccttgtttgggccacatccaagcatgatgtctacatgtcacagaattattcagtgatgcactggtcttcccttcttcaaagaggggaggaagtgctcaatgtgatagaccatgtatttccaaagcagaaggtccgtggagcccggccattgttcagaatgcagatctgctccatggccgtaagagacaatctcatggtagcaggtggtttccgtggtgaactggtttgcaagtacattgatcaacctggagtggctttctgtacaaatgtcactgaagatgatgataacatcaccaatactgtagatgtgtacgagtctcctaatggctcaacacgagtgatggctggcaacaatgaccgtgtcgtcagagttttcgatactgagaggttcagtgtacttagccactttgcattcccatggtcggtcaatgacacattagctagccctgatggtaagcttgtcgctgttcttggcgatagttctgactgcctgatagctgatcttcaatctggcaaggagatcgcgagcctcaaggggcacctggactactcgttctcctcagcctggcaccccgacggccgcgtcctcgccacggggaaccaggacaccacctgccggctgtgggacgtccgcaacctctcgcggtccttggcggtgctcaaggggaggatcggcgccgtccggggcctcaagttctcctcggacggccggttcctggcgatggcggaggccgcggacttcgtccacgtctacgactcgcacgccggttactcggaggagcaggagatcgacatcttcggggagatcgccggcgtgtcgttcagcccggacgcggaggccctattcgtcggggtcgccgaccggacgtacggcagcctgatcgagttcggcaggaggcatcgctacgactacttgaactcgtatctatgaagctgcaagggtcaagggatgtcagtgtgtacaaaatgcaaaatacatagtggtatggtcgttgtgtttgccaaaggcataggtgcatgctgtgtgcgcctttctcgaatgcttttgtaaggaaaggatgtcagtacatgatttcgaatgcttaatgatgagagtcgctatgctaatgttttgcccggccggtctacctaaaaaaaaaaaaa

SEQ ID NO: 27054 - DNA, 616 bp, Setaria italica
  Peptide Sequence Number=SeqID_93028
cgatggagatggacttggtcgacgacttggagttgctggacgactacgacgacttggagttcgacgggttcggcgtcgccgccggcgacacctccaggcagaataagaacaagtatgataccacttctgctgcagagtatagaaatggaaaagacatgcaagggataccgtgggagaggctgtattacgggagagatgactaccgtggtaagaggctgaatgggtacaggaactatgagagcctctccaggtcgcacgagttgttggattcggagtgcaaacagtggataaaaagagcacattctatgatttctgtttcaacacaagacttgccaggacaatggtagttcattttcaggacagcactgcaacactatcctttcaccagggcccataagcaggtggacgagcatcctcagcggccggcgttgttgtcaggacatctgtggaatatggtatggtaggttgtttatgataagcgagcctctgctggataattcatgctcgcatttttttggcaggttggaccttagatagggactaacaaaattttatgcaggacgtgccatatggtgtcaacttttcacaaattatgtgtctgaatgttctgttgtga

SEQ ID NO: 27055 - DNA, 656 bp, Setaria italica
  Peptide Sequence Number=SeqID_93029
tctcgcttcgcttctcaagcttccactccgatccaaccaaggcccggaaaactgccgcctcgcccgcctgttcgccgctccggacggccggtagcaagcatggcgcacgacttgtgcgacgacctggagctcgtcgccgccgacggcgagtacgactacttcgacgacgacttcggtgacgggttcccgaccgccagcggtggcgaatccggcctgcagcatgagcaaatggatgatacttcagcttcggactataaagaagggaaagacatccaaggcataccctgggaaaggttgaactacagtagggaccagtaccgcgagatgaggctgaaggaatacaagaactatcagaacctcacgaggtcacgcagcggactagaacaggaatgcaaacaagtggagagaaaggatactttctatgatttccattccagcacgagatctgtcaaatcaaccatagtgcatttccagttgaggaacctcctgtgggctgcttcgaagcacgacgtgtacctggtgcagaactactctgtgatgcactggtctcccctgttccagagaggaagagaagttctcaatgtggccggccagttgaccccaacagaggatgtcaagggggctagaccattgtcgagggttcaaatacaagtaac

SEQ ID NO: 27056 - DNA, 462 bp, Setaria italica
  Peptide Sequence Number=SeqID_93030
aattcatggtaatgccaagtgatcctgaaggctgttggattgagtaagaaattttggagtttatgattgtcaatcatgacaatcaacataatgcttagcaattttgaggaaaaggatgtgcatcaaactgggacaagagtgtttttttttgccccttcaagtcttgcttgtcgcaagatgttgttgtttttacccttgcttattttttcataatgcattgcatttttgcatatccagagtcatttacaacaaaaggggatttagtcagacaatcagtctgtctatgcgagtaagaaggataaacagttcatagaaaaaaacatagatcagaacggctgaaatgttcattctacaaatgttagccacttgcatttacacccttcttttttgtagatgttacgatatttttgaaggtttgactgctttccgtttcagtaggtgaagtttctgtttacctaacaa

SEQ ID NO: 27057 - DNA, 1396 bp, Setaria italica
  Peptide Sequence Number=SeqID_93031
gtgcatttcctagttgagttctctgaaacatgtgtttcatttggagctattgtgtgtcatcattctgaagttgaggaacctcctgtgggctgcttcgaagcacgacgtgtacctggtgcagaactactctgtgatgcactggtctcccctgttccagagaggaagagaagttctcaatgtggccggccagttgaccccaacagaggatgtcaagggggctagaccattgtcgagggttcaaatcagtaccatggcactgaaggacaacctcatggtggccggtggtttccagggagagctcatctgcaagtacgttgataaacccggggtggcgttctgcacgaacctgaccggcaacaactactccatcacgaacgccgtggacatcttcgagtcgcccgatggcgccactcgggtgatggccgcgaacaacgactgcgtcgtcagaacgttcgacaccgcgagatacagcctgctcacccagttcaccttcccgtggtccgtcaataacacgtcggtgagccccaacggcaagctgatggcggtgctcggcgacagcccggactgcctcctcgccgactcccagtcgggcagggagattgcgacgctccgcggccacctggactactcgttcgcgtcggcgtggcaccccgacggccgcgtcctggccacggggaaccaggacgcgacgtgccggctgtgggacgtccgcaacctctccgagccgctcgccgtgctgggcggccggatcggcgccgtccggggcctccggttctcccccgacggccggttcctggcggcggccgaggccgccgacttcgtgcacgtgtacgacgccgcggccgggtacgccggggcggagcaggaggtggacctgttcggcgaggtggcgggcgccgcgttcagccccgacggcgaggccctgttcgtcagcgtcgccgaccggacatacggcggcgtgctcgagttccggcgccggcggtcgtacgactacctcgactcgttcttcttctgaggtgcccagccggccggccggagtgtatacgtttgttgtgtaccgaagcgcactgtttttgtcgtgcgcgggtcctgagtggtgcggcctgcatttccgctctttttgaactgcggagtggcaaggtgccctcaggacgttggttcgtgtattgtatgtcgggtgacgagtgtagacattttgaatgtggtgttctaggcactgtagcttgctataggggcatcgtggatgatgcctggtagtgtaagaaatgtaagtctctgaggtttgcgtaaggtaagaactgctgaagaagagatagttcgcacagaggtgtatccagttcctccactgttttgggccttatttgatcgcggtatccttttgagagaccaaaaaaaa

SEQ ID NO: 27058 - DNA, 1860 bp, Setaria italica
  Peptide Sequence Number=SeqID_93032
caaatcaaccatagtgcatttccaggtacaattttacttggacaatttcatgcaaacacttgcatgcatatgaaacagccacttgcataaaagatattttgggtgaggatgtgaaggttccattcagtttactcacaaattattatctttttacatcaaaatattgaagttgacactaagaaaagtattcagctgtcattgctaatagccattttcacctaaaaatgacggatctgcattcataaagtgccagagtagcagtatacttatttcattccgttggtcatggggtcatgggccatcatacaaatcagcaatttaaaagttgctgtgccaagatgtgtggtgcttcttgttgattttgggttacttcactgttcattacttcagtttgcatcatgaagcacagtgctatttacctcttgaggctttgtgtatattaatccgaagggttggtaacaagggtcggttctcacacccatcacggcctctatcccgttttttggaaaaatacaatcagagtcctggttgccacagttacaacatactttgtcattggagcatactaatagaattaccaaactgagatgtctgcacaagcacagagtccgttgcggattgtgagcttcccttctattttcttcctgtcaagtttacagtgtaagcaatagcagatccaattgtgaaatagcccctcttaaacttccttgtccggcaagttcgattaccgagcaacaacaaatgcactttttttctaaagtattctaacttgtccatgagaccacgaaaaatattttgtactgctgtgcatatcgtcttgtacgagttattgatttataccatctatattaaatgatgttgctattcgtgctgctactttctgtgtatgaacgtaacactgattgcaggtcatgtaacgagtcggggttgcatatttgcaattgatcttgtgatattaggacatttgcagtaccatgtttcatcaggaacaaaagcagatggatatgatgagcatcctgagcagccggaacactaactacagggtgggaatatggtatgataggatgcttcatgataggaaaagatgttaaatgaatcagttcgaattgcgttttgcaggtggatggaagagctagcactcacaaattatttgatgcacgatcatttgttcttaaactttacacatagcatttgataggcttctcatactaacagacatggtgtgcaaacttatgcttcgtgttacagtttcgtgccaattgaaatggtgtgcaaagcatggtattcgtttggagctattgtgtgtcatcattctgaaggtagtgctaacatgggacttcaacaacacaaagttcttatcggcctttgtgttacaaattatagatactacgatttacagattgtagacacagaatttggaacattgaatgttccatttcctcctgtatattgtccatgaaaatagaggccctgtcaaaactaacatgtatgtaaggctaacagtgcaatgggtcacaagggcttcacagttgaaaatctgaataagcatctggaattctctcatttgtatgcgtgcaagaatactaggtgctgcttgttcggtctgtgcttgtaaaattgtaaggttggtaccagtgcattagtgggatcgcacataaggacatacaaagttgagcttattcttccatctgtgcatgcgggatgactgaatggatcaacgagtttcatgatacttttaccattaagaaaagacaagtgccacgtacctgaatcatgcatccgtcacatcttgtaaaagatttgtatcctgttgcattctctgaaacatctgtgtcaagtgtaatgaccagtggtaccaaa

SEQ ID NO: 27059 - DNA, 1416 bp, Setaria italica
  Peptide Sequence Number=SeqID_93033
taataggttacctagtaagttaacctttttaggaatagttagtagggaattacttaaaattgctagtaccgtttaatctgctatatatgataatatatgactcctgtgtctttcaactaggtccatgtttcgtatatggcaacctcattctagtacaccacactgaagcttttgcaaaaaagactcattatttgattgtttttttggatgggcataaaaatggtaaattttcattggaaacttttgataaggggctaatggaaaaatgtttctggtacttccagtgcatagaataactagttttgcttatagattagatcccaaaaccttaattgtatacttctaaggattgatgctgtataatctttaatgaatacttatcatggaatcagcaatgctgtaatccaaaaaggaggacaaaatctgctgcattcctgattaaaacgtggattagagctattgacatgtctatgtcattgcaaaacaacaacatagctgccccaagtaacaaagtccatctcattgaaattggtactcttttttttgcctgtgatggcatcccttaatgttaacgagaggattagaagggtggaagaaaacacaaatatgaagaggtttgagctgggagttgtagcttgaacggtgccgtgagatgggatgtgagcatgtaggaagatagaatagatggtgtctagttgaaatggaattcactacagctggacgcatggcttattcagttatgtttgatgtgattgttcacatgtgatatattttatgcactggtggcctctttttgtagatgcgtttcttccaaggtgatcattaaatcatttgtcttttgctgtttgtttgtaaaggagaaactggaaagtgtaggataatttccagccgagggctcttctgtcatacttgcatgctttcctaatgatggtttcgatgacatgctttcctaacgatggtaacttggtaaggatgacatgctttgataatgatggtaaggaaagatacgtattgagcttttgttacaatgcactttgaactttttttatcagagttttcccatatagattatggctgaagtacttaagctagtctatcatctgtcaatcgcttgcacactaatgattgcacttatgtacttgtgtgaggccatcatgaactgctatgcttgtatgatttgtaggaaacaacatgagatataactgattgtgtggatacatgctcattccgtgtaaggagtgacattataactgagattgccgattggttctagtgtgtcccatcccagtgtaacattttgaccactttccagcctttagttagtttgcctggtagtgttgcccatagaagatccgccacccacccacccacccacacacacacacaaagttgcttgggaatatttctcccaaattg

SEQ ID NO: 27060 - DNA, 1977 bp, Setaria italica
  Peptide Sequence Number=SeqID_93034
agaacctagacgagtcaccttgcaccgcctcagcaatttcaacatcaacagccaacaatgcttagaactcagtcacctgctgttggtcaaccttttgggcagggttctttagatctggaaacacgtggttcaaaatcagggaagtcagaaaatacaagcagtgctgctgataatactgctgttagtgaaaataaaaataatggtgctgtatcaactgccatgagacctacgacgttgcagtcattgggtgatgaaaacatgaacagcaaacagaatggttttggtggtgttagaaaagatgcagtgcaaactggttttgcatcacacggtgtagatggttcaattgggagggtggaattgctgaccgggtaggcaattcgcatggtccagttatacagggaggcaaagaccataaggcttcagatgcatctactaatcatgagaaaggaagaccatttcggcagatatcacagcaaaatgcaggacagggctcctatgtgcccccaggcatgggaccacaacatccaactggaccggatagattgcttcctcagcatatgatgcatcctggtcataagcatggtttctctgaaaataaccggcctccgttgcagcaaccatatggtttgtttcattctggaatgacaccaaggccatttggagagaaccagattcagatgccaacgtcacagcctgggagtgttggtatgattcggccagagccacacatggttggtccattacctggtcatcatgatgcaatgttgcctccttttgtcgaacatttgggccatccacctgtaagtggaagggctttccatgaagaggggttcaacagctcaggagaacatctcaggtcacatgcagcatatcctggtagacatgataatgtgaaagacagactgaagcaatttccagggccagcgcatctggatggtcagggcatcccaagtggtcctagaccttttgagagcgctttaggtagacctgatggtttccttgattcaataccaggaaggcctccatttccaaaccagagaagtccgtttcctgtaggcttgcatgatgatttttcaaggaagccaaatgctactgccggtcaccctgattttctttcacatggtgcagaatttgatcatcatagagctgatggaatgcccattttcagaaacccaggtccatttgctcaagggatgagtggtggttctcatggtcctccccataaagtccagcttggctctggtaaccttcctggaaatttacaacattcttttgggggtccggagtaccctccaactcgttttaaccctggtcacatgcatccaggtgatcctaatcttgttgctgactatgctcagcatggatttcccaaagaattagcacactttggtttgggtggacccttgagaaatgggaatgttggttggtgccgaatatgcatgtttaactgtgggagtgcagagaacctggatctgcatgtacagacaagggaacatcagcaatgtgcgatggacattgtcctgaaaatgaagcaagatgttgcaaagaggcaaaagctgagttatggcggccccaagtcattccacaacaaaaaggtagctgggaaaggacactttcgtggaaataggcgttaggtgttagctggttcagcccttgatgtgattttgaaggttgctactgaatactgatgcttatggacgtttcaaaggcaattgagaattgagatctcttcagacttcttgttcatgcagttcagcacatgtgaagtggaacttgtaatggtcccaaacttttgttgccatgttgatctgcagagttcacatgcctttatggttccctgtagttacctttttggaatgttgtggaacttgtaatggtcccaaactttgttgccagtgttgatctgcagagttcacatgcctttatggttcccaacttaggtccaatgtttcgtatatggcaacctcattctagtac

SEQ ID NO: 27061 - DNA, 241 bp, Setaria italica
  Peptide Sequence Number=SeqID_93035
cggagcaacggaggacgacgacgacggagacgacgaggaggcgctcgtcttcgtggtgaagttgtgggaattgatgtagtggaagcgtagggatgatgcgtgggagatgatcagcatcaacgcggagacgaagacgaggggaagcttggtggctgtggcgtgcatggcgctgagcttgcggatgcgtgttcgcgcgctccttttcttctctgtctgctgctgcaactgtgaagtgatcaag

SEQ ID NO: 27062 - DNA, 333 bp, Setaria italica
  Peptide Sequence Number=SeqID_93036
ggacacaggaaggagaagctcctattagttccgaaactagtacgtgtgtagcaccatcattgcaaccaagcgatccaacagatggccaatggatgcaggccggattcttggcacagcatgtcagcatgatgactagttgcgtcagtgtaacaatagtttacttattttcatttttttggaactgtttacttattttcatagattgtttcaattcttgtgtcgaacacgtttgcgcatgcgtactatgatgtcgattggctgttggcgcataccataggtcaccatttgtaataatcagtcttctaaagtaatgaagttttcttcctgtataaa

SEQ ID NO: 27063 - DNA, 145 bp, Setaria italica
  Peptide Sequence Number=SeqID_93037
catagatgtcatagtaaccacgcgcaacgaagatattgcaaggaaagtttccacatgtccaccatacaagctggatgctttgaacgattatacatgctgggaaataattaagagatatagcatgtttgaagatcaacattaccaa

SEQ ID NO: 27064 - DNA, 383 bp, Setaria italica
  Peptide Sequence Number=SeqID_93038
gtggggaatgccgctgacgtcgccgcaggcgtagcggaggagctcggcgtgcgcggcgtcgagctccttctggaggcggtggacctggcgctggagcacggagatggcgccgacgcagccgtagacggggtccttgacgcgcgcctcggcctcgtaggcgagcgagctcacggcgtcctcgcgctggtgagggagcagctcgttgagcagcttggtcacgttgctggcgccgaacaccttgtgcacgttggcgaacttctggggctcctccggcgggaagtagggcgcgaacacgcacccggcaggcacttgcgacgcaggaacttgcacgccgccgcacggcgcaccggcgccgggccgtcgtccgcccccgacgaggccgc

SEQ ID NO: 27065 - DNA, 296 bp, Setaria italica
  Peptide Sequence Number=SeqID_93039
cacacacagacctctagtaactcggcgtccgtccaggggagaggagggggaggcgcgggacaggacgcggacccgcgctcgcgccgccggagaggagacggggcgcgcggagatccgcactccgagcatgcgggccggggccgcccggcggtagatgaaattgaggaacacagcaataacacgagcaaattcagcctgtcttccaatgggggatcgtgttgctgtcaagtacaatagtgtcaatgagggcgaggagcgtaagggaggccatggcattcccaaagtttccatggtcc

SEQ ID NO: 27066 - DNA, 1906 bp, Setaria italica
  Peptide Sequence Number=SeqID_93040
gggctctcacttgacaaggcggacaaatacggagtaccgttggaacagctgcaaaggtcgtgcttaccaaagagtctacaacaaattgttggtgacggcaccacccaggaagaagttactaagagggttgcacaaataaaaaatactcattgaggtagcagaacaggaatatgaaaaggaaaagctcaatgagaggatagcaaagcttgctggtggtgttgctgtcattcaggtgggagcacaaacagaaactgaactaaaggagaagaagttgagagttgaggatgccctaaatgcaactaaggctgccattaacaccggcgtttttagcaatcaatttgagtgggtagctcagggccctcctcactatttcagctccaaccttctgctcatcattctccagtgtgtccttgatggcatcaactttagcagcaagccgcaagagagtgcaccctccaccaacaacaataccttcctcaacggcagccttagttgcatttagggcatcctcaactctcaacttcttctcctttagttcagtttctgtttgtgctcccacctgaatgacagcaacaccaccagcaagctttgctatcctctcattgagcttttccttttcatattcctgttctgctacctcaatgagattttttatttgtgcaaccctcttagtaacttcttcctgggtggtgccgtcaccaacaattgttgtagactctttggtaagcacgacctttgcagctgttccaaggactgatttgtccgccttgtcaagtgagagcccaacttcatctctgattacagttgctccggtaaggatggcaatatcatccaagtactgggtcttgcgctctccaaaaccaggtgctttgatagcagcaatcttcaatgatcctctaagcttgttaacaacaagggtagcaagagcctcctgctcgatatcctcagcaattatcaggattgggtatgcacctctgatggcttcctccaaaacattgataaggtcccttgcgttggtgatctttttgtccaccaaaagcagcttgcagttctcatactcagcggtcattttctcactgtcagttacaaagtaaggagagatgtaaccacgctcaaattgcattccctccacaacatacagaaaattctcagaactcctcccctcttcaagggtaaccacacccttgcgaccaaccttgctcatagcctctgctatcatgttaccaatttcatagttgttgccggcactgactgcggcaacatctgcaagctcactatcttcaacctcctttgacagcttccgtagttcatcaactagtgcttttgctgttttctcgataccacgggtaatctgaacaggattagcaccagctgccacaaccttaacaccctcagcaatcagcccctgagcaaggaccacggaagtagttgtcccatctccagctagatcattggtcttagctgcagcttgcctgactaatttagctccaatgttttcaactggatcctccagctcaacctctcttgcaactgtaacaccatcgttaacaatcttaggagacccatacttgctctccaaaaccacattccttccctttggtcccagtgtaactccaactaggtctgcaagcttattaactccagtctggagcttcttgatagcggagccatccttgttgaagtacagctccttagctgcttttactctgaagttagccctcctctgaaggcgcacattcttaccggttggagcagccataaggccaaccgtagaagtggcaccgaatgtggaagccatatctgcctcgcggattggagccggaggatggcggaggcggagaggataaggctggtggcggccgtcgggggggttgggttgggtcgctgctgcgtgtgtgagaagttg

SEQ ID NO: 27067 - DNA, 455 bp, Setaria italica
  Peptide Sequence Number=SeqID_93041
tggtccctttggtttgtctttctaagttcctattggtacttgtctttctaattgtaagtctttgttcttttggtacttggtcttgttgatatccatccgaggaaggttcttctgcattcattttctttgaccggccctgaggacccatctcagcatcaccattagattcagcatgttggtcactaggatctgcagaactgcttcgttctgaacccatcatttcagattgcctctgatccatgaatgcttgctggttttgtttttctgcagctttttcaccagcaccacgagaagcttccttcacagtacgtgtgacaattggtgctgggaaggatgactgcctcctgggtgtcgatgtcttcattgtacctgcttgtttcgcatcctctacattgatgaagcagtcctcctcctaagactacgttttttaaccttaagactaatttagtacctta

SEQ ID NO: 27068 - DNA, 2611 bp, Setaria italica
  Peptide Sequence Number=SeqID_93042
ttttttttttttttaattgaactttttttctctagatcctgaccctgtatacagaaggagcttatgtcatatggtacagaagccctgcctatgttagcatactgatcctaccagacacatcaagcatgcaacgattgcagtagcaatcaggcaacaatgcttgaaacctaccctgctctagagccagtgagctttctcctggcatgtttcaaaatggaaaatgcccatgcatggcatgtatatatctacggaaagatggacccagctaaagcaaggattgcaatgtcaagacataatcactccagctgacagcctagttctaagaaagaagttcctgcttaactccagaacactaagggccgccatgtcagccattctttatctcaacctgacatcatgagcctccaaccatccagcatgacagcatcttgatgcatgaactggaagccacattttgtggtgggatctgctcgtcctctgctgatagcaatgttttcttgcgacaacccaccacagggtgcaaggaatctaatgcacaagcaagtgatcttctgaacaggcatcggcatcttgctgcatcaggacttcgtcccagatctgtttatcattgttctatgttgtaccaaagctgtaggtagtaatgcattctccttacacttctctcctaccattagatgaatttggtctcctgggaactccaaactgcacattatccctggggcgatcaccaggtcgtccaaaatcatccaaattcctgtaactaccatttcttggaacggaactgagacgctcatcttcatcaggcctgatgttcatgccagccctgggttctggaaacatgtccaaatgtcttggtcttgggccaccagtcctcatgttacgtatgttgttggaagaattcctgcctagagtgttagaaggaaccttcatgggtaggaagtccttgggaatgctatccagatccatgaaacatttcctggacttcgcatccgctataagtgctgcccaatcctcagactgcatgagagcattggcattaccaacaacccacagagctctcctggctcgagttagagctacattcatacgtcgtatatcagcaacaaaacccacaccatggtttgaagcacggacacatgacataataattatgtcacgctcctggccttgaaaagcatctactgtatttatgtagatatccttcccctcctcggtattcataacctccttgaattcccgctgaaggcatttcaactgcaacttatatggtgtgattataccaacagataccttcttgccaccatttgctttcaggaacttctgaagatgctcatacaaacgcaatgcaaactgtgcttcatgaatattctgaaatgaagatgacccacccctatgagactcacggccatgtgacatgtcgtaaaagatataaggtgccataagtgcatctctgtaataggcttcatccggtaatttcacaacactctcactatctgtaagtcgaccttgatagaagtatcttgatggaaactcacggatctggggatgcatcctgtattgcactgacagcaaaatggtaggacaaccagcctgctgaaacctctcaaaaagacttctgctgtaaagcaatgttccagctgctttgctaataacagtagcaggaagctgctgtggatcaccaaccaggacacatctagctgcaccaagcgccaatggagggaggacccctacttcactagcctgagcagcctcatcaataacaaccatgtcaaagccatgagttaggcgagaaaataacttgcgcccgctgcttgacactgttgtaaaaacaatctcggcttcattggcaaaactggcttccagactagccctagcatcttccatattgaagttactcccaacacgaaacctgctttctaatatcagcagacgtgacatctccaccagtactttatccctgctttcaactgacgcagcaagtttctgaagtagaatatcacggttacgatccctttgagccagaacatcaggatctacccctactgaaccctgggatctaccagctgctgcaaccatattgagttctctttgaagataagcaatctcctgtgacagctgctgttcacggccctttagctgatgtagccacccaatcacttcatcgcggcccttcattaaaagctgatccgtcctcctttcgacagaaacagcttgggcagcacgagactgtgaatcaactccaacacgagcaacatcagggcggtataccttcatctcaccatctataaaaccgcggtcaagaacacgagcaagcagctcatctgttgcagcgtttgatggggcacacacaagcatccgaggcttaggacaaagcttgggaagagtgcgaaataggttctgatccatgctctgcaaaagttcatcaattgaccctgcagcaacagtctccgagctggtactagtgctaccactaacttgcttgtaactttcaggagcaagtttcttgagcaaagcagcatagtaatgctgatactgaacaagatggataacatttaacatcccccacacagtatgagttttccctgtcccaggaggaccttgtaccaatgtg

SEQ ID NO: 27069 - DNA, 2797 bp, Setaria italica
  Peptide Sequence Number=SeqID_93043
tactaaggtaagtctaagttttctttgtagtctaaagtctagtctattagtaatgctgatactgaacaagatggataacatttaacatcccccacacagtatgagttttccctgtcccaggaggaccttgtaccaatgtgaaaggccagggttcttgtttcttcacgacaccattgcttgtgcctgcagctgtatgcgttgcagcccagtgaattgccgacagttgaggcccattgaagctgcggtggagatgatcagcaaaatttggggtgaagcagtctggcatggcaggtggctgctcttcatactttggaaaatgctctggacttggttgaagtattgcattttgcatctgcacattaagacggcggaacgcatgcaaagcaacatattccctttgtgttgttgcaagagaacctagtcctgttagataccaagtactccgaggttggagtttcctcagaacattagcctcattgttaaaatcaaatgaatctccaacataaaagtggataatagctccaattggatcacgtgtatcaataggcatatggcgcctaacagtaccaacaagccgtccacattccgattcagcatcttcatttgaaccaacagccctcctactagatcggcctgattgagcagctgaaccaggccgcgggaatgacagaatagcgacatcaccttctttgaaattccatttatattcatgcattggtagaacaatgacatcataccatcctctttcacgtctatccacagtttttattcggactgctacatgtgcatcccttcccgcagcctcaagactctcctcatacgaactgtaaagctgagctctgcattcctcaaaaagcaaaggctcaaaaactctaatgtactcctcagcagattcaaagcttccagggacacactcaagttctgcctcctctggattgtgccagaacttgtcgtttgtgacctcccttataagtcgctcaacagatgagtcctgatattgcgtattgtttacaaaagacggctttttggaaataatagaccttttgctggctggcttctgatcagcagtattttgtcctgttacagctgttcgttgggaagagaaaggtcggccctttggttgcttcaagtccatggactgcttcaatgaagcttgtctttggactggctgttgatatccatccgaggaaggttcttctgcattcattttctttgaccggccctgaggacccatctcagcatcaccattagattcagcatgttggtcactaggatctgcagaactgcttcgttctgaacccatcatttcagattgcctctgatccctgaatgcttgctggttttgttttctgcagctttttcaccagcaccacgagaagcttccttcacagtacgtgtgacaattggtgctgggaaggatgactgcctcctgggtgtcgatgtcttcattgtacctgcttgtttcgcatcctctacattgatgaagacagtctgcctagctcgttttttacctagcattgcctccttgtgttcatttaacttaggtctctttgcagggttgctcgcaaacttcaatgcataattggcttcaactcctttaacatcctttgacctgttgcaagcatctaaatcatccccaggttgatttcctttacattccaaattctgcatgctctctgatcctgtggaaccacgaagaacctgatctttaggtgcatcagccatttcagcatcactacactcagcagcagtatcatctttagtcacatctccggatttaatgagatggggctcactatcttgggattctttcttcacatgagtacttgcagttccaactgactcatctttgttgctaacactgctccctgcattttcagaaacaccatctgcatcagaccattctccttcttctctttcaaccgcttgtgacacctgattgcaaggctctacctttggagtagcattatcactgatgttattggctaccgtggacgatgatgctacactagaattcatgttatcttctgccttcaacgactcctttgtgttatttgaatctttgttcctcacaaaaggttgaaaaccagaaccgatcgatgcgtgcttaaaggcattattatttagtatcccctgtgactgagatccttcccctggctgaaacagagttggggcatgcgttgtgggaacaggaagggatttctgaggttgtgacacgacgacagcagcttcttgtaacacgacaacagcagcttcttgtggtatgacagcaacagcttcttgtggtacggcagcagcagcttcttcatcagcttctgctgggagttcgttaaggtcaaataacatccttccacgagaacccatgtcatgtgtaaatgcatatagcttgaacctttcagctagtggaaccagtaataattttctggaacaacagcacccactggagggaagttactattgcccttctgttgggacaaatatcaggcgatcgtcgggcatcagctgcggcggcggccagatccagccgggcgagggcggcggcggttgactagggttggttccccccgtttgcccctcccctgcttcgttgccttccccctgtgatgcgccgctgggctgcttgtgttgggttcttttttttcctttcctcttccaatatttttttcccttttcggtttggttttggaagagagaggtgggcttccttccggctttcgattactcgcctcgcctctcacgagcggccggtcctctgcgtgacgaacgacttggtgagagagagagagagaggcggggg

SEQ ID NO: 27070 - DNA, 830 bp, Setaria italica
  Peptide Sequence Number=SeqID_93044
gagatgaactgccatgtgcagaattcgttggctgacatgtacgccaagtgtggtagcatcagccaagcttatctcttgtttctagagactcatccaagggatgcagtgtcttacaacgtgatgatcactgctcttgcacaccatgggcatggcagagaggcacttcagctcttcaatgagatggctgaggaagggttacatccagattccgtgacttttcttggtgttttatcagcttgtgctcatgccggacttgttcatgacggaaagcgctactttgagtccatgaggacaagttatgcaattgagcaatccctggatcactatgcttgcatggtggatctttatggcagagctggtctcattgaagaagcatacttcttagtgcagacaatgccaatgaaaccacatgcaggagtctggggagccttgctcaatgcctgtaggaagcattgccaacttgaagttggtaagatcgcagcgagagaactcattacaattgaacccaggaaccctggaacctatgtactccttgcaaatactttggctcgtgatcagcaatgggactttgttgagatggtgagacaatcgatgagagggaagggtattgacaaaacggcagggtgcagctgggttgaagtggacagtgttgttcatgagttcttgatgggggacttcagacaccccaattctgatgagatttacagtatccttgagcatctgtatcttcaaccggcttaaggtttgtgtcgctttcaagattgatatcaaggatggtttcatttacaatgactgaagacacagtgaaatgtacatgaaagatgtgccat

SEQ ID NO: 27071 - DNA, 249 bp, Setaria italica
  Peptide Sequence Number=SeqID_93045
aatccatatattcgtcaacaatcggagccatcttcataagttacaatatcaaaaatcttcagcaacgtttgttgctccgttgctcaaagatcaaaacagagtaatatattagaatggggaaactaccggcagcaatcggcaggttcttctgctttgtacaggtgaaccagtcaacagtaggcatcaaagagagatttgggaagtttgaggaagtcctcaatcctggatgccattttatgccatggatca

SEQ ID NO: 27072 - DNA, 357 bp, Setaria italica
  Peptide Sequence Number=SeqID_93046
taattaaacatatgtagccaaggaacagaatggacatcccgctttgcttcccaggatgcgattggacatttgtgctacatctataaagcaactggaaagcaggagagtacaaggctcattgcaggatcttgtttggctcgcctctctcgcttcagtccatcatgtattcatttaatcctggagaagatatcattcaaggatattgcatccacactcatcaagggaaatccacgtgaacagcagattagtcttaatattctcaattcagcattagttaacagtcagactgtaacaaatatgaaccgctatattctttcattatcggatgacaaacaattggtccctgggctcatctct

SEQ ID NO: 27073 - DNA, 824 bp, Setaria italica
  Peptide Sequence Number=SeqID_93047
aaatctgccgttgtatgtactcaaatcaaacaggttccatgaatttctttttgtataagcgagtgatattgcaaccctggaagcattcctttttagaactgttgatgttggcaacttggcgtctaatttccttcctacaaacacaaatagtttctctttatcatttgttgtttttaaaacctatttgttctcttgattgctgggaatgggcatggattatcttttcttttttaaacttgaagtagtaatgtcaacattttgccaccatctgtgatgaacatggacatccttcatgacagcgattgacttccctagtagccagcattcatcttctgttcagtagtgcttttgcctgcacttgcatgccaaagccattcggttgtcaatctgacaaagtgcttatggataagagcttctgcattctggaacaataccagctgaacatctactggtgtcattactcattcgtaaactatgccaggaacttgacatgctagcatgtgctaatatatcctcctttggtttactcatgttaagcattcttgctgtattttagaaaaaaaatgtaaaaaaggtcatcttgtccataagcattagttttttcttttacgattatgttcctatgcttatatttttcttcttataggtaatgtatgatgcatcaggaatcagatggcacacaggtcgccaagctgcggtaagcttgtgaatttctatgcatattgtgagcataaggcattatcttaatgcactgtatcgtcactgcctttttgaacttgcatgatagcactggtatattgatgtctatcttctaatccagtcta

SEQ ID NO: 27074 - DNA, 573 bp, Setaria italica
  Peptide Sequence Number=SeqID_93048
gtggggtgaagaagggcggcgcccggaccatgccgccgccgtactggcggtggtggctcgcgtggtcctcgtggtggtcgtagatgctcgacacctcggagccggacaggctggagacactgctccgggagtggcagcgctggttgctgacgttgccaagccccggcggcgcccgtggtggctcggagctaggtgacgtggcaaagcgcgcaggcggcgctgctgctgccgtcctgccactcccgttcgcgttcgctgccccttctttcttcgtgttgaggaagcgcccgccggagcctctcgcccgtcgcatggcatggaggtggcgcgactcatgaagatatggctttctgcctttcgccagcctattctccctctcagccttggcgcgagcacggcggcgacggaggatgccttcgtactgcttcggattcacgtagatcggtgcatcagctggcgcattcaatggcaagagaagtctcccactagacatcgatctcatcccatacgtggtaagcatgccatagcactggtcagcagaagaataattggaagggaccatggattgaccaa

SEQ ID NO: 27075 - DNA, 465 bp, Setaria italica
  Peptide Sequence Number=SeqID_93049
tcgccgaatcagcagccccccagcgccggcggacgggcggggcgaggaagccgcggaggaggtgccgagggtttcgactcagcacgctcgcacgagcgcggcggggttcgatcccgcgccgctggagcgcggggtgcgtgcgctggatcggctggggcagtcgacggaccccttagtgttgttcgagctaatgaagaagcaggaagaaacgcgccagcaggaactcgctgcgaagaaagtcgaggagcagaggcaactggcccagcttgagattgagaaaaaacggatagattatgaagaaactaaaaaacttgatcaacagcgagctaaaatgaaggcacagtcagctcaatatgaagatgaccttaaaaggaagcgattacaggcggagcatgaggcacagagggtgaggaaccaggagctcgtgaagatgcaagaggaatctgcaattaggctagagcagat

SEQ ID NO: 27076 - DNA, 205 bp, Setaria italica
  Peptide Sequence Number=SeqID_93050
accgaaccaccgacgtactgcaccttggcctcctctacgccgagctccccggctgtgccgtcgtgcagtccaggtgggcgcgcggcgcgacgaggctgtccggcaagtcgagcctcctctcggctgtgtcccccgtggggtcttccggcggcggcagtggcggttcgcagaaggacaggcagcagccgagtaaaccagaggccgt

SEQ ID NO: 27077 - DNA, 459 bp, Setaria italica
  Peptide Sequence Number=SeqID_93051
aggagatagattgccctataattcactgtgatattaagccagagaatatactcattgacagcaacggggtggcgaagatagcagactttggtctggcaaagttgctaatagggaaccagacacagactttcactggtgtgcgaggcacgcgtggatatcttgcaccagaatggagcaagaacacggcaatcactgtgaaggtggacgtttacagctacggcgtcatgctcctcgagacgataagctgcaagaagagcatggaactgaagctggccggtgaggaatgcaacatttctgagtgggcctacgagtacgtgatctcgggtaacttgaagcaagtggcagctggggaatgcatcaatgaggtggaactggaacggatggtgagggtcggtatttggtgcacgcagaatcagccagtgacacggcctacgatgaagagcgccgttcagatgatgg

SEQ ID NO: 27078 - DNA, 303 bp, Setaria italica
  Peptide Sequence Number=SeqID_93052
gtggggtggggaagaagagcaggcgcagaagcggacgcggaagcagcccaaggcccgagccgaagcggggaggcgacgccgccgcgctaccactcgccccgcccgggccagcgattcgccgcctcgcgggagccagttttggcggcggcggcggaggcgggcgggagttcccggcgaggggttccgcttccggcgaggatgagcggcggcggcggagggggagggggagcgaggggggtggcggggcccgtgccggcgtccgcgaggaagctggtgcaggggctaaaggagatcgtgaacccg

SEQ ID NO: 27079 - DNA, 247 bp, Setaria italica
  Peptide Sequence Number=SeqID_93053
gatgtagcaataagcagttaaggctacagaaatacctgtgtgtcttggatttaagagactgctggctacagaaactaccagattcttttggtcagttaaggcagcttaggtatcttaatttgtcaggatcctctaagcttgtaaatctaccggattcatttggcaatctattaaatttggggcatattgatctatcaggctgctctcagcttttagaactgccagcttcatttggcaatctcacaaa

SEQ ID NO: 27080 - DNA, 718 bp, Setaria italica
  Peptide Sequence Number=SeqID_93054
taaaaccctaaaccgtagttgtaactgttactatgtcctacgcttttaccgtgtttaggtacttctcatgaatctgtaatgcttctctgcatgccttttttgcatccagactaccagtgatttcatttaaaatcttgacaacatcgtctagaccttttgcctcacccagtaacttcttgtttctagcctccagaacactagcaacaacaaagacggatagagggatctcctcttctttcttagctgcttgcaaaattttccgctcaaactttccacactgtcttaggacactttcatcatttgtggttgccctggttgtgccattgtcactctccaacattgaaaaaagatttggattgtactccatagaccacatgagctcccaaaggtacattgtgtccacgaacgagaactccctacggaaaagaaccatcagcattcggaaggcaaataagtattcccctccatcaagatgttctaaatgttcatgtagctttggatcaacagatttcattatggttgacaaggttgtgagctgagctcgaactccaatggaagtagaagtacttatgaaatttcctcgctgcatatttaaaaggtaggaacccaggtttttactccagaatacgttaaaagaagtatagatgtctgtagacattttttgatacattaaagaaggcagataccacatgcaactgaacagcttccagtactccag

SEQ ID NO: 27081 - DNA, 686 bp, Setaria italica
  Peptide Sequence Number=SeqID_93055
cactcggcctcgaccgcgtcggcgagcgccgggtccgcgcggagcacccgctccacggcggcgcgcacggaccggtcggtgacctcggcgtcgagcgtgccggagcggatgtcgcggcagaggcgcggccagtgcttctccaggaagcggatggcgcggaggaagcccgaggcgaagacggcgccgacgcggagcacgtcggcgcggtgcacgatgccgcagagcaggtgcgcgtacatgctctggtacgaatcgacgcagaggacggcctcgtcggggctcgtgtacacggtgtaggggtcgtgcgggcgctcgaggaagtggcggctccggtagaagctcgtgagcacggggcgcgccgggaggcccgccggcgtgcgggattccgccttgacgaagtagaggtacatgcacttccccttgtccaacccggggacggcctggttcataaccggcatgagcagggtgtacatcagcgagcgccggtccatctcgtcggcgatcgacggcatcagcttccgctcccctcccgacgtgccggagctggtgaggaactcgcggatgggcttgccggagaggatggggcgaggtgtcgccgttagcgatgcggagcacgtcggggaggatgtcctcgtaggtgacgagcggcgcggcgcggaggaacgcctcgacggcgcccggcgcgt

SEQ ID NO: 27082 - DNA, 273 bp, Setaria italica
  Peptide Sequence Number=SeqID_93056
cccagcaacaccaacaccaccagcaacaccaacaccaacaccatcagctgccgccgatgccacctcccggagctctcatggctcctcgccctgacatggagacgattgcggtcgctgcgagtggcggcggcggggcggcggcggcccgaccggcggctccgcggtgcggccgggctccatgacggagcgggccaggctggccaagatcccgcagccggagccggggctcaagtgcccgcgctgcgagtccaccaacaccaagttctgctactt

SEQ ID NO: 27083 - DNA, 586 bp, Setaria italica
  Peptide Sequence Number=SeqID_93057
ttaaccggaaatgagtttgcatgaaaagtacaaccagcttgttctatcaggggagtcaaacaagtacaaacccatggctgcaacaccgaaacagagcaaattcttccagttcacattacacaaggtctggtactacgtcccatcttacaagagcatcaacagcgatgaaaacagcacatctccatcctatcatagcagcaccctgctgttgttacggtcttaccgagctcttttctttttgtaactgaacccttactgcaatgacaaatcagtacaaataaatctcaacggataacgaattcctagagagagccccaggaatcagaggaagctccccgacggctaagaacaggaaccaatagcccccgaaaaaactgaatgctgagcttgttagttgactggtatgatctgatgagagctagctgacatgcaatggtctatctattgttttttaggatggctgcaaatgtagtcatacaagggcaaagacccatagcgctgcagcgaaatcacgccgacttgaacatttcaggagcagtccaaattttggctcatatcttggctataaatttcatctgcccttttt

SEQ ID NO: 27084 - DNA, 220 bp, Setaria italica
  Peptide Sequence Number=SeqID_93058
ctcaaggacctcctccacaacacccaccctcccatccccacggcccggccgtaaccaccaccctccaccatggccgacgagtacctagacgacgatgagttcgacgactacaacccgcacccctacgccggcggctacgacatctccgccacctacggctccccgctcccgccctcccccgccacgtgctaccccgtctcctcgcccgccgcagtccccg

SEQ ID NO: 27085 - DNA, 487 bp, Setaria italica
  Peptide Sequence Number=SeqID_93059
ctcacggttacaacaacgaagttttacaagacaatgctcggataaggctcacggttacaacaacgaagttttacaagacaatgctcgcaaaattgataaggctcagggttagatctactaaagatcacggcttggattactttgcaaagaatcttaagcttccaagggttatcaaaagatttgccaagacacaaagaagaaactaaggatacagaatagaccgggggtctatctgcaaaagctcaaagctgggcggctatggcggatgggagttctgggctttccaatcgccggcggtctggggcctggggattctggcgggtggcgcatcgaagagaggatgtggaaaggtaagcccaatcgccggcggtctgggcctggggattctggcgggtggcgcatcgaagagaggatgtggaaaggatcgcggaggtgtgctcaccggcggcggggagagacagaggccggccggaattgggagggtaag

SEQ ID NO: 27086 - DNA, 429 bp, Setaria italica
  Peptide Sequence Number=SeqID_93060
ccctacacaaaatctagtccgtgcatgcgcgcgtcgatcacttctgggcggcagcggctccgccgcggcccatgaccgacgtgatcgccgccgccagcgcagactggaagctcgggtccgacgtgatcgccttcgcgagcgtgtccgtgacggccggcgccaccgcgccatggccgccaccgccgaggctgctcgtcctctgcaggtacgactgggcagcgtacagctgctccggcctcgacgacacgcccaagccgccgccgaacaggtgccccagcgccagcgagcccttggcgtagtacgacggtggcgcggcgccgtacgcgaggtaaccgctgctgcacgccgccgggaccgccttggactcgtaaccggcagcgtagggcgtggagtgcatgagggagtgcggcgccgccggggtggtgaggt

SEQ ID NO: 27087 - DNA, 579 bp, Setaria italica
  Peptide Sequence Number=SeqID_93061
tttgtttttctatctttcttctactaatttggtaagtactagtacttctaaggtcttgtccttactaaagtcttactaacttgtagggtctaagtttcccagaagcactgaggcagttccttaacatcttacataccattcctgttattgtggtggactcacggagagaagttgatgaagtgaaggaattaattgagatagtgaaagagtatgttcttggtctgaaaatggagcttaagagaaaggaattgagggatgatgtgacccgtcaacaagagttggctgcttacttcactaattgcaagcttcagagagttcatatgaggcttgtgcttgcaagcgctatggctctttgcttcaagcaaagaaactatgctactgcagcacactttgcaaggatgcttcttgagaacagccctcaggaggctcaagcaaagaaggctcggcaggtgatgcaagcttgccaggacaagaatgattctcaccaactgaactatgacttcagaaatccattcgtttgttcttgttggttgtcttactattattgtttcctttattctttatttcgtttggttcctt

SEQ ID NO: 27088 - DNA, 282 bp, Setaria italica
  Peptide Sequence Number=SeqID_93062
cggcccctgacgggcccgtcgtgctcgtcgaagcggtcgagcagggtgcccatccggtagtcccacatctggatgacgccgctgtggaggctcgccaggatccatggccgccgcgggtggaaggccaagcccttgacccggttgctcttggtctcgaacttggtgagcatcttcctagctccccggagacgatcagtcagcaggggagtcggaagagaggaggatctaatctcggcggtggcggcctggcggaggaggaggtgttggatctggagcgcggag

SEQ ID NO: 27089 - DNA, 989 bp, Setaria italica
  Peptide Sequence Number=SeqID_93063
ttaggctagcagattcactccatcctttctcaacagcaacagggtataaccggagcacttgcaaatgcacgcaggaaggtatggctgcccatgagtgcatcgaggaacaatggcttcagaggagcaaatttttttattccaagctggcggctaagcagccgcatcgcagtgtcaaagttgccagctgcagcatgctccccagcaagggaagacttctgcgtccaaatttggctgacaggcatacctggcgttggagccacaaacaaagtggagcgggccacaccaacagcctttggtgtttctgcctctggtggcaattccagatcttcaaggtcccagccaccttcctcttcgttcacctcctcttcctcattgtggtcaacgacatctccattctccaccacattgttcacatcaacaatctcaagatcttcatcaccccaatcaccaccagcatcatcatagtcttcctcctgatctgccctcccagtagcatctagaccagcatcaaatataccacgcatcaccctcaacaaaggccagtcaccacaagacataagaggagcaggcggaatcaacagtgagctagttttcccatctgatacagaagggacattctcccccaactcagcagaaagcctatcagcgatttccgtgagcccatgagtgacagctgttacatacgcaagagctagctgccctgcattctccaagatttcaactcgcttccgtacatccccgagataaagtgcgttgtggaactggcccatgaaattgttattctgcccagctatcttacacataaagcccaccttgtccaaataacctgttatgagatacagaaaagcaagcctgtcaaaattcttagtccgctggtatgcatactcaactataccaacatttccctgcctacaagaagacctacaaattacccaaaaccttaagttaaacctaaagttaagtaaattaacctttaagttaactaatta

SEQ ID NO: 27090 - DNA, 2975 bp, Setaria italica
  Peptide Sequence Number=SeqID_93064
ccaactgacggctaagcaaccgcatagctgtgtcaaagttccctgcagccgcatgctccccagccagagaagatctctgagtccaaatttggctgacaggaatgccaggtgtaggagcaacaaatacagcagagcgagcattgccaacagcttttggagtctctgtttcaggcggaagttccagatcttccaagtcccagccaccttcctcaccatcctcctcatttggttcaccctcctcagcttcaacaaaactatcaccaccatttgccaccacctcacttgcatcaataatatccaagtcttcatcaccccagtcagcaccagcagcttcatcatcttcctcaagctctgcccttccagtagcatccagtccaccttcaaaaattccacgcatcacccgcagcaatggccaatcaccacaggctgtaagaggtgcaggggggatcagcagcgagtgagattttccttcaggcagagaaggagcattttcgcctaattcagcagcaatcctctcagcgatttcagtgagcccatgagtgacagcagttacatacgcaagagctagctgccctgcattctccaagatttcaactcgcttccgtacatccccgagataaagtgcgttgtggaactggcccatgaaattgttattctgcccagctatcttacacataaagcctaccttgtccaaataacctgttatgagatacagaaaagcaagcctgtcaaaattcttagtccgctggtatgcatactcaactataccaacatttccctgcctcagagcctcaattcccaacctgtaccagtgatccttgtcatcaagctcctttgctgaagcaactgcaatctgaatgttaccactctcaagagctaggttaaatctggtcttctcatccttcacaaagtgtagagcaacttctggaaaacctttctgctgcaaataagaaataacagcctgtccacatagctgggagttcttaatcatactcataacatggtcatagcgttttcggagaagagcgagcttgaaaatgtactctgatgcatcaacagcaatcagcttgttctttccatcacgatctaggcagaagatgttgttcccaacaacccttgttatgtaaataggaacatcaagtgttctgatgatcccgctgtctccattgggaagacagtacttgatatggttcagagtggtgtatatgaatacaccattttcatcccaggcaccactcttcacacgtatggtttcatgaagcgtgcatcgatggacaagcttcttgtttgcaatgataatggcatgcttgctcagcagtgcaacagattccatatcagtggaccaagcaacatatttaacagcaggcgtctggagctcaccaagaacaagcctttgctgcagatcaaagatggcaaccctgtcttcagctttgcacaatatgttgccagtcccagcgtaataaattccatctgttgcaataggaagagaggttttcttcacaatctcattcttaagattcttcaccaaaacttgattgctactcttctcaaggactgcaaacctgttgcgcgctatgaaaactgcagaaccaccagctcccttctttgcctcttgcaaataatcagacctgccggctgagtccttgggcacaatgtacagctcatacgagcccccatccacatcagaacatatcaagattgcgttctcagttggactatatgacaatgttcttggtgactggttcaagctaactgatccgggccttcttattggagccacttgaacttccttctgggtggagtattcgaagaatcggagaaatcgatccttcacatagaacacagtgtcaccactaacacagaaggctgggcgttccctctctagtttgaacacaatcatgccactgtcatgaccagcagcaagaagattcatttcagggtgagcagcaagaatccaaaagcggtcgtgttcccgcctaaatgtttgaataccagttctctttgtggcatcccaaatgcgaatgcttttgtcttctgagttagacacaatgatgtcttgctttgcatggaacatcacgcaagacacattattcatgtggcccctcaaagtatcaacttcccaagccttggtgtcattcattctccatagcttcacttgccggtcatctgcaccagaaacaatgagtggtaatgtgggatgaaatgaggcccagttaaccccgcggtcatggccttccaacacatacttgacaacagcatcgatgcctccgaacagatcggtgttcatttgggtgaggcgcataatgtcatctgctggtgagactgctttcttcctgagtgccccaatatcccatacccgcacagtctggtccaaagacgctgacaccacaaggtcctccttgggatggaaggaggcacacatgacataatgattatgacccgtgagcacggctacacaggtgcgtgactgccagttccagatccggattgtctgatcatcactagcacttacgatccatgggtactcatgatggaattgcacagtgcgaatgtagtcaaggtgcccatgaagcgtgaagaggcagcggtgagtcttgtagttccacacctttattttgtaatcatcacctccggagacgaagagcggctgggtggcgtggaagtggacgcccctgacgggcccgtcgtgctcgtcgaagcggtcgagcagggtgcccatccggtagtcccacatctggatgaccccgctgtggaggctcgccaggatccatggccgccgcgggtggaagctcaggcccttcacccggttgctcttcgtctcgaacttggtcagcatcctcccggcctggcgtccccggccacggcggcgggtgaagcccgagaccctctagcccttggccgcggagaggagcggcgaggaggtggtggatctggaggggaacgggagagagggaggagtatgcaccggacgaggg

SEQ ID NO: 27091 - DNA, 1712 bp, Setaria italica
  Peptide Sequence Number=SeqID_93065
cagtatgccacgatgctctgagatagctgaaacacaaatcacacactggctagctaacaggaagctgagtatacatactattagtccaagtcattgggaatgaatatgccctgcaactgcaagtctgcacttgcaagccagagcggcccaagacctaccgaaatactgttacaacgtacacgtgtagcaagaaaaccaaataagcagttaccaaagaggaagaaattatcccatccaacatagcacatcatcatataatttggaggaattctcaactaaatacaaaaatttgttcctttagcgacttgttgacccagtcctttgatcttggcatattgcatcaccatcaccatacaaaaaacacaatcacagctggcttggtaatatcaggcttgcggtagctgccaccaacctgtcaagactgaaggccacttatctcgattgtgtaggagagcagaggaggcctgaagcatccgcaccaaccactgagagctcgcatatgctacacagctcaccttccaccgagggcatgaaccgagatccacagtacggacaagaaacatccttctgtccacggtatattggaacaaaggttgccccacacaccacaaatggatttctaaagtcatagttcagctggcgcccatctttcctatccccacaggcctgcacaacctgccgagccttctttgcctgggcctcattagggttgttctccagaagcatccgcgcaaaattcgctgcagtagcatagttcccacccttgaagcaaagccccatagcgctagtcaggacaagccgcgtgtggaccttctgcaggttgcaattagtgaagtaggcagccagctcctgctgcctgatggggtcttctttcagctccttccttttaacttccatcttaagaccaaggacatactccctcgctatctgaatcaattccttcacctcatccacttctctccgcgagtccaccacaaggagcgggatcgtgtgcaggatgctcaggaactgcctcagtgcctccgggaatttaccctcggttgtggctttatatgcagccttaagcttgtcatccatttgtgagaaggtaaacacaagtgcaggtgggcccctcacattaggactagcagattcactccatcctttctcaacagcaacaggtataaccggagcacttgcaaatgcacgcaggaaggtatggctgcccatgagtgcatcgaggaacaatggcttcagaggagcaaaattttttattccaagctggcggctaagcagccgcatcgcagtgtcaaagttgccagctgcagcatgctccccagcaagggaagacttctgcgtccaaatttggctgacaggcatacctggcgttggagccacaaacaaagtggagcgggccacaccaacagcctttggtgtttctgcctctggtggcaattccagatcttcaaggtcccagccaccttcctcttcgttcacctcctcttcctcaattagtaggtacaaacgaacaatactaccaattactaccaaccaacaattagttacaacaataaatataaatattataattataacctattgggtatcaagaacttcactcctctaaagcccttgtttcttgatttgcacatgggcagtcacacatacctacgtgcacttgctgctgctccagttatatcagttgctgttgagaaaggatggactgagacacg

SEQ ID NO: 27092 - DNA, 1429 bp, Setaria italica
  Peptide Sequence Number=SeqID_93066
tgactggggtgatgaagacttggatattattgatgcaagtgaggtggtggcaaatggtggtgatagttttgttgaagctgaggagggtgaaccaaatgaggaggatggtgaggaaggtggctgggacttggaagatctggaacttccgcctgaaacagagactccaaaagctgttggcaatgctcgctctgctgtatttgttgctcctacacctggcattcctgtcagccaaatttggactcagagatcttctctggctggggagcatgcggctgcagggaactttgacacagctatgcggttgcttagccgtcagttgggtatcaagaacttcactcctctaaagcccttgtttcttgatttgcacatgggcagtcacacatacctacgtgcacttgctgctgctccagttatatcagttgctgttgagaaaggatggaatgagtctgcaagtcctaatgtgagaggccctcctgcacttgttttcagcttctcacaattggaagacagactcaaggctgcctacaaagctacaactgagggcaagttcccagaagcactgaggcagttccttaacatcttacataccattcctgttattgtggtggactcacggagagaagttgatgaagtgaaggaattaattgagatagtgaaagagtatgttcttggtctgaaaatggagcttaagagaaaggaattgagggatgatgtgacccgtcaacaagagttggctgcttacttcactaattgcaagcttcagagagttcatatgaggcttgtgcttgcaagcgctatggctctttgcttcaagcaaagaaactatgctactgcagcacactttgcaaggatgcttcttgagaacagccctcaggaggctcaagcaaagaaggctcggcaggtgatgcaagcttgccaggacaagaatgattctcaccaactgaactatgacttcagaaatccattcgttgtctgtggtgctacatatgttcctatctatcgtggccaaaaggatgtttcctgcccatactgtggatcccggtttgttccttccatcgaagggcagctttgtaccatatgcgagcttgccactgttggggcagatgcctcaggcctcctctgctccccgacacagttgagataggcgatggaagctacaggcccctatattctttctagtgtctaaaagttctaaatgtaagactttatcatatattttatcaggaactttactgattgtaaggaataagtattatacatggttttatctcgagtttttctttttcgtgttttcttaccataatttttgtttgcctagagactgctgtgatcacttgccatatggcttagacttttgatcgacctatgtaagctatgatatacattgatgtatgcaaagtttctttcactctttaaaaaaaaaaaaaaa

SEQ ID NO: 27093 - DNA, 1290 bp, Setaria italica
  Peptide Sequence Number=SeqID_93067
cggactcgggctgatcgcttctttttaccctaccagcttggcaaaatgctagcatctcagctgcagtcctcaagataacagaattccgtgtgccagttagggacgattcaccattgttatggttctccacttctgacaccttactcatctgttcaggtatagacctagctgaggaatggaaaccatcaacatcacaatacttcaattccaagtccattttgtttccttctattactgtttttaccaccctttcttcaatgcacaaactggacttacttgtgtcatcaggttcacaagttcttcccacattatcttgttcacttgctagttccttacttaaagatccagaggttgcatttgaaacttcttctgcaggttttggagtgacctctggcaaatgtatgtactcatctaacaatttgttcagtctgagactcatgccaaaagctaatcctcctggtgaattttccacatctgcttgtagaccatgttcaatttgcacttctgattctgagcaaaaacaaccttgagcatggacaggtttctcatagttgtggtgctgtaagttggccattgacgaatggtctccctgcactccttgttcttcgggttcaaattgtaggcttcttcgaactgatgcagttcttcttctagctgcaattccttttcctctagagattgactgatcactagcaggagccgagcacttctccagagagctgagacttcttttctttcggacataacttctcttgattttctgatttggagattctccatctggtgttgaatcagatttttgaactttggctagcttattctctctgattacctttggtctgtgtttcttcctccgagtcttcattttttgtgctggggtttccccattcctgaacatttcagttttctcagcacttgcgatctgcatctcaatttgatttagtgttctctccttgggtgcagctggtgttgacaatggtgtatgttcactctgattggtttgtgtcttgggccttttttgcataggctggtaagtatgcatgttgtcatcagcagttctttctgtaagaagggcagttgattcatcagaatgctggattcgtgtttccaaggtgtttgcaggaaccactgcttccaaattatcatggttgttacagaaaattgttgttgctaattgttgcagttggctagcttctgttccattttcagtcttggattcttcaccatgtaaaccatttggccaaagatgctcagaattgtatttatctggagtggccagttgtgccggat

SEQ ID NO: 27094 - DNA, 1023 bp, Setaria italica
  Peptide Sequence Number=SeqID_93068
cgtgggttattttcacgtaacctgcttcaaaaaaagcctcatatcacagaagaaatggctcgtggatatatgagcaatgctgagcttgagattgctgtacatgcctttggaagtcgttgttctaatatctccaggatatacagcattggaaagagtgtgaatgattttccattgtgggtgattgaaatatcagacaagccaaggcaaaaagaaagctgaaccagcattcaagttcattggaaatgttcatggtgatgagccggttggaagagaggttcttatgcatcttgcgaattggctgtgtgataactatctgaaggatccattggcaactctaattgtggagaatatgcaccttcatatacttccaacaatgaacccagatggatttgctcttagatggcgtggtaatgcaaatgatattgatctcaaccgagattttcctgaccaattcttctccgctaacaacgatatcaactccagacaacctgaaactagagccattatgaactggtaaagcaagaacacttcacagcttctgctagtttgcatgggggtgctcttgttgccaattatccatgggatggaactagagatacagggtgattccttcttctacctaaattcactttcaagtatctcaactaatagtgttgctagtgtggtagtgtatggttcagaggatgtacaatggattcttgtggttgcaaatggtttatttaaagttttgattgcatataggtgctttaatctgttataatgtgatgttgcagctagtggtttatgttttcttaattctttataggacaaactccattttactaccccaaacaagtcactttgtcggtctgtcctcttgacctcatgaccaaaattttgacactcccccaaactattttaaactgggtccattcacccccttatacatatttatattttgtttatccacattcaaattgagttttaagttcaaactttatcagatgtacatcgaaaaaaaacagttaacaagtctaagtttaa

SEQ ID NO: 27095 - DNA, 364 bp, Setaria italica
  Peptide Sequence Number=SeqID_93069
tccccgggctgatctcctccttgtagcacaggccccacgagtactccccgtccggcgccgtcgcccagccacctgtggtctcgtgggagatttgcgcgaagaaggcggcgatctcgcgcttgcgggtgttgaggtcgccggtggcggcgaacttggggaacgtccgggcggccaggatgaaggaggcgtaggtgtagaaccccttggccgggcaggccgggtcgtccttgtgcaggaacagggagttgtacagccgctcgctcaccagcgccgcgacggggctacactgcccggggccgccgtacctcgcctccgctacgccggcactgccggaagcgacaacgaaagcaaccacggcgatcaa

SEQ ID NO: 27096 - DNA, 931 bp, Setaria italica
  Peptide Sequence Number=SeqID_93070
accccttaacctgtgacttcgtcttcaacaggtccccaagtgatggagcctgagtcccatctctcacaaggtggattgtgtggaaaactgaccaccccacaatgtaaatcagcttcctcgcctggcatatggcatcatagatgtctcgccagcactgcccgtgctgatagcgcagcccattgccaagccatatatctgggagacaaccatcaggcacatgtgcatcttgatacagtgtcaccttcatgccacgccttagtgggaagtaagtatggggcacgccatgactgtccggaccagcaacgacaccatggtggtacattgtgaggcgagcgacagggatgaactgtatcgacagatgcagtacagctcctggagcgcacggcttgccattgggctcaagcacggggtagacaccctgaatcctttccccagacaaaagcttttcagccgggatggccactgcaccgatgatctgggcaccgaagacatcgctgtccttgacaacaaactggacttcggctgcctcatgccccacgggcacgatgaagttctgcgaccagacagggttctcgcagttggggatgacgtaggtccgcgcaacggtggcgtacgaaacctggacggtgacataggggtcgctggtcatggatgcgctggacatcttgctgccaacggcgccggtgatgcgcgggccaaggagttcgccgaccttcttggagaacatgtccttgttgggcaagtgccgggcgtcgtgcacccagatgtcgagggtgccgtggagcagcaccaccttgagcgacgccctgacgctgccgccgtgctgtgaccctcccccgcccgcgccgtagggcaccacctgcatccccccgccgtgctgcgagcctcccgcggccgcgccgtagggcaccacctgcatcccgccgcccga

SEQ ID NO: 27097 - DNA, 464 bp, Setaria italica
  Peptide Sequence Number=SeqID_93071
aacaatgatctttgatatcaaattcctccttgataaactgttagttggcaccccccagattgcacgtagattgacagagatacgcgcaaccgatattttgttgcattcaagatgtccactgtcagaggtactatccgtctggactcctatcgccttaatttccttgcacatagtgcttcttggttcaaaatgggtattttcctccagagacaatcctccagaagtacttattccattatcgatcatggtgcgtcgcttcagttccatgtcctcaggtaaatcagtttgatgcccttgcttcatatacagatcaacttgcaaggaattggcatcattatctttgccatttgtcttgtctgttcgcctggtggatgcccaagaagaacccccaacatgcaaagccccatttgcaggggcatgaaaagactgatcaacatccatccctgtgctgcaaacatctttgc

SEQ ID NO: 27098 - DNA, 1118 bp, Setaria italica
  Peptide Sequence Number=SeqID_93072
ttgaccacaacaaacagcaactgtttctgaattagaccatatcaaactataacaccaaatgtctttttacagtgtcgtattaggacagtgtttaacatgctccttaacaaggaacgcaagagccgcttggcaaactaaaagtccgcacatagttacatcttaaatacgcctcagctgtcagtttaccaaaaaaaaaccgcaggggctttcaatcatctttctgatgttgagcgccaagttgattcctaccattcagtgctgcatggtacacgcgcttgtccgccagaccaagattagaaagaatcaaattgccctccattgctatcagtttcctgacattattggcgtagagcttaggatcttccttttcttgttcagaaggatagtatacaggcaaacgaaccacctcgatgtaatttacaaattggcacaggagcaaaaatacatgacgtgctccatccatggaatcccatgccggactaaatctcctgtaagggtatctcaaaatgactggctgcactggtgcacttgcaagaaaggctccggtcttaaatgggagaaggtaatcgccatttgtagtagttccctcaggaaacagtaacatcattggggtatttttatcttgacaaacctcctggaccctttcagttacagcacctgagacacctttggaatctgaagacttcgattctcgttgaacaaaaatgcatccaagacacttgcttatgagaccaactaggggcaacctggacactgactccttagcaacaaaacttggaaaagaagctgacatgtgataaagaatatccacataagacacatgattagacacaattgcccctggccttcccaattcttcaggcagttcttgatttacatcctcgacactactagggagcctcttgtcagtctcgcggatccagtagaagccgaagacgaacagcattgcccgcgagagcgcgcagccggagcgcagcaccgccttcctcctccaccccgccagccgcggccggccccggtccgactcgacgcacagcgtgcacacgcggcacacgaggtagtagagcagcagcacgagcatccccgcgacgaagcggagcgggaggagcacggacgga

SEQ ID NO: 27099 - DNA, 311 bp, Setaria italica
  Peptide Sequence Number=SeqID_93073
tcgtttaagaataacatctttaggaatgtatctcctgaaaccatctttcattcttattgtatctcaacaaacttggttattatacattcccatctgtatatgcattattatgctaattctgtatggctacagaacaaacttagttcacagtacaactcagaaatcaatttgccttgctactactatcgctgagtcaacatatgaactgcttcaagaattcagactccatgagccggctacgagtgttaactgacagcttcaactcatgatctgcaaatactgagcagcttctaaattttttctccaaataa

SEQ ID NO: 27100 - DNA, 394 bp, Setaria italica
  Peptide Sequence Number=SeqID_93074
caaaacattgcttatttgtgactggagggagtaactgacaagatcaggccccctacatatgaagtgacaattactgactgtcactagttaaggcccccgatatataaattgacgactaacataaaataagttatcccattgctaacactacaatcaaatatttacagatgctcaacacctgacatgatagtaaattagccatcaccgtattatttagcttttaaacttgtctgcattgttgctcattttagcttagatagaaatatgatcccaagcctatcccaaaagtaacaacttatttgtattgagtaggaaccactcaaacaacaaatatatgaaagttgctaagagagagttggctgatgcaataacatgttaagtaatgctacagaag

SEQ ID NO: 27101 - DNA, 250 bp, Setaria italica
  Peptide Sequence Number=SeqID_93075
ccaccagcacacgcgtttcccgattcccaccaaaagcacccctctgcttcgctgattccctgcgccgcgatcccgccgctccggccgtctccatggccgcctcgtcttcctccaccgccgccgccaccaccacatccaggaccaccggccggagggagcgcgcttccaggccctccgccgccaacgccgtcgaaccaccacgcgggcccgtcgtcctccgcggccgctgggggcacggacgccgcgctct

SEQ ID NO: 27102 - DNA, 312 bp, Setaria italica
  Peptide Sequence Number=SeqID_93076
tcccggtgaactaccagagggtgtcgtgcaagaggagcggcggcatgaggttcaccatcaacgggagggactacttcgagctggtgacggtgaccaacgtcggtggcagcggcgtggtgtcacagatgtggatcaaggggacgaacacaaactggctgacgatgagcaggaactggggcatgaactggcagagcacggcgtacctcaacggccagagcctgtccttcatggtgaagatcgacgacggccgcgtagtgacggtgtggaacgtcgtcccgtccaactggtacttcggggcaacctacaccacca

SEQ ID NO: 27103 - DNA, 251 bp, Setaria italica
  Peptide Sequence Number=SeqID_93077
cgaactgattaatgcatgctttaggaacgaacactgcaagtttgatcaacaaacatgcatgatacagacaatgagaacctaataccaagctcgaccatgagccaacaaaacatgacaagttgacaacaagctcacacactcatacagaggttacaaactaagaggtcgaacacgctctgatcaaaatacataacggaaaaaggactgtgatacacatccttgcttgaaaagttaaaaacaccagcggacat

SEQ ID NO: 27104 - DNA, 550 bp, Setaria italica
  Peptide Sequence Number=SeqID_93078
ccgcccaggaactaatgcacccatgattcctcgttcagtgtgtttgggatggctcatcccaaacacactgaacgaggaatcatgggtgcattagtcctgggcggcgcgaacagcagaggtcaggattacatatccactcacacccaccgcagttgcccttggtgttccaagctatggcggatgtcgccgtcgatggcgacaatctgctttttcagggctagactggttggtttcgtgttgtatttcacttggaaccttccgacagggcctgcgtcattgttgatcgaactttccgggataacctcgtccaagaactcatcagctacgtccccgtcttcatcaatcctcagcctccttgtataccaccgaaagccctgcacgccgccgtccccctcgggggcgagggcaccagcacgggccgccgcagccgctgccctgtcctgcgggaattccgcggcggcggcggaggaggatgaggagtcggggtggtcggcgtcgtcccgggagatcccgagtaagccggcgatccggcgtaagaagcccatcgtcg

SEQ ID NO: 27105 - DNA, 853 bp, Setaria italica
  Peptide Sequence Number=SeqID_93079
tggggaaacgaagatacacattcacacacttcatcagtctttgtcagtcgctgcatactccgtacatgagatggcaggatccaatggctccactggcaagcacactactcattctacatttccagcaggagtttgtttacttctgtcatcgttcggtgcaataatgtacaagtaatagtggtacaagggatctagtgatcaccatgagatgagccatcccaaacacactgaacgaggaatcatgggtgcattagttcctgggcggcgcgaacagcagaggtcaggattacatatccactcacacccaccgcagttgcccttggtgttccaagctatggcggatgtcgccgtcgatggcgacaatctgctttttcagggctagactggttggtttcgtgttgtatttcacttggaaccttccgacagggcctgcgtcattgttgatcgaactttccgggataacctcgtccaagaactcatcagctacgtccccgtcttcatcaatcctcagcctccttgtataccaccgaaagccctgcacgacgcagtccccctgggggcagggcaccagcacgggcccgggcccctgccgctcgacagggacgggaacctggacgctgaacccccgcctcgcgccgtgggccgcagccgccgccgcagccgctgccctgtcctgcgggaattccgcggcggcggcggaggaggatgaggagtcggggtggtcggcgtcgtcccgggagatcccgagtaagccggcgatccggcgtaagaagcccatcgtcggcgaggccgcggtctccgggaggcagggggcgcggttgatccgacggtggtgggagtgggaatgtcaatg

SEQ ID NO: 27106 - DNA, 380 bp, Setaria italica
  misc_feature (323)..(323): n is a, c, g, or t
  Peptide Sequence Number=SeqID_93080
aggtaggtggttgataatttcagttgtgcataaaacaatcaaagagcaaaaaatccaggaaccaccataatagcaggcaagcagtgtatgttaatgctctctcatattcataaaacaccattttgttgggatgatcatttgcaacaaataagttctttattaaattatatttccaaatcatcatacaggagctattttggtgcaacaactatcgataatactacttccattatgtcaacactcatcaagaaatgtcaattcatttctgatgtggatgctttacaattctgatgccaattcatttctgatgtggatgctttacngcattcccaattttgaatcaaataaattctgctgccaattattgcagcagtaaatat

SEQ ID NO: 27107 - DNA, 416 bp, Setaria italica
  Peptide Sequence Number=SeqID_93081
agcatttagacagtcccttgcaaaattcttttaaaattctgcaaagatgctggatatattatcacacctgaattttcaatgtgttgtcctccttgatggattttccagctttaggtgacactatactttgaacatcattgcaagtccaaataaatgctatcctttgctttgggttttatatcttgtgggtggttgcatttcacaggctcaagatagacagaatataacctgagtggcaagcgaaagctcagaacaccgtccacggacagacggcggagcgcgctgcccccgtcgggtcgccgcgctgcggagcgacccccttcccctatcacaccgctagggctccagatccagaggcggaccccaataatttattaggaagggaagggaagggaagatgtgggcgggcattcccg

SEQ ID NO: 27108 - DNA, 366 bp, Setaria italica
  Peptide Sequence Number=SeqID_93082
aaataacgtatccaagagaaacagaacattctactagtgtctgtagaattgcaccaggatctggaaacgggcagactacataaattacctgcatggataaaggatcgctggtgtcaaaagtaagttgaataaattaccatgtaagaatagccttgcatccattatgagagctctagacccgaatgtatagacgtataggtgtatgcaaatatacacaaaaccccttacaaaactgagaatcaggaaatacaagacatgaatatatgatctaacaagattatcatattgactgcaatgccagcatcttgtttggatggtctgagacggaaattggaaagtgatcccgtccatccaagtggaaatcaa

SEQ ID NO: 27109 - DNA, 374 bp, Setaria italica
  Peptide Sequence Number=SeqID_93083
catagcttctgatcagtccgtccgtccgtccgtccgtccatggaggttctttggggaggcggctcgccggcgtggatcgacgtgccggagcggagcaagagtgcgttcatggagctgaagcggaggaaggtgcaccggtacgtgatcttcaagatcgacgacaggagggaggagatcgtcgtcgagaagacaggctcgccgggggagagctacgacgacttcacggcatcgctcccggcggacgactgccgctacgccgtctacgacctggatttcgtcagcgacgacaactgcaggaagagcaagattttcttcatctcctggtctcctacagattctcgcatccgtgcaaagaccatatacgcggtgtcaag

SEQ ID NO: 27110 - DNA, 376 bp, Setaria italica
  Peptide Sequence Number=SeqID_93084
gcattgtttaataacaagtgatacaatacatgtcacaagataacttcatgtctttaactgattacaagataagaagcaacaggatttgtgattctacttgcacaaacctagcatgaagcaacagggttcatacagaaaaaaaattatgcattatttataaatcttaaattcaactaatgtcacatcataattctgggttaactcaacatgatattaatgggatattttatcaaaatggtagtattttctaaagcactaaaggatagtagtttctattagcactaaggaaaaaaagatattttctaacgacactaaataaccaacagctaagtaacgacaaattctcatatgatatgtcagcaggaagagtataagg

SEQ ID NO: 27111 - DNA, 628 bp, Setaria italica
  Peptide Sequence Number=SeqID_93085
agaaccgccagaagaagaaaaagatgaggacgatcatgagcaggttgatgcccacgacgaaggccgtcagcgccgcgccatgcggagcccagctgatgctcgcgtcctccaccgccggcgccggcgccgcggccgcggggctaataaggctgccgctcccgagcgtggacatggcttctgcgccgacgtgatggttttcgacagccgaatcagcagagaggagctgccaatggtgtgcataaaaccactaaacttaaaaccgctttccaagaagatggttgcgttttgcaaaccgaatcgcaagaaaagatcacaagttcgaaaagttgtctgggaaaagaatcgcaaacgagatatgaagcaaagaggaaaaggaagcaaggaaatgccagagagggaggaggaaggcggagtgatggaaagcggagcagaggagggggtctataaagaggtagaagcgggggaggtagcgttggccgttggctcttggtttgggtaatggcgatgaggtgtatggtttgactggggtggtttgggacatgttgcgaggttagctcttgatgctcgttgcgtcgtgccatgactggatgaatcatgatagagccttttattcttttttttgtcttgg

SEQ ID NO: 27112 - DNA, 565 bp, Setaria italica
  misc_feature (1)..(11): n is a, c, g, or t
  Peptide Sequence Number=SeqID_93086
nnnnnnnnnnnattcttgttaagtttaggtttcattcatttacaggttgtcaccacatcctaatctgtaagttaggtttcattcatttacaggttgtcaccacatacccatctgtaaaacacgtttcattcatttacaggttgtcaccacatcctaatcaggaaaacacacatcattgtcacttaaaacaactgatcttaaaaatcagcatacaaccagatcagaatcactaagacattgcagaagcttcactcgcattcttcacgagtcggatgttgatgcacacaggctctggggtgtagaagttatgtcagcataagtctgttatgcactatcactgcctttgagaatgttgtacttgcaaagtggacatgttgcatgcataacgtagccatttggtaatacatgtccaatggaagtgatggttgcaggggagagcagataactctgctccatcttcgtatgatgagaggcagatacaacattcctgaaagaacaagagtcagaaaatcatcacgttggaaatgaagaaagatactagtattgcaacagaagcattgcttga

SEQ ID NO: 27113 - DNA, 872 bp, Setaria italica
  misc_feature (739)..(739): n is a, c, g, or t
  misc_feature (857)..(857): n is a, c, g, or t
  Peptide Sequence Number=SeqID_93087
ttttttttgttaaatttgttgtaattttatttaccaaaccgttattgcaaaaaagcagcacaactcaaaagatatttacaggtgatattagttttttttttggtaagttaggtttcattcatttacaggttgtcaccacatcctaatcaggaaaacacacatcattgtcacttaaaaacaactgatcttaaaaatcagcatacaaccagatcagaatcactaagacattgcagaagcttcactcgcattcttcacgagtcggatgttgatgcacacaggctctggggtgtagaagttatgtcagcataagtctgttatgcactatcactgcctttgagaatgttgtacttgcaaagtggacatgttgcatgcatacgtagccatttggtaatacatgtccaatggaagtgatggttgcaggggagagcagataactctgctccatcttcgtatgatgagaggcagatacaacattcagcatcctcgcgaagaagaatacgctcacttgtcgatgttccactattatttaggatagggatcatcactccctcatctgtccctttctctccgttctcgcttggatcagaatatctatatctgggaagaacacttatatctgcatctgatgcaccctcctggccagccagagcatacagaattgcaatgacacaaggcaagcagcaacacagtgcaatcccaataaagaaggccacaacaacacaaaacacagcaaaaaacncatcaaaggctagaaacacaacagttaacctgcaaaaatcaaatagcaaagcaggtaattctgtcagttaggatttaagaatggcaagtagaacaactcacaccttatggagtaaacngatgcatgcatcaac

SEQ ID NO: 27114 - DNA, 250 bp, Setaria italica
  Peptide Sequence Number=SeqID_93088
gcagcatttccaggaggtacactgcttgacccggcaaagtttgccccaatggatacactagaaaaatgtttcccctcgtccgcatcaacctcaagtgctttcttcactagaagttgactgatatttttcgagtttttatcagctgatgttctctcaaaagacagtttttagcgccatcattaccactgcatacctcagaagtaacattcttaccggagctagcattccttgctgcaagaaactctgctaa

SEQ ID NO: 27115 - DNA, 1641 bp, Setaria italica
  Peptide Sequence Number=SeqID_93089
tcttcagtttgtttttttttttttttttttaattcaaatggacagtataccctttttattgtctcatatcaaatggtacagaagatcgaatttgctgtctaaaaagtcgtattaaccaagataatatgacaaataaatacaaaccaaaagtaacagcagcattaaccaaacagaaaagcgtctttgtgtcaccattcatctccctgcagtcaagtttacccatttcatcatcatctataaaagaaggaagttcagggcaggtctgccttcatgccacggatgaactcctcggaatgctccttggtgacgcagctggcgagcatcctcgtgccgtcgagcggcagcggcgccttaaggatgacgacagaggcgatgaagtcgttgttcaccagtggcccggcgaacaccggtgggccgaagccgtagtccacctccgagaacccgagcttgctccagtccgagacgtaggtggactcgtagttgaacgtcatctggaacgggtcctggtcggtctcctccttggcgaactggaagaactccacggccatcctgtccttggcctgccggatcatgtccacgacctccatgatagacgagccaagcaccttctcggccggcgcggacatcttcacggggaagatggagttgccatagtaacccctgtcgagcttgagcaggtgcctgacactagcgaagaagcagagcttgacctcggcgttgggctccaggttcagagcccgggtgcgacactgccagagcttggcagtcagcacgtcgaagcccgagcagaacttgccgctgtgctccttgtactgcttcttgaggccgtcgatgtagccggtcgggaagtcgaggacgatgtagtccagcgccagcacggggagctccgggagcgggccgggcttgatcttggggttggggaacttctccctgtcccagacgggcttcaccttgggctccgtcagaccccgtgccatgtcgccgatggcgttgatgaactgcgccgcgcccatgccgtcggccgacgcgtggttgaaccggaggcccatcacgaacccgccgcaggtgaacttcgtgatctgcatcatcatgatggtgttgtggggctcgacgccccagcggtcgtcgccggggtaggggacgaggtcctccttgggcaacagcagcgggcgctccaagaaccgcacgtcctcgaggctgcagtccgcctcggcctccgcgaagtagacgccgtcggcggtgcagcggatggcggggcaccccggctcggcgccctccacgatgcgccccgccagcgggtagaagaaggccagcgccttgcccagcgcctcccggatgacgcccggggccgcgtccgcgcccgaccggaagatgtgcatcgactccaccaggccacggtgggtcgggtaccggtccacccacgccagcggcagcgtctcctccggggtcgccgacgccggcttcaccgggccctccgagatccgcgtcaccttgaagctcgccatggccaccgccgcaccacgacgacgccgactgctcgcctctgctctaactctccctccccttctcgggtctcggcttgtggggtggtgtttcgggagcttcgagccttgctgtcgctgagcttgagctctggtctta

SEQ ID NO: 27116 - DNA, 273 bp, Setaria italica
  Peptide Sequence Number=SeqID_93090
gacgccgccgtggccaccgcgctgtgcctcgtcgtggtcagcgcggcctccagcggcgtcggcggcggcgccttcatgctcgtcaggctcgccgacggcaccgccgtcgtgtacgactcccgcgagaccgcgcccctcgccgcgtccaaggacatgtacggcggcaacgcgacgctgaaagcgcggggcgccctctcgatcgccgtcccgggggagatcgccggcctgtacgaggcgtggaggcgccacggcaagctcccatggaagcgcctc

SEQ ID NO: 27117 - DNA, 664 bp, Setaria italica
  Peptide Sequence Number=SeqID_93091
tatcctttacatatgctggtaccatttcgctctctcttcaaacaaggttgtaagccaccggttatcatgaagattgtactgattgatcatttcaacccattccctctcgaagtcagctgatgtaatggtatcatagactaccttcttcattctcaaactgattgcttctttatcctcaactcttccagacatttcaggaagttccttcattatatgccaaaggttgtatctgtgccgagtatttggaaatacttcactgactgctttgactactggccttgaatgagtcgtaataattgcttcaggtgctttatcattcatacattttagccattttttgaacaaccatgcaaaagtctctggagactcgtctccaagtagaccacatcctaacaacacaaactgcccatgatggttgattcccaggaacgcgaccaatggaatgacaaattgatatgtcaaatagactgtgtcaaagcaaataacatcacaaaaatgttgatatgcaactctggatctagcatcaacccagcaaacgttcttgagccgaccttcatcatccatgtcccagttgtagaagaagttggagttttgagcttgcatcttatcaaagaaaactaagagtgcctcaacgtcaccctcctcgacaaacctcaacttttct

SEQ ID NO: 27118 - DNA, 325 bp, Setaria italica
  misc_feature (71)..(71): n is a, c, g, or t
  Peptide Sequence Number=SeqID_93092
ttggtggacttgatgtcgcggtggatgacggccggcgtgcagtcatggtggaggtacattagccccttggnggcgccgagcgccactctgcgccgccgcggccagtccagctctggccgcccgccgccgccgccgcccttggcggcggcggccgcctctcgccgaagcgcctggtgcaggttgccccgcggcatgtactcgtagacgatgaagtggaggtcgccgcgggacaggcacgcgtgcagcttcaggatgttccggtgccggaccttgccgaggatggccatctccaccgccatcacccgcgccgcgttgcccttccaca

SEQ ID NO: 27119 - DNA, 308 bp, Setaria italica
  Peptide Sequence Number=SeqID_93093
gcgggggcggggggatagggttccagctatggcacccgcaccagcaggcggcggcggccgcgccgcacacgtcgcagttcttctcctccggcgtggccacgggggtcgtgctggggttctcctcgcatgacgggagcggcgggatcggcggccccggcagcggcggcgcggggggaggccgggcggggacgagctgccaggactgcggcaacaacgccaagaaggactgcgcccacatgcggtgccgcacctgctgccggagccgcgggttcagctcgcccccaccacgtcaagagccaccgtccggg

SEQ ID NO: 27120 - DNA, 996 bp, Setaria italica
  Peptide Sequence Number=SeqID_93094
gacagaggaatcgaagcatgtttgaactacaattgaagcagttccatggaatgagaatgaggaagagaagctaaagcgtgttttggtagatgcacttttgatgaatcggtatgtaaagatgtgctggcaagattgcaacaacaatgcagaagcagctcagaggatttgacagtgcagctcgttgaatctgtcaccagtggaaccaacaacggtgcaaggaaagagttgcaatccttggtcagcggtctcctaagcaaaagctcagtctatcataaggacttgtctgggctaaacaaagggagcctttatcaaatctgtcgttcttgtttgcgttcactggtggaacttttcgtggaagactcagggccagtcgaggatgcaggccaagctatcacagtttcagatagcaagcctatgatcgaaagggtcagtaagcaaaccgagaatctcaactggctctttgacatccttgtaaacaatgatatggcagaagaattcgttgagtgttgggctaaccaggacgaactcatcagaatgcacgaggaggcatcaccgatgttcagatacgagctgagccggatatcagcgagtgtgttcatcgctctggggaaagggagaatccaatgccccagcgatatgaggagccagttgttctatggatggttcaggccgatgctaatggacttcggctggctccaaaggtgctccaaaggccttgatgtcaggatactggaggagcatctagggcaagccctactcacccttcctcttcagcatcagcaaagcttattcgaagaatggtttcggtgctttgcatcaagaggcacagaatgccctaatctcagcagagctttccaggtctggtggaggaggtcgtttgttagatcatctgtagaggtgcgtcggtgagtgttttatacatcactgtgaggcatatgtgctgcgtgtattatcagtgtaaaattttagcgccgttcaatatctagtatattcaaa

SEQ ID NO: 27121 - DNA, 465 bp, Setaria italica
  Peptide Sequence Number=SeqID_93095
ttcattgtcaacagcactagatggtatgttaactgggcgtcctgagacaaataacttccataacaataaaattgctgatgttcctgggaagatcacactgcctctgattggtctagcttcttacaaactacatggttccatgtggatgtcaaatcagcaccatgaacagcagttaactacatctcttctgaaagctgctgatgactggctttgccagcggcaagtagatcatccagattaccgcttcttcctctcacactaaaattggaacttgatccatgctatcgcctgaataccaccgctcagatgccattagttaatctatgaacttgcattatagctatatagtccacaagcacaagtatcaatatcctttgagtattatcatttgtggggcttcgtttatgttatagcccggtattgatatctaggtcaggattaggtggtggttgttttgctgttgtg

SEQ ID NO: 27122 - DNA, 474 bp, Setaria italica
  Peptide Sequence Number=SeqID_93096
cgaccgcgccgacgacggcggcgttcatagcggcggcatccatcctgttccgtcgtcgtcgtcacggcggcgcgggcgatctcgtcgtcgacgatgccgagcagcactctggcgaggtcctcgaagccgtcccactcgcgcacggcggcggccggcggcgcccccccgatgaggtcgcacacggggtaccccgcccgcggcatcacgtagtcgccctcccgcagctttagggacgggcagtagtccccccggccgtcgccgaggtacaccaccgctctccgacgccgcctcgccgccaccgccgcctcttcttcttcttggaggatccgctccatcaccttgcccttgcacatgttgggcgggcaggaggggagcgcgcagccgtggccgggggccggggcggcgaactcgtggtaggggcggatgcggaggcggccggcgccgtcgacgtgggcgggttggtgtcggtgccgg

SEQ ID NO: 27123 - DNA, 519 bp, Setaria italica
  Peptide Sequence Number=SeqID_93097
tgactaacaaattaaatatggtatataacagtaagaactccataagtcactggatacatgactcagaacagataccaaagtacaataatgaactataagaaaattaaaatagcaatatataaaatttaaacaaatttaattcccagcatgcaacggctatgagacaagtcgccgccaccgcaagcaaacctttgaagcgagacgggaaatatgacggctcgatcctgatcattcccgatcgagcttaatagcgagggcaagtcaagccgggtgggcaatccctgcggccgcaccggtttagactcagactgatgttgatgggcacgcggaggggaatgccgaggacgttggccttaagcacggtgcagaggcacgcagcggcatcgatgtcaacgagcccgtccagcagccggcagcacctctcccgctcctccggtaaactaaccttgacaaggccatctagaatgcttgcgcacacctggagctggagcgcatccactgggcaccgcctggccgggc

SEQ ID NO: 27124 - DNA, 963 bp, Setaria italica
  Peptide Sequence Number=SeqID_93098
tcaagaccctgagctccccgccttcccctccttcgtccccacccgcggcaccgaccgggaccaagccgccgccgtccgtggcggcgacttcttcctcacctccctccaggagcgctccggtgtccacaacggctgggacatccacgactgccgcggcgggtacgtcctcctcgccaatggtgatcaggaaacaatggcggtggtcaatcccttggtgcgacggagcgaaaggttccttgattttggccacaaggacactcttgaaggtcatcgcgcctgcggcatcgtacacagggcctgcttgctctgctccgacgaagaccccacgtcgttccgcgtgatcattattgcccatgacaagtccagggtgcgggctactgtcttcagctcggagaccggcgagtggtccgttcgccggtgggtgcatatcccggcgaggccacggcgcggccgtggcgaacggtggattctgaacagcaacatgcaggccaatggattcttgtactgggtttcgaaaaatcgcaaatatatggtcacactggacacggcaacagtggatttctctgtcaatgagctccctattttcctgcagaatcgacactgcaccttcgttgtgggtgaaatgaagaatggtgaagcctgtattgtctatgctattaacttcacagttggtgtcctgtttcgcagaacagagagtgatggcgttgataggtgggtgctggacagggctgaactcttggagacacagcttggtcgggtccttggcgaagtaatggagaactacaatgaggtggaggttgtggcagtaagggatggctttgcgtacttggcaacaacagaaagtttaaatgattctgggactcctagttggtcttgtaaatttgtacaaactgtatcattctttagcccctaaggctaatcacaccgaccagtcgacaaagaaaggaattcaagataatgaaa

SEQ ID NO: 27125 - DNA, 327 bp, Setaria italica
  Peptide Sequence Number=SeqID_93099
ccgggaggcccaaggtgaagtggctcgtctccgacgtgtacgcgtggtggtccttgaacgtcgccaaaaggttaggcatccgggtggcctcattctggccggggtcggcggcgtgcttagctattaatctcaagatccccaagttgacagaggaagggctcctcaacaacaagggttagctattaatcttacctttctttttgcttctcatactctttcgtccctcgaactattaatcgacaaaggacgtgtagtagtgaaaacaataagttgaagttttctctatttgaattcggatacggaatgcattccgacctctgctggtgg

SEQ ID NO: 27126 - DNA, 1127 bp, Setaria italica
  Peptide Sequence Number=SeqID_93100
cggatacggaatgcattccgacctctgctggtggcacatttgtactgtggcaggttggccagagcgggacgagacgttccaacttgcccccgggatcccgccgctccacacgtcgcagctgccgtggaacaacgtcggcgcgccggaggggcagcccatcatcttcgagctgttcatccggaccgacaggctcagcgccctcgccgagatggtggtgtgcaactccttccacgaggccgaggccggcgcgttcaagctcctgccgcacgtcctgcccatcggcccgctgtcctccgacagggagttccggaagcccgtcgggcagttactgccggaggacacccggtgcctccggtggctcgacgcccagcccgacggctccgtcgtgtacgtggcgttcggcagcttcaccgtcttcgacccgtgccagttccaggagctcgcgctggggctggagctcaccggccggccgttcctctgggtggtgcgcccgaacttcacgaccggcgagctgagcaaggcgtggttcgacgagttcctggcccgcgtcgccggcaagggcatggtggtcagctggtgcccccagcagcaggtcctggcgcaccgtgcggtggcgtgcttcgtgtcgcactgcgggtggaactcgacgatggagggtgtcaggaacggcctgccgttcctgtgctggccctacttcgccgaccagtacctggaccggaactacgtcaccgacgtgtggaggaccggcctggcggtgtcgcccgacgcggacggaatcgtgacgaaggaggagctgaggagcaaggtggagcaggtcgtcggtgatgccgagatcaaggagagggcgcgggtgttcaaggacgccgctcgccggtgcatcagcgaaggagggtcctcgtgcgagaacttcaacagatttgtgaacctgctaagtgaatgaggactcgactacctctacgcttgctcagtgtggaatcctttgcagctgcgttttgtaccctatgtcacatacagatgccgtgatttgttgtgttcttggtgttctgttttgtccatggtcgatcaccaaattgttttcagatcgatcagaatactggtgctcctttaataattcaccaacgattggt

SEQ ID NO: 27127 - DNA, 935 bp, Setaria italica
  Peptide Sequence Number=SeqID_93101
taattggtatacagtgtctaccacctctccactgctcctgcgcaacccaaagggatagagagagagggaagaagccatggccatgaaggctcacgtcctggtcctgccgttcccgtcgcagggccacgtcacgccgctcatggagctatcccaccgcctggtcgaccacggcttcgaggtcaccttcgtcaacaccgaggtggaccacgcgctggtggtcgccgcgctgcgcggcggcgaggcgacgctgctgggcggcggcggcggcatacacctggcgtccatcccggacgggctggcagacgacgaggaccgcaaggacctcaacaagctcatcgacacctacacccgtcacatgccggggcacctggagcggctcgtcgccgaaatggaggcggccgggaggcccaaggtgaagtggctcgtccccgacgtgtgcatgtggtggtccttcgacgtcgccaaaaagttcggcatccgcgtggcctcgttctggccggcggcggtggcgtgcttagccattagcctcaagatccccaagctgacagaggaagggctcctcaacaacaagggttggccagagcgggacgagacgttccaacttgcccccgggatcccgccgctccacacgtcgcagctgccgtggaacaacgtcggcgcgccggaggggcagcccatcatcttcgagctgttcatccggaccgacaggctcagcgccctcgccgagatggtggtgtgcaactccttccacgaggccgaggccggcgcgttcaagctcctgccgcacgtcctgcccatcggcccgctgtcctccgacagggagttccggaagcccgtcgggcagttactgccggaggacacccggtgcctccggtggctcgacgcacaagcccgaacggactaccgtacgtagtaacgtaggacgttacggacaa

SEQ ID NO: 27128 - DNA, 282 bp, Setaria italica
  Peptide Sequence Number=SeqID_93102
cagttgacagtttaaacaccatctatccaaggcgcgtcgtacgcacggtctccacatgaagatcacggtgcatacgtccaaggcagtcaagcccgcctacggcggtggcatcggcggcgacgccaccgccgtcccgctcacggtgttcgacaaggccaacttcgaccagcacatctcgggcataaacttctttcgccagccggcgccgcccaacgccgcactcgcggcagggctcgccagagcgctcgccgagtaccgcgagtgggctgggcggctcggcgt

SEQ ID NO: 27129 - DNA, 389 bp, Setaria italica
  Peptide Sequence Number=SeqID_93103
ccttggcgcgcgactcgtcgggcggcggcgggccctcgacggtcatggagacgacctcctcgccgcggaggaggaggaggccgagcgtgcggcgctcctcgcggtcgccggttgtcttggaggacttggagggcgggaggcggcggaactcctcgcagtcgccgaggacgaggttcatgtggcggtcgaacgccatgaacttacccacgagctggcgaccatcctggatcgtcacccgcatgcggtagttgatgaactggagcatcttggagcccttcgggttcgacatggcggcgtcgccgggggcaggatggccggcggcgggtagggttagggtttcggcgagagggggtggtggatgcggcggcggggatgaatatgagagaggg

SEQ ID NO: 27130 - DNA, 341 bp, Setaria italica
  Peptide Sequence Number=SeqID_93104
atcagagagagagcagagagcagagagtgagagcgacgcctcttgttgctcggctccttcacggccggtcagtcgtcctcacctcgccactctccagaccgcgacgttctcgccttaccctttctcactcgcgtcaagcagcaaggcgtcgcctcgtccacctccatgtgagtgacaggctgacagcacagcgctgcctcccgtgtctcgcccggcgtgaccggagtttgcagaggaagaagaagctagcagcggccggctgcagaattaggccggcgtgccgggaaggcgcagccgcagaagacatggggctgctgtctcaccgggtggagcggtcggag

SEQ ID NO: 27131 - DNA, 207 bp, Setaria italica
  Peptide Sequence Number=SeqID_93105
tagccacggcacttggtcaacaataggaatcgatgaagatattaataaagcggtctatttgagttatgaagacttgccttcacacttgaagcaatgttttgtgtattgttcgctaatccctaaagataacttgatgtcgattggagtaatagtccagctttggattgcagcaggtcatgtacaatgtaaggcaccagaaaagttggg

SEQ ID NO: 27132 - DNA, 665 bp, Setaria italica
  Peptide Sequence Number=SeqID_93106
aaaagtcctcattggtagacagagcagtatgaggtaaatcagaagggtccgaaatcctggcgagataatatagaattagtttgccttcaccagtcaaacagagtagaatatgttgaggggcaacctccttttgttcaggtccaactgtaacagtgatcttttgaaatagcgaaacattctcaacaccaaaccctagtatgacattgtcatcaccattctcttgcaaatcgatcctaggactgtatttatcctccaacatttcaagacattttacagttttttcatcatcgtgggtggacggccacttcagaagggcaatgtgttcatcaatgctctttttattagaagccaccatgagatcccagcgacgcagataacccaatagcagattaggtccaactccagatggtaaaacatcatccatgacgccgttgaaaaaatccacataggtatatacaactggcttgcctgggctctcacaaaatgtgtttcttcacttcttataacctgaacaagatagccttcctcattgtcatcttcatttaatcgaacacaaccgataacaatactatcatcacgtatccagccaatggaatccactttgatggtactgccctctgaatcactttcatcagaccacaactggaacaagagggcatgcaaca

SEQ ID NO: 27133 - DNA, 423 bp, Setaria italica
  Peptide Sequence Number=SeqID_93107
tccagccgcgccggcgcgagcacgaacgcgacgtcgccgcggcggacccgaccccgtgagcgcaggccccccgcctagcgcgcgcacctgggaccggaacgctggaaacgacagggtctcaccggtggcggcgtcgaggagggctgggtgtgccgggagcggtgacggcaggagcgagaacgcgaacgctgtgaacgagagcgggctgcctgccggtggcagcggcaccggcggacgcaggctgcagaacgtcttggtctccttgcagtagccgctgcggctgtccacggcgccgggagcagtggcgcagccgtcggcgctggccgcgggttggggagtggccatttcctcgcggcactctgtcgtggctgagcggacgacttggcacggggcggacgctgtggttggtgattttgtcggcgg

SEQ ID NO: 27134 - DNA, 228 bp, Setaria italica
  Peptide Sequence Number=SeqID_93108
gggcggaggacgggtcagaggcgagggtgcggagcatgaggttgtaggccgcggagccgacgggctggccggcggcggcggagcggcggaagaaggcgagcgcgcgggagggatcagtggagaggttgtggatattgtagatcacggcctcaggggtagctgccgtggcgatggcggtggagaggaggcggcggtgggcgaggaggcggcggagggagggaagcgccg

SEQ ID NO: 27135 - DNA, 781 bp, Setaria italica
  Peptide Sequence Number=SeqID_93109
ctcgcctcgcctctcacgcacgcacagcccaccccacaggccacagccagaaggagccataagacacacaccagccaggcagcccccgcaccgaaacctcgtcgcgtcgcgcggaagggagggaggagaggggtgcgcgcgggtgggaagggaatacagctgcggaatcccctcgtcatccgccaccgctccaccgcgctagctaaaccctctctcctccgcgggcggcgcgccgggctccggcgccgcctgcttccttcccggcccccgcgacactcccgccgcgagggggaaaccctagcagcggcagatctcgcgcgggcgctctcgatccggccgattcggccggggaaatggcggacgacggggcgccggacgcggaggagcggccgcagcagctgcaggaccggctcagggaggttggggaacgcctgcaggcgccgcccgacgaagcggaggacctgctcaagctcctcatagaagttgaggagtgtttacttaaagtagagcaatcacctcctgaaagcacatcaaatgctatgcgagcagcaactgaagcgctggtcaagaaagagctggtgggccatactgacccagatgtcaggcttgctgtggcatcatgtatctctgagatcacaagaatcacggcacctgatgctccatatgatgatgatgcaatgagggatggtaattctcttttgattgtggggtccttccagaatctcgatgacacagaaaagccccttgtttggaaggagattgtcaattcttgatactgttg

SEQ ID NO: 27136 - DNA, 695 bp, Setaria italica
  misc_feature (630)..(630): n is a, c, g, or t
  Peptide Sequence Number=SeqID_93110
ggacttttcgtaagaaacctcttcatttgtcttggcttcatctatttcttctctttcttatttcttgctgtgctaaacatgttttctaagctataccctggatgtatgttcaagtttctgtaaatttgtccatcatctttttttgagacgaggttcgatcccatttccattacttataatggaattatagatttgtctaagatactttgtacctgtaagatttgctaaggaacaagagctagctacttttttatctgttttaatttgatttcctccttagatacttcaacattatatttgtcagcattgccaaactgctaatgttgattctaaactcattgatctgtttctctggctgggagttacagattcacacactgattatttataaatgaagcttctatattttgatattagcttaaccctattctgctactacattttgttcacttgatcagcattcatggtttcagaagtatgtgttgtattctgcatacgagttttcaacttttctacgtcttatttcagttctgaacattcaaatgctgtcatctcctgcatggaaacaataatgagattggtaattgaggagagtgaggatgtccaaccacagattgcatcttgcttacnccaaaatgttaagaaaagaggacaaggaatcttcttcgcctttctttgaacttgctgagaaggtt

SEQ ID NO: 27137 - DNA, 530 bp, Setaria italica
  misc_feature (529)..(529): n is a, c, g, or t
  Peptide Sequence Number=SeqID_93111
tttacctttttagtttacttttctttcttagtttgtattgtactaagtagttgtctaagtcaaatctaaggaggctagcagcaaaggcaaggattccaaagatgaagggaagtccactgaaggaaacggcaggccaggtcgctttccttttgtttcttttgcagtgagtgaagttgacaaagagaagcggaaggagaaagatggcaagacagctgaaacagagcaagaggcatcagcaaatgcttctacaggaaagaagcgcagaaggaaggcttgaagttggtggctatgattctcttgtaaatggatctgctccctaggtttgctccgttagtcagagaggggtcggcactgcaccatgtattatggattgtaactcctggttcggttgccttttaaactgtcatctgattgggtctctagtgtttaggagtggtagcaacatttgctatagttttaatgttagaagtaacttgttcgttgtggtcggatgcgtggtgcggagccttaagcggaatgaatcccatgnt

SEQ ID NO: 27138 - DNA, 619 bp, Setaria italica
  Peptide Sequence Number=SeqID_93112
aagtaagttaagtaaattaactaagaacaaataaacgaagttttacaaacttttactaacgtacttaatttcaagttctagaacattcaaatgctgtcatctcctgcatggaaacaataatgagattggtaattgaggagagtgaggatgtccaaccacagattgcatcttgcttactccaaaatgttagaaaagaggacaaggaatcttcttcgctttcttttgaacttgctgagaaggttataggcgcgtgccgggaaaaactaaagccagtctttctgcaatcactaaaaggcacttccttgagtgaatacagccaaatcgttgcattagtttgtgaagagggttcagatgacagggaagaaaataatgctgatccttctgggaaggacacggtggatgatggcaaactatctgaaagaactatttctgatgaattaccacaggaatcttcgaaggcggagcaagatattagccgtcctgaacaagatggtacttctatgaatggtaatacggctgctgctattagcagtgatgcaactccagctgacacagattccattgctgcagaacccaaaagaagtcggcccttgattcagacaaaagttatttaagtccc

SEQ ID NO: 27139 - DNA, 2699 bp, Setaria italica
  misc_feature (2639)..(2699): n is a, c, g, or t
  Peptide Sequence Number=SeqID_93113
taagttttaaactttaaaaagttaagtaagtactaaattactaaccttctcctgaaagcacatcaaatgctatgcgagcagcaactgaagcgctggtcaagaaagagctggtgggccatactgacccagatgtcaggcttgctgtggcatcatgtatctctgagatcacaagaatcacggcacctgatgctccatatgatgatgatgcaatgagggatgtattctctttgattgtggggtccttccagaatctcgatgacacagaaagccccttgtttggaaggagattgtcaattcttgatactgttgcaaaagtccggtcctgtgtggtgatgctagatcttgaatgtgatgatttgataaacgatatgttccatcacttcttgaggactgtttcttctgaacattcaaatgctgtcatctcctgcatggaaacaataatgagattggtaattgaggagagtgaggatgtccaaccacagattgcatcttgcttactccaaaatgttagaaaagaggacaaggaatcttcttcgccttcttttgaacttgctgagaaggttataggcgcgtgccgggaaaaactaaagccagtctttctgcaatcactaaaaggcacttccttgagtgaatacagccaaatcgttgcattagtttgtgaagagggttcagatgacagggaagaaaataatgctgatccttctgggaaggacacggtggatgatggcaaactatctgaaagaactatttctgatgaattaccacaggtatgacctgcatcttctatatctattgaaatggctgatataataccagcttgtttttttgcacaggaatcttcgaaggcggagcaagatattagccgtcctgaacaagatggtacttctatgaatggtaatacggctgctgctattagcagtgatgcaactccagctgacacaggtgcagattccattgctgcagaacccaaaaagaagtcggcccttgattcagacaaaagtattaagcccaatccatcggataaatctgaagcaactgaacattctggttctgatactaaaaaagaagatattgtagcatctggagaggaggggaccaacggagcagctgatgatacatcaaagcctgctgatattacacctgttaagccaagacgaggccgacctcctgggccaaagtcattggagaagaaggctgctggaaagaacaaaccttcaagattttctagtgattcagcagggaagttaacaaaaagatcagctaaggatgaggtcaagtcttctgtaaaaaaggctggtgaggcagagtcatctaagaagcctcaaaagagcagttcgaagcagcagaaggatgaaactctttctgaggaagatcctgccaaggatctgagcttaaaggaaatgatctcaccgaagtcttcgaccaaggggccaggtagaaccaaaggacaaagcacagagaatagcacacctaagaggaagcaggaacaagagactgaagagcttcctcgttcaaggaaaaacaaaggccttgatggaagcctagttggtgcaaggatcaaagtttggtggccagatgataagatgttctacaatggtgttgtggagtcatttgattctggttctaaaaggcacaaggttgcatatgatgatggggatgtagaggtactacttctcagggatgaaaagtgggactttatcagtgaggacaaaggagcttctgtggcatctcaaactccacgaggccgaaaaaggaaaggggatgcagtgaaggaagaaaatacagagacacctaaaagcgatgctgtggatcctccaaagaaaaggggacgtcccaaaggtgtgcgatccaccaatggggcaccgaatgacaacagctctgctactccaagcacaaaggggaaagctgcaagcaaagatgtgaaagatacgcctgaaactggccccaacctcaaaaatgaagttgagaagacctccaaggacaaagccagtggatcaactgagaagacaaaggatgaattgcctaaagatgctgatgacaagagtgcaagcaaatctaaggaggctagcagcaaaggcaaggattccaaagatgaagggaagtccactgaaggaaaaggcaggccaggtcgcaaaccaaaaaatactcctgcagtgagtgaagttgacaaagagaagcggaaggagaaagatggcaagacagctgaaacagagcaagaggcatcagcaaatgcttctacaggaaagaagcgcagaaggaaggcttgaagttggtggctatgattctcttgtaaatggatctgctccctaggtttgctccgttagtcagagaggggtcggcactgcaccatgtattatggattgtaactcctggttcggttgccttttaaactgtcatctgattgggtctctagtgtttaggagtggtagcaacatttgctatagttttaatgttagaagtaacttgttcgttgtggtcggatgcgtggtgcggagccttaagcggaatgaatcccatgctcgctgtgaggcccatggcatcgtgttgtcaggatggtgttgtagcttcatggtgtgatatttattgataggcaatttattcagtggattttgtaacagatgcgccttcgaaaaaagaannnnnnnnnnnnnnnnnnnnnnnnnnnnnnnnnnnnnnnnnnnnnnnnnnnnnnnnnnnnn

SEQ ID NO: 27140 - DNA, 239 bp, Setaria italica
  Peptide Sequence Number=SeqID_93114
cggttctactggttggcatcacctagttcatgtcacgactacttcgcttcgtcatgggcagaattgctacgcagtttcaccgctattagctaagtacagattagcgtgtagtttgcatcagcaaggtttgacgggaagcacagctgattgtagtacaaattcgtctgtccgctacagtcagatgctcaggatgtcgatcactcaagaacctcagttaccaagacatggtaaatttggaa

SEQ ID NO: 27141 - DNA, 323 bp, Setaria italica
  Peptide Sequence Number=SeqID_93115
atataagagatcagtaaacccctcgatctcactgtccagaaatactctcctcattgttgctcttccaccttcactatattgcaaagcatctagcttagatgaataacggttttgcgggtatcctccaccgcagaaaccagcctctgatggatgattctgcagtgtcgattggtttctcgatgacaggctacacatcaggcagccatggtcagagtcagataacatttggcctagaccggttgggttcagcaatggacaacagctacagccatggccagagaggtctgcggaggtcgagccatgcgcctgcgcaggatgatggg

SEQ ID NO: 27142 - DNA, 324 bp, Setaria italica
  Peptide Sequence Number=SeqID_93116
atcaaggtgtatattgtacaacagctctcaaatctcatcccctgtctacttgaatatcaggcctccatgggcggcaaagaatggtgcgaacacgagggactcgacggccatgagcttgatcaagatgttgagggacggcccggacgtgtccttgagcggatcgccgatggtgtcgccgatcacggcggccttgtgagcgtccgaccccttggggcctagagccttggcgtggtcggatgcacctgcctctatatacttcttggcattgtcccatgctccaccactgttggaagcagatatggcgatctgcacaccggagaccag

SEQ ID NO: 27143 - DNA, 618 bp, Setaria italica
  Peptide Sequence Number=SeqID_93117
tttctccctctgttcatcctcaagtgcaactccactgagaacagcctcctttatttgatgttgaccgaagagttgcagaacgaacacaagttcttgctcctctgccggaggacaggttcctgtgcagctttagccatatatttgcaggtggctacgctgctggatactacagttacaagtgggctgaagtattgtcagctgatgcattctcagcttttgaagatgctggtttggataatgagaaggcaattgaggaaactggaagacgattcagagacacggttcttgcacttggaggtggaaaatctccactcgaggtgtttgtttctttccgcggacgggagccttcacccgagccacttcttaggcacaacggcttgcttcctgttgctgtgtagggtgaccatttatttgcccagtatgtgaggagttaagatttttctggggcatcagccgaacagaattaggtttatagctcgttatgtttcctatttcaacgtgaagctgtttgaacgtagaataaacaatacaagtagtaaattagacaataaatagaaattttaaatacaaagaaagaaccgaaattaaaaataacctaagaaccaaaaaaaaaaaaaa

SEQ ID NO: 27144 - DNA, 198 bp, Setaria italica
  Peptide Sequence Number=SeqID_93118
cctatttcaacgtgagctgtttgacgtgataacatcagtgtaattgcataatgaatcttaactcctcacatactgggcaaataaatggtcaccctacaccagcaacaggaaggcaagccgttgtgtttcctatttcaacgtgagctgtttgacgtgataacatcagtgtaattgcataatgaatttaatcggctctga

SEQ ID NO: 27145 - DNA, 1662 bp, Setaria italica
  Peptide Sequence Number=SeqID_93119
gttatgcaacatgctcgtagcagagctctccgtgaagaagtctaccgtgcttatctaacccgtgcctctagtggtgaacttgataacaccaatatcatcgctcaaattctgaagttaaggcaagagaaggctaaaattcttggctacaagaactatgctgaggtaagcatggctcagaaaatggcaaccgttgagcgtgtagaagagcttctcgagaagctgcgtgcggcttcttgggatcatgctgttaaagatatggaagacctaaaaatcttcgccaaagattctggttctccagaagctactgatttgactcactgggaccttacattctggagtgaacgactgagggagtctaaatatgatatcaatgaggaagcactgcgtccttattttgcattgcccaaggttatggatggcctcttcactctggcaaataagctttttggggtgagcgttgaacctgcagatggactggctcctgtctggcacagtgatgtcaaattttactgtgtcaaagactcttccaatagccctgttgcttatttttactttgatccatattcaagaccatctgaaaagcgtggaggggcttggatgaatgttgtcttttctcgcagtcgtgtcctagctcgcaatgggttgcctgctaggctgcctgttgctcatatggtgtgcaatcagacgccaccagttggtgataagcccagtctcatgaccttccgtgaggttgaaactgtgttccatgaatttggtcatgcccttcagcatatgcttaccaagcaagatgaaggttatgttgctggtattcgtggagttgaatgggatgctgtagagttaccctcccagttcatggaaaactggtgctatcacaaggatactctcttgagcattgcaaagcactacgaaaccggtgaaactctcccagaagaaatttatgcaaagcttgttgctgcaaagaatttccgtgctggcacctttagcctgcgccagatacgttttgccagtgtagatatggaactgcatacagcatatgatccttatggctcagagtccatatatgatgttgaccgaagagttgcagaacgaacacaagttcttgctcctctgccggaggacaggttcctgtgcagctttagccatatatttgcaggtggctacgctgctggatactacagttacaagtgggctgaagtattgtcagctgatgcattctcagcttttgaagatgctggtttggataatgagaaggcaattgaggaaactggaagacgattcagagacacggttcttgcacttggaggtggaaaatctccactcgaggtgtttgtttctttccgcggacgggagccttcacccgagccacttcttaggcacaacggcttgcttcctgttgctgtgtagggtgaccatttatttgcccagtatgtgaggagttaagatttttctggggcatcagccgaacagaattaggtttatagctcgttatgtttcctatttcaacgtgagctgtttgacgtgataacatcagtgtaattgcataatgaattttaatcagagccgattaaatcctgccaccaaccgtgctggtatcgtagcatccatcactgcatgttccaaagggggttaataaaaagaaagaaatcatgcttttgattaaaa

SEQ ID NO: 27146 - DNA, 1207 bp, Setaria italica
  Peptide Sequence Number=SeqID_93120
tctcagtcgttcactccagaatgtaaggtcccagtgagtcaaatcagtagcttctggagaaccagaatctttggcgaagatttttaggtcttccatatctttaacagcatgatcccaagaagccgcacgcagcttctcgagaagctcttctacacgctcaacggttgccattttctgagccatgcttacctcagcatagttcttgtagccaagaattttagccttctcttgccttaacttcagaatttgagcgatgatattggtgttatcaagttcaccactagaggcacgggttagataagcacggtagacttcttcacggagagctctgctacgagcatgttgcataacagcgatatagcttggtgcatccaacgtgatgatccaaggtccattttcagctgtagcattttcgtgaccctttgacacggcagtttgtgctgctaaaccaagggctgtagcaggcaacccatcaatttccttcttatcagtaattaatttctcaaatttctttgttgcgtccagcacattttcgctaaacttttgtgacaacttttcaagctcctgttcgatttggttaaatttctccctctgttcatcctcaagtgcaactccactgagaacagcctcctttatttgagcttctactatacgcttgcgagcatcactgagactctcccaatcagaagagttcctaatggccttgaaagcctcatagataggcttgctctggcccagccttagttgaaacttgactttgtcaggctggacttcctcgacggcggcgcgtagatcggcggagtccttgacggccttgaggtggtcgaccatcccccagatgacctcgagcctgtcggtgatgcgctcgagcggctcgacgagcttcccccacgagggctggacgcccttctcgagctcctcaagctgggcctcgagtcgcgtgaggaggtcgcggatgccgggtcggacgtggccgggctcgacgcggtcgaagggcgggaagtcgaagtcggcgacgaggagggggttgtcggtggcggccatggtggtggaagaggagaaggcggcgcaggtggcgggggcggggcgcgccctggggcagaaggctcgtagcggggaggaggaagggagggcggcgaagaggaggaggcgggtggtagggttggggaggcgggtggaggcggcgagtgggagccgcgcggtgaac

SEQ ID NO: 27147 - DNA, 433 bp, Setaria italica
  Peptide Sequence Number=SeqID_93121
atcagattttcacactgccaaaggataccctgctatatcctgccatgactacaaaggtttcacagtaagtagtgtactatgtatcttgaagtttgccagccatgctaccagtcacttgaatgtgttatttgcaggttagtactgttgaagaggaggtcgcctataacgcccgactaacgaaagataaggaaactttcaagacgatcatggatagtaagtgctcacaatggatatgtagctacatgcattggttttcatactgaatacccacgttccttctgacatacccgctttgcttgtcaaactaatcctttcttttgagctaaatgaaactgatcatttactcccatcttggcagacctgaacctgtcttatccaaagatgatagatgtagctgtacccgccaatttggtctgcggcatcccgaggtatt

SEQ ID NO: 27148 - DNA, 632 bp, Setaria italica
  Peptide Sequence Number=SeqID_93122
cagattttcacactgccaaaggataccctgctatatcctgcccatgactacaaaggtttcacagttagtactgttgaagaggaggtcgcctataacgcccgactaacgaaagataaggaaactttcaagacgatcatggataacctgaacctgtcttatccaaagatgatagatgtagctgtacccgccaatttggtctgcggcatccaggatccgccaccgaagatctgagctgttccgttcgaagcctgcagtgctgcttcgggttatctacgaacaaaggatcaccacgagaggcttgcaactcagttgtacaataaataatttgtttgctgcagcctgtgatattacgagaaaaataatttagtcaatggacaatgaggccggtggttgtaacttgcaaggcactactgtatgatgggatcaatgagagcaacactagtgataaatgaagccaatttgcctctcgtctttttactattgtttgatgggatcaatgagaacaacactaccattgaagtagaaaacatatacgcgtggaagctctctgactaggtatgaaaaatggacctaggctgaacattacgcatgctgaagctcattatcattttgttgcagactaaaaaaaaaaa

SEQ ID NO: 27149 - DNA, 1081 bp, Setaria italica
  Peptide Sequence Number=SeqID_93123
cgtgaagctgggcaaccgcctgaagaaggtggccgcgaagatgatcagcggcaaatgctccgaggtacgcttcaagaagcgaagcgcgagcatcagcacccacgtcagttctctgatgtgccccgcggagctattggttccacatcccgaaccagcggcccagctgatgaggaccttcatgcctcctgccgctactggtgctgcggcgcgcacccacggcattcctaatttccaggttattcagaggaggggcaaaggagttggtatttgaattggctggtcgacttacagttgacggtaagcctgcttcagcctaaataagatgtgcttgcagctttccacactgataatcgactaatttcaggtttgatttttttagtctattctcttctggacttaatgattgcttttatattttacgctaattcaagctgggttgtgcaattgattcagaagcatatagagagtattagtgaaggggttaattaatctgaaatgttgtaacctaatctaataggttttgatttttgtcaatttcttgaccatagagcgtggcccatgagtactaatcagtgtattgctctacgatttttagcccaggtgctcttgatttttacctatggatctgatcttgatcggaacctttacttttctattgtaactgctgcttctccattcttatttactctgggaaaataacactgttgttttgtttgtgttcacatgacagctaggaattcttggcctgtagagacacttggcttatgcactttctagctactaaaatttgcggtaaaatttttctgttcattcatacgagatacttgttttgaaaatttttaagcttactatataattgatcaattaccagttgtctattccatagcctagaaaaaataatactccatcaaccaaactatatcatttctccctatgcattttgcaagaatcttataaccgtagttttgctgagtatttgtttcatagttcttcaccttgagatatttgatatgagaggcaccaccgatgtggcactagaaaagagacaaggtaagttttgaaaacagttttaccatctttt

SEQ ID NO: 27150 - DNA, 394 bp, Setaria italica
  Peptide Sequence Number=SeqID_93124
cccgttagttattcatacctcagtgcgtcataacaatgaggtatgaataaactatcggttcaacatgcttcaactttaatcatacctcagtgcgtcataacaatgagaccatttttccactaactataaagtcatctatagcatctatagcagctttataagatgctatagatgctatgttcctttcaatttgacctttttgcatatgagcatacagtgacttgtagcgctcatccctgagcgggagccatgcgcaacttggttatgctgacttcttgccaccgaaaatgagattccaactataggtgttgcctttctttgcggccgcgtccagccgttttgcaccaatcttgtccataagccagtaaccaattgttggcatgtattgcaccaa

SEQ ID NO: 27151 - DNA, 458 bp, Setaria italica
  Peptide Sequence Number=SeqID_93125
ttacataccacaacaaaatgacccatccctctatccagcatgtaaggtgcaagaaggcgagtgagattaatagttccaatgacattgacattaaaagtagccttgagacctccctcactttcttccagtgccccccgtttctgcaatttgattgaaaattaatgcatttaggaagccgactgattatagtaacatagattgaaaggagcaatacctagcagataatattcatagaaaaactagtaacaataaatattgaatgtttatagggaagggtgttgaaaatggtaacacaaagtaagggtgatatttacaggacgctcgaaggctgcattatggatcatatagtcaatgcctgcattagaaaatagtgattctgctgcatgtacaacttgtttcagagattcttcaccagctgtattaaattcctattgggttaactactttctaattccttg

SEQ ID NO: 27152 - DNA, 1813 bp, Setaria italica
  Peptide Sequence Number=SeqID_93126
tttttccctgccacagaaattggcccttgactgagagagctctcacaacttccggcacttacatcaaacacccagcatttctaaataaactatcggttcaacatgcttcaactttaatcatacctcagtgcgtcataacaatgagaccattttttcactaaactataaagctgctatagatgctatgttcctttcaatttgacctttttgcatatgagcatacagtgacttgtagcgctcatccctgagcgggagccatgcgcaacttggttatgctgacttcttgccaccgaaaatgagattccaactataggtgttgcctttctttgcggccgcgtccagccgttttgcaccaatcttgtccataagccagtaaccaattgttggcatgtattgcaccaagtacataacagtcagcacaggctgatatgatatccatgcttctttcaggccatgagttgctgcaacaatggtcagttcagcacatctttccaccgaaacacgtttctcagaagaatgcctttgtactgaagaggctgcagcagaagattgtggtgtttcaattggtccggggcagactacagtcactttaatgccttttgtacacaactcagaacgcagagaagtgaagtatccattgagagcatgtttggatgcagaataaacagcctgaccaggagcaggaaccttcccagccgcactgctcatcacaacaaaatgacccatccctctatccagcatgtaaggtgcaagaaggcgagtgagattaatagttccaatgacattgacattaaaagtagccttgagacctccctcactttcttccagtgccccccgtttaggacgctcgaaggctgcattatggatcatatagtcaatgcctgcattagaaaatagtgattctgctgcatgtacaacttgtttcagagattcttcaccagctgataaatccatgggtaacacttcaatcctgctatctggattcttgctgaggatgttctgtttcactctctcaagctcatccttgttgcgagcagatagtatcagctttgctcctaaatttgcaaattgcattgaaagaacctctccaatcccgcgactcgctccagtgatccacacgaccttgccgtccaccctctcccgccgcggcgggccgcgcgacacgagcgtcaagtccccatcgacaacggtggcgaacttgaagaggaggaaggcagcggcgccggcgaggagggcgaggaggaagaggaggagcattttcttggcccctgcgtggcgctggccgattctcttgggttcttctgaggttcttgggaatttgggatcgagaaggcggagaggacgctcgaaggctgcattatggatcatatagtcaatgcatgcagcagaatcactattttctaatgcaggcattggtagtgattctgctgcctgcattagaatcactattttccaatgcctgcattagtagtgattctgaaacaagttgtacatgcagcagaacctacaagaaacgacaagtgagtaaagggaaccaagtacaaaattttaagtttgaactgctgtgccagcagatggttggcacagcagatggttccaagattttaggacctgagtagattctgttatcataggtaggaacaaaaaatattgggcattaccacttttatttggatacaaaaagaataactgtgcagttacttgcatggaagactcaaaaacaatagtacttataagttataactgagatggtgaagtttaaatgccttactttagtgatcaacctttttgttgtctgcaagatttaaataag

SEQ ID NO: 27153 - DNA, 305 bp, Setaria italica
  Peptide Sequence Number=SeqID_93127
tagtaatcaagccagggttggcatccaacagttgaagtacacagcaaatcaccttatgcttgcgagcgaattcctccagctgagaccggaatgttgccagctgctccttcatgacatccgtcctgaccttggccacattctccccgaccagacggaattggtcgcgagtagccgccgcattctgcaagcccgcgatccccggccgcctcctcatgctcttcggcgctgaaccaccgtggggcaagagagttcagcacacaacagataaatcaaaaacgcgtccggataaccggattggatttcca

SEQ ID NO: 27154 - DNA, 739 bp, Setaria italica
  Peptide Sequence Number=SeqID_93128
ccgcctccgccgcctccgccgccaccgtatccaccaccaaagtcaggttgtccgtacccaccgccataccaaccgcgaccagaaccacaccaccgaaaccgctcgtgcctcccatcccccacgtctccaccacccagctccgctccctcagcagcttcgtgcaggacaagcactccacgccgcaggacagaacagagcaggactgactactgagacgaagaagacagacagaggataaacccagccagcagggaacagaacactccgacatgggtgccgcgttcctggcgtcctggccgtgggacaacctcggcttctacaagtacgtgctgtacgggccgctggtgggcaaggcggcggcgtcgcgggcgtgggaggccgcgagccccgaccggtggatcctcctcctgctcgtgctcttcggcctccgcgcgctcacctaccagctctggagctccttcagcaacatgctcttcgccacgcggcgccgccgcatcgtccgcgacggcgtcgacttcgaacagatcgacaaggagtgggactgggacaacttcttgatgctgcaggtcctaatgacggccacggcgttctacgcgttcccgtcgctgcgccacctcccgctctgggacgcccgtggcttcgccgtcgcgctcctcatccacgccgcggccaccgagccgctcttctacgcggcgcaccgtgccttccacgccagcagccgcctctacgcccgccacca

SEQ ID NO: 27155 - DNA, 273 bp, Setaria italica
  Peptide Sequence Number=SeqID_93129
aaacctagcacagctctccattccccaaatacatgggattgtaccaccaagctttcctgcagtacattttggagcaagtctctccgagagacgacgacctaaaagtaatgaaaggaaactgcgcaattctttggcttctctgaatctgaagcctggataaaatccccttgcccatttttctcttcttgctggcacagacataccatgcccaactggaggattccaaacacaagcagctacgctaaacaagagaaatcaccaaagccgttgcag

SEQ ID NO: 27156 - DNA, 745 bp, Setaria italica
  Peptide Sequence Number=SeqID_93130
cctccctccgctcgcccctcgctcccgctcatttatcgcgccgcgcgcgcgcgcgctccgcgcctaaacccttgcactcccggcggattagcagtagcactacccgcccgcttcgacacgacctggtggcgcggtttgcctccatggcgggggcgctgggagcgctgtgccgcgccgggggctggtcatacgcggcgatctggcgctccgaccgtcgcgacccgcggctgcttacaataggagaatgccactgtgaagatgaagcaagaaagtgatggagaagatggtcaatcaagtccatgttgtcggagaaggcgtcataggaagagctctaataagtggggagtaccaatggatttgtgatgatatccccttcagtttgtctcagataagcgatgcagataacctaggtttatttcagggttatacttggtggcaacatcagttcctaagcggaataaagactattgcagtagtacctatcccggcgtttggtgtggcacagttcggttccatgcaaaaggtttctgaaagcttggagtttctggatcaagttaaaggtgcagcttttctgacggaaagtatttcatggcacccttcagccagagatgttcagaaagatgttttcacgtacaatccacaatttcaacttaattcttcaagcatcacagagggtcttgtaagtattaaggctgaagctagaaaacgcaaggctcctggagacacaataactgtagattctcta

SEQ ID NO: 27157 - DNA, 429 bp, Setaria italica
  Peptide Sequence Number=SeqID_93131
aaaatagaataatcccatattttggttcctacagaacaaatggactccacacattcaactaggaacctagactggtatgtttcacgcaataaatgtaacaaaaaagcaaaatgcattaaatagatgctcgatacaaacagtggagaggacatatggtggattaacatcattttccaaatagatcgacatagaaaaattcaaatagacactgcaagtacagtgttacaaggccagaccaaatagtaactaccacactcaatgactacaggaaagatgcaccaaatggtacaatggcatgctatatagggattagaagcactgagtaactagagaatagcacaaagaggtacagggcaaaaaaaaacattagtaatttagcttatgatgtgtccatgctagattgctgtgccaaatgggccaacatcaggc

SEQ ID NO: 27158 - DNA, 295 bp, Setaria italica
  misc_feature (246)..(246): n is a, c, g, or t
  Peptide Sequence Number=SeqID_93132
cacctgcaagaagtgcaaaacctgcgtcctgggaatgttgataacgatgccaggaatcaagtcgctgacgtacgacgacgagaagagcacgctgacggtggtgggagaggtggacgtggtggagatcgtggcggcgctgcgcaaggcgaagcacccggcggaggtggtgtccgtgaccgacgagaagaaggagaaggaggcagaggagaagaagaagaaggaggaggaagagaagaagaaaaaggnggaagaagagaagaagaagaagaagtgctgttgccccttgccgtgtccg

SEQ ID NO: 27159 - DNA, 643 bp, Setaria italica
  Peptide Sequence Number=SeqID_93133
atggatgttaggaatgatatcggcaacctcttttcctgaggaaagttccacaatgaagtcgctgacggtcgccgacttatgaacgctgacgacgggaactccgttcagggtctcggggatggacggcagctcggcaggatggcaatcgacaaggtcaatcatggggaaatccagctcgatgaacagcttcccctcacctgaggccgccgcactcgccggtgcaggaaccttctcggcggtgagaatccccgatttggtcgcgaattcgatgagcgtctcgtgctccgcgaggacggatgtgaagaggaagtgagcggaggccagcgtcgcgtggccgcagagctcgacctcggcggcgggggtgaaccatcggagctggaaccgtggggcggcggcggcggaggagtcgcggaggaggaaggcggtctcggcgaggttgaactcggcggcgacggactgcatccaccgcgcgtcggcggcctgctcggcgtcgtcgaggacgcacaccgacgccgggttgcccttgaacggctccgccgtgaaggcgtccaccacgacgtattggataggcctcttggccattcttccaaacgggcttcccttaccggggctatggccagcggcggcggctgctccggcagat

SEQ ID NO: 27160 - DNA, 299 bp, Setaria italica
  Peptide Sequence Number=SeqID_93134
cggggaagtcgcggaagaggttgtagacctcgcgcggcttggcgtcggcggggaggccagcgatgaagagggtgcggagctcgtcccgctgcgggaggacctgctccgcgcggtcgtagtaggagccgtaagcggttgggggaaccggcgccgggggtaggcgtggcggtacgcgccgtacggggaggtgcccggcgggggaggcggcggcgggtaggaggaggagtggttgaagtacgaggcggccatgcgacgcgcgcccgcggagagcggggggtcgggcaggcggcggctacagg

SEQ ID NO: 27161 - DNA, 423 bp, Setaria italica
  Peptide Sequence Number=SeqID_93135
aaaatgtacttgacgcttgccatgagcatggtgtcagaaggcttgtgtatgtaagcacgtacaacgtggtgtttggaggaaagccaattgtcaatggaaatgaggctttgccttatttcccgatcgaagaccatgttgacgcttatgggcgcagcaaatcagttgctgaacagttggtgctgaagagtaatgggcggccagctaagtaagtttacccttctcctttgctaggcttgaatgccatgtgcacaataagctaaattcaacctgctcctcaaaaatagatagaccctagaatacatgcagccaaggttgttaataattaatttatattaatggatttgccatcaaagtacttcgatatcattataattttaatattcttgtgcgggtgcacagttgaaaaagtattgtaaatgtttt

SEQ ID NO: 27162 - DNA, 1707 bp, Setaria italica
  misc_feature (1654)..(1707): n is a, c, g, or t
  Peptide Sequence Number=SeqID_93136
caccctcgttttctccgctccacagtccactgcgcacgagtcgccgcgctagcgagaggaggggcgcgtggagatgcatctgagcgcgaacgaggggatcgagggcgtgcggttcgcggtgaccggcggacagggcttcgtcggcgccgcgctctgcctcgagctgctccgccgcggcgcccgcgaggtccggtccctggacctccgcgccgcctccccctggtcccggcagctcctcgacgctggcgtccgcaccttccaaggggacattagaaagaaggatgatgtggggagggctttccgtggagtggactgtgttttccaccttgcttcttatggcatgtcagggaaggaaatggtgcaggctggtagggccgatgaggttaatataaacgggacctgcaatgtacttgacgcttgccatgagcatggtgtcagaaggcttgtgtatgtaagcacgtacaacgtggtgtttggaggaaagccaattgtcaatggaaatgaggctttgccttatttcccgatcgaagaccatgttgacgcttatgggcgcagcaaatcagttgctgaacagttggtgctgaagagtaatgggcggccagctaagggtgataaaagtactcgtctttatacatgtgcaattcgtcctgctgctatatatgggccaggtgaagagcgccatcttccaagaatcatgtccatggcaaagttgggattagcattcttcaagattgggggcccagatgtgaagacagattgggtatacatagacaatctagttcttgctctgatattggcaagcatgggacttttagatgacattcctgacaggaagggaatccctgtagcagctggtcaggcgtatttcatctgtgatggatcaccatgcaacacttttgaatttatcatcagccctctctttcgaagtttgggttatgcagttcctcgagtgacgctcgatacctctgtcgccctttccatttcaaaaatatttttattcatatctacaatgttctatccgtggcttgatagcaaatggatccctcagcctctaattcttcctgctgaagtgtataaggttggtgttacacactacttttcgttcttgaaagcaagagaggagctcggctatgtacccatggtgagccctcgggaaggcctggctgcaactatctcgtattggcaggagcggaaaagaagggaactagatggcccgaccatatttacttggttagctgttacaattgggatgctggctatattctctgctgcttgccttgcacccatcggcccgttgaaatgggtgcttgacatccatttatttgtctttcgctcaatgttggtgattcggttagtctttgcaacagccgttgtattgcattttggtgaaggcgtttatgcctggttcttggcgaaaagggtcgatccgaggaatgctacagggtggttttggcaaacctttgctcttgggatcttctctctccggtatctgctcaagagagcgagagggtagatttttttcacatacacattgtaattctgtaacagtgatttccagcttgatgcctgttattgaggagatgtacccgcaaatggggtttatactgctgtaaaaagtttcccattctgccgtgaaaaaaaaaaaaaaaacaannnnnnnnnnnnnnnnnnnnnnnnnnnnnnnnnnnnnnnnnnnnnnnnnnnnnn

SEQ ID NO: 27163 - DNA, 567 bp, Setaria italica
  Peptide Sequence Number=SeqID_93137
gtggggcgacgcccgaggccccgccgccacgtccacccatcgccagcaggtgcgcgtcggcgacgaggcacgcgacgtcgtcgccctcccgccgctccagcagggcggcgaggcgctcccggaacggcgcctcgcaggcgcggttcatgtcgaggatgcgcttggcgatgtcctgcagcgggtggccgccctccggcatgccgtcggggacggggacgaagtcgtagtcccgatgggcggacgcgtcgggggcgttgaagtgggtgtggaagatggtgacggcgaacccgcgcgcgtggaggaggccggcgagctggaacatggggtttatgtggccctggtacgggagcgggaagaacagcacgcgccgccgacggccgccagcagcggcggtggccatggcttggatgggtttcttggcttcagtggtcgccagcaggtcggggccgagctagaggataagatatgaacaatgtaaggctgggagattggactggacttcgttgttcatcgattgtctttgctaccacagattccatcctaactttaagtaaattaattaaatta

SEQ ID NO: 27164 - DNA, 334 bp, Setaria italica
  Peptide Sequence Number=SeqID_93138
tactacggcaacctgacaaaggacggcctgctgcactccgaccaggtgctcacgagccgcgatgacgtgaaggcgttcgtggaggagtacaaatccaaccaggacaccttcttccgcgacttcgcgagcgcgatgaagaggatgtcggagttgggcgtcctcaccggaacgaacggtcagatcaggaccgactgcagtagggtgctcaactagctgtgttgccgttgaccggtgctagccgctgagtacaacgatccggtctaccgtctactatgtgtaccgatttaatttaatttttgcgtctgtgcgcggtgagtcgtcgcgttcgcaaagg

SEQ ID NO: 27165 - DNA, 209 bp, Setaria italica
  Peptide Sequence Number=SeqID_93139
gcaggtagctggcgtcggagccgatgacgtggaatgggaggccgttggacagcgagaggttgaagaagcgcgcgttgctggcgttgatgatgcggaagcggtagcggcggcgcgcgacggggaggaacggccaggccttgccgttgacggtgacggcgtcgccgaagtactcgggctgccactgcgggtggacgccggggttgtcgccg

SEQ ID NO: 27166 - DNA, 364 bp, Setaria italica
  Peptide Sequence Number=SeqID_93140
cgagcgaacacgccacaacactcatccaaacaacgcgcgcgcacacacgaagcggagcatcgcagcaccggcatagtcgcaagcatggcgcaggagagccttaggctggtgtcgcacccgatcgcggcgcacgacgggcgtctgccgcggcagtacacgctggagggtcagggggcgaagaaggacatgtcgccgccgctggagtggtacggcgtccccgacggcacgcggtcgctggcgctggtggtggaggacatcgacgcgccggacccggagggccccatcgtgccgtggacgcactgggtggtggccaacatcccgcccaccaccaagggcctccccgaggggttctccggcaaggagg

SEQ ID NO: 27167 - DNA, 282 bp, Setaria italica
  Peptide Sequence Number=SeqID_93141
gggcagggcggccggcagctgcagtatctccttgcactcgtcgcagaccacgaacggcgtgccgcccagcagcggtcggcagtggtgcgcccgagccctgggcccgccgcgccgactgctcgaaaccgacgacgccgacgacgaggaggaggcgctggcgtcccggcgcgggcgctcgccgggcagcgcccgcgtgagctgcgactccaggcggcgcatgagacgggagctgcgcctcgttatcgtgcgcttgccgccgccgccgtcgtggcaggacgcgct

SEQ ID NO: 27168 - DNA, 586 bp, Setaria italica
  misc_feature (4)..(4): n is a, c, g, or t
  Peptide Sequence Number=SeqID_93142
gaanctttcagaatgaagtacatagagagcatcattgacaaggtgcacttgaaacgttttgctttcacatacctgcctagctatttatttttgccatttagaatccgtacccagttaagcgtttttagtttattaggagtcttggaattagattaagaaaggagtccagacagcagcatcaccttgtggcaaggccgcagaggattcctggttggttgtaactattgtggacttgtggtccactggttggtggaagaagtatgttgggaggcagcatgtaacaatactagggcaataaagtggctctaatgctgtctaactcggccaagaagagatttaggaaagatgaacatgtatagtggagcttggggttttttgtcttgttacgagtttatcctagtagaacgctttgtagagtcttggtagaagttgatgtcttctaattttgtcaagttactgaactatataacccataattgataattctgtgggacctacttgttaggttataaaagtattagtattgtttatggttgtattctttttgttgatgaaagaagaattagtccctagtgactcaccccaa

SEQ ID NO: 27169 - DNA, 416 bp, Setaria italica
  Peptide Sequence Number=SeqID_93143
gcagtctcagttttccattgatttcaatgtgtttgcttaataataacatacgcataagtttcagcctttcaggtgaacacaaagtaagagatatctacacatatatgggtgaatctgaaacacaaaatatgacatgctccaatatatcttttgcagatctctggcatacactggtggtatagagttcccaatcacgcagctgagctcactgccggatactacaacttagatgacagagatggctacagaaccatagcacacatgctcacaaggcactatgcttgcatgaacttcacttgtgcagagatgagggacaatgagcagagctcagaggcaaagagcgcacctgaggaactggttcagcaggtaccaagaccattaattgttgcttcataatttgatgaatttttctcctg

SEQ ID NO: 27170 - DNA, 937 bp, Setaria italica
  Peptide Sequence Number=SeqID_93144
tgacggaggcgggcgtcgacggggtcatgatcgacgtctggtgggggctggtggaacggaaggcgcccggggtctacgactggagcgcctacaagcaggtgttcaaactggtgcaggaggccgggctgaagctgcaggccatcatgtcgtgccaccagtgcggcggcaacgtcggtgacgtcgtcaacatcccgatcccgcagtgggtgcgggacatcggcgaggccaaccccgacatcttctacaccaaccggagggggacgaggaacattgagtatctcactcttggagtggacgatcagcctatcttccaggggagaactgcaattcaggttagctgagttgaactctcttcagtctagcacatgcggcagaaccatttatccttggcaaaatcaagttttcttgtgatcctgatgtgctatcttggggcatctctgtctgtgacagttgtatgctgattacatgaagagcttcagggagaacatggcagagttcctggatgatggtgtcatcgtggacattgaggtcggacttggccctgctggagagatgaggtacccctcctatccacagagccagggatgggtgttcccaggaatcggagagttcatagtgagtactctttccagaaataatattcttccacctttactttaataaaatgaaggagatatgtccctgtgatgcgcctttcccaggcagagatgtctaatactctaatcttggccccaagggttgatctccgctggaagcagacttcaaagcagcagcagcagaggctgggcatcctgagtgggaattgccagatgatgctggggagtacaatgacactcccgagaacacccagttctttgcagaaaatggaacataccagaccgagaagggaaagttcttcctcacatggtactccaacaaactgatcaagcacggtgaa

SEQ ID NO: 27171 - DNA, 1710 bp, Setaria italica
  Peptide Sequence Number=SeqID_93145
tagcgcacctgcaccctcttcctggggggacagcagcttgtaccggctgaaccgaaagtgcgccgctccctcctccagtcctctccctagctcccctgtataaatagccccccaggctccctttcttgtttcttccgctcttcgtttgaggaacgtatagctggatatcatcaccgtcgacaacacgttcgagaaggccgacgagacgagggcgcagctgaagaagctgacggaggcgggcgtcgacggggtcatgatcgacgtctggtgggggctggtggaacggaaggcgcccggggtctacgactggagcgcctacaagcaggtgttcaaactggtgcaggaggccgggctgaagctgcaggccatcatgtcgtgccaccagtgcggcggcaacgtcggtgacgtcgtcaacatcccgatcccgcagtgggtgcgggacatcggcgaggccaaccccgacatcttctacaccaaccggagggggacgaggaacattgagtatctcactcttggagtggacgatcagcctatcttccaggggagaactgcaattcagttgtatgctgattacatgaagagcttcagggagaacatggcagagttcctggatgatggtgtcatcgtggacattgaggtcggacttggccctgctggagagatgaggtacccctcctatccacagagccagggatgggtgttcccaggaatcggagagttcatatgctatgataagtacctggaagcagacttcaaagcagcagcagcagaggctgggcatcctgagtgggaattgccagatgatgctggggagtacaatgacactcccgagaacacccagttctttgcagaaaatggaacataccagaccgagaagggaaagttcttcctcacatggtactccaacaaactgatcaagcacggtgacaatatcttggatgaagcaaacaaggtcttcctgggatgcacagtgcagctggcaatcaaaatctctggcatacactggtggtatagagttcccaatcacgcagctgagctcactgccggatactacaacttagatgacagagatggctacagaaccatagcacacatgctcacaaggcactatgcttgcatgaacttcacttgtgcagagatgagggacaatgagcagagctcagaggcaaagagcgcacctgaggaactggttcagcaggtgctgagtgctgggtggagagagggccgaaatgttgcgtgtgaaaatgcacttggtcggtatgatgcaacagcttacaacaccatcctcaggaatgcaaggccgcaaggcatcaacaagaatggccctcctgagcacaagctgtatgggttcacctacctccgagtatcagatgagctgctgcagggacaaaactacaccactttcaaaacttttgtcaggagaatgcatgctaacctggattataacccacaggttgatccagttccacctttgaaaagatcaaaaccagagataccaattgaagaaatcctagaagtagcacagccaagattggagccatttcccttcaacaagaacacggacctacccgtttaaacatcctatggtacaatatacaggaaggagtacggggaacttttaaaatcaataaaagcatgaaataagccttattgttcgaacaatttggcttattaaacttaaattaaacttgtcttattgtcttctagtct

SEQ ID NO: 27172 - DNA, 387 bp, Setaria italica
  Peptide Sequence Number=SeqID_93146
tatgaccaagatgtgaagacctgttccaggacttcaggatcacgatcaccaccatcattaaggagagctaaaatgccattagcatgtcttcctagaaagggcaaaaaatcttctagaatgtccctggagagagctgtgatcaacatgagtatcggctccagggacaatctcgcactcatgttcactctcagtagaagcgcagaaaagagcttttcacggtgcaatacaatttgaggtagggtctgtaccaatggtatcatctcctcataaaatgagataaaatcctctgcagtattaagctccctccactccatgagggcgtcgaggaagaggacgagccgctggagggctcggccttcacagcgtgtaggctgcggtacacatcga

SEQ ID NO: 27173 - DNA, 402 bp, Setaria italica
  Peptide Sequence Number=SeqID_93147
ctgcaattgggtgttgggtacatctaaaattgtgtggccgcagccgctgctgtttgctggctgttggtgcagcacagcagcagcctttcagtgctgcaaactagcactgccaattacttagctcccagttccatgctaaatatgattctccacctccttcattgtcgcctgaatctgctgcttctacattattactaggacaatattttttagtagactatgttcctggatacttttaattctgatgatggtttcttatgaaaaaatgccacgttattatgttgatttatcttattggcttcctagttcctactgtagttgtttaagacctggttcctttaataaattggattgctttctacatggaaatgattaatacatagcatctgtttataccctcag

SEQ ID NO: 27174 - DNA, 174 bp, Setaria italica
  Peptide Sequence Number=SeqID_93148
tgcggcggctagggttcttgccgagagctcgggacgggcagaaggagcggtcgccggcctgccaccgcgggggagcaaggaggcactctcggctctcatggtagaggaggtgggtgagcaggggagcgacgccggcggcggccgtggccacggcgtagacgctgctgggcacgg

SEQ ID NO: 27175 - DNA, 397 bp, Setaria italica
  misc_feature (25)..(25): n is a, c, g, or t
  Peptide Sequence Number=SeqID_93149
ttttctaatgcatgtatatatacancctttcaatctctatttctcagatgaactattagaactggaataggatagttcaaatttaaaggacaaggaacttgctccagaatccacactaatctagtgcatccaattcataaaccacattgccataattaaccaattcatgatataatgtttatagttataatcgtaatatctggtggattataaaaccatatgtgacaacacactggcgatcacgaacatctgttttcttttctatgacaggcttgatgctgtagagtagttctatggcaggcttgatgctgtagatgaaaactaataggtaggcagcacaggaataatggaggccctgctgcaaaccaaatacttcaaaggagctcagtactataaa

SEQ ID NO: 27176 - DNA, 178 bp, Setaria italica
  Peptide Sequence Number=SeqID_93150
tttggctgggataagaagccaagagtaacatgctgtcttgcatgcttgtcagaactgcttatgtctgtatctgtaatttactaaatactaaagcatctagatgtaccaaaccataagttaccactcaatatacatgttcaggtcaaatcatacaccatgattaatttctatgctatgg

SEQ ID NO: 27177 - DNA, 797 bp, Setaria italica
  misc_feature (769)..(797): n is a, c, g, or t
  Peptide Sequence Number=SeqID_93151
agaacccgcccgtcctcgacctcggcctcgcgctgcggctccgcgtcctcaaccccggcttcctcctcccgctgcgctaccgagcggtctccgccgccgtctcctaccgcggccacctgctcgggtccgctaaggcgtggccggggtccggcgagctcgcggccagggatgaggtgtatgcggacgccgaggtgtgggtggacgccgggagggtgctggatgacgtggtcgacctcatcggggacctggccactggctccgtgccgctggagatcgtcacggaggtggtcggctcgatcaggttgttccgtttccacatccctgtgaaggggctcatatcgtgctcggtgaatatcagcccagagactcagggtatcataagccaggattgctattaagtgagagtgatttgagatcttcatggaacataattgcataattactatggaagatactatcaagttgcagagcctgcttgatggaactggagtgcctatctgtatataatttggatattgtcctgtattggctgggataagaagccaagagtaacatgctgtcttgcatgcttgtcagaactgcttatgtctgtatctgtaatttactaaatactaaagcatctagatgtaccatagcatagaaattaatcatggtgtatgatttgacctgaacatgtatattgagtggtaacttatggtttgtgatatttgaattgaaccatggtaaatgaaacgtcatctgtgtagatatgtttgacattaagcctacnnnnnnnnnnnnnnnnnnnnnnnnnnnnn

SEQ ID NO: 27178 - DNA, 261 bp, Setaria italica
  Peptide Sequence Number=SeqID_93152
ataaacagggtgggggccacggctcggctcacgaggttcgccgtagccagccgccccaccgacacacctaccgatctaggtcttgcgtagtagcagcgggaagcaccaccgccgccgcgccggcaaggcaactgcactgcgcgtcgctgccttgcgcagatcttcgacaacagaaccagcgatggccagcagctctgctgcttccacccctaggggtgaaggtacccctacctctctatctctctgtctctctatcactct

SEQ ID NO: 27179 - DNA, 254 bp, Setaria italica
  Peptide Sequence Number=SeqID_93153
ccgccgccgcagcccgcgcccagcgtgccgccagcccgccacccagatccggcgagccatccttgcccctctacccacctctcttcccctctcatcgtcgtcttcctcaatcctttccgcgggtttcgctccagctggatttcgactgaccgctccgtcagctgggtacgggcctcaggatgcaatctttgctccggaatgtctgcagagccgaaaaccgtggggctgctgcgaggctcctagaatttgccgct

SEQ ID NO: 27180 - DNA, 268 bp, Setaria italica
  Peptide Sequence Number=SeqID_93154
gacggcggcggccgccgcggtcggcggcggggcagctgcggaggcggcttccacaggctttcttgaacggccgcggccgcggtggacgtgcctctcgcagtacttgtggcccggcaccacgtcgcgggagcaccgccacttcttgccgtccgtgcgccggcaccgcccgggctccggctccatgctgctgcggtagtcgaagcacaggctccccaggcccaccagggagggaaagcgctgcgggccgaaggaggaggcggcgacgctt

SEQ ID NO: 27181 - DNA, 1752 bp, Setaria italica
  Peptide Sequence Number=SeqID_93155
tttttttttttttttttgtacaatgcaaaagactcgttatagtatcactgggtactgtaatttcttgtctcattaccgattcggtgtgattgtaatgaaatcatggagcaaaaactcaacttttcttactagctactatcgttttccatggcgactctctgctggtaacaactccagcttatgttatctgacggtgacactccctcggagccttctatgatggcgcagctaagactctttgacacccaggacccctcaaaaagaaatttcattcatagaatggggttcttttatcacggactgggcacatgtatgctacgcgctaatcagttcaacaaaaaatgtggcccaagctattgggccacctgatggcctagggctgaatcatgcatgcccccattaggccttcaggtcatccgacatggcagaaggtatacagtgcgtcgtcagaatgtcctgggtagcagccttcgcggtttttgtctccagaacaacaatctggtcatactccagatcaaacttcaaaaattcatccttgcaattttccaccatggtcactaagttcttcaaattttttacaggttgaccattgaaagcaagaacctgggtattgacaatttcttcataaccgatattgatatctgccacaagcacctgtgataccaccacaagctgttcatcaggtgattctgccattgcatgtaaatgcttcaccaacaacttgacaggcgcatcatattcataatcttttccatactcggatcgaagatatggaacagagacagctgcaaagacaaagccagcaacaatgtaatatgatggtggcctgccctttacatgcgctgcaactagtcgcttgtgagttgctagccttatcttaaattcatgaacttttgaattgcgcagaactttaacaagagctttctctccagtatatttctgagaaaccaggtaactgaagccaatgcgctcgccatgcctgaaaggaactgttccatcattggcaatgtcaacaccatcaaagctaagaataatatcagatggttgtagacatccagattcgggggcagtgggctccaccctcctaacacgaacacccttctgatctggtttcattcccatcgatttgcggagatcaggattctccattttctgccattcaattccaagtatagggaagcctgtatattctccagatttctcgtagtcctggatgaaatgtgtaataactggggtcggtatcacatagccaatattctctgcatcttcatgtttgagagattgaaaagctatacccacacatttacccctatcattaaaagctgggccacctgaatttcctgaattaatagctgcatctatctgcaagcctagaagttctgtagagccatgaacatatgaaagtatttctatcctagagaccactccgcttgtcacagatatggtatctcctccaattggataaccaacaacagtgactgcatcctgaagagccggtaatgttccaaactcaacaggtgaaaccccttcccagaattcatcgtcactgacagttaagagtgcaatgtcgcactccgtgccgatggccaggacggtggcaaggtacttggtgtcggagccgcgcttcttcagcttaacctgggtatagtgctcgacggagtgggcattggtgaggacacggcggccgccgatgataaaaccgctgctgctggagctgtactgccgctttctctgccacggcagcgagaagtt

SEQ ID NO: 27182 - DNA, 459 bp, Setaria italica
  Peptide Sequence Number=SeqID_93156
gccgcccccaaaccacaatgctaagattcagttcggtgagttggcccactgaaaccaagttttcagtaagctccggtacataccacacatcagggagaacgacctttgctgtctccacagatcctctgccacacacctgcatcggcaagccattcccagaatgaacaactttattacttactgggctcagatcagggatgaggctccggttgtttgtcatgtgatggcaagcagcagtcgcgatgaaccaagtagatcttcctgcgttttctgagctgctgtcgccgcccccttcggatgcgttgcaaggattaggttctgctgaagtcgctggcgagacggggaagggcgccgccatcttctgagaatttgggagcggccggaagaagttgttagggttcggaacagataattataaaaacggaacggctctcgaaagtaccatcctaactatagcta

SEQ ID NO: 27183 - DNA, 1969 bp, Setaria italica
  Peptide Sequence Number=SeqID_93157
tgcaggcagagcaacatgctgatcatgaagtcaacccttgttttcagtggccaactaccgcacctttcacattgaccttcaatgttgttttgcaacccaaagagctgtagatagcctcttgatgccccggatcatgacttctcatttatacatgatgtaatgggtgccttgcactgtcaatggtacttccttgacatgttgtatctactgaatgaatccgaatctgatatagtgaaatcatcacgtctccatctttccagctgctggtgaagacccatttcacttgttccttcatcctcctcctcgtcaacaatattcgttggcttccattgatccaccaggctggaaagtctgttcacacagtgacacatgtctggccgctggtatggttctcgtgccgtgcaatggcgagcaagatctgctacctccagcaagctgctccaagattcagcactgagttcaagagtgggatccacaaacttcctgaacttatctttgtcaagcatatttcttcggaagattgttacaagatgtgtttcatcctcaggtaatgagtcatcgagtacttttcttcccgtaatcatctccataagtataacaccgtaggcatacacgtccacttttgtagtgacctttcctgtagtagcatattcaggcgcgaggtatccaaatgtccctgctacccttgtcatcatggacttatctgtatctttagcaagtttgaccaacccaaagtccgaaaccttggctctcaaatcttggtccagcaatatattagaaggtttcagatccctatggatgaaagtctcctgcgccaaaccatgcaaatattctatcccccgagcaacatccaaagctattgtcatcctctgtgtccatgtaagaggagtataaccactctgctgaagatcacacaggtgctcacgcagtgttcctcccgacatgtactcatagaccaatagcctctcattaccatgggtgcagtacccaagcaatgcaaccaagtgtcgatgtctcactttcctaagaacatcaatctcagccatgaattcttgcagccctttagtccccatagtgccactgtcgcacctcttcacagcaaccagatttccattgagagtccctttaaaaaccaccccaaagccccctctacctaagatgtagtcctcatcaaaattgtttgtggcctttagtagcacactcatcggcaattgcatcccatgagactcgaagatatcagcaatgtttgtactgtcagcgctcacatgactgaaaaactcagttgggattgaaccacttacattgctattgccatttgtcccaaccacctgaatcttcatcatctcagattcaccagaagggctcttagttgagacaggactgaacttgtccacgttcttcttccttcgatgatgtaggaaaagcccaacacagactacgagaagaatgacagctagaagaattccaatgatcattccagcattcgactttgagttccgtgaacctggatttgaaggtgatgacccaccatcggaaccaccacctccaccactatcaccgtctgattccccccaccggtttcctgctgtcatcagctttatatccggctggttaaactcaggcacttgtccagtgaggcgattatttgagacatcaagataattgagggttgccagcgttgtcaaactatccggtatcttccctgtgagttgattgttcgacagatccaacttttgaagcctagtcaggtttgcaaaagctggcgaaatcatccctgacaagttctttctaggcaaattgatttgaatcacatcattgtttttgcagataacaccaagccattgaccatttccgctacctccgcacgggctgtttcctgcccacactgaaagctgaggtgggtatccaaaacctgaggccacatcaagcagaattggttctacctagttggttatttgttcttaagtta

SEQ ID NO: 27184 - DNA, 877 bp, Setaria italica
  Peptide Sequence Number=SeqID_93158
aaaagcaagtagacatcaatggttttttttattctttgttttagttgaaacatcatttaacacagaaatgtcatgatgtcttctttccaatattaccaaccatgcaatcacacaggacgaaaatacaatggcagccttgaaaaaacattttggaagggtatgtattttgtttgattgcagctcatgcttattacaagtttgatagaggcatattctagctcttactttcacaacagatactgatgaaagcaaaagcagtccaggacgaaaacaacatcatctgaatgtcaggctcacagactagaggtctcgagctcaagcttgctccggcttcgggggacctctccacttgaagttctctgcgtaagccttgggcttcaaaagaggtgtatgacgtttccgaaccacataattccatccgtgtttttcagcaaatgcctttgctgactccgcactgtcgaaggtaagtcctgcctcaccaacatttgcatacggatccccagtagatgtccatcccatcaacgggttctcccacttttgggttgacaaaaagttaattttccacctcccgactttgcctgaaccttgctgggatgcagtccttgctggtgaataaattacaaccttacggcggaggtgctcctcggggatgccggagaccatcccgatctcccccggcttgatctctaccagggcgtcggaggcctcagcggagagcatccgcaccggcgccggcgtgaggagcgcgcgaccgagggaggggaggctccgccggagaggggcggccatctcgtcggagccgtacaccaccggagattaggagatggaggggaaaggaggagccgagagaggaggagcttgtgacctgtgagcgcag

SEQ ID NO: 27185 - DNA, 415 bp, Setaria italica
  Peptide Sequence Number=SeqID_93159
gtcgagtactgcaaccggctacttggtgatcaatacagaccggtgcttggtcaggtgatcaccatccatcgcagctggcgcaaagaggtgttcaatgacaggatgcttgttgacgcggtggttaacattgtcaaggccctcgaagctaactttgatgtttggtccaaggcatatgacaatgctatgctgtcatatctcttcatgatgaacacacattggcatatctttaggcatttgaaggctactaagctaggggagatcttgggtgatgtgtggctgcgagagcatgaacaatacaaggaatactatctgtcgatgtttatcagggagagctggggagcacttgcgccgctattgaaccgggagggattgatattgttctccaagggccgggccacagcaagggacctggtga

SEQ ID NO: 27186 - DNA, 852 bp, Setaria italica
  Peptide Sequence Number=SeqID_93160
tttttctttttacttttattttttggtttctttatttatttcttttaggtctatttgaaggctactaagctaggggagatcttgggtgatgtgtggctgcgagagcatgaacaatacaaggaatactatctgtcgatgtttatcagggagagctggggagcacttgcgccgctattgaaccgggagggattgatattgttctccaagggccgggccacagcaagggacctggtgaagcagcgcctgaaaacattcaattcaagctttgatgagatgcattgcaggcaatcgtcgtgggttataccggacaaggatttgcgggaaaagacatgtaatcttgtggtacagacaattgttcctacttaccggagctacttgcagaactatggaccacttgtggagcaagagggtaataccggcaggtatgtaaggttcactgttgatggtatggagaagatgcttggtgcactctacatgccccggccaaggaggtctgcaagcatccaaatcaagcactcgagtgacaagattaccagtgcaatgactgggttgcatcggagcgcttctgcagtgaaatagcttctgttgaggaactcaaagatcggatccaatattatgcaataactgttttgtggcaaatgattcatttgaccctgtcagtaaagagtcctgcgctgtataggtgacctgataatggaccgatgatgagagcagtggtcagtggtggcacatgaacataagctcctctttagtaagcatgagaagagaagatggcgtaatcattcctcagcaactatttgagatgttacttctcctgggccatcttctcttgtttttgtacttctactaggg

SEQ ID NO: 27187 - DNA, 752 bp, Setaria italica
  Peptide Sequence Number=SeqID_93161
tggtaggtcgtggcgaacgctgacgctgacgaggaaggggaggaagagggagaaggaactgggacttgccgcccccgcctccaaattccccactcctccgccaccgccaccacccacctctcgcgccgctccgccctcccgattccggcgtcgccaagcaaccccactcctcgtgccggtaccagaaccctcccaatccgtccgattcccagctgccaacttcgcgtcgggactcgggagcctcggagcaggggataggcggaggatcggatcggcggccggaggagcattgggcgatggccgcggtgtaggatgcagctggactccgccggccgccgcttagctgctgctgctgaagttccgatgcttcggccgccgcgatcctaataggagggagtacaggtggagtgggttgggcggcttgttgatctccgtgagcacaggcacctgcgcgctgggagctgaggaggtggttgcgggaggcgtatggagaagccctcgagggagggggcctccccggggccgtcgtgggcgccgagcgagtccacggctttccgggtgtatgctgcggcggtgggggagcgggcggaggcgtcatcgtccgctccggggattggtgtttccgcccgctcaagcaacctccgcgccgtcaggaagaggccgtttgttgcaagattaaccacagacatcgtccaaacttttgaaaaatgcaatcctgagtttaagtactcagagtcactaaaccccaagcg

SEQ ID NO: 27188 - DNA, 254 bp, Setaria italica
  Peptide Sequence Number=SeqID_93162
ggtgctctccttgttgtgctcgttttgatttctttcctcccgctgagatagagaagaaaaacacaagaaagaacaggctttagaaagtcaaacggatcaatggatcggcgttcatgcgcttgttgtaatctcctttcttgattgggttaaacagatttggtcagttttgtcgtgtcacattggaaaattgtattacattgaagaacataattatacaaactccaatcttggagtactgtacttcgtgattgtcg

SEQ ID NO: 27189 - DNA, 1409 bp, Setaria italica
  Peptide Sequence Number=SeqID_93163
ggctctcgtgcgtcctcgtcatgttggccctctgcacgagccgcaccagcgactgcacgacctccgacatcggcggccggaactccggctcgggctgaacacacagggcgatagcatcggcgaagcgggagagggacttcgacgggtacaggccctgcagcgcggggtcgaccatctggtccagcgcgtcaatgtcgtgcagctgcggagtggcccaccggaccagcgactgctcgggccgcggccgagtcctgtcaaacggtttccggccagtcaggagctctagcatgacgactccgaagctgtacacgtcactcttcagggagtactgtccagacatggtcacctcaggtgccctgtatcccgagttctcatctgattcctggaattcatggttaggagtaaggtctgcaaacccagaatcagaaacgtgagggttcagctcactatccaataaaatgttggatgacttgaagttcttgtggatcatggatggtgaacaagtttcatgtaggtactccaatgcccttgcagatccaagggcaatcttgacacggctgttccaagacaatggtttgctgtgttcatccttcatatgaaggaagtcatgcagagaaccatttcggtagaattcatatgccagcaagcactgtccatgctctgagcagtaaccagctagctcggcaaggtgaggatgatttagccttgaaatgtttgccaccaactcagtgaacaaatctgaaggatggcttgaaaatgcagaaaaaatgattttctttacagccagtaccttctgatcactgaatttggctcggtatacacgaccaaacgatccctcaccaataagactgtcagggctgaagctgcctgttgccacctgcaggtctgccactgtatatgcaggtattgtgacggaagacaaacttactttccttgtaatagacttgctagtggtatcagtttcatcaaaggatttgtgcaggtcaattttcgttggaggcttcaaactcattgaaacagtcttctgcaattcttccttgccaattgttgatatgatcttgatagatttaatagatttcatctgtttaagtccagaagcaagagggctgagaggttcattctgctcagggtcttgtccccgtgacaacctccatgatttccttttgatcaaaaggaatgcaactaatgcaccaacaaccagcaaacatattacaattcctgctactgcaccgcctcccagtttagagtgtttgcctttgccaccatcttcagctgggatattgttaccatcagtacttggaacaggaggtctccaagaaggtggaggtgtatatgatgatggtggtgatggtggcggtggcggagcaggaccatcattaaacgagtttccacttgtctggagattattg

SEQ ID NO: 27190 - DNA, 430 bp, Setaria italica
  Peptide Sequence Number=SeqID_93164
ctgattcatcagtttcttcaagtacaaaatttgtagacttgtcctccagccggcaggacatatttctttttccccctgagaggacacgacaactcaacaaagtttgagtatggaacacactcatgcatgctagggatgctccgtgatcaggtatggttgctgcacttagaagtttgcatgatggaaagggaatattctaggcttgcgaattgtacaatttttccaacatagcttatgaacagaaaatatgtcagttacatgggaaaaataaagattctgttaaggcgcagcacagcgtatttattatgttactcttgtcccagtcccatttcatccaatcatcctttgcacccatattctagtaaatcatggggagcattacttggtttgctgcttttaactggacctgataagttagttcgagaagcta

SEQ ID NO: 27191 - DNA, 827 bp, Setaria italica
  Peptide Sequence Number=SeqID_93165
tcccagcttggtgttttcttggcatctgtttgcaatatattactggtcgtgtcagaagggatgaatgatttgtctatgtgggacctcatgcttacagttgatttactgaagcataacatacctgatccatccttgttgacctcagcagcttcccaagacaaggaaaacaaaaatgatgaccaatcgggcagtgaagactacatttctgatctctgttttgtgcatgctagattgcgggaacaagattttttctccttcaaaactcacgcttctaagaaaagctctcgagaagcacttcaactcgtcctctttcagaattggtagctccagtgcgacaggtcaagtttctgattcatcagtttcttcaagtacaaaatttgtagacttgtcctccagccggcaggacatatttcttcttcccctgagaggacacgacaactcaacaaagtttgagtatggaacacactcatgcatgctagggatgctccgtgatcagatcctgtcgtggccagcaaggtcattctcgaagaatctctcagagcgcgactggttgagaagctcagcgaagatctgggacatggtgaagaaatcccccgtcatcgcggattactgcaaggcgcttcagagctcaggattgtttaggaagtagccatagctgtctctagtccctcacttggaccgactcgaagactgatgaatcagatgaacttgacggcacgacaatgtgtgtcgaaactttgtaccatcactattccagtgtaaacatgctctcattagcgataatatatttctaggtaccgttgtatgtttatacaaaaaaaaaaaaa

SEQ ID NO: 27192 - DNA, 690 bp, Setaria italica
  Peptide Sequence Number=SeqID_93166
tgtagtccaaacgggctgccgctagcgacaacatcgccggcgagcaaaagcagtcgtcataggatgcccgccaccggcgccggagaaggcggcaaggcggccgccgggtcggccagcctccacagcaagaccctcctcaagagcgagccgctgtaccagtacattctggaatccaccgtgttccctcgggagcccgacttcctgcgggagctccgcgtcgccaccgcctcccaccccatggctgtcatggcggcgtcgccggacgaggtgcagctgttcgggctcctgctcgagatgctgggcgccaggaacgccatcgaggtcggcgtgttcaccgggtactcgctgctcgccaccgccctcgcgctcccggacgacggcaagatcgtggccatcgacgtcacccgcgagagctacgaccgggtcggatcgccggtgatcgagaaggccggcgtggcgcacaagatcgatttccgcgtcgggctcgcgctgccggtgctggaccagatggtcgccgaggaggggaacaagggcgcgttcgacttcgcgttcgtggacgcggacaaggtgaacttcctcaactaccacgagcggctgctgcagctggtcagggtcggggcctcatcgcctacgacaacacgctgtggggcggctcggtggccgcaacccccgacgagccgctcgccgccg

SEQ ID NO: 27193 - DNA, 249 bp, Setaria italica
  Peptide Sequence Number=SeqID_93167
aactagaaacctacgctgacggatgcaggaaagaggagaagactatacacaatcaacagaaaaaataggcaaagccaaccgacccaagaggatcgctgcaaaaggaatcaatccgaggatgcaaatgcaacggatggcccggcagcgtgatttggcagcaggcacccaagcgcgtcgatcagtaggagatgtcgacgagcgcgatcatggcgttcgcgacgatatcctcgtgtgccgccctctgcagct

SEQ ID NO: 27194 - DNA, 472 bp, Setaria italica
  Peptide Sequence Number=SeqID_93168
ctgttaggtaagctggggggtcgaaataggcgatttttgcgggagcctcttgcacttgaatgcaaggaaaatccggaacatggattacgcctagttctgacttttgagcctgcaacaccgtttttagttcctttagacagatgcatacaccaagctgttggtgcagttatgcaaggcagtggtatggaagctttctacaggaagcaagctcttcagttcattcgggtgtgcctggattctctgttaaatctgagggaaaatgtgcctggtgagggtgtgagccctggtgttcttggtacattgctaatctcttcgctggacccctcaagacgtcgcaatgacgcttcagatatgaagggagatttaggtgtgaagacaaaaacacagctattggctgagaaatctgttttcaagactctacttgtagctgtcattgcagctaatgctgacacctgcctccatgatgagaagg

SEQ ID NO: 27195 - DNA, 423 bp, Setaria italica
  Peptide Sequence Number=SeqID_93169
aagctgtacaaggaggttcgcgagctgggattcaaaatctcttgctcacgggcaggagcgaggggcaccaggccgtcacggtggacaacctcaagaacaggggttccatgattgggacaagctcatcctcagggcagcagctgaccgcaaaaagaccgcgacaacctacaaatcggagaagaggaaggagatggaagcagaagggtacaggatcctgggcaattcaggggatcagtggagcgatctgcttggctcttccatgagtgctcgctccttcaagctccccaacccaatgtattatatcccataacagaatgaaaaattagggcgggtgaaaaattgtttttttgacgccttttcaccaggcccatttcaacagaatactgactcgtgcaaagaaatctgagaataattggcaatgaa

SEQ ID NO: 27196 - DNA, 264 bp, Setaria italica
  Peptide Sequence Number=SeqID_93170
tgccatcttcctgagtcctgagtcctgactggctggctgcaaggaaccttgcctggactcttctgctgttctgctctagctcctgtcaggattctaaactgcagccacaaccactagattccctgaagctcagaacggaaccgaatgagcttccgcgcatggactaaaatgtagtggcaagatgcttatcgccgacggctggactgcaaatcatgctggtttccagtccatgccagcatacaggacacgcaccgcgcaattatg

SEQ ID NO: 27197 - DNA, 460 bp, Setaria italica
  Peptide Sequence Number=SeqID_93171
ccatcatcatcacaccacatgcatgtgtcctcatcatcacatatttcaatgaaaacaggctgtttctttgcaccaccagttttgtccttttaattcttcaactgcccacaacaaatcttctgtttcgtttagattgggctttgcttcagtatccactacaagactatctattgcatacggtactttcgtgcttgaggaagagttatcaccatgatgtaactttgactgcagtagggccacctgcgaacgtagctgatctatcacttgctctaaagattgcactttgcttctttcgatgctcaatctttcatcgagaacacgttcacctttctgacgactactcagttcgtccatagttctatccagcgctataaatattttgtccattccatgtagacctgacaacatatcctttaacgatgtgtcatcatcatttattgtttcttgtttagtcagcata

SEQ ID NO: 27198 - DNA, 1096 bp, Setaria italica
  Peptide Sequence Number=SeqID_93172
aggccaagaaaacactaattgattctcatcatctggtaacagtttcatacacatctgcctaagcaaatgatacaaatcaaaattttggcaatctcagccttaagcagccggagtaacacaaggagttgcaggaagatcagtgtgacgagtctatcctgccaaatgccaacgtcatataacttagataattgaagggttattgcatcaccggcctttctgcagaccatactatagtacaatcttgagtatgggaatatgatcgaagaacagaagcagcctgaaggtagctggctaagctgcaatagatgcaagcttttcctttttacgtctgactaaattctggacaaagagctctcctgcacgatatgatgaccgaaccagaggtccactagccacatagagaaaacctaaagtttctccgtactccttccagaaatcaaacttctcaggagtcacgtactctctaactgtcaagtgtctttctgttggctgtaaatattgtcccagggtcagaatatcaacatcaacagccctcaagtccgccatggtttgcttcacctcctcatctgtctctcctagaccaagcatgatagaggactttgttaccatgcccactttgctagtcttagcatgtttcagaacagctaaactctgatcatatcctgctcggggatctctaactattctctgcagactcttcaccgtttcaatgttgtgcgcatatacatctagaccagagtttgctaaagatgagacagcctccatgtcaccccgaaaatctgaagtcaggcactccaccaatatcccaggtttcaactccttgagagcactgactgtttgagcaaaatggccacttccaccatcaggaaggtcatctctatcaacacttgtcagcacaacatagtctactccccaactagccacagccatggctgtcttcagaggctccagggcgtccggcggtggaggcttgttgctagttttcacagcgcagaatcgacaaccccgggtacaggtatcaccgaggagcatgattgtcgcggtcgcgatgccatccccttccccgccggcaccgccacctccattccaacactct

SEQ ID NO: 27199 - DNA, 461 bp, Setaria italica
  Peptide Sequence Number=SeqID_93173
cacgcagtcgtggtggaggtacgcgagaccctcggccacgccgacggcgatcgccagccgcacctcccactccaccacggggtgccgccggcgctaccgccgtggagcaggccgcccagggtgccgttcgggaggtagtcgtagaacaggaggcgcgtgcggcggttggccgcccacccaagcagccggacgatgttgcggtggcgcacccggggcagcacgccgacctcgcacgcgaacgcctccgcggacgcctcgtcgcatgaccggaacctcttgacggcgacggtgacgccgctcgacgggaggctcgcgcggtacaccgcgccggaccacccctgcccgatgacgttcgccggcgtcaggctgcgcgcaacgtccgcgacgccgatctccagcttctggtacagcgtcacgttccacggtggcgacatctcgccgccgtccttgtcctcgcccgg

SEQ ID NO: 27200 - DNA, 605 bp, Setaria italica
  Peptide Sequence Number=SeqID_93174
agggacgactacaaagactaggaaccaccactagccggccatgctgcagaggacgctgggtgcagatgttctcgtcttcaacactgggcactggtggactcacaccggcaagctcagggcgtaagtccacgccatctctaaccacgtccgctcttatgtttcccagcaacttaccccaaacatctggatgcaggtgggaccatctcgagaggaacgggaagatggtcgagatggaaggagaggaagccttcaacatagcgctgagggcctgggctaaatgggtcgaccacagcatagaccccagcagaacaagagtattcttccggagcgtctcccctgaacacaagaggtgctacacatatttcgagcaacaatagaaacactacagaaactacatgaagtcactaaatacatccattctaccgtgcagtgtaaactggtgctacaaccagacgttccctatctctgctggaacagtcgctccagggtttccaaaaagcctggtaaccattgtcgagaggaacatcaaaagcatgagaacaccagtcacatatctgaatatcacccacctctcagaactccggatcgacgcacacccatcggta

SEQ ID NO: 27201 - DNA, 462 bp, Setaria italica
  misc_feature (1)..(40): n is a, c, g, or t
  Peptide Sequence Number=SeqID_93175
nnnnnnnnnnnnnnnnnnnnnnnnnnnnnnnnnnnnnnnnaaaaaaaaaattggataatgttgtatatcgcatatttttatgttgtcagataacctagtatacaacaacggatgtcatcttgtacagtgaagaaaagagataaaaaaatgttgttgaattacattggtttcctcatcggtgtacaagaactagcttttactatgcaacaaagcgcggcatggagccgttggtcgacggcgagctctggtcgctgacccacacctcctgcaccgacacgggcgagaccgccaccttctttcccaccgtctccgctccatccaagctcaggtcgatctggacgtccatcataggcctgagcccggacccggagtcggagtcggagtccggggcggcgtccctgatccggtgaagctcggcggcgacctcgcacatcgccggccggacgtccttgtggaatgcca

SEQ ID NO: 27202 - DNA, 352 bp, Setaria italica
  Peptide Sequence Number=SeqID_93176
gcttgtgcgccgccggagccgcgtcgtcggccggcgccgctggctgcgcctgggcaagcgcgagcaccggccgcgccagcccctccgcccggcgcaggcggtggtagtccggcgactccacctccgacttccactggcgcgagatgcggcggaccaccggcagctggtcgaagcccacccggacgaggcactccctcgccacctcctccggcaacccggggatcagctcacccattgcagataatgccttgatcagctgcgtctggccgtaagcgatgttccgatcgatggatcgaagctggattcgtgcaagaaacgagaggctgttctctgagctctgtgtgtgtttgat

SEQ ID NO: 27203 - DNA, 751 bp, Setaria italica
  Peptide Sequence Number=SeqID_93177
aaaatggattgcttgatatgaagaagattcaccatgccagctttttcagtatgtgtaagaagcaaaaggctgtcttggaagctgttcgcttctgcactttgattgacaacccgaaaataagtaccttcaatatgcttttgtccgtgtgtgctaattcacaagattttgatggagcactccaagttatggagctcctaaaggaagctgggctaaaacctgattgtaaactttacacaacactgatatcaacttgtgcgaagtgtggaaaagttgatgccatgtttgaggtcttccatgagatggtcagtgctggtatagagccaaatgtcaacacatacagtgcattaattgatggctgtgctagagctgggcaagtggcaaaagcatttggtgcttatgggattatgagttcaaagtagaaggtgaagccagatcgagttgtcttcaatgctttgatcagtgcatgcggtgaatctggtgctgtggctcgggcgtttgatgttttatcagaaatgatggcagaatcttcggaatcaaaaggatccggaccaatacttcctgatcatgttactgttggagcgctgatgaaaacatgtattcaggcaggccaggctgatcaagctcgtgaggtgtacaaaatgcttcaggagtacaatataaagggtaccccagaagtttacacaatcgcattgagaagctgtagcttgactggtgatttagggtttgcactgaagatatatgaagatatgaa

SEQ ID NO: 27204 - DNA, 334 bp, Setaria italica
  Peptide Sequence Number=SeqID_93178
ctcctcccgattgctaaccccccatcctccatcacgggccgcagccgggcggccggccggccatcccctcattatatatagctctgatctctgcaaccgccactcacctgccttaaagcagctacaactctctagctagtcgccgagctctctagctagctcttctacttgcttccacactgaacctaacgactctcttatcatcagtagcttgctactagccaatatatattactagatcgagtatgtccagcagccggaggtcacgcacgcggcgggcggggagctcgctgtcgtcgtcgtcgtcgtcaaggtccatctcggaggaccagat

SEQ ID NO: 27205 - DNA, 1870 bp, Setaria italica
  Peptide Sequence Number=SeqID_93179
gggagacagtacagtacatacgcgaggcgagccggcgaggggaaatcgagtaacgggcgccgggcggcaccgtctgacctgccaaattgtccgaccccccgggccccggggctctcgccgttttttccctttcctttgaggtcccttggccatcccatcccttcgcttccacgcaccaatcttgtcccggcgcctgccaagtccaggaacaggttacaggtgtggggggagccgggcagagcagcagaagcactagcgggcagcagcgcttgccgactgacgccaatggcggctccttccgcgcgcctgctgctgctctccctgctcgggttctgcgtcgcgctcagccaccaggagtcgtcgtcctcgtcgtcgacggactcgtgcggcgcggcgaagctcgcggtcgccagcctcgtgcccttcgactccacggccttccgctgcgtcgccgcctggaagcagcaggacttcgtcctcaggtacaagaacacggcgccgagcgagtggagcttcgtcctctcggcgccggacaagggctcgtacgtggcggtcggcttctcggggaagggcgccatggtcgggagcagcgccgtcgtcgggtgggcgtccaacggcaagggcaccgtgaagcagtactacctcgacgggaagagccccgacgacgtcgccccgaacaggggcctcctcaagctcgtcaagaacaagtccgtcgtcgtctcccactccggccgcctctacgtcgccttccagctcagcaccgactacccgcagccgtacctgatcttcgccgtcgggccggacggcaacctgccgccgtccagcaccctgcggctgccgatgcaccagaacatggcctcccgcgccttcaactacacctccgggatatcttccaacgccggcggctccggcgacaacgcggcgttcccgccggaggggaagcacgggctgctggccatgatggggtggggcgtgctgatgcccatcggcatgatcaccgcccgctacttccggcagctggacccgtgctggttctacacccacatggccatccaggtgtccggcttcgccatcggcatcgcggccgtcgtcctcggcttccgcctcaacgaggacgggctcaagaacgtggacgtgcacaaggcgctcggcatcgccatcctggccatggcgtcgctccaggtgatggcgattcttgcgcggccggacaagacgtccaaggtgcggcggttctggaactggtaccaccacaacatcgggcgcgcggcgatcctgctggccatcggcaacatcttcctgggcctctccatcgcgcaggagaccaacgcctacatcgtctcctacggcgtcttcgtcgccgtgtgggtggtcgccgtcgccgccttcgagatgaagcgctgctacgccgacgacgactgatcccgtcgcgcgctcgctccaccccggcagcagcggtaccggtacatgacattctgaacaagtggccataggacgaaactgatggacgtacgcaaaaaagaaaactaagcgttcacgaccagtgaagtgaagtgacacacacagacacacacacacctgttcttgttccttagctcacaactggacagtgcattcggaaggcgtgcttggtcggctaaaatttgtgggtttttttttgggggggggggggtggggggggggtataggatgtgaagcagggggggcggactgctgtttctagcctagctggacgctctgattcatatttgtacattggtacatggtcgtgtttgtgttgtatttgtaccattttggacgatagcttgttcttcacttccttttttccgtttccaccgtgaattgatcaatgatagtactattttgctgaaaa

SEQ ID NO: 27206 - DNA, 362 bp, Setaria italica
  Peptide Sequence Number=SeqID_93180
gcgaaccacccctcctatcctctccctcctcatccctctgcgccgcgtcgcttccggaccctttctttcgccattggcgaggccgccgcaggaggcgatcgacaccttcgtcagcatcacgggggcggacgaagccctcgccgtccgcaagctcgaggaacatggtggtgacctcaatcgggccatcaattcgcatttcaatgaaggagacaacacactgaatggaatcaatcaaaaccctatacctgctagtcgtgaagatatgatggacctggatggaccattgataatacatttcaaagatctttgttcccagagaatttccgtgtacccttttgcactgatggatccggtattttcag

SEQ ID NO: 27207 - DNA, 154 bp, Setaria italica
  Peptide Sequence Number=SeqID_93181
agagcaaaaacaatagcctctttgaagtagaggttgagaggctcaagatggaactgggtgcattggtggggaaggaggcagttgcggatgcatttgatgttcagaaggaagaaaacatgaaggaatccaatgacctcaagaggaaagtggaaga

SEQ ID NO: 27208 - DNA, 135 bp, Setaria italica
  Peptide Sequence Number=SeqID_93182
atccggaaagctagatctcgaatcttattgacaaagatgccagcaatctcgttggtatccttgagcttctctgagtcatgcaggtatgccttcatgatctcgagctcaccctcagctttgcggatctccccaaag

SEQ ID NO: 27209 - DNA, 1016 bp, Setaria italica
  Peptide Sequence Number=SeqID_93183
gataacaatacaagcaacaatttgtcctgatccagtctgttcacaatcccaatgcatacatacagatacagcttacaggtacaaagcaaaacaacaatctcaacattattcagctgtacaaaccccacaagcaggggtaaacattacccaaaacttataggttacagtcacagccatgtcacttgctgtttattaagttcctcttgtatactctgtcccattgccatggattcttatttccaccagtactgcagcgatgaacagctcctagcttgctgtttattcagtttcttttgtataccctgtcccattgccatggcctcttacttccaccggtaccataccagtgcgctaatacagcatcgcaccttacacacaaacgatggcaacttgtaagaggcaaaaggaaccagctgatgtacagtccacagagagagaccgagccgggtgctcctagattgctctgtgtttcgatatcttccacaccctagattgctctgtgtttcgatatcttccacaccctagattgctctgtgtttcgatatcttccacaccatgttcatcgttctctttgttctcttaaaggaccgctcgaggtcagctgaggaccatccagtgaaaccgcaagatttaccacggcctaacgaggaagaggatgacccagcgcctcgaaaagatggtccagggtctgctgaggatggttcattgacaccagaactgtttccatatgatgacgcagtcgagctcaccaagccagtcacagcaggtgcaaaactctccacaaacatgccacaagatatcaaagtctcgccagaaggcatgttgatgtacgaaactgtacaatcctgaagatctatgcaaatgagtctgttttggttgccaaagaagatcttcctcttgagctggaaaaatgggctcatgcccacaggtatcctaagagcaacggtatgcaagtggatccagtcttcttgatgagtcaagtccaccacccaaatatcagaaactatattgcccca

SEQ ID NO: 27210 - DNA, 697 bp, Setaria italica
  Peptide Sequence Number=SeqID_93184
tgttccctaatcccgtgtgtgccttggctgatgcaacatgtagtaacttattagctggtactgctggaagacttcatgcatggttaatacatgaaaaagaaataaatctgaacatggtacatgtaataaatgtactggtgctatggcagacctgctttacataattactagtgtgctagtttacacgctaccatggggctacatagatgtgtaaatgttctcaacagaatggtctattaggctaaagttaaacctgttatcattagcgttttgtgacactgtttgaatcagtgctggattaaatggtcctgtttcaacatggaattttatctaattgctttttcaggggaagcttacataagattattcatcgttgtgaaattgatgagaagcgtaggattaagatggcccttgatgtggcaagaggcatgaactgcctccacacaagtgtaccaacaattgttcaccgggacctaaaatcaccaaacttactggttgacgataattggactgttaaggtctgtgattttggactttcacgtttaaagcacagtacatttttgtcttccaaatccactgctggaactccggagtggatggcaccagaagtactgcggaatgaacaatctaacgagaagtgtgatgtttacagctttggtgtcatcttgtgggaactaagcaaacgactaacggaaca

SEQ ID NO: 27211 - DNA, 1413 bp, Setaria italica
  Peptide Sequence Number=SeqID_93185
tatatcctgatctaaggaagtcccctcctgacagattcatgggtgcaccaaagcagcactcaggggctatttctccatcccaagttggttcaagcagggttgacatagtgctggaggatgtatctgagtgtgaaatcctctgggaagatcttgtaattggtgaaaggattgggttaggttcatatggagaagtctaccatgctgattggaatggaactgaagtagctgtaaagaaattcttggatcaggatttctatggtgatgctctggatgagttccgttgcgaagtgagaattatgcgtcggcttcgtcatccaaatattgtgctctttatgggtgctgtaacacggccaccaaacttatctattgtatcggaatatcttccaaggggaagcttacataagattattcatcgttgtgaaattgatgagaagcgtaggattaagatggcccttgatgtggcaagaggcatgaactgcctccacacaagtgtaccaacaattgttcaccgggacctaaaatcaccaaacttactggttgacgataattggactgttaaggtctgtgattttggactttcacgtttaaagcacagtacatttttgtcttccaaatccactgctggaactccggagtggatggcaccagaagtactgcggaatgaacaatctaacgagaagtgtgatgtttacagctttggtgtcatcttgtgggaactagcaacgctacggacgccatggcagggaatgaacccgatgcaagttgtgggtgcagttggctttcaggaccgacggcttgatattcccaaggaagttgatcctctagtggcaaagatcattcgggactgctggcagaaggacccaaacttgcgcccttcctttggccaattgacgagctacttgaagactttgcaaaggctagtggttccttctcatcaggagataccgaacccacatactcagcaacaaatatgggtgaaccacaccccttgaggttaccatacaccaaatctgaacaaagagtatagttttgtgccatatatttgggttcactagtctgcaaaggcatggcttgattgagaacccccagtcccggatagcagtcatcctcgctgttacaagaaaaagctttgcagcagggtatgtacagtgcagtacagtataggcccatcaggtaatagccaaatgaagagaaacaagggtctgtttggatgagggtatttcactggaaggtttctggatctagttcaaattcgaagtaaatacaaaactttccaatgaaacacccccaatccaaacatgtccttggtagagattgtagtggctgcttatgtcacctttcttttcctttttgtccctattgagttcgagcattgctggaagacagcatgctcgcagtgtctatggtttatgg

SEQ ID NO: 27212 - DNA, 402 bp, Setaria italica
  Peptide Sequence Number=SeqID_93186
ccccacttggattggataggagattattgaagtggaacgaatttctctctcacattccacttgaatccactgctagcaaatgtcattatttggtcgggcgaccacctggggccttcgctgggcgccggcgacgaacatgcgacagtcctaaactaggtccgcccctgtcgccggctcgccgctgctcaccggtggaagcattgccgcgggggacatggcgtcggaggggaagaagaagggcgtgccgccgtggctggtggctgatgctcgtcggctccctccgcctcgcctccgtctggttcgggttcttcaaaatgtgggcgctgcgcgtcgccgtcttctcccagacggagatgtattgtacttgtattgttactattgggtcgttactttttggttgtt

SEQ ID NO: 27213 - DNA, 538 bp, Setaria italica
  misc_feature (498)..(538): n is a, c, g, or t
  Peptide Sequence Number=SeqID_93187
ggaattctcaatggtgatcaaagtggttgtcatgctgtgaagcagtcatgagcgatgcttgggttgtttgcctggtgtggtctgggcctccagggaaggaaggatgtctgaaaaaaaaccttgctagaaaacccttgatgactctctgtgccatttgtacttcattcctcatcgtttcattgaacatttgttccactggttagggactggaatttcaaacattgtaaacggcaacaaaatcttgtagccaggagctgtaacaaccggtttgatgacattcaggcgcacctgggaaatgcagctgcacctgttaagctgagacatcaattagggggtataaataagagagatatgtgctatcgttgcatttgtaagttaagggcgtgttattttttttgtcagtttttgttattttttgttctattgatggtgcagcatgcgccaggcgcattactacattcaataaaagccaggccgttttggaggagcctcgatgcnnnnnnnnnnnnnnnnnnnnnnnnnnnnnnnnnnnnnnnnn

SEQ ID NO: 27214 - DNA, 557 bp, Setaria italica
  Peptide Sequence Number=SeqID_93188
taggtactaattacccccttaggtaccgtaccggtacgaacttgcggcgaggggctcttctggtgaagggggccgctttgcttcgctgcaagctccccctccccctcccctcccgaaggagaaacagtcgagcagcccggccccgtgctcgccttgatggctgctgacaccagctctcagccgccgccgccgctttccactccacccccgccaggccgacaccaacatcgtcatcccgccggagtcgccgcctaggcggatcacgcgctccatgctcaaccacaagcctcctaccgcagctcctccacctcctcacaatgccactccactcaagcccaaacccgaaccgcccgaggaagaggacgacagcaagcccggtccagcgctcaggcgcttcaccagatcactcctgctcaaggataaggacagcaacgacgacgacctctcgggcaccaccaccgccagcaatgcctcctcctcaccatcacccaacgccaccaccagcatcagcagcagcaagcggaatactacaaacaagatccccacaacctcaggga

SEQ ID NO: 27215 - DNA, 261 bp, Setaria italica
  Peptide Sequence Number=SeqID_93189
agacgggctccaccgcgcccagaacccgccactcgtccgcgccgcactcccggcgcaccgcgaacccgcacttgcgcccgttgcagtaggcgcgccacgtcggctcctcgagcaacccccgccgcttctccccggcggcgagcggcgtcttctcgcactcgagcgcgaggcgcacgaggccggaggacatctccctgacgagcgcgccggtggagtaggcggccatctcgacgagcagcacgggcgcggagcgcgggtccg

SEQ ID NO: 27216 - DNA, 438 bp, Setaria italica
  Peptide Sequence Number=SeqID_93190
gagaaagtagcagcctcggcatcgtggggagagatgaggcgtcgctacagctgcagtagccgtgtgcttgtgtgtctggtgctcgtgtgctcatgcttcgaagcatctcttgttcaggctcagcaagcagcaagcactgatccaatcgaagtggcggcgctgaacaccatcctggggagatggggcaagaaggcgacgcggtcgccggcggcgtggaacatcagcggcgagccctgtagcggtgccgccgtcgacggcaccgagcttgacggcaactacaagttcaacccgggcatcacgtgcctctgctccttcgacaacaacaccgtctgccacatcaccaagctgagggtatacgcattgaacgttgtcggtcagataccttcagaactgcagaacctcacctacctaacttacctgaacctggatcaaaattat

SEQ ID NO: 27217 - DNA, 249 bp, Setaria italica
  misc_feature (227)..(227): n is a, c, g, or t
  Peptide Sequence Number=SeqID_93191
caacagttaaccaatacagacgtggggcgccgagctcgagcacctctccgcctgacactatccagtagaatccaatgatccaccacagaaacgatatcatcgtgttcatcgactcacaacgacttgtataactgctcctctcttccgcctcttcgtcatcttcgccgtcggtgtcggagctgtccgtccctgcgcccgcggactctctgtcggaggcggagccccgngcgcgcgctggccccggcggtg

SEQ ID NO: 27218 - DNA, 256 bp, Setaria italica
  Peptide Sequence Number=SeqID_93192
aaatgacagcaaatgcgctaaaacctgaatgtttgcttggccatcatcaagcttgagaggtggaacatcacaagtcaattgcccagacacatagacaaggtcattttctttcaagtgggaagcagctacttgggccaagtcatctttgaaaactatgggaacccagaagctggggaagtcgatgcggcggtcctgcacgagcacggagactgcggagaagcggccgtcgggcgtgcgctgcaggtgcaccggcgca

SEQ ID NO: 27219 - DNA, 186 bp, Setaria italica
  Peptide Sequence Number=SeqID_93193
gctgttaagatgctggaaaacgtaaggcaatgcgaggaggagtttcaagcagaattgcgcataattgggagaattaatcatatgaatctcgtaaggatatgggggtttgctctgaaagctgccacaggatgttggtcacagagtatattgagaatggatcattagctaacatcctatccaacgaaa

SEQ ID NO: 27220 - DNA, 728 bp, Setaria italica
  misc_feature (706)..(706): n is a, c, g, or t
  Peptide Sequence Number=SeqID_93194
aatttctattgtattgtactttgtcaggttcatcaatcaatgagtaaacattgttcctcggcctagtcaatcgtgtgagtagtgatggttctacttcgactttaatctctgtacatgtaaaacaacacgccctgcaacagaagttctacttccaatgtaaatcccctgcaagttccattatcttctacaggatcgggatcggtaacgcagcagtggttactcaaaacagctcatttaccaatgggaatttggaagtgcaggaaggtagatctagatctgtgtgcctgcaaaatttcctgcccttttgccagtatatatatttcatctgctggatggcggcttcctctacattaataccaagtacaacggagcagtaattaacaaagcatgtaacagtggaaaggcaagattagatctaacccagggcatgtgacagcgactccattgaggggtttggatccaatcctcccagtataatctgccaaggaacagcctctgccattgaggtttatataattgttactgcatggaatgaactggctctcattcacctctgtgccatgtgttgccactgggtcaccagctgtgatgtctcattttattctcctttttaaccttcaactctggagattcttactatcacagcagttcaattgtcaccctgcaatgattgtaattacagtgcagggcttactggtttgtttangccatgacattaaagcaatagc

SEQ ID NO: 27221 - DNA, 422 bp, Setaria italica
  Peptide Sequence Number=SeqID_93195
ttgggtgacaacaggttgcactatattggctgattcatggactgataacaaattgaaagctctaatcaacttttctgtgtcgtctcctctagggacattcttcctcaaaacagtggatgcctcttcacacttcaaaactcacagagggttgtatgatctcttcgatgaagtgattcgagaagttggcccagagaatgttgttcagataatcgctgacaggaatataaactacggcagcatagacaagctaatcatgcagaactacaactcaatcttttggtcaccatgtgcatctttctgcattaactcaatgttggatgacttctccaagattgattgggtgaaccaatgcatctgccaagcacaaaccgtaacacgatttatctacaacaataagtgggttcttgattttacgagaaacg

SEQ ID NO: 27222 - DNA, 1713 bp, Setaria italica
  Peptide Sequence Number=SeqID_93196
tggtgctgttaacaagtcacgcgctgcttcagaattggaggcagagcgatgcatagctgaagtagttttcgagaacaagttggactatagtatagcagactcagtttcataccagcatatgctggaggtacttggtggtgtgggattccgggggccgtcagcagaggttctgaaggacaagtggttgcacaagctcaagtcagagattttgcagaaaacaaaagagattgaaaaggattgggtgacaacaggttgcactatattggctgattcatggactgataacaaattgaaagctctaatcaacttttctgtgtcgtctcctctagggacattcttcctcaaaacagtggatgcctcttcacacttcaaaactcacagagggttgtatgatctcttcgatgaagtgattcgagaagttggcccaggagaatgttgttcagattaacgtaacttaagtaaactggtattctgacaggaatataacagcatagacaagctaatcatgcagaactacaactcaatcttttggtcaccatgtgcatctttctgcattaactcaatgttggatgacttctccaagattgattgggtgaaccaatgcatctgccaagcacaaaccgtaacacgatttatctacaacaataagtgggttcttgattttacgagaaagtccatgccagggcaagagcttgtttgctcagggattacaaagtctgtatcagattttctcacactgaaatccttgttgaggcacaggtcaaagctgaagcaaatgtttcattgcgctgaattttcatcttcttcatatgcaagtaggtccattccttgtgttgagatactcaatgatgatgagctttggagagcagttgaagagatagctgctgtttctgaacctttattgagggtcatgagggatgtttcaggaggcaaagctgccattggttacatatatgagtctatgacaaaagtgacggactctattagaacatactacataatggatgaaggcaaatgtaagtcgtttctggacatagtggagcaaaaatggcaagcagagctacattcacctcttcattcagcagctgcttttctgaacccaagcatccagtataacccagaagtaaaattttttagtagtatcaaggaggagttcttccatgttcttgataaggtgcttacaaaccctgacctaaggcaagatattacttctcaattgcatgcttttcgcaaggcgcaagggatgtttggttctaacattgctaaagaggcccgcaacaatacctccccagggatgtggtgggaacaatacggcgattcagcaccatcactgcaacgagccgctgtcagagttaccagccaggtctgcagcaccctaacgtttcaaagagactggggtatgatccttcagaaccactatgaaaagcgcaacaagctggacaaggaggctttggccgaccaagcctacgtgcactacaatctcacgctccactccgaacccaagacgaggaagaagttggatggcgatccaatcgcactggatggcatcgacatgacgtcgccgtgggtggaggactccgacggcccaatcctcacccagtggctcgacaggttcccgtcggccttggatggtggagacttgaacacgaggcagtttggtggatccatctttggtcccagcgataatctgttcggcttgtaatagttcttata

SEQ ID NO: 27223 - DNA, 231 bp, Setaria italica
  Peptide Sequence Number=SeqID_93197
tgaattgttgcctccacgtccttccacccatctttttgttcgcattgaatgctccagcatgatgatcaggaaattatgtatgaggtcttcaatctcaccaatgcttacaccatcagcatttttcttagtgcccttctcatgattagaaatcaaaacctccaaaatccattctggccactctgcaattgaggtcattgtggttctattgtcaggatgactgcaagccaaaaa

SEQ ID NO: 27224 - DNA, 319 bp, Setaria italica
  Peptide Sequence Number=SeqID_93198
cgcccctcgagctccctgagccggccggcgaacgggtagtagtgcacgagcgccctggcgatggcgcccccggatcaccggcgccgggtcccgcgcccccatcagcgcgctccggcggtggaactggatgacggggatgtggaaccgcagcccgtcctggtcgtcgatgtccgacagccgcttcagctcccgcggcgtcggcgacgccggagacaccagctccgccggcttcctccgcaccgtgaacttgagcgactccgccatttgttccctgctgctctctggttattgcacagcgactcgcttggctcagtgagct

SEQ ID NO: 27225 - DNA, 763 bp, Setaria italica
  Peptide Sequence Number=SeqID_93199
taatgtctatggagataaccttctcaataccagttctgaacagatgatgggactgtattcccagctgagaagttgctcggagacttgggcttcctaaggaaatttcagaggtagcatagcctagatttctgaatcctgttaagttacatgaactatatgaggcatggcttgaacgatgttctttctgatgtgtgttgggaagattatctgttgttccaccataagctgacagcttctcacggaattggagagtatcggacgaaatagacatgccagatgattgaaactggtggtctgaatttaaggtgttcacgtcaaggtatcttcttgtttcagcagccaaaccaatagggtgtcccatgaaaggtttgtggttcttctcatgaactactagactccgcaccagctcatttataggagcagtcggccttttagtaaatgaatcatcaatactgccagggagcccttgtgaaacccctggagtggtaaggttttgtttatcagcaagatgtgccaacctctcattatcttcaccatacacatgaacaaggctccgatatagctcatgtttcgatgaaccctctgcatacttgaactgaggcactttcaagttggattgatgttgtacttgggatccttcttcagaacctcgatgattcccagaaccagctggtgcaagcagaccagcctttgcagaaccaaaaccctctctgtcatgaagaaaagtgcatacttctactctcggtcgaccaaccttacgtag

SEQ ID NO: 27226 - DNA, 532 bp, Setaria italica
  Peptide Sequence Number=SeqID_93200
gtccagcggcagaagtggcgaggctcccgttcgcttaaggtgatgtgtccgaggagtggtgtgaggtggtggatgtggcgaggcccccacatattcgagttagtcttggagggtataggatccgatgcggtgcttcggtcgtttggtatgttcggtgctgcagcgacactttggcgatgcgtcctacatggcggtggtcttttcggcatggtgtggtgtgccatccttttgacttctactaacgtgggatcgtgattgggagatcgacgattgcgtgggtgtgacctagggacgatggcggcatggcgcaatggtggaggaggcatggtggctacacggcttgcagcggctagcactgcatggtagtggctggttcggcgtgggatatcgtcaggaacgatgacgcttgcggtgaagatgactaattggcataatctactgggctttggcagtgcatcatggtatggagcgtcgtttataggtttgtgtgacgcgggttgaagtcccagtccaactcgctatgtgttgttag

SEQ ID NO: 27227 - DNA, 327 bp, Setaria italica
  Peptide Sequence Number=SeqID_93201
aatgcaacttttgcagccattagtgaaggcataactcctggcggtggtgttacatatgttcatttatcaaagcatattcccagtatcatggatcttgtggacgacccggaagagaagatgggtgtaaatatagttgggaaggcacttcttgtacctgctatgacgatagctcgcaatgccggggcagatggttcagctgttgtagagaagcttctcgccagtgagtggcgagttgggtacaatgcgatgactgacaagtttgaagaccttgttactgctggtgtggtagacccatgcagggttgccagatgcgtgctccagaactct

SEQ ID NO: 27228 - DNA, 702 bp, Setaria italica
  misc_feature (568)..(568): n is a, c, g, or t
  Peptide Sequence Number=SeqID_93202
atcatggtgcaagtccccagagggccatcccttccagccccaggtctcctcaacaatttctcagaggcaactctagcagcttcaatgatatccttggtaggcagccacttcactgccctgccaggatcacctcgcattggtgagtggatttttatcagaccaagacattccatcatttgataatatgctctaccatgaagtggcgtatgaccctttctggcctctgaaaagtatcttgtccattccttgtagcctgggtctactgtgaagccatacatgtcaacactgtcacagatggagagagcaaattcaagagctttaaccccagttcctttagcagacgaaccaaatgatgatgatgtgcctagcatgaggtatactggattggttattggaagttcccgaatcatttggttcatgatatcatgtattgtcgtcttaacgatcaatacctccttttttgtttcatctaactcaacaactttgtccagtgcctttgcagatcctctgttcagaaggcgaaatgtactctttgtaccgacatattcagtgtaattctggatgggcncaccattttctctgaagacgacatcataagaatcaatttcatccccaaattttagttttaagaagatcaccagagttcccaacaacagcacatctaccaaattggcgaggcacatatggtgatgtctcaggtag

SEQ ID NO: 27229 - DNA, 329 bp, Setaria italica
  misc_feature (323)..(323): n is a, c, g, or t
  Peptide Sequence Number=SeqID_93203
ctttgacagaaagcaagcctgtgactgcaccgaatgaacctgcaactgcacgtacgtcgccatcggcatcatcatccggacaggacaggggaatccggtgcggcctcggcgtagctacgttcccaagcaacgcaacgcagcgcacgcgcggccggcatgggggccccgtgcggcggcggggagccgtgagccatcgttttctttgggtacacgccggtcgccggtccctcgttactgcacgacgcacggacctaccggtcggtgcccgtagcagcgtcacacgatcgtgtcgtgctcacatcaaaggctgtacgatcaggaanacaaca

SEQ ID NO: 27230 - DNA, 239 bp, Setaria italica
  Peptide Sequence Number=SeqID_93204
caaggaaataaagatgattgatacgaaggaagggttaatatagtcttcatccattatttaagaaccttatcaagtacacacatcgtcaatgagaattgtggtatgtgtattgtgtaagctccttttaaggaattctctcatagtggactagactatttacttgtttatgccatatgcccacacgcagctgctgcagtgagatgaggtttgctgttgaactacttcaaatagcatgttaa

SEQ ID NO: 27231 - DNA, 210 bp, Setaria italica
  Peptide Sequence Number=SeqID_93205
ttcccctcctttgggatttaggtgtgccttgctgcagcccactagaagtcatttctgcctgttgaacaactaccggtgctatcgaaaaaaagttactcacgtcggtctccgtaaacctatccatactctccgctttaacaagcctatcgactatttgctttgcatctggtctcctccttgggtcatagtcagtgcattctgtccctatct

SEQ ID NO: 27232 - DNA, 439 bp, Setaria italica
  Peptide Sequence Number=SeqID_93206
ggaacttcccatcctcctagactttaggtgtgccttgctgcagcccactagaagtcatttctgcctgttgaacaactacgtcggtctccgtaaacctatccatactctccgctttaacaagcctatcgactatttgctttgcatctggtctcctccttgggtcatagtcagtgcattctgtccctatctcaaagcatactcttaactgttccaactgtgagcttgtctccaacctgtctctccaactttctattacctaaggaattgcagaagtgaataagggttttatgaaaatgagcaacatcttttagatgggaaattagagcatgtagtgtatgcaaaccgcatacttgatgtaaagtaacaaaaaaatcccaaaaggtaaatgaaatcccacagttcatagtctacgttgctttgccccctttgcatatttagt

SEQ ID NO: 27233 - DNA, 814 bp, Setaria italica
  Peptide Sequence Number=SeqID_93207
ggctgagcgcctcgcgttgcctcctcttcctgtccgctccacgccttcgcctctctgtttctttcctagcggcgacggcgacggcgacagggcgagcttcgacgcccttgaccaagtcttcgtcgggcccttcgccgatgaccagcaaccggcagctgtctgtgttctgattctcctggattgaggggattgctctttggagattcatctcgaagttggatttcacaatttttatggcctttgactgcaacaagggaagaggagtttcttcgcctgataattgctccagcatttgccctgagggtacactcatccaggcaaatcccttatctcactactggaaggctaaaggttggaagagccgcaacaaattagggaaccagaagtccagttatgaatcaattccaagagactctaatccaaagaaagatgatgaagtgcggggtgaagcaactgcctcgacctgtggtctcaggtgcttcaccgatttgccagctgcatatttctgtgaggtccttgcacgcctcgatgcaaaggagcttggaattgtatcttgtgtctccacccttctgcatactttagccacagatcatcacggatggaagaagttgtactgtgaaagatgggggcttccaaatcttcctgccaccctaaatgggcttttggttccaggtggtcccctagacgggaagtcctggaaaacattttttgtggagcgggagtttcgaagtaaatcattcatggggaaattcaatgtggatgtttttcgtggccacaatgaggatgtacgtgctgtgttccttcttggcatcgg

SEQ ID NO: 27234 - DNA, 364 bp, Setaria italica
  Peptide Sequence Number=SeqID_93208
ggagggtgggcgccgtaaggtaccgttctctgcttgcgtctttgtcgtctgcagggcgccagagccaagctggcagtgacggcgccgatgatggccatagcttcccgccggtgacctgcgtcgttgccgatggcctactaacttgggcgatcgacactgccgaggagctcggcgtgccggcgctcgcctttcgcacgtccagcgcgtccactggcctaccggaccgttcccaagcttgtcgagctcggcgagatccccttccctgcaggcggcgacctcgacgaggccatccgtggcgttccggggatggagagcttcctgcgccgacgtgatcttccaagcgtgttcagctgtcgcggtgaca

SEQ ID NO: 27235 - DNA, 1405 bp, Setaria italica
  misc_feature (1)..(21): n is a, c, g, or t
  Peptide Sequence Number=SeqID_93209
nnnnnnnnnnnnnnnnnnnnnagtttctctagttcatacatttacattagactgtacaacataaatacatctgccaaaaactgtcaagactagctagaacctttcagacggttgaggccacacacaacatatctggctgcaccgccttgatgaactggcagcaaaaccttgctcataccagcaggctcgaagacagattgcttatatcttactacaaggcatcggcccagctgcccagtgttcaaactggaacattaacaaatcctaccatttctacaaaacttagcaattactcagatcggtcaaccgaccgaaggaaggctgtcttgagacgacaatgagcataggaagcatcatgagtttctcaatgatgaaccatgcaaggtgggaaagccacagaacactgagcataagtaggatcctttcatggtatttgagcatcctggaaggtttctagacaaagtagtcttgtcgcaccacagtaatgaagtcgccagagagtaaatcatcctctttctgtttccctcctgtttcgctgttgccttggatatgccaatatattgggggaagaggagtgtacaaatctgaagaaagggctggatcattttctcttgtagaatgcagcacaacagtaccagtaagcacagtaagaaatccacaaatctcagaggcaatactgcttatactctgcccggaccagtccttgaacattatggcacttgctaaaattgtgagggaagtgaacatcgcataatagatgggagaaacaactgcagtattgaaagtatccaatgccttgttcaggtaaactaactgaataattatgcatgtagctgaaacagtcgcgaacaaccaagtttggaaatagccagcctggtttataccctcaattgtaagcttgatagcaatgcctaccgccttgatgctcattaccgtcaaagatcctatcactgagcaaatgccgacataaaccactatattggtctggccatagcggggtgcacagtgcagcatcaatatcattgagatcaccaatgcagaggccgcataacaaagaaaggcaggttgtgttgccaagtgccagatctgcgccacagagcttggcgtctcttcttcgggtgcatggaggatgattacggttgacccgactatacagagcacacaacccaacacacccatccgctgcagcttctcattcaggatgaaatgggctagaacagcactgacaattatgctgagcgcaccaagtggggtgaccagaacagctggcgcaaacatgtaggccacgaaattagcaatctcaccaatcaacatggtaaccatcccaacccaccacaatggctccaggaggtatccatagcccccaacacctgcgcgggtgccggcagcgccggcgcggcggagg

SEQ ID NO: 27236 - DNA, 442 bp, Setaria italica
  Peptide Sequence Number=SeqID_93210
aacttaaaaccctaagaacttttaagacggaccaaagtttactacgaaggaagaacagtaactggccaagtctgcccttccatgggcgaaaagccttccatatcaagagaagacgtatgatcatctcacagcaacagcctctttgtagagaaggagcgttgacgtagcaccgtatcagagccaccttgaaccaacctgaggctatgtacaggtacagctggtatgcctccaggactgccaagacaaccattgtgacgaatggtttcaggcatcagactgagattgctattattactgagattggtgtcgtcgtgacgcttgacgcgcaggcaggccactgtgagccacgagcatagggcaatcatgatgacaggtagacagagagccaggtatctaccctttggtagaggtaagagtaccttgtgtaatacatgtcatggac

SEQ ID NO: 27237 - DNA, 1029 bp, Setaria italica
  Peptide Sequence Number=SeqID_93211
cttttgcgcccaagattctcgaggaaacagtactgcccaagtctgcccttccatgggcgaaacggcttcaacatcaagagaagacgtatgatcatctcagaacaatagcttgtttgcagagatggtgcggtgacgtagctccgtatcagagccaccttgaaccaacctgaggccatgtacaggtacagctggtatgcctccaggactgccaagacaaccattatgacaatggtttcaggcatcagactgagattgctattattactgagattggtgtcgtcgtgacgcttgacgcgcaggcaggccactgtgagccacgagcacctggctctctgtctacctgtcatcatgattgccaggtatctacccttttggtagaggtaagagtaccttgtgtaatacatgtcatggacaaaaacaagctcctcctcaataaccctgaaggcccgcatatgtggcttgtccccggcaagcaggcctttgaagacgaagtcatgggttttctgaagctctgcctctgagagcttgaagccagcaaaccttcggttgagcatcttggagagagccatagagaggcacaagtccttgagcaccttgccctgatcatcaatgagcagattccccttgcactgccagatctgttccacggtggtaaccttcaagtcgtccggctcctgcttataccatggcgtgtgtccaggccggttgacacattgtttctcaccggcgaccatgtaccagtagccttccatggtcacaggattgagggcccccagcttgttgttgtctatatactgcatgtaatcggcgaccaccttcacgttcttgccgaggtaggacttgctcaccatcctcatggaagctatcatcacatatgacttgaggacgataacgaccaggatggctgtgagtgggggccacaggtatttcgcatcccccttcttctccatgtcatggccaaaccttagcatgatatacaccagcaagacccccttaaagagttgtttgatgcagattgcttcttccagc

SEQ ID NO: 27238 - DNA, 876 bp, Setaria italica
  Peptide Sequence Number=SeqID_93212
agagtgaggtagagaactggggctagtccactctgattaggattgtgggggaggaaaccatggctactgccgacatggttttggcaccaagtctcccaccaagttcccctccctcgcaaggttgcgatgaggataatacaactggtgtggcagtttttggtcttcctagccattgtggcgatgttcctcttgcatatactgggtccattgcgccggcggtttagccacggtctcgttcaccacatcgtgatgggagtctacacgctctcctatccactggtgggctacaccattgggctgatgcattctaccacttggtacttcaacgacttcaccgtgtgggctgtgttcctgcttctgctcctcagcagcacggatagcctcacggcttgccgcctcaacgacatcgacaactggaagagcatctgcatcaaacaactctttaagggattcttgccgaggtaggacttgctcaccatcctcatggaagctatcatcacatatgacttgaggacgataacgaccaggatggctgtgagtgggggccacaggtatttcgcatcccccttcttctccatgtcatggccaaaccttagaagaagggggatgcgaaatacctgtggcccccactcacagccatcctggtcgttatcgtcctcaagtcatatgtgatgatagcttccatgaggatggtgagcaagtcctacctcggcaagaacgtgaaggtggtcgccgattacatgcagtatatagacaacaacaagctgggggccctcaatcctgtgaccatggaaggctactggtacatggtcgccggtgagaaacaatgtgtcaaccggcctgcacacgcatgtataagcaggagccggacgactt

SEQ ID NO: 27239 - DNA, 508 bp, Setaria italica
  Peptide Sequence Number=SeqID_93213
ctgaggctattgctaaactgatggatcttgcaccggaaactgcaacactgttgatacatgaccatgaagggaatgttgtaggagagaaagagattgacagcagattgattcagaaaaatgatgtaatcaaagtagtcccaggtggaaaagttgcttctgatggctttgttatatggggccagagccatgtgaatgaaagcatgattactggagaatcaaggccagtagcaaagagaaagggtgacactgtaattggagggacagtgaatgagaacggtgtgctccatgtacgggcaacatttgtcggatccgagagcgcgctgtcacagattgtaaggcttgtagaatcagcacaaatggcaaaagctcctgtccagaagtttgctgatcagatatctagagtctttgtcccacttgttattgttctctctttgcttacttggctcgtgtggttcttagttgaaagctatccatggaagaaggtatccatgagtaagggtaaccatgg

SEQ ID NO: 27240 - DNA, 1032 bp, Setaria italica
  Peptide Sequence Number=SeqID_93214
cacggccaggcgagggattcggttcacgagctcctcctcctcctcttcctcaaccccgcccgccgatcttgcgacgcgccgccgctagcggagatgcaataatcctaagcgagaagcatatttcaatagtcaatagaaagggcattgttacactggaggaacattgtgttggtggttgctgaattttgtgcacattcgtagatggagagattaagcaccaaccagctctacagttctggagttcctgtaactgtgccaacatccctgccttccataccagcctctctggaagagagcttcccaaggcttccggattcgcagaatgttttgatagagagagaactgaggagcaccccagtgccacctcatcaaaacactgttgctcctatccgtggtcagtttcacaccagtactggatctgttgggcctttatgttcgcccccggctgtaaggttctcttcggtttcaaaccctgagcaatactccaatcccagcccttataattctcaagcaccaagtactgcaagttcttcaacgcggaattatggatcacaatatggaggctttgaaccatccttgaccgattttcctagagacgttggaccaacctggtgccctgatccggttgatagcattcttggatactctggtgatgtccctggtgggaataatttgactgggagcacttctcttggagcttcagatgatcttactaagcaaactgaatggtggactgaacttatgaatgatgattggaaggacattgttgataacccagcttctgcagaaactcaacaggttggaccacctgcgcaatcatccatctcagttcaccaatcagctgcccaacaaacagtttcatctcaatctggagaacctatggcagttgtggcaccctcacccactggtggctccaatactgccaaggcacgcatgagatggactcctgaacttcatgagcgctttgtagatgctgtcaatcaacttggtggcagtgaagtgtgtattgttgaaacacttgtatctccgtga

SEQ ID NO: 27241 - DNA, 1745 bp, Setaria italica
  Peptide Sequence Number=SeqID_93215
tccgccgccatctccgccccgggccctgcctccaccgccgcgtcgcgcctccaccggatgtggggcgagttcgctcggttcgtgcgcctgcacgggaaccaaatctctccactcgggttcgcgtccctcgggctgggcctcggcgggggcgagggcggagggggtagcgccggcggtgggggagggggcggaggggatgtggatgcggtaggcgaggtggaggaggccgcggcgcgggccgaggcgccgaagaaggtgctgatcctgatgagcgacacgggcggcgggcaccgagcgtccgcggaggccatcaaggccgccttcacacaggagttcggcgacgactaccaggtatttgtcactgatttgtggaccgaccacactccatggccattcaaccaactgccaaggagctatagttttttggtgaaacatggacccttgtggaagatgacatactatggtactgcaccgcgtgtaattcatcagccacattttgctgcaacatccacattcatagcaagagaggttgcaaaaggcctaatgaagtaccaaccagatgtaattatcagtgtacatcctttaatgcaacatgtgcccctccgaattctaagatccaaaggtcttttggataagatcccattcactacagttattacagatctcagcacttgtcacccaacatggttccacaagcttgtcactagatgttactgcccatcaactgaagtggaaaagagagcactaaaagctggacttaagccctcacagattaaagtctatggcctccctgttcgaccctcttttgtcaagcctgttcgaccaaaggatgaactgcgaagagaattaggcatggatgaagatctgcctgctgttctattgatgggtgggggtgaagggatgggtcctattgaggccactgctaaagcgcttggtgatactctgtatgatgaaaacctaggggaacccactggtcagatacttgtgatttgtggacgtaataagaagctggttaatcgattgcagtcgataagttggaaagttccagttcaggtgaaaggttttgttacaaagatggaagaatgtatgggtgcttgtgattgtatcattaccaaggcagggcctggtactatcgcagaggcgatgatccgtggtttaccaattattctaaatgattatattgctgggcaggaagctggcaatgttccgtacgttgttgaaaatggatgcgggaagttctcgaaatctccaaaacagattgcaaacatagtcgccgactggtttggcccaaagtcggacgaattcagaattatgtcccagaattgcctcaaacttgctcgcccagatgctgtgttcaaaatcgtccacgatctgcacgagctggtcaggcaaaaatgtttcgtaccccagtacgcatgcgcaacataaaaggtcgtttcttccatttttttagtttgacatttttccccatgcggcactagttatagctgattgtgaggattggaaatattaattgatttcaaatgtctccatgagagcagtgaaattatttgagctctctaagtttgtttccccactcactagtttcgtcttcgttgataagaatagtagtaaatgcaaaggtctggccaggtctggagctttgagtgggtctagacctctagggttccaagctcccgcccagtgaaattcccaagggcttatctggaagacatggattttcttcagatgatcgaataaacaat

SEQ ID NO: 27242 - DNA, 266 bp, Setaria italica
  Peptide Sequence Number=SeqID_93216
ctgctctcggcctcggcgagctcgctccccggtggtggtggtggtggtgggaggggagggatggactggttcgagaagagcctgcagaagaacttcgatctgccgcccaagaacgcctccgaggaggcgcggcggcgatggcgctccgccgtcggcgccctcgtcaagaacccccgccgccgcttccgcatggtcgccgacctcgacacccgaagccagaacgaactcatgcgacgatccgcccaagaaaaaatccaggttgccat

SEQ ID NO: 27243 - DNA, 774 bp, Setaria italica
  Peptide Sequence Number=SeqID_93217
ttttttttttttttaactttgattttcttttatactctggaggccaggacatcacatctttattgtaaaagcttaaatccgattaacatcacgtcatcattacataaaaggaagaagcacaaattttagcaatttacaatgaggagctagaacacttcaataaagaaaataaaaacaaaaggacggattagaggccttcaccgaatttgcacttcggagtggaacgaacaagaggtatcaatttccgaggaaaaacagaacattatccagataacagaacctgcaagaagtaactcagatacatacaggacaaggcttctgcccgtgtccaaatgaattcctctgaatctcgcaagcaatcacgccggcttgccgtcggatcttctagtttgcgacctgtccgccgccgaggcaagggaggcattccaggaagctctttgatttcttctggtcgccggttggctttcccgatcccgcggccgtccggccgtgctccggggtcccgatgaagtaatcacccggagtctgtgtgttggcaggcttggattcggccggctgctgctccggcgcgttcgacggccggcccatgaagtacccgccgggaacgttggaatcggcgtcggccatggcggatgatggctcgagctgcaacggcgtcctctcctccgctgccgagacgaggcggatgaccaagacggggggaaagcagggtcaccgcgcccgccaacgtcttatgagcgtcgacgtacctaccgtaggtcttccgtaccccgt

SEQ ID NO: 27244 - DNA, 273 bp, Setaria italica
  Peptide Sequence Number=SeqID_93218
aggaaccgcacccgcgcaccgatccgcggcggcacccctccttgacgatcctgtcgaacacgaactgctcgtgcttccccgggaaccgcgcccgcgacgcctgccagtgctcgtagaacgccacggcggccggcgacgaccggacgtagaggaggccgccgtttggggtagttccccggtgagtccgggttgccgacgaagaagtccgacgacatcaccacctgcgcctcgccggcggcggcggggaggaggcgcgggaacgggaccggaacc

SEQ ID NO: 27245 - DNA, 731 bp, Setaria italica
  Peptide Sequence Number=SeqID_93219
gcgtgtcacacaaaaggtgttttcttgtgactccattgttccaggtagcaggcttcggctctgcagatcaatcccatccatgggtactacaggtgatccactcaactttctggatctggcaatcttacaagctcgtataggtggggatggagaagacaggtcaacaatatcctggagcggtgccacagtgtgtatatctgctgtctgagggccagccgctgtagatggaaaggtaccactttcagattcaatcccaagcagcaattcttggagctgcacatccacatctttaacggcagctgggggtgatttcttgggcctagctctcctcttttgcttcttctgctcacccttctttccaaaaattcagttattttttctgggcaagcacttctaacaagatcccctggaacaactgaaactaggagcccatctatgtttctccatgaaacctcataatattcacttccatgaacttttcgctgcttcacaattgccaatacagggcatggtactggaatctcatttagtgaaggtttcagtcctagatctgaagacgtggagcgaagatttgaaaaccttctgagttctctctcagctatctttggaaggatatattcatcagtcttctcagggctccactcaaagtattgctcacatatctgttgcagttgtgaccgaagaaacggacgctggctgcatgccctctgcacagcttctgaatctggttt

SEQ ID NO: 27246 - DNA, 430 bp, Setaria italica
  misc_feature (1)..(27): n is a, c, g, or t
  Peptide Sequence Number=SeqID_93220
nnnnnnnnnnnnnnnnnnnnnnnnnnnctcctatatgggctttcaaaatgcctggtgaattttccagtaatagtcgagagaaaggaagctcgccacgccacatgtcgcatccaccggccggttcctaaaaacggccgggttctcattgggcaagcaccgcgacgtgccgagcccaagacatgccaacgcaacgcgattccaactctacgcccaaaaatagccaccagtctcgcgtataaagccaccagaatcgccacgccaagaacacagaacgcagtgaccatcagcaccgaaacacaagctgcatacgagttcacaaagcgcgcaagcctaaacaccaagactccttccatggcccgtgctctcgcgctcgtcgtgatcctcctcgcagccgtggcggttggtctcttcgccggtccgcttgtggtta

SEQ ID NO: 27247 - DNA, 1045 bp, Setaria italica
  Peptide Sequence Number=SeqID_93221
aaccaaaagttggaggtcttgctaaaaagaaaggtaaaaatggctggcaacggaaaaagagcattgatcagtgttcaaagtaccaacaaaaggtacttaaaactaggttaacctagagaaaagatcgaacacacacagaactcattggagcatatggttctcgaacctgagtgttccgcaatgaacttgaaagaggacctgcaaattgaaccatctgttgtggatagcagaacaaaaaagaggaaaacaagtggacgaaagaaggaaagatcctcaagtacatcctgcaatattgctaagaagtgtgttgatcgttctgttcagatttctgacaagcttcattcgcacatgcagcccagtgacatggacaacttgatggataatccccctgtggtcaaggatgctgaattggacaatgagatctgcagaattccagaggataaagatggcaatgggaaagaaaaatcatcagagcgttcaggaaaagcagaagaggctaccaacaaagccacttccaatgaaaataatgagccaaatggtgtgctaggcaagaactttgtggatatacacactgaagcggatcagagtgaatttaaatcaagagcagagagaagcatggagttgggataaaatgcaaatggacgtgactcaatattaggacaagagatctcaatgggagaaaatcaaatgtgtcgaaacctatgtgaacaagaattaagatcaggtaaaaggaagaatgccagtaataaaagcgctaaatttggtttgggtaacggtgtagtgacaccagatcatgctgatgacaatcctcctgaaaagctgctgcatgttccacatgtggataagatgactattatagataaacaacacactcagccagaatattgtcgtgacaaaggccgagaaggtaatgcgagccatgcttttcaagaggagccaaataatgagcaaaatcatgtgctagacaagatctttgtggatatacacgctgatgtggatcagagtaaatttaaatcaagatcagggagaagcatggagttgggag

SEQ ID NO: 27248 - DNA, 1926 bp, Setaria italica
  misc_feature (2)..(2): n is a, c, g, or t
  Peptide Sequence Number=SeqID_93222
cnctgctggctccgccgtttcctgacgccgatcgatcgatctccatcgagcttctgagatgtggaagacgttgacgccatggaggtagctcgccgagagccaggtttggtcgaccacgatcggctcgtgtgtggcctggctccctgtatgccacacatgtatccaacccgtggcgtgattggatgctgtgggtggcgtgcaaggagccaagcatgcagaacaggccatgatcatctcctccccatcttctgatctgcagtttttttgggtgcttttggagatgctgatgcacatatttcatgctgttatatccgtatgctttcctgtgcctgtttggttttgaattgtttctgcagggggcagaattaaggattcaatttcggggaaaaggtttgtgttgctcctcttcaagcttgacccaaatcattcagagagggtttacaaatctcatccattttcatcctaaaataaaacatctgcttttcctcttgcttatttacatggcttcgatcgatcttgcagattctgagtgttagcttttttgatttccgtcgagttcatagaaacagctaaggaaaacattgaaacttcgttggattctagttattaggcatccgttctttgctagatgtagtccattagatcaccgatctgagctagaattccttgattctgcttgttttaatttgttgtctcaaccttggcgacgggaatttaagttgtagatgtgcaagtcttttttgtaatttagttcttgaattctcgtctggacccagtgtggaactgaaacggacgtagctgtatttcatctgggaaaactgacacgtccttcaaatttccgctgcaaatagccaggtgtacgctaacggatacaagcttccgttactactcaccaatagtctgttttgactgagaaattcgaggacatgtaagctggaccttcatcagtccaacgatccttttaattttgtgctcaaatatgttttccgttgtgttgtacgtattcccaactgcgattaataatttaaagtttccttgttcttatcatatgcttcaaaactctcttttttggtgaaagaataggccatgtcttttagacataatcattcattctctccctttggatgaaatttatgtgtactctactaagttctaaatggtaacacaaacacaaccaatatggagtaaaccgtaatgtagtaccggtaggttgtaactctgattgatatgtttgtaagttggggtctctccaaagtccaaagtagttattccaaggcatgccaacaaatgtatacggcttgaaacaaatgcaaacaaatctaaagtttcaaatcacaaatgcatacgatttccgcttttatactaagttacgttgcaatgtggtttctccatgttttgtaccatgatgattgatacttccatacatcaaactaaaccgcagggtcactacgaaataaaccacattaatgagtttaatttgtcttgccgccattatttgtatttatgtacacaaaaataaaaatttgagacatgcacacatgcgtaccatcagttcctgtatatgccttgaatctaattatattgaatctacaaaaataaaatttgagtcatacagctctagtagccctttgtttgagtcagatactcagagctcttcatgcatcaactctttttttggcatctaatattttgggcagtataataatatatagggcgcatgaacaaagggtctgcacttttcagaggaggtgcttttgggacttgaatgaaggaataaagagcaaaggtgtacgtacgtgcacggtgcggtctctgactccatgttgtggtgtgtgcaatgcatagataatgtgcctctggtacaagctgttcagagctagcagccaagtacggagtacgtactgaaactgaaagagatacccccag

SEQ ID NO: 27249 - DNA, 1198 bp, Setaria italica
  Peptide Sequence Number=SeqID_93223
ccccttttgtaccagctcattaaataattctctgcaactccctcatttccttttgttgtagtataaaaccttcagctgcccattgctttagcaaatcatccttccagatggtgcatcccactggatacatggtaagatatagcaagcatgtctttaactcttgaggaagattattgtaacaaatgcttactatttctttaagcatatcttccaaagaaagattttccagagtggacagaacactttgcagcagttggtgccatatatctgagttatctcgcaagcttgcaaaaagaccagctgcagagatgattgctaatggcaaaccaccacattcttttaacattctgcaggaaacatccttcaatggatcaggacattgattgtcagaactaagagctctatctaagaataaattttcagaatcctgactcccaaggggcttcatttcaaaagtatcaacggtgtggtaaccagagcattcgggcgctatattttttacttcacatgttattattactctactgcaattactaccatttggaaaagcgtttttaatgatatcccatgcttctgcttcccataaatcatcgattacaataaaatacctcttctcttcgaggtgcttcctaatgttttcaatgtcgccttgaactgagcaggcatacagattttgtttattaggccgcagaatttgatagagtagttcctgaagaagtctacttatgtcaggattctgtgacacccgtatgaaagcccggcaatcaaatttcccactgagttcacgatacagttctttagcaagggttgttttaccgatccctgcaggtccaaaaatacacaacactttcaactgttgttctgcttggttggtgagccacatggtaagttctttctttggtccctcgatacctataggatcggcaacaactttataaaccaatgtgatccgactgctacggccagagaacacagacctaggattcgagacgcaaccatcaagctggtaccttgcatgccgttcgcttgcctcccacagcagagtcctgagctctgcaactcttacgatcctcgttgacagcttgagcatactgggaagcccacgaatcttaagacgtgcaaccctgagcttgggggcatggatggatctcggcttctcattggcagcgttgtgcgacaacatcatgaagtcgatgct

SEQ ID NO: 27250 - DNA, 1250 bp, Setaria italica
  misc_feature (45)..(45): n is a, c, g, or t
  Peptide Sequence Number=SeqID_93224
ttgttgttgtcctttggtctagttctcttttttttagtttttttntttttttttttttctttttggaacactccaatttattcccaatttattgatacacagcgaaagttcttgttacaatacagtacaggatcgagattcaccgacccactaggcggcaagggtgaaattgaagttactgcatgaaagccctaccccgttgaggaacgtggtgaagccgagggtcttcttctccgcgtcgagcaccagcaggcggttctccatctggaacccaccgataatcgccgccggcgcctggccggacgccttgacgaacccgaggcaggccgtgttgacgttcacctgcaccatggagttgccgcccaccaccgagtagttgctcccgctcttgaggacgaactctatctgcggcacggcgtagccgagcctcgtcggcggcagtttcgtcgagtcatagcaccgttcgaacggtgcgacggaggcgaccctcgtcatccacgggaagttggatccggtcgcggcctggtcgaatgccttcatgaacgggtcgtacacgtcggggcggagcgccgtgtacggggccgtcgtgctcagtccgaccacgagcgtcccggggttgccggcgaggctttgctccacggcgatgccggtggcggagatgaagtacccgggggatccgttgaacccgactagcggagccgtgccggcgagcatcgtcgtgaagtcgccccggtccgggaagatcaagggacccccgccgtagatggccacgcccacgctgttgccggtcgtgatcttgccgtcgctcgggaggcagagggcgagcttgttggcgaccttctgcgtgcgcgcgacctgagcgaggaaggactgggtcgagggcgcgagccccgcgacgccgacggcgcccgccggcaggttaggctgccccggcgcgcaggaggccacggcggagaaggacaccgggaacagcgggttcgcgccgttcgtggcgttggaggagagcgtcgtgaccgtcccgttcttggaggagcacgtcgtcagcgagatcaccgggccggagaggtcgaggacgagcgggcggccgtccttaaggggcgcggtgtagagggaggtggccgcgtccttggtgacggccgtgaccaggggcttgccgccggtggccgctgtgcatggtgacaaggcagagatgcagagcgagatgacgaggaggaggggcttggggttccacatttctgccggttggtttg

SEQ ID NO: 27251 - DNA, 336 bp, Setaria italica
  Peptide Sequence Number=SeqID_93225
ggcggtgttggcgtcggcgtggtcccggagctccttgagccaccgcctcgcgttctcgaacgtcgaggccttggtcgtgtcgtagacgaggagcgcgcccacggcgccgcggtagtaggcgcccgtgatcgcacggtagcgctcttgcccggccgtgtcccagatctgcgccttgatcgtcttcccttccacctggatggtgcgggtggcgaactcgacgccgatggtggacttggaatcgagggagaaggtgttgcgggtgaagcgggagaggaggttggacttgcccacgcccgagtccccgatcagcaccaccttgaacaggtagtcgtactc

SEQ ID NO: 27252 - DNA, 451 bp, Setaria italica
  Peptide Sequence Number=SeqID_93226
ccaccggctgatgttctcaaaggtggtgggcttgctcacatcatagacaaggacagcgccaagggctccacgatagtaggcgctcgtgattgcccggtaccgctcttgacctgccgtgtcccagatctgcgccttgatgatcttgccctcaacctgcaatatcaagtcaacattaggcacaggcgaggatttgcatggttagaagaatcaataacacattcagcaacactgcaagctgcataatttcttggtttaactttttttttgagtaatcaatttcttggttaactgtgaatcttcctgtgacaagtttgtaagaggtgcagttttgactgcatcgagtagttcgtaacagcactcgatttcttggttgggactgggagggctaaggaataaactcagttgggcaggaaccccattcagggcttgcagttggaactctactctttgg

SEQ ID NO: 27253 - DNA, 271 bp, Setaria italica
  misc_feature (1)..(12): n is a, c, g, or t
  misc_feature (27)..(27): n is a, c, g, or t
  misc_feature (31)..(31): n is a, c, g, or t
  Peptide Sequence Number=SeqID_93227
nnnnnnnnnnnngtgtcgtcgtgcgtntctnttttgtttttgtttctcccgtcaattaaaagatgatattgcagtgatagacaagaacaccatatgaatcttacagaagcacaaattaatagtcgataatttaaattgatagtttgagtggttcttgagtgaccctaatcctcagtaacaccaccagaaacagaatccaacatatttcttgtactgcaagcgcaacggtaccttacctacaatgaaaaatgaaacaaaccgttaacgttaa

SEQ ID NO: 27254 - DNA, 736 bp, Setaria italica
  Peptide Sequence Number=SeqID_93228
cttcagccagcgctcaacattctcaaaggttgagtgacgagtgacatcataaacaagcaacgctccaacagcaccccgataatatgcactagtgatagctcgatatctgcagtaagattcagatccaaaatgcagtgagataagtaaaccaagaaaacagcactctgacttgcaaacaagaaagtgccatggacatcaaatgaagaatcctatttacccaataaagtcaaaatactaaataaattctgaaacaaatattcacaatcttttgttttattcgacacactggtcatcatcttttaccctatcacaagaatatgattcaacaaaattaatcagatctgttttgttcgcaaagttgattatctacaagtttggccatcctgattccctttattttgactggatggtggatagggcagccaagccctgtgtcagtcaaatgctgatacaaatcattgaaagaaactcgagtatgtcaccaaatcatatttagacatcatcacccataaatgagacagataattgactcaacctgatatggttagcatagaatttactgctgatatgatagcaatgtttacagccaaagacccccattatgacagtattgatgagacagtgacaatgatcctatttgaagcaagagcatttcattggatccaaatcaaatttcgtacagaattctatgacagaaaaccaataagacaacttggtgagatgtaatactacactg

SEQ ID NO: 27255 - DNA, 1297 bp, Setaria italica
  Peptide Sequence Number=SeqID_93229
agcctgaacattttttttttttggttattgaggaacataaaccttcaatccaaattttgtacacctgtgagaattacatgatataaccctctaaaaacacttgctgcctaccagtgacagatggacatttaccgagtggaacataaccccttgtgacataaaagacaaagttaaactctttgctcccagcaaggaaacatcagtagctccaattacaacattttagcagggtatgttatgtagtgaggtgtgtggaggggattctaatatcaattagtgtggaacagtagtgcatataaaccatacaaggagaccatgaatatcaatgacactgcaaaacgttagtttttgtcccagcctggaattaaaacttttaacctctaaatcgtttttctggtgtaccaacataatctcataaccaaccaggctaggcaacacaagggagtcatattttcaattaccaatcatatgattgggtgagcatatggttccttttcatggtcataaatttaggatgaacaacaccctgacttcttcacagcagagacatcatccttgcctccaacattgatggtttgtcctcttggtggagctgcagggtcatcgccaatgtcgagggccttcttgctgaccacacgatagatctgagttaggacctcggtgaaggcgctctcgacgttcatggactccagtgcggaagtttccatgaagaaggtactttccctctcagcaaagcccttggcatcctccacagatacagccctaaggtgtcgcagatcagccttgttgccgacaagcatgatgacaatgtttgcatctgtgtgatcccggagctccttcaaccacctctccacattctcaaaggtcacatggcgtgtcacatcgtacacgaccagtgcgccaacagcccctctatagtatgcacttgtaattgcccgatacctctcctgcccggcggtgtcccagatctgggccttgacgaccttgtcgtcgaccctgatgctcctggtggcgaactcgaccccgatggtggacttggactcgaggctgaactcgttgcgcgtgaaccgcgagagcaggttggatttgccgaccccggagtcgccgatgagcacgaccttgaagaggtagtcgtagtcgtcctccgccctgtacgccatggtcggtcgctcagccccggcaggcaggcgcttcccttccttcccttccttccttcctgaaccggcggttcttgggggcaggaggacgggcaggtgaggcccgcagcgcttctcggggctgccgcgggaaggatcga

SEQ ID NO: 27256 - DNA, 1259 bp, Setaria italica
  Peptide Sequence Number=SeqID_93230
ttttttttttgttccacgctgctggatcagcattttttttggttactggagatttattattgccatcaggagaagaatgtgttacagagtacaggattttcttcgatccttccaagtatacagggataagttataaacaacaaatgcaaaaggaatatgatttgatctggcaggttacatgtatgatactagaaaaggttcctttgatgaaagaatcaccagttaatggctttggaaagcagataacgcgaagcaatctacaacctaggcgcagcaatgtgcagctctgcagaaacgaatgtttccggacctctcctctttcgctgggcgcagttcttcagctagaacagcacgaacctttcgtggcggtggatgattctgcaacgttaatggtggttccttgcatggagcgaccgctggcggatgcagactcctgcgctgcgagcgccttcttgcttactgtctggtgaatctcgctcaatatggtgtggaacgccttctcgacgttgaccgcctccagcgcagatgtctcgaggaaggataggccttccttctcagaaaatgcttggccgtcttcctcagggaccgatctcaagtggttcaagtccgacttgttaccaaccaacatgacaacaatgttggcgtctgcatgatcccggagctctcggagccacctctgaacgttgtcaaaagtttgcttctttgttatgtcgtagacaaggagtgctccaactgcgcctctgtagtaagcactagtgattgcacggtacctctcctgaccagccgtgtcccatatctgtgctttgacagtcttcccatcaatctgtagggtccgggtggcgaactcgacgccgatggtggacttggactcgaggcagaactcgttgcgggtgaatctggagaggatgttggacttgccgacgccggagtcgccgatgagcacgatcttgaagaggtagtcgtactcgttgtccacccggtgcgccatctgatcgagcgcgagtcccccgaaccaggcccagccgacgacgaggtcctgctcttgctgccggacgggacgccgccgctcgccgaacgggacgggattcgattcgcccgctcgtttcttccgctcgcgtggggatttgaaacggtgggggcagcagatccgaggcggggtgcggggaggaggaggaaacggaatgggcggcgaccgtggaagggaggagaggggagggccgtgcgctgctgagctggacgtgattggcggttgatttggc

SEQ ID NO: 27257 - DNA, 1292 bp, Setaria italica
  Peptide Sequence Number=SeqID_93231
tttttttttttttgaaaagcactgcaaattcccattgtcaatatatctgcatgacggattttcaaaagtcataacctgtcacttataattatatatgctaccgtatcaatcaaatgggctgatgaatacacacgacgacagcgattgcaaggttgtaaaacaacatgctgccctctccaaaacacggtgtccatgtcgagccccaaccaccccaaccgcttgaccatgtcaagaaaagattgtcatcacgttgtcttccttaaccagcaaagcatttctttgtttgaccagggtgtcaagccgagcagcacccgcccgtgttcacgggcgagacctcgtccttggcggcaccgacgtcgatggtcttgcccctgggcggcgcggccgggtcctccccgatgtcgagcgcgttccggctgacgacgtggtagatctggcggagcacctcggcgaaggcgcgctccacgttggtggcgtccagcgccgacgtctccatggagaaggtgccgtggcgctccgcgaaggcggcggcgtcctcgggcgagacggcgcggaggtggcgcaggtcggccttgttgcccaccagcatgaccacgatgttggcgtccgtgtggtcccgcagctcccgcagccaccgctccgcgttctcgaacgtcacgcggcgggtcacgtcgtacaccaccagcgcgcccaccgcgccgcggtagtatgcgctcgtgatggcgcggtacctctcctggccggcggtgtcccagatctgcgccttgacgagcttgccgtcgacctggacggtcttggtggcgaactcgacgccgatggtggacctggtctcgaggctgaactcgtccctggcgaaccgcgacagcaggttcgacttgcccacgccgctgtccccgatcagcaccaccttgaacaggtagtcgtactcctcctccgcgcggtaccccgccgccatctctatacctctctcttcccctcacaaccgggagacgtgcagggcgctctcctcgatcgatcgatcgactgattggattggtttgtcgatagattgatacgattcgatcgctcccgcttcccgcgcgacggtgcgggctctctaaatagcaggagcagcgcggcgccggccttcctctgcccccgccccaatcatataaccgcggacgcggcgctgggcaacgcggtgcggcgcggcgcggcgcgtttcttcttctttttggtgggctgcgctgctacggggaagacggaggagtggggtggggggacgaggtcgccgcggttgcgcggctctgttt

SEQ ID NO: 27258 - DNA, 1141 bp, Setaria italica
  misc_feature (1)..(70): n is a, c, g, or t
  Peptide Sequence Number=SeqID_93232
nnnnnnnnnnnnnnnnnnnnnnnnnnnnnnnnnnnnnnnnnnnnnnnnnnnnnnnnnnnnnnnnnnnnnnttttttttttttttttttattttgtaaagaatctgaaagccgcacactttcacatccctagctataccagcaagcttaagtcctgaatgaattaatgtatcaaatggcaaaatgaacacgagacacctgtaacacatgaatacagattgaggaccatgactgcaataacatcctgcaccctctactacaaaagtatcaaccaacccaagtacatgttctatccttccaagctaagacgaacagcaagcagacttcttcactgcggacacgtcgtccttgccgccgacattgatggtctggcccttgggaggcgccgcggggtcatcaccgatgtcaagggccttcttgcttaccacacggtagatctgcgtgagcacctcggtgaaggcatcctccacattcattgcctccagggctgacgtctccatgaagaaggcattttctttctcagcgaaggcctttgcatcctcagtcgggacggccctaaggtgccgcaggtctgccttgtttccgacgagcatgatcacgatgttggcgtccgtgtggtccttgagctccctcatccacctctccacgttctcaaaggtgacatgccgtgtgacatcatagacaactagtgcccctactgctccacggtagtatgcacttgtgatagcacggtatctttcctggccggcggtgtcccagatctgggccttgacgaccttgtcgtcgacgtggatgctgcgggtggcgaactcgacgccgatggtggacttggactcgaggctgaactcgttgcgcgtgaagcgcgagagcaggttcgacttgccgacgccggagtccccgatgagcaccaccttgaagaggtagtcgtagtcgtcgtccgcccggtacgccatcgccgcctgaactgggcgctggaagtgagggccgctggaactgcgctgcggcggcgcgggacggggtgcctcggccctccctccctgactctgggccggcggcggcggcggcggcggggaacgggcggtggaggtggaggagggggagcggatgggaagggcggagcggagcacgcggacgcgggtgcag

SEQ ID NO: 27259 - DNA, 997 bp, Setaria italica
  Peptide Sequence Number=SeqID_93233
aacaaaggtactatctgactgaatgaatcaccaaactttggactcaaaatggccattacaacagcatacacgcctctgaaatatctcagcaggacgcaccacccatactaagttgagcagcattgcttcttttcagcagcagcgtcagctgcaacattgatcgtcttaccttccttgacgcctccggctgcccctgccccagactcgtctgacgccacgggcttcttgctgatggcacggtaaatgtcgcccagaatgagctggaacgcctcctccacgtttgtcgcctccagcgcggaggtctcgatgtaggataggccttctgcctctgcaaagttctgggcgtgctccgtggcaacagcccggaggtgtctcaggtcggtcttgttgccgacgagcatgattctgatgttggagtcagcatggtcgcgcagctccttgagccaccggctgatgttctcaaaggtggtgggcttgctcacatcatagacaaggacagcgccaagggctccacgatagtaggcgctcgtgattgcccggtaccgctcttgacctgccgtgtcccagatctgcgccttgatgatcttgccctcaacatggagcgttcgcgttgcgaactcgacgccgatcgtggacttggactcgaggcagaactcgttgcgggtgaagcgggagaggaggttggacttgccgacgccggagtccccgatgagcaccaccttgaagagatagtcgtactcctcttccgcgcgccgcccagccattggaatggattggatctcccctctctttccgctcgcttctcgctcgctcccaatctcggcagtcgagaggaggggagagacctgaccgagcagagtggcagactgaagcaaaagcaaagcgaggccaaggaagcaaggatgaaggccgctggatctattgctctgctcggctggttctcacccactctgcagtctgcccttgcggagcagctggcagctgcggctgatcctcc

SEQ ID NO: 27260 - DNA, 1035 bp, Setaria italica
  misc_feature (1)..(24): n is a, c, g, or t
  Peptide Sequence Number=SeqID_93234
nnnnnnnnnnnnnnnnnnnnnnnntttttttttttttttttatttttgaatcttacagaagcacaaattaatagtcgataatttaaattgatagtttgagtggttcttgagtgaccctaatcctcagtaacaccaccagaaacagaatccaacatatttcttgtactgcaagcgcaacggtaccttacctacatgaaaaatgaacaaaccgtttgtatccgccttagtttgatgagcagcaaccaactctcttcatcgcggacacatcatccttcacgtttattttctcccctttgcccggggcagccgcgccttcctccggtgcctccaccgtcttcttgctcacgatctggtatatctgggtcaggacctccgagaacgcgttgtccacgttggtggcgtcaagcgcagacgtttccatgaagtacatggactcagcctccgcaaactcttttgcgtcttcagtcgagatagtcaccaagtggcggagatcggatttgttgccaatcagcataacaacgatgctttggtctgtgtggtctctgagctccctcagccaacggcccacattgtcgaatgtagcacggcgggtgacatcatagacaagtagtgctcctacagctcctcggtaataggcacttgtaatagcacggtacctctcctggccggcggtgtcccaaatctgggccttgatgaccttgccgtcgacctggaggctgcgggtggcgaactcgacgccgatggtggacttggactcgaggctgaactcattcttggtgaagcgggagaggaggttggacttgccgacgccggagtcgccgatgagcaccaccttgaagaggtagtcgtagtcgtcctcggcccggtacccgcctccgttggcagccattgctcccctccgagcagaggtcggctgctgctagcgcgggcgaggtggtgggaggttttgggtctggatctcgctggagccgggtggtggtgcagtgtcactggaattgggaggggggtgccagtgaggaggcaatcaagtggttg

SEQ ID NO: 27261 - DNA, 1193 bp, Setaria italica
  misc_feature (1)..(20): n is a, c, g, or t
  Peptide Sequence Number=SeqID_93235
nnnnnnnnnnnnnnnnnnnngttctagaagttgatttttactaggttaacaatacaaataaaatagttaacccaacaaaaaactacaactgcaaattatataaatactaccctgctactaggtaagagcaaggagctttgctgggagtggtacagagttttttgctcagttagagagcgatacacctttcctcccacagtagcttttgatgtaaaaagactatgcaggtcaagtagtcagtgtctcaagtctgccattcttaaaatctacacttattgctcacgcagagagtaatatatttcgacaagtctacgactcaaatggaggacctcaattgtttgtttagatgatcctgatgagcacctctaagaagagcagcaccgtgatgtaagggtgctagaatttgtggctgacacttgaatggattgtccccctctgatattaccagaccctgatccagactcctcagatgacaggggcttcttgctgataactcggtagacctcagctagcacagtttgaaaagccttctcgacatttgttgcatcaagtgcagaggtctcgatgaaaaacaacccttcactctctgcaaagcttgcagcatcctcaactgcaacagaacggagatgcctaaggtcgatcttgttaccaatgagcatgacaacaatgtttgagtcagcatgatcccggagctccttcagccaccgcttcacattctcaaatgtcattactttagtgacatcatagactagcaatgcccctacagctccacgatagtaagcacttgtaattgctcgatatctctcctggccagcagtgtcccatatttgagcttttatagtcttattctccacctggagggtgcgggtggcgaactcgacgccgatggtggacttggagtcgagggcgaaggtgttcttggtgaagcgggagagcaggttggacttgccgacgccggagtcgccgatgagcaccaccttgaagaggtagtcgtactcgtcgccgccctgctcccacgacgccggccgccgagccatgccccttcctccgctcctccttatcctcgcctctctcgccggccgccgccgccgccttgcagcgccgcttctgactcgttgcttggaggagcgcgtgcctcgctgtcgctttgggaggcgtggcgacggtggcacggaacgaggactcttgttgtt

SEQ ID NO: 27262 - DNA, 1158 bp, Setaria italica
  misc_feature (1)..(33): n is a, c, g, or t
  Peptide Sequence Number=SeqID_93236
nnnnnnnnnnnnnnnnnnnnnnnnnnnnnnnnnagttcttttgactatataattattaagatatactgcagtgccgtgtaacttccagaatgtaaagggaatgaatcctaatacacacatctaacttctgattcagaaacactgaacaaactgcatatgctccagcaagttcacacaacaaagaaaaggaaaataaaagataagagtagatattccctccacaccatttgtgactactatgctccgctttctaccaacatttctcgtccaaggttctctataatatgatgtctgaagcccgattatacattttaagtagagcagcatgccctcttggtgtttccagaagtgctgtcaatgctgatggtctttccctgggaaggcagtggagctgctgcagctgccacttctttggccgccagcgctttcctgttgacaatgccatagacctccgagatgatagtctggaaggcttcctccacgtttacagcctccatagctgatgtttccaggaagaataacccttccttttctgccaacgctttgccttcatcctcagagatggctctcaagtgtgtcaggtcagatttgttgccgaccatcatgattacgatgctggagtccgcatggtcacggagctcacgaagccacctgtgaacattgtcgaagctctgcctctttgtgatgtcatatacaagtagggctcccacagccccgcggtagtatgcacttgtaatggcacggtacctctcctgcccggctgtgtcccagatctgagcctttattgttttgccctccatctgcagggacttggtggcgaactcgacgccgatggtggacttggagtcgagggagaagtggttgcgcgtgaagcgagagaggatgttggacttgccgacgccgctgtccccgatgagcaccatcttgaaaaggtacgagtactcgtgatccactcgcccgcccatctctctcccctgccctcctgctcgtccggagatgagatcccttctcggtggtgaggaggtcctgagggaggaggcgcccaagaaaggaagggggattcgtctaggaagaagaagaggggaaagtaggggagtggtggcctggccttgcgctggtgggtggtggtgggaagaagacaactacgacccaagacta

SEQ ID NO: 27263 - DNA, 1068 bp, Setaria italica
  misc_feature (1)..(33): n is a, c, g, or t
  misc_feature (50)..(50): n is a, c, g, or t
  Peptide Sequence Number=SeqID_93237
nnnnnnnnnnnnnnnnnnnnnnnnnnnnnnnnncttttttagtttttttntgagaacgtggcaatcatgaagcatatttctattttgaacagttcataagtttaaacatggtagcagtggatttcacagcaaaaacaataccatgcctattgccggttacacaatacaatagcagaaagatctaagctgatctaaccttcagtttttccagtttgacaataaactctctaggtaacatagaagaagttgctaatgccactaacaattctcggtcgctgggaaaaagccataacataagctacatcacacaactccaaaaaatacaccagggctgctcagcagcagccacccttcttcactgccgaaacatcatcctttatattgatcttctcacccttgccaggcccagagactgcatcttcgcccccttccactgctctcttactcacgatgcggtagatctgggttagcacctctgcgaatgcgttctcgacattggtggactcaagcgcggatgtctccatgaagtagagtgattctctctctgcaaatgccttgccttcatcagtttgaacagctacgagatggcggagatcagatttgttgccaaccagcataacaactatgttgggatctgtatggtccctcagctccttcagccagcgctcaacattctcaaaggttgagtgacgagtgacatcataaacaagcaacgctccaacagcaccccgataatatgcactagtgatagctcgatatctttcctggccggcggtgtcccaaatctgggccttgacgaccttgccgtcgacctggagggagcgggtggcgaactcgacgccgatggtggacttggactcgaggctgaactcgttgcgcgtgaagcgggagagcaggttggacttgccgacgccggagtcgccgatcagcaccaccttgaagaggtagtcgtagtcgtcctccgcccggtaccccgccgccattgctcccgcccgctaccccgccgcgatacctcctccctctgctctccgcgccgatctggttttggggcgagcgagcgagagagag

SEQ ID NO: 27264 - DNA, 342 bp, Setaria italica
  Peptide Sequence Number=SeqID_93238
gcgccaagttgatgcttagtggctcgcgggaaccagaaagcttccagcttatactggtggatgatgggaggctgtcactatacccagtctgaatctcttcagttttacttccacggggcctcctgagcttgtatataatgactagggtggccattatgagcaccaagagtgccactgcaaggagtacaaattcttcgagaaattttctccgcccacttggggaatgttgggaactatctccagtgctggcgttgtgcatgcaaggattcaatgggatgccacagaggccagagttgttttcaaagcgggatgcaggaaatgtaatcagctgtcccgatgtcg

SEQ ID NO: 27265 - DNA, 236 bp, Setaria italica
  Peptide Sequence Number=SeqID_93239
ggacgtgatgacggccgtgccgtccagggccagcggcacgccggtgaagcccgagtacacgaactgctcgtcatccccggcggcgaggacagcgacgccgaccaagccgacgaggaggacgccggcggcgagaagagagcgcgcgcgggtcaagtcaaccatgacggtacaacaaccacttggcaagaaatcctcgagcaattcacatcacccgagcaggcgccgccgcttcttgg

SEQ ID NO: 27266 - DNA, 367 bp, Setaria italica
  Peptide Sequence Number=SeqID_93240
aaccattgaacctagaggaacttgtctcgcccaagtcgctgcagatggtaattgatggtctttgcggcgttctttggcttccctttctgggtctgagtgcacataaccaagagatccttctgcctcacgcacttgtcatcttcctgtttgtttaaggccaggcagttgaggaaggccaccatttctaccatgcaaggctttgcaacagcaccaaacttctttgggtttatgtacaaagcaccagccttccgacccattctgctgcttcacctcgagaaatgagacgccgacgagcgatgggggcgcggccgccgcgtcgacggggttggggccttgggggggactgcggaggcggcgctcttgagat

SEQ ID NO: 27267 - DNA, 497 bp, Setaria italica
  misc_feature (106)..(106): n is a, c, g, or t
  Peptide Sequence Number=SeqID_93241
tcaatatactactgatacattaatgtttgacatagattattggctgaccatttgtccaatgtaaacaaacatattactgccccgttttagtaaaaatactttgagngaaaaattgccctccggccctcaatacaaggcagcgagcttgatgagaaaatgatctcaaaaccattgaacctagaggaacttgtctcgcccaagtcgctgcagatggtaattgatggtctttgcggcgttctttggcttccctttctgggtctgagtgcgcataaccaagagatccttctgcctcacgcacttgtcatcttcctgtttgtttaaggccaggcagttgaggaaggccaccatttctaccatgcaaggctttgcaacagcaccaaacttctttgggtttatgtacaaagcaccagccttccgacccattctgctgcttcaccttcatatatgtcatcaatttgtgtgattagctcaagagcaaattaattgtctaaattagt

SEQ ID NO: 27268 - DNA, 210 bp, Setaria italica
  Peptide Sequence Number=SeqID_93242
tctcctccgtcagagatcttacctggagggcatcacggatgcgctcaacatgaccgacgaaatgctgagcgctcgctcgttctcaaggcagatcatggatcagatttatctagcaaaaacttatatcgccgcttcaaaggaggccaataacctgcagtttgcggcggagcttagtgcccaggtacggcgggcacagagcatcctcgcgca

SEQ ID NO: 27269 - DNA, 327 bp, Setaria italica
  Peptide Sequence Number=SeqID_93243
cgtcacgcggctgggagaggtggcctttggcggcgaggcggcgcagggaggaggagatggatgcgacggcgcgggagagggcggcggggtcggcgtcgaggaggaggacggcgcagccggcggcggcggcgagctgggctatgcccgagcccatctgccccgcgccgatcacgcccaccgccgcgatctcactcgctgtcgccatggtttcgtctccgaggaagcggtcgggcttatcgtcttcggatccttctgagctctgaccactactgcactagagacaggagttcgcctgagacacgcaacaggggatatgcaaggcacacg

SEQ ID NO: 27270 - DNA, 350 bp, Setaria italica
  Peptide Sequence Number=SeqID_93244
gcggggaggaaggctggatcgcggccgcctgcgccgccgccgagagccgcaccggcgccgggccggggcgcgtcagcgccggaggaggggttggtcgccatgcggggtgggtgggaggggagccgatcggacggagggagggagggcgccgctagggttctgccgaatttaccctgacgaagaacagctcgctgttgttatttttggggggattttccggtggccgtttgatccgggacggaggcgaggggagaggggggttttggtttgtggttcgaaatggaatgagggggtgagagaccagaaagaaagtgcgtgtgcgcaggcagagcgaaccgggggagtgcgag

SEQ ID NO: 27271 - DNA, 351 bp, Setaria italica
  Peptide Sequence Number=SeqID_93245
gctcgagaagctccaagactgccctgccgagatcgccgagatggtgcggcggtgcgacccggccgagacaaaaaccctgaccaaggtccggtaccgtcctccgtggcaggtgatgctgggacgcttccagaggggcaccgtgacggtcgccggcgacgcaatgcggcgccattcttcggccagggcggctcggccacgctggaggacgccgtcgtgcttgcccggtcgctgtcgcggtctgtgccggacggtgtcgtggatgggagcacgagtaaccgtgaacttgaagagaagcagatccgttcggcattggggaaatacgtcagggagaggagaccacggttgttcttg

SEQ ID NO: 27272 - DNA, 438 bp, Setaria italica
  misc_feature (1)..(51): n is a, c, g, or t
  Peptide Sequence Number=SeqID_93246
nnnnnnnnnnnnnnnnnnnnnnnnnnnnnnnnnnnnnnnnnnnnnnnnnnngtgtcagaaacaatcaaacagatctcttaccccaaggccataaaagtagtattcctgagcaccttagtgcaatactgaaatgtagcagagacagtggagacatttgtacaccttagagagagtcacggccacactctaatactccagtagcacagcagaggcatcaatgaactttaggcactgcaacgtttggcttctgagctgtcttgtgcccagtttccaccactggtatgaaatccacatgcccatactcgcacaagcgaggcaacacacaagctaagcaggaatcacattgagccctcgccatccatcgccaaatgcagaagtacatcacagtcaatcaaactggcaatgcaatcaatgccaattgatgaatggaagacaaga

SEQ ID NO: 27273 - DNA, 320 bp, Setaria italica
  Peptide Sequence Number=SeqID_93247
ccttgcaagatcagcttaaagaatctcaagttgctctcttggtggagcaggaaaaggctgaggccgccatcagagaagctgatgttgccaaggcggcctggtcatgccgaatctgcctgaatgctgaggtcaacatgactatagtaccatgcggtcatgtcctatgtaaccggtgctctagtaccatgcggtcatgtcctatgtaaccggtgctctagttcggtttcacgatgcccattttgccggacgcaggtgtctagaatgatgaaaatattcaggccatagaaatactaaagctagactaaatgcccctttaatat

SEQ ID NO: 27274 - DNA, 4218 bp, Setaria italica
  misc_feature (4143)..(4218): n is a, c, g, or t
  Peptide Sequence Number=SeqID_93248
tatgactttggcaggggagttgttgaggatatcagcaaaacaaagtggcccacaatccacaggtctcaagccaactgaaaataatgtgttgtcatctatcattgctgagctcaaaggtgttccatttccaacatcgagaaagtgtctaacgaggcttggaatttctgaactctggatagccaatgaggagcagcagctactgatgagccctttgctggatcactttatccactataaatgtctggaaaagcccttcttggcactgctgctatccactctggtaatccatgggcctctgaagttgaggagtttttctcctcagttattagcaggtaatttgaagcacatacttgatgagcgttgggtacactttgcactaaataacaagtcctcatggattccttgggataataatgctgaaccatcaactgcctggccaactcccaaatggattagaagcttctggacaatatttagttccttgaatggtgacctttctcttttgtctgattggcccttaattcctgcttatttggacaagccggttctctgttgtgtaaaggaatgccatctaatattcgtgccaccaattgatgattcaaatacagttactgggcctgttaatgatgtatctggacagctggatacatcagatccgcccagagacgatgcaagagaagcggaacagaagaatgtacttgatactgcattcgagtcaatgaactcaaagtttccatggctacctgcactgcttaaccagttgaatgtaccaatttttgattcctctttcccagagtgtggtgcaatatgcaatttgtttccttcaaatagtcggactcttggacagacaattgtttttaagttggtcgcagcaaaaaatgttgcccatttaccttcgccacttagtctatcaagtggagactgcgataaactattcggattatttgtttcggagttcaggttagctagcaaccacttgtatcagagagaagaactggatgtcttgagaacacttccaatctataagacagttacaggaaaatacaccagtttgttaggatctaatcattgcattctttctcctagtgcattctttcaccccagtgatgaccgatgcctttcttgctcatctgatgcaaccttgtttcttcaggctttgggggttgaacaactaagcgaccatgaaatattagtgaagtttgcattgcctggatttggaaataaaacagctcaagagcaggatgccattttgacctacctgtatgctaactggaaagatctacatctgaactctgctgtagtagaaaccttaaaggagaccaattttgtggccaatgcaaatgaatcttgtaaagagtttttcaaaccaaaggaattacttgacccttcagatgctttgctgacttcagtattctcaggggagagaaataagttccctgctgaaaggttcatgtcagatgcttggcttggtatactcagaaaagcaggccttcggacatccacagaggctgatatgatagtacagtgtgcaacaaaaataagaaaccatggggcatgatgtcatatcgtcttcagaagatcctgacgactttgtggcagacttctcagacagcaaaaatgaaattccttttgagatatgggctttggcagaatctgttctaaatgtgatttttgcaaattttgctactttgtatgacagttctttttgcgaaaagattggaaaaattgcatttgtgcctgctgaaagaggttttccaagtattggtggtaagagaggtggtagaagggtacttgcctcatataacgaagctatcttgtcaaaagactggccattagcatggagttctgcaccaattcttaccaagcaaacagctgtccctcctgaatattcatggggagcatttcggcttgggagccctcctgccttcagtacagtttttaggcacttgcagattgttgggagaggcaatggtgaggacacactagcacactggccaacctcttcagggataatgacggtggaagatgcctttcaacggatcttgcaatacttggataaaatatggggaacaatctctttctcagaaaaaaaagaactggagaaactggcatttataccagttgcaaatggtactcgcttagttccagtgaaatcactttttgcccgtttgacaattaacatgtcaccttttgcttttgagcttccaagtcggtatcttccatttgtctcccttcttagagaaattgggatgcaggaaagcctaacagactcttatgctagagaacttcttttggatatccaaaaggcgtgtggataccaacgcttgaacccaaatgaactccgtgcagtgatggaaatcttggatttcatgtgttctggaatcaaccaaaataccacagatcgatcagatgggattattgattcagtaataccagatgatggctgcaggctggtcactgcttcatcatgtgtatatgttgacccatatggttctcatttactgagtaacgtaaatacatcaaggctaagattttctcatccagatctttctcagaatatttgcaagaccttgggcataaaaaaactctctgatgtcatcgtagaggaacttgatgaaaaagaaggaatcaagctggtcaatagcattcactcagttactctaggcagaataaaagagaagctgcgaagtaaatccttgcaagacgcattaagaattgtgatgatcagcatagccaatcatttcccttcatttgaagccctcactttggtccagatagaacttatactagaggacatatcacagaatctgcagctggttcaatgcatccatactcgttttctcttacttcccagtctccaagatgttacaaaaaccgttcagcatccttctattcctgaatggtcaagcaatggaatgcaccgaagcatttgttttgtcaacaaatctacgggttatatcctagttgcagagccccctagttttttgacaatatatgatgttattgcaattgttgttagtcacagattgggggcaccagtaatcttgcctattgcttcattgtttgcatgcccggatggttcagagaaagaagtccttaaaatacttcatctgggcactgacattggagtttcaaaacgtgaagggggatacgatgcttccctgggagcagagttgttatcacaagatgctcgtcaggtgcaattccttcctctaagaccattctatactggcgaaattgtggcatggaagacaggaaaagagggggaaaggctcaggtatggtagggtccctgaagatgtaagaccctcagctggccaagcactttataggtttccagtggagacagctcctggggagactcgcatgctgctttccagtcaggtttactcttttaaaagtgtttcaatggctgatctctcgtccacacctttccaagtggatggtgatagagtggcacaaggtggactggaggacctcttgtccatcaacactagcactgaagtcactgaggacttggctgctgggcttgaatatggcaaagtgtcttccactgagctggtacaagcagtccatgatatgctttcagctgcaggagtaaggatggatgctgagaaggaaacactgctgcagactactctttccttgcaagatcagcttaaagaatctcaagttgctctcttggtggagcaggaaaaggctgaggccgccatcagagaagctgatgttgccaaggcggcctggtcatgccgaatctgcctgaatgctgaggtcaacatgactatagtaccatgcggtcatgtcctatgtaaccggtgctctagttcggtttcacgatgcccattttgccggacgcaggtgtctagaatgatgaaaatattcaggccatagaaatattaaaggggcatttagtctagctttagtgtggatgtgttacgaattacgatattgggcttcctggttgtggtacagtacaaaaattgcgtatcattttccatgatgtgctaaactggaatggttgcggtgcggtggcccttcggtaggagtgtaaatatagttagtttgtacagccacagtgcattgcagtgtacagattattttacaaatccttgctccgatacgttgacaaaagctggtttacctnnnnnnnnnnnnnnnnnnnnnnnnnnnnnnnnnnnnnnnnnnnnnnnnnnnnnnnnnnnnnnnnnnnnnnnnnnnn

SEQ ID NO: 27275 - DNA, 356 bp, Setaria italica
  Peptide Sequence Number=SeqID_93249
cctttccttggcttgcttctcctttagagaaggatgaaccctttccaccagtttttaggctctcagatgaagccttcccatttgacttggagtgaacaggagtcagctcttcaacgaaaccttcagagtcagagccagagtcagaatccgaaagcaccacaactcctgcccggttgatcgaacccttgtgctttccatttggtagtcgatccattggcaaaactcgtcaagacccgcggaagaagaggtcagcccgggaaatatgagcctcccaccccgccccggtccgtccggaggacgccggaggaggggacgagggagaggcggggatttgggccgaggggcggagttccgct

SEQ ID NO: 27276 - DNA, 1055 bp, Setaria italica
  Peptide Sequence Number=SeqID_93250
cctctttttaaaaaaagagaattgcgcataaactcggatgcaaacagatagatcgagaggcacgaagcaacatatggcaacaagccagcagcttcattgttcaagctagtagcagcaagtgcagacagtatcttagcagttctgagtagactagttcaaccactcaactgattctgatgcacttcagcagtcagacatcctagaggagttcatgcagcacatgctacggtttctacatacacagaataacctgattatgcagaacacacaaaacatcgaaggggacggtttgcagtttccgtgttccttgatcagcaacatggctgcatagctccattggagattcacttggctgcttttatgttagcaagagcagcaagaatctcagtgattggaccttcgttaagtgtccgcttggccttgagagatggcaccagtgcatagacctcctcaatggtctcaggcccaatatttgctatcatgcaaatctcgccgtcattaacaccgcattttttaagaggttccagagcttgtttcacagagcttgcagtggtgaactgatttccatcttttgcatattggaaagctttgtcaaatgactcaggaattttgatctttggatcctctgataagatagccatatgctcgtgaatttcttgcaacagttcagctgcttcacaattcattagcatcctagaatttggagggatatcaagctccagctttagttctgcatcagacttagtaggaactacatttgatgaagtgccctttccacctttgccaccactgtatgcctttccttggcttgcttctcctttagagaaggatgaaccctttccaccagtttttaggctctcagatgaagccttcccatttgacttggagtgaacaggagtcagctcttcaacgaaaccttcagagtcagagccagagtcagaatccgaaagcaccacaactcctgcccggttgatcgaacccttgtgctttccatttggtagttactccattccaaattaaggaacaaaaaactaacgtaacaaaagaaacccgaa

SEQ ID NO: 27277 - DNA, 289 bp, Setaria italica
  Peptide Sequence Number=SeqID_93251
gccggcgccgaacccctccccgacggcgcccggatcaacggcgccgtcgtggtccacccttacttcctgggcgccgtcagggtggcgtcggaggagaccgaccccgcgatggcccgaagcgtggtgaccatgtggcgcgtggtgtgcccgggctccgcgggcgtcgacgacccctggatcaacccgctggcggccgccgcgccggggctgcgggggctcgcgtgcgggcgcgtgctcgtgtgtctcgcggagaaggacgtggtccgcgaccgcggccgcgcgtacgccg

SEQ ID NO: 27278 - DNA, 283 bp, Setaria italica
  misc_feature (231)..(231): n is a, c, g, or t
  Peptide Sequence Number=SeqID_93252
tgctatacaggtgggcagcaatttgcagagttaggggccctattaaaacgctagaatgctgggatgtggctgcagttaggtaaacttatttcagacgcactgtttaataggcatgtcaaggcagatgtttagctaaagcatgacttcatcgatttaagaatcaaaatagtgctgctagataattgccaagatacaaaatgcttgatgtatcttagcactacctttttttcngttgaagttgttggtagggttctaaagaatgtgacactgcttaaagcaagct

SEQ ID NO: 27279 - DNA, 791 bp, Setaria italica
  Peptide Sequence Number=SeqID_93253
aaaatctcaaggttgctgcaggtgctttgaagaagtacggtgcagaagtaacttgtgctgacagcggaaaaaaagcaatcgcactgttgaaacctcctcacaattttgatgcttgtttcatggacatacagatgccagaaatggatgggtgagtcttatccttcgctagtcatcatgcaaccctagtttagctatactcagttgatacacaatactttctcttgtcatacattgcttatgtttcttggcgggagtcactttatcatgcatttggtacattttgcagatttgaagccacaagaaggattagatcgatggaaagagatctaaatgagcaaatagaacgtggagaggtcctgcaagagtgtccaaacatccggcggtggagaaccccaatattggccatgactgcagatgtcattcaagcaacacacgaacattgcttgaaatctgaaatggatggttatgtttccaagccatttgagggtgagcaattgtacagtgaagtagcccgctttttcctaaatcaagacgaagttcagtaggtaggctcatatggaatgtaaaatagtggaggatatcgccaccagttcacccatcggggcacaaacagttttgtcaaagatcccatgttctcaagagtggaaacatttcaggctggagatggaaccatcaatgttcaattccttggtgcaccatctgaccgggctgcaaaactgaatgtacaattctgaaggcgtgtgaaaagtccagcagcattcactaactgcagatgtcctctgccactgtaa

SEQ ID NO: 27280 - DNA, 554 bp, Setaria italica
  Peptide Sequence Number=SeqID_93254
aaaaaaagaacaaaataacgaacaaactaagttaagaaaacctacctacaacaattttgatgcttgtttcatggacatacagatgccagaaatggatggatttgaagccacaagaaggattagatcgatggaaagagatctaaatgagcaaatagaacgtggagaggtcctgcaagagtgtccaaacatccggcggtggagaaccccaatattggccatgactgcagatgtcattcaagcaacacacgaacattgcttgaaatctgaaatggatggttatgtttccaagccatttgagggtgagcaattgtacagtgaagtagcccgctttttcctaaatcaagacgaagttcagtaggtaggctcatatggaatgtaaaatagtggaggatatcgccaccagttcacccatcggggcacaaacagttttgtcaaagatcccatgttctcaaagaagtagggacaagacaaatttagacaagaagttaaggggaccctaattaaaaacgactaagaaatagactagggaatagtaggactagacaattaaggta

SEQ ID NO: 27281 - DNA, 1071 bp, Setaria italica
  Peptide Sequence Number=SeqID_93255
ttaagtaaaggggttaacaaagaacgtaaggaatagacgggacggaccgaacggctgccactgctatcagggacgtaggaagactacctacccaatctggtccgggtgcactatgcgacgctcaatgtgaacaatctgcccgattatgtaggccgggtgccgcgggtgctgctgggtgaagagggctacggattcctcagacaggtagtagtttgagcagttccggttgatcgcctcatagtgcccagcaggattccggacaaagatggcgagctcatggacctcgaaacggccaaaggatatcttctccttgctggcctgttaaacagttttccaggagacaccacagcaaatttgcttgttagcacaattagcaaagaggttcaatccatcaaccaattcattgctagctgcaggacttcaagtaaaaacaattatctcatgaagtcagataggatcatgacttgacaaattcattcttcttgcatattcaagatgagttttgctttgtgcatgagtattcatcttatgtaaaacagtaaaagataccaaatttgtaactgcataagttacaagacaaacctgtttttcaagttgaagtttattgtagagattcttaatcagctctttcttctcatccaagtcttttgcgatagctccgtgtgctgcctgcactgccgagtagcggtccagcagctcagcactctgtcgtgtcaggaaagtaacttttccgccaggatcttgatgcattgttgaaactgaacagtggtatcagcttcatccttctttacagagcttgctaaggagacagccaaagaacgcagtgactctgcaaagccagtcacgcctggtgcagtgacacaactgtttagtctttcaaacagaccatgtatcctcagagcagatgaccgcagagcatcatactcaacagcccttctgtcagctgaacatttgttggtacgggcctcttctcttgcctcatgtaagcagttttcaagatgcgcacaattcttcttgatgaatctcagatgaattgtgcgcatcttgaaaactgcttacatgaggcaagag

SEQ ID NO: 27282 - DNA, 2929 bp, Setaria italica
  misc_feature (1)..(10): n is a, c, g, or t
  Peptide Sequence Number=SeqID_93256
nnnnnnnnnnttttttttttttagaataaataactagtaattgaacccttttattaaaagaacaactcaatttgaaacagcagaggaacaataaggcgatgctagctgaaagaatattcagtctgcttgaacgaagaagatgcctagcatcagtagctgagtctatttacaccagtgaagctgatcgtatatacagacataacttgaacaagcgcaactgcgaactgagagtctatagcaataaatttcagtatatatacacttgatagctttctcccttcatttctgcagccaatggtcaggcaggatcaggaaggtgttttcgtttcaacggacagcgtcgggcagcatggcaaccgtcaccacaaagtactcgcagcccggggccaggttgtaggggttcagcgtggatgcgggcggccgacggctgccactgctatcagggcgtggagctcctcccatctggtccgggtgcactatgcgacgctcaatgtgaacaatctgcccgattatgtaggccgggtgccgcgggtgctgctgggtgaagagggctacggattcctcagacaggtagtagtttgagcagttccggttgatcgcctcatagtgcccagcaggattccggacaaagatggcgagctcatggacctcgaaacggccaaaggatatcttctccttgctggcctgtttttcaagttgaagtttattgtagagattcttaatcagctctttcttctcatccaagtcttttgcgatagctccgtgtgctgcctgcactgccgagtagcggtccagcagctcagcactctgtcgtgtcaggaaagtaactttttccgccaggatcttgatgcattgttgaaactgaacagtggtatcagcttcatccttctttacagagcttgctaaggagacagccaaagaacgcagtgactctgcaaagccagtcacgcctggtgcagtgacacaactgtttagtctttcaaacagaccatgtatcctcagagcagatgaccgcagagcatcatactcaacagcccttctgtcagctgaacatttgttggtacgggcctcttctcttgcctcatgtaagcagttttcaagatgcgcacaattcatctgagattcatcaagaagaccccgggcgtgttcaagttctctcttcagggagttaacctcatctgccatagcactaagtctactttcagtttcacccaactgtttgactttctatccagggcattttgcagctctgacacaaggagctccttattcctcaactctaaggcatgatgatcttctacaggaacatcagaagtatcagccatagtaagttgtgtcagcatttgcccttccttatcgatgcttacaatcttgtcttcattgtcacgcggcaattctgtcatgaaagcatccagattagtacatgctactgaatcgagcaactgcaagttcagtgcacccgaaatgtcggtcatgttctcatcgccaccttctgtttgttttgatggctgttcggatgttgaagaggcctcatccatggccacacttgattcatcccgtatttgggtttgcctgcctccagacacctccaggttgcaatcattacatttaaatgcagaaacaagggaaccagacgtgcctttgcttcctgaaaccatgtggccttgcatgtactggttagataaccgttcctcaagatcctggattcgcttctcatatgacaagcatttttcctgatttgcagtgagcaatgacttgagcttgttagcaaactcatcctttgcagccagcgcctcagcagttttttcccttgcttttttctagtacagaatcaatctgctcttcatcaatagactcatatccatattcaacaccaagattgcagagagttgcaattgcagaagcaagctctgcttttaacctggcattctccacttctaacttactagttcctgcaatatcgatagtgtcataatcccccagaaaatcttggaaatccatcttatcatcagcactcagaagattttgctcagatttattcaaatttccactggtgctagaattgctcagtgaggacttgggtagctgtgacctctcggatttcagaaaaggcccaactagagactggggagcaagcttttccacatcatcaacatcaatgggaagtagatcacgatcaaaaggagtgacttttatgtcacactgacttggagaatcaaagagtcccatggaacccatgatatcatctggaatgtacttgacccatgtcctatagaaatcctctcgtcttgctttctcagtttcacactcagttgccagcttttccgcatatgttccagccaatccagtatacagcttaaaataagattttctacgtgctacctcagcaagacaagctctatacgcatgacccaagccactaactattttcaggttagcaaaatcatcttgatgactcatcccctcctggaatgcaatgagctcattcatgatgtctctgatattcatctgagtagactttactctttgcatggaaacatggaccaaagtattcatttcattctttttgtccctgcatttctcaagtaattttgtaagcatgtgatcaaaatttcgtattcggggcaagttatccttttcatgtacttcatagatgcgaccaactgctgagactgcatcatgaggacggagagaagcagatagctggcagcttgagcagtcatcaacaagcttctttgaagtatccacatctttgcttagagattgcataatgctcttctgctcactgatgactccctgatgctcttttatcagcttctcaagatccttgcacccacttgagctcataacattgaataagttatccaccctcttcttcagctccaagaagtttgccttcagttgcgacaccttcatctcaaactgcttc

SEQ ID NO: 27283 - DNA, 275 bp, Setaria italica
  Peptide Sequence Number=SeqID_93257
tactagtactactactactactactaaaatttgtactaagatgatcgtccctggctaggtaattagcactagtaattatgtttagttgctgcgatttggagattgatcgatcgagctagctgcatgcatgtaagccacctgtaaggctccggttcttgatatgcatgatgatgatctgatgaacgatggccatgccgggcaggcccctgtaaatttttggttgatccatcaaatctgatctgccatttcttcggcacaagtgccacctaattttt

SEQ ID NO: 27284 - DNA, 388 bp, Setaria italica
  Peptide Sequence Number=SeqID_93258
aaggcgagcaccacagacgcgatgatgatgaagtggtacagttttaggggaccatggggagcaaggctcctgtacataatctcgaggcagtcggcggcgagcaggatggagccgatgctgacgccggtgttgatggcggtctgcacggtgaccacgaagtagaacatccacccggaaccgaggacgtcggcggcgagctcgcggaagcggatgtggcgccggccgcgcgcctcgcagtgttcgaggacgcgggacatgagggagtactcgtagaaggtgacggcggccatggcggagagcagggtgaggcccagcgcccaccccgtcccccgcggcgcgtaggggagcgtcagcaccgtcgggcccacgatcgccgtcgtcaggtcgg

SEQ ID NO: 27285 - DNA, 471 bp, Setaria italica
  Peptide Sequence Number=SeqID_93259
tggggggtattagggagagaggacttgcggtggatggcggtggttgattcggttggttggttttggttgccgagatcgggaggcgggtgcgcgtacgtaccgaggacgtcggcggcgagctcgcggaagcggatgtggcgccggccgcgcgcctcgcagtgttcgaggacgcgggacatgagggagtactcgtagaaggtgacggcggccatggcggagagcagggtgaggcccagcgcccaccccgtcccgcgcagcgcgtaggggagcgtcagcaccgtcgggcccacgatcgccgtcgtcaggtggaaccccgcgtgccaccacgtacctgcggccagcaaaacctgagatcaattggccggccgggcggctcatcctgcttaaagctggaattgaactcggcaagtcatcagggacgaggaagaggcggcgggtgcatcgcatgcgttacccttggactcgagcacg

SEQ ID NO: 27286 - DNA, 1153 bp, Setaria italica
  Peptide Sequence Number=SeqID_93260
aagattcacatctcacacttatagtagtttgccaaaagatgtgtgctctataccctaattattggttgtgcgccagattgaaaaaaaaggtaaattttgccatagaaattcttataagcttttagcagttactgctaaattgtccgcttactttgatatactcttgttatcctaacatggttaatgcaattcataagttctatttgagaaatcatggtgaattttgatgcggcttaataaagttatctaatggactcttctcaatttctgaacaaccatgcatttctgggctgacaatagtggtggatgccaatctattaattctactaggtcaacctactttttttacagttaagagcagtgaatacattttccatatacttttccccaggaattaaaaatcgggagatcactacaggaatccacaatctataaccattttttttatttgtcaatgcatgggcaaacatatgtaagtatctgtcctacttaaaaaagcagtaattttccttatacttttagtaaattcatgttttgcaaatatacattatttttttgatagtacgtatctgtcctacttcaaaagcaataattcatgttttgcagatatacgcatatgctcacaagcatcatcaatattggtgctggatagtacgtatgccgccattgctcattatttcttgaattgtatttcctatcagactgggcaatctacaatgtaattctcttgaactgtagggcaaaaagctgatgcaacctcatcaaggttatggtcagcagcttatttagggcctccttggctagctttcagttcaagcaaacaaaagggaggttggtcaggagcttagcaggtccttggttggcattcagttcaagcaaagagaaaggagggtatggtcagcatcatttttggtggtcaagtaactatatatattgatgtcatggagaaatgtcatgttaacactattttttatctctctttcatggacatattgatatgtgagaactgattctacaggtggcaatttgttgaattctaacatagcctgattttttaaagaaacttttctcaccatcacagatatgaacatattcatttgaatgaagttcaatggtaaattctgatatggagaacaattgaacaataattgag

SEQ ID NO: 27287 - DNA, 779 bp, Setaria italica
  Peptide Sequence Number=SeqID_93261
attctgcatggtgctgacaataatgcacttatcttgtggattcaggggaggtcacatccaatgcctatcatctagaatatgcagttcaaatagagtgtctctgtctgcaattctgcagttcctttaaatggtgttccttttaatatttgtgcttattttaacattattattatcttattgaatgcttcatttattacaatataaatgtttgttacaatctaaatagttctgccagaaatgtagattgcctgccaattttccatttttctcatatggtttttgtggctgatttttgttccattttgtggttgaacctgcagttgacaatttcaatggcaagtagaccagttgcagtcgcaacagagctgaagaacatggagtttgaatatcactgccacatggtctagcttcctgctctttggtaagatgatgcttgattcttataaaaaatgcagtccactgctttctttattttgtttctttttttgtccattgcgttcttcctctattgctttgatatcaccagctaaacctcgaatcaggtatacagacttgtcagctttgattaaaaaagaacaatttagctaaaagcctgaaatgttcctgtcacatggctatttgatgataaagtcttttactcataagtcaagtgaatatgtagttacagaacaagtatgcttgagcagtagaaagcaagttgaatgcagttacttttgtctttattgttgattaatttagtcatgaataagaataaacaatagtttgcagcttatgggaaa

SEQ ID NO: 27288 - DNA, 377 bp, Setaria italica
  Peptide Sequence Number=SeqID_93262
agctgactcaaaaaagtgacgtttatagttttggagttgtccttttagagcttctaactggaaggaaacctgtagatcatacaatgccaagaggccagcagagtcttgttacttgggcaacaccaaggctcggtgaggacaaggtgaaacaatgtattgatccaagattaaatggagagtaccctccaaagggagttgctaagcttgcggcagtggcagctctctgcgttcaatacgaatctgagttcagaccaagcatgagcattgtagtcaaggcattgtcaccccttcttgcaaatgcaccatatcaggctgctgctgctactgatacaccttcagatgcctgacaacatgttcaattaagcattcatgtaaag

SEQ ID NO: 27289 - DNA, 475 bp, Setaria italica
  Peptide Sequence Number=SeqID_93263
tttattggatgctgatgtggaaattgaagagcaatctttgaaagcacctgctgcagttaactcaataactaggctatactggatggtgaagcatttatcaggcagtgtctatatttggcctcttttatctgcaatttttattctgtgcctgctgatgctgattgctgaaagttgaaattgttgactgatttaacaaaaaagggagaaattgttcattgcatagaaattgtgtagacatgcatctctcccaatgaactagtaagtgctacatgactcattttcaaagaacaatcctgccaaatgcaattttaattttgatatgagattattttcctgtgtttacctgttaagagggaacattctcttacatgtaccagtttcgttgcgctaacccagtagatgaaggttagactgtttgtcagtattttattgttctgtgtctttccttttgtcatcatctttaattagttttagt

SEQ ID NO: 27290 - DNA, 283 bp, Setaria italica
  Peptide Sequence Number=SeqID_93264
cacaggccgacggtgtgcagcacggcggggttgacggcggtggtggcaccgtcgacgacgaggttgtggccgctgatgaaggaggcctggtcggacgccaggaacagcgccgcctccgccacgtcctccgcccgcagcaccttcccgcgcaggacgttgtgcggcaccgtcatggcctccagctcctctggcccgacgcccatgagcgcgcagctcatgggcgtggccacgccaccgggggacacgcagttgactcgcacgccgtggcgcccgagctcccccg

SEQ ID NO: 27291 - DNA, 288 bp, Setaria italica
  Peptide Sequence Number=SeqID_93265
ggcacatcatgctgtctgattttgacctctcccttcgttgcgatgtaagccctactgttgtcaagtcttccaaccctggaccagatgcactgcagaggaacaaccaagcatactgcgttcagcctgcttgtatcgagccgtcctgcatccagccagcatgtgtcgctccaacaagttgctttggtccccggtttttctcctccaagtccaagtcaaagaaggagaagaagccgaagccaaagcctgagattgtgaaccaagttagcccactgcctgagctcatcgcgg

SEQ ID NO: 27292 - DNA, 410 bp, Setaria italica
  Peptide Sequence Number=SeqID_93266
gagggagaagcaggactagaaatagataaaagggaaaaggaaaaagaaaagaggagaaaagcaaaagggaaagagcaaaagaagcctatttgccaaggaactgggatcagctgagctctatgtggctttattcattctgcacaattgctcagctaagtgactttattcattccttgccgctttgatcaaaggagatgcaaattgctggtagggaagcacacaggttctgcctaagaaggcaagcttagcatcagacccatgatgtcccctacacgtaccggcgtaccagcagacaaactggatgggtgatggacgccctgagtttcctaggcttttaccatgcagagaaacttctttcgaaaaaatagcttgtccccagggataggagcaatattgagatttacatgtag

SEQ ID NO: 27293 - DNA, 229 bp, Setaria italica
  Peptide Sequence Number=SeqID_93267
gccgtggagtgctttggcggccgcccccgacgggaacggcctcacgccgccggagacgctccaatccagagtctaggcactcccgtcaataggtttcgcctcattctcagcatccccctccgtggagctcgtcatctgccatcctggtgtggccgccgaagatgcagatcttggcggtggggagagacagtggtggcgggccctcgtaggtggagcagcggtgatccgg

SEQ ID NO: 27294 - DNA, 627 bp, Setaria italica
  Peptide Sequence Number=SeqID_93268
cctcctcctcccgccggctggttgacgagcacgtgcagcttcatcccgccgaggcagtgcagctcgttgccgcagatgaagtaccggtcgccgggcgccgtcagcggcaccgtcgtgttgccgtcgctccgggacaggaacgcgctcgccgcgctgcagttcttgaacccggcctcgtccacctcggccagcgtgtggtacctggagtactggaacactagaacgtcgccgacggagaaggttttgccgttggcccacgacggcaagtccgcgctgagatcccacccggcgctgttcccgacgttgtacgaggtcgcctcggctctccgggccacgccgtggacgaacagcaggacgccgcacagcgccagagcaacccgagctccagccatggaggacgacgggctgtgcacccacccggagatatgtttcctgtgcagcggttgggatgacatgtagtcgttccatgcatgccaaaaaggctgggatatatacgaaaacgccggttcttgttgaagattggttacctaatcagctaatctctctcgagagcgcgctttccgcaagggactagctggttcgggcgcctgctaaagcttggttatttgggaggctgtcgtgtcgcgt

SEQ ID NO: 27295 - DNA, 402 bp, Setaria italica
  Peptide Sequence Number=SeqID_93269
aaacaagtcatgttcgtagagatttccattcatccggctgtctttttccacagattaacctgacagcgagcaagaactaatatgtacatacatgtctgttgcttgtcagtcaaaacagtaaacggaactaaaaaagaagtacgaataattaggctgggaaaagaggggggaagtgatcaagattcaagaacaggggagaaacacagagcaagaagctaattcagctttcaactccccgtaaacaaatacgagctcctggtgttaactgatcgcgcttctgctaccgacccgacgcgtctcttccgatccaagaacaaaataacgttacttgcctttgcaaatccgctccaatccagcttgatatgtgaggagaagaggagggtaggtaggtagtcttctagt

SEQ ID NO: 27296 - DNA, 387 bp, Setaria italica
  Peptide Sequence Number=SeqID_93270
ctagctacctggattcccatccctgaccctgtctggctccctccgtagacactccacgccacctccagatccgcgtcctgactcaagaccaacaaacaaatcgccggccaggagggagaagagaggatgggggcggtggtgacggcggtgatcgccatcgcggcggtggtgctgggctggatcaccatcgagatggcctgcaagccctgcctcgagaccggccgccgcgccatggaccgcgccctcgaccccaactacgacccggactcccccaccaacaccaccaccggctccggcggcgcctccgccaacgagccgctcctcggcgacctctccgcgtccaccgcgccgcccgccaaggccatctgatctctttattcttcctta

SEQ ID NO: 27297 - DNA, 452 bp, Setaria italica
  Peptide Sequence Number=SeqID_93271
ggctgaactcttgatggtacacgatagtcccgagcacctttctggtgtagacttgtaaaactcagcaaatcatgttcatcctccaagtaacgacgaatgagttttaacaacatttatggcgcaaccgcaagttcgactgcatttgaggacctaaacctcaatctaatttcttccggaaacttctcttttacagtttcagcagttgtaactggaaatggcagtgaacaagttactgagttaagcactaaaacacgatctgcagcaacctctatagccccagtcttcatatctgcattgatggcatctgccgggcgtggccggaccacccctcaacagcaatcactgactccactctcagcttgtttactatattgtaaacttctgggtactctggcaacgttgtcacctgcaccattccggagctatcgcgcagggtgaggaaggtgagcccg

SEQ ID NO: 27298 - DNA, 911 bp, Setaria italica
  Peptide Sequence Number=SeqID_93272
ggatattcctcagttcgtgactcaccgtgtctatcacttccagcttatgagcaataaataatcttaaccgaccaagaatccggttagttgatgatcggtcacccagtgcaaacaggataagatcacccgcctttgcatccggaagttccacaagctgttctttattttcggccttcaagctctccattctccataactttgaggaaaggcaggcccttggctccagctttggaagcttcagtgtaaacagttcctttctttaagtcagtgtttgaaaacactgtggcaccaccaggaacacgcagtgcctttattatacgtccattttccaatgtatccgcaaaaaccttgaagctagtgccctcatgtcctaaactaacatccgagctgatggtagatcattcatggtttggccattctgcgcggtggcaggatgatgtagggcctcatatctctgctcatcactgttccattcaaacattggaaaatctgtcacccaaagaactgaatttgttgacgtgtctatcaattccagtgctcataagctggaagtgatagacacgtcaacaatccggttagctgatgattgttcacccagtgcaaacaggataagatcacccgcctttgcatccagaagttccacaagctgctctttcttttcaggtttcatacttgataccagcggaccaattccttcaagatccccattctccataactttgaggaaaggtaggcccttggctccagctttggaagcttcagtgtaaacagttcctttctttaggtcagtgtttgaaaacaccgtcgcaccaccaggaacacacagtgcctttattatacctccattttccaaggtatcagcaaaaaccttgaagctactgcccaaaaatgcaccgctaacatatttcaac

SEQ ID NO: 27299 - DNA, 1572 bp, Setaria italica
  misc_feature (1513)..(1513): n is a, c, g, or t
  misc_feature (1530)..(1530): n is a, c, g, or t
  misc_feature (1546)..(1546): n is a, c, g, or t
  misc_feature (1560)..(1560): n is a, c, g, or t
  Peptide Sequence Number=SeqID_93273
taaagaaaattttaaactaaacttttaaacggaaagtaaatacgcttttcggtaggtatgcctagacttcttgcatagatgcacacaaggctctacaccatccttgcaccgcaccaaatcctgaagatatgaatgatctaccatcagctcgtgccctggcttatgacatgatttacaatggcgtggaggtacattctgttttcatctttttcagtgtacatgcaagctaactttatatattgccttaatctcttttagtcatatgatgcaccctaaagttcactattactactgatcttagttattcatttttttgtttattattttgcttaacaaattttcataccttatcacagatgcaagtctcatccagcacgtgtttcagaaaaaaagactaatgcacacattttatttacatattttatccatgatctatcgaatcgagtagccctttgatttcaaactaatgtttattgtagcattagacctaggattttacataaactttgaatcaggaatcttaatcaagttacagctgaggatacatattgcatgctggctggcatttggacatatgaatcaatgctaaatacaatttattttttatgaagtacaagccgagttcttatttgatttcagttgagcttttcttggatacaatatgggtccctaaatgaagataatactcataaatacttacaaccttgaccttacatatggtaaatcacttctctattgaactgcctgagtgtgtgcccccttttcctggtactagcaataatttgtcaaatatatgatatatctgtgttactgaaatatatgcaaaagattgctagatttaatatgtagagatagttgaaaaatatacgaaacatctaatatttggtcctgttattaatagattggaggtggcagtttgagaatctacaaaagtatgtacaacaaagaatttttgagatcattggtatctcacctgaacaggcagaggagaaatttggctaccttttagaatcttttgacatgggcgctcctccacatggaggcattgcctatggattggaccggttggtgatgctcttggctggtgagagctcaatccgggatgtgatagcattcccgaagaccacgacggctcggtgtgcactcaccaaagcaccatctgctgtagatcctcaggaacttaaggatctcgccttccctaagtctacttgaaacaccgttcaaaattttgggggttgaagaacagttagagttggttgcttctttatattttgaggcgcattcatagggaatgtgctttgttcacgagaattttccgaccctggaaaatatatagaagatggttatcacgccaaagttccggaaacatggattcatacgagtttcaagtagtgatgctatgcatctgtgtacatctttctcttgtaaattattcaacatcttacgcatttttgtgcaaaatgtgaactgcagagtgctccatttgttgcacacataaaaaaaaaaaaaaaanaaaaaaaaaaaaaaaanaaaaaaaaaaaaaaanaaaaaaaaaaaaanaaaaaaaaaaaa

SEQ ID NO: 27300 - DNA, 734 bp, Setaria italica
  Peptide Sequence Number=SeqID_93274
gcactgggtgaacaatcatcagctaaccggattcttggctggttaagattatttattgctcataagctggaagtgatagacacgtcaacaaattcagttctttgggtgacagattttccaatgtttgaatggaacagtgatgagcagagatatgaggccctacatcatcctttcaccgcgccaaatcctaaagacatgaatgatctaccatcagctcgtgccctggcttatgacatgatttacaacggtgtggagattggagggggcagtttgagaatctacaaaagtgatgtacagcaaaggatttttgagatcattggtatctcacctgaacaggcggaggagaaatttggctaccttttagaatcttttgacatgggcgctcctccacatggaggcattgcctatggattggaccggttggtgatgctcttggctggtgagagctcaatccgggatgtgatagcattcccgaagaccacgacggctcggtgtgcactcaccaaagcaccatctgctgtagaccctcaggaacttaaggatctcgccttcccaaagcctacttcgtgagacactgttcaaatttttgggggctgaaggacagctatagttggttccagtttcttctatattttgagcacattctagttttgcatggtagggaatgtgctttgtttcacgagaattttctgaccctggaaaatctatagaagatgctcgacgcaaagttttgg

SEQ ID NO: 27301 - DNA, 651 bp, Setaria italica
  Peptide Sequence Number=SeqID_93275
ggaagtgatagacacgtcagcacattcagtctttgggtgacagattttccaatgttcgaatggaacagtgatgagcatagatgtgaggtcagttgtttttaatcttctatcagggaattatactgcttaattatttgtacttttccaaaaccaacatggttattacttactgtttctgatcacattattttagacagctgtctatactttgtatctcgaaagagcttgatattatatcatgttggcacttgacattacaccattagtagaacttggtgctttaggttatgacattttaccactagaatacccaccattattgaaatcagtcttcagagtttgtacatgtaatcctagcatgttatggtacggcacacacaccaacaacaaacatattgaagacataccaccagacaatatgttcctgatgttacatgctaatgtcaattgattacagcagatgcccactgttctaaaattaggcccagtacagttagaatttgcaagtccctagaagtagccttgtctgattttctcttttcggagtatgcctatttttctgcatttatgaacacaaggctctacaccatccttgcaccgcaccaaatcctgaagatattgaattgtattcttacctattctagtcttcgt

SEQ ID NO: 27302 - DNA, 1426 bp, Setaria italica
  Peptide Sequence Number=SeqID_93276
cgggtgaaaggatgatgtagggcctcaatctctgctcatcactgttccattcgaacattggaaaatctgtcacccaaagaactgaatgtgctgacgtgtctatcacttccagcttatgagcaataaataatcttaaccgaccaagaatccggttagttgatgatcggtcacccagtgcaaacaggataagatcacccgcctttgcatccggaagttccacaagctgttctttattttcggccttcaagctctccattctccataactttgaggaaaggcaggcccttggctccagctttggaagcttcagtgtaaacagttcctttctttaagtcagtgtttgaaaacactgtggcaccaccaggaacacgcagtgcctttattatacgtccattttccaatgtatccgcaaaaaccttgaagctagttcccaaaaatgcatcactaacatctttcagctcccaatcaaagcgaaggtcaggcctatctgtcccatagcgatccattgcctctgcatatgttaaccttggaaatggatttggcagcttgatacctcctgccacttgaaaaacatgtctcatcaaatcttcattcaacttcaacatatcctccattgatgtaaaggcaatctccatatcaagttgtgtaaactccggttgcctgtccgcacgcaaatcttcatcctggaagcaccttgcaatctgatagtatttttcaaagccagaaaccatcaacatttgcttgaacaactgagggctttgagggagagcgtagaatgttcctggctgaactctcgatggtacaagatagtcccgagcaccttctggtgtagatttggataaaactggagtctcaatctcaacaaattcatgttcatcctccaagtaacgtcggatgagtttaacaacattgtggcgcaaccgcaagttggactgcatttgaggacgacgcaagtccagcactctaaacctcaacctaatttcttccggaaacttctcttttacagtctcggcggttgtaacaggaaacggcaatgaacgcgttactgagttcagcactaaaacacgatctgcagcaacctctatagccccggtcttcatatctgcattgatggcatctgccgggcgtggccgcaccaccccctcaacagcaaccactgactccactctcagcttgtttactatgttgtaaacttctggatactctggcaatgttgtcacctgcaccattccggagcggtcgcgcagggtgaggaaggtgagcccggcgtgcacgcggcgtagcgcaacccatccgcagagccgcaccctgcgcccggcgtccccggcgccgagctcgccgcacagcgcgtccctcggcggccactgcagcggctgcagcctctcgaccttcgcaccagcttccgcgggcgctgccgcctcctccg

SEQ ID NO: 27303 - DNA, 282 bp, Setaria italica
  Peptide Sequence Number=SeqID_93277
ccaagaaaagtacacattagttagattttatagcaggttaaataaataatagctacaaatacccaaagaaagaaggataacaaggaaatcagacaatgttcctgagtttcaaaaaccaatgaaagcctacaatttggaaattaccgcaccagttattttccataacttacaatcctgtaacattgaactgcgtactcatcatctcaaatttctaactgattaccagggttagaaaataacatacagggatcaagatatttacaactataacaagggatagca

SEQ ID NO: 27304 - DNA, 353 bp, Setaria italica
  Peptide Sequence Number=SeqID_93278
ttgccttcccaatactgtctttgaatgatttcggataacccccaatgtggtctcagtttgagaaggatgcctgtagacctgtacgttttctcgggctgacctaggattattattgtcataaccaggttcagatccctcattggagtttttattacggaagaagtgattgagctcatattttcgcctctgtagatcctgggcttcttctactgagtcaatgacagaatcattgttcgatttcttaacaagaaacagccgtgcttcatacctctgaaaaagttcatctagctcacactggatacataaagaaccagaaccatcgtaacactttggacaatatcgctgaccctcaa

SEQ ID NO: 27305 - DNA, 157 bp, Setaria italica
  Peptide Sequence Number=SeqID_93279
agaaaaaccagctgctgcaaagattctttgcggcgcatcacttgtccgtggctggaacattcaggaacatgtggttggtatggtggtcaagctattatcagcttctttgccctcagattcctcaatctcaacaactggaagcatgaaccactacctt

SEQ ID NO: 27306 - DNA, 433 bp, Setaria italica
  Peptide Sequence Number=SeqID_93280
agaacttcgcgctgctcgaggctaagatggcactgagtatgatccttcagagctttgagtttgagctcgctccgtcgtatactcatgcgccccatacggtgataatgctgcgcccgatgcatggtgcccagatcaagctcagagcaatatgatcgtctgaggatttgcctatggctgttggtttaacgggctttgggccttcatgtgagcagtgagcccaagagtgttgtgtagcattgggcctttagcgttttcatgtgttttgttcacttgaaaaataatcggtgttctgtcgcgtcaataggttgcatcttaggcccccttgcaaaaggaaaagggaaaaaagaacaattgcatcagtgtgcaaattcttttaacgttgttcctatcaagtcatgcaagatgaatccaagaacttaactctggcagcact

SEQ ID NO: 27307 - DNA, 548 bp, Setaria italica
  Peptide Sequence Number=SeqID_93281
tatcattcaagctaccagctccattgtggtacttaggtttgacaaacattgctgatatccgaactacttcatcatcaagaataataacggagtctttaggttgtgaagaagatgcactccgttcagcaccaaagctatgtgtgtgaagcattgctctatttgggataaaagatctcattgccccggctagaaagtcaaggtcagaagggccccatatgttcaccgacatgccctcgtctcctatgcctgctagagttagcaccaggcctggcagcccccctgcagtttctgagcacacgcgagtcaaaaagatatggtcaatctttgataacttaatcttgtgttcagtacagaaacgttgaagaccctcgccggcgttaaatataaacctttgtttgtcaaagaagagcaaaattgaaggtgaagtgtcctgtgtgtccatccctgtaccaagaatctgcacgtagcaggtggtgttgacggggttgagcttgcgggtcttgagctccatgctcccgcgcttcccgccgtcattcccctcagcccgc

SEQ ID NO: 27308 - DNA, 1446 bp, Setaria italica
  misc_feature (1)..(83): n is a, c, g, or t
  Peptide Sequence Number=SeqID_93282
nnnnnnnnnnnnnnnnnnnnnnnnnnnnnnnnnnnnnnnnnnnnnnnnnnnnnnnnnnnnnnnnnnnnnnnnnnnnnnnnnnntttttttttttttttttagtcacctgaaccccctacagcatgttcatctcacaattgagctaattgaatttttactatatatataacttatataatgaatgtatctgtattatgatattacagtgattagctaaggcctgcaataaatatgaatcctcaagaattgaacgaatgaccatgagcactacgtatatataaaccgccatatgtgagtgagcgactaagagccctcgaggagtcgtctctaataattttatgttcacctaagcttcagtccagctggttgcttgctatgcctatgaggcacccaaactcttcacaaaatcatggcctggggtggctcgtacccgctccggtgcgccttctgccatgtccatgccaccttgaggctctcgtggaggtcggtgtgctgcgccgtccagttgagctcccggttgatcttagcagggtcactgtacacctcagcgtagtcgcctggtctggcgggggaagtagtcgaccttgatgtcgactccggttgccttcttgcaggcttcaacaaactccttcactgaccgaccttttcctgtgccaacattgtatatgccaactctgcctctttctgccttgttgagcgccttaacatgggcgtcaaccagatcggtgacatcaatgtaatcccttacacaagtaccatcaggcgtttcgtagtcgctacccttaaccttcaaacctgggattatacccagcgctgcatcgaagcatgcacctgatatacgaccatgctcacgcaattcaggtctaggtgcctcacccagtctcccttctgggtcagagccaatgacgttgaagtatcttagaatcatgacagccatatctgctttcttggactttgagaagtccaaaatgatgtcctctgccatcttcttggccttaccatatgggttgatcggaaactggggagtttcttcagtgattggcatcttctccggctctccgtaggtagcacatgtgctggagtatatcagagttttcacactgtgtgttgccatagcttccagcaccactaaagtgtttgcagtgatgttgtggtagtacctcagaggttcaagtgtgctctcaccaacatacgcaacagcagcaaagtgcatgacagcatcaaatgcattctctgcaaatattctgttaactgctttcggatctcctagatcagcttgtatgaactgcaaccgcccaggctctgggaacaagttctggagaaccttgatcgccccgatatttcctctcgaaagattatccactatggtgaccctgaaggagtccttgagcaggcgaagagcggcgtgcgagccgatgtagccggcgccgccggtgactagcacgt

SEQ ID NO: 27309 - DNA, 392 bp, Setaria italica
  Peptide Sequence Number=SeqID_93283
ggaggggcggtaggactaggagggaggaaccagcgcgccgtgtgcggcgatttgggggagacgagcgaggggatgagagcgcggatggcggcgggtgaatgggagagggagaaaagcagctagggtctgggtaactgctgccgctgccgccgccggcctcggcggcgcgcgcgaggaggaaggcgaggaggaggaagacgaggcgaggaggggcggaaccggtggcgcagggaggttagcggaggcggggaggttaacggaggcgttttgtttcctaattctagttccgttccgtagcggttgagtggggtggggtgctgggcctgggcgggggctcctatggatagttaatatatctttgattcgctagcagcccaagacagcccatgaag

SEQ ID NO: 27310 - DNA, 360 bp, Setaria italica
  Peptide Sequence Number=SeqID_93284
caattgcaattcccctgatggttcctctcttagaagcgatgttgccatcctcaggccgcggtgcactgacccagctgcaaggtaattaatgatcccccaagtgtccaagaacctaacgatcctactcagatcatacagttcacctgtgttcccaacaagcccctggcactcggcaaaagcaagcctcttgcctgggttctccaagtacttggcgataactttattccttaacatggcgtacttctccggggtgtgccctggagacttccctgtaaagaagtgtggaaccacctgcctttccagcctatgcacaggtcccgggggagaaccaatctgagtgctttggcacgacatggagac

SEQ ID NO: 27311 - DNA, 2196 bp, Setaria italica
  Peptide Sequence Number=SeqID_93285
tttttttttggagtcacgggacctaataaataaacacttatatgaccaacacaggacactgtctaaatgaattacaatgatgtgtttataaatcatataacgctacagctggtgaaactaagctgagtaaaattcttatgaagtattccctatcctgcactagaattgtttccagaagacgatctcagcaactgatggtggttaggagtaaccgaactgggcatgccagagttgaacatgatgtttgatgcctgtggcgatggttgagtctggattgccgagagtggaaggcgaggaccgaaagagagcatctgcggccgctgatgcatgaatgacatctgaggcatctggggatgaccatgtccctgcatgttattggcgtatgcggttggcatgctggcctgaggcatggagcccggcacacccactggtctggggctcatgcttactggatttgacggcatggtgctactgcttccaggcattccagtagaacccaacatggctgacctcatccgggcacggtcagctgaaatccgctgtctcaccctctccacttgctcacattccttcaagagcaaagtctctacttccgcaaactgcttcaatttcaactccaacctctttaactgatgatttattacagtagcagctagtctttggacttcacgttcctcttggtccgcaaagagtttagacttcattgctgctgctgacagaccacacatggcagcatgtttcacattttctggagaaatggctggtgaagcaccattatggttgtgaaaaataggatttgcaccattgcccctgccatcagcatgcatgccttctgaactgagcctgggatcatcatctcttgttaaaaaagataatgctgcatgtgcgcatgatgctgcaactcttggtcctatcacagaggccaaaaatgcaaccaacgacatgacaggattagaagaattaatgaatggaagctcgtttccatgtcgaaaactttgaactggtatccctgaagtgctgccatttgaatctaaatgtggaaaaccattgctttgtgctctaaatggcatggatccattcgatacctcaacattctctagcaaaccatcttctactggaagccgaataaaatggtaaatacattgtgcctttgattttgttccaacatgccctgcaatgtcatcccagttgtcattgtacttctcaatgccctccaacagcaacaatgtttcttcatcagtccatttatcactatcattttccaatccatcattatccccatccactctctggaaatctaagctagaatgcccagtaatatatctcgcgtcatggaagcaatcagagcacagagcaatatctgcctccttttgtgatcggtaatgcaaacttggcaaaggctgtaagcaataactgcaagagctttcagacaaacgctccctaatcttcccgtccaagtctgcaaatgcagcatcaaaatccaccaactccgaatttgatgaagatgatgccatcgaagaaatgtcctccgcttggaggctacatttcggccggtcaaacaaaaccagaccatcgattgatttcaatggtgctgtgagcaattgcaattcccctgatggttcctctcttagaagcgatgttgccatcctcaggccgcggtgcactgtgttcccaacaagcccctggcactcggcaaaagcaagcctcttgcctgggttctccaagtacttggcgataactttattccttaacatggcgtacttctccggggtgtgccctggagacttccctgtaaagaagtgtggaaccacctgcctttccagcctatgcacagtcccgggggagaaccaatctgagtgctttggcacgacatggagacgaccgtggaactgcttgggcacgccatgcccctccattaggggaggcggggtgcacacatacaaggacgtcttgttggggtctgtggtgagggatgggtggtccggaagcaccccagagagcacctgcagctgcccgtgagagatgttctctagcaccggcggcggcgccgcagcagtgatgtcgccggaataagcagatcgctcggccgcgatcagggcgaggacggactggtgcggccggttgaccacgcggcgcttcgcggcggggaaggcggagatgggctcggccgtgggcagcacctccgcctcgcggtgg

SEQ ID NO: 27312 - DNA, 276 bp, Setaria italica
  Peptide Sequence Number=SeqID_93286
cgccgtacttcctccattggtgtccgtcgttgtgcggcgcgaaggtgtccaccttcctcatgcgcttctccttcctgccaagatttcatttccccccacaaacaaaaaggaaacgcaaatcaggcgaattgaaccacggaaagagcaaaagatcacccagagaaacggaaacccaagcggcagcttacctcgaattcatctgcgactgatgcgagctcggcgccggagacattgtttgtttccggtggaagaaggaatcgagaaatgcggggaggg

SEQ ID NO: 27313 - DNA, 595 bp, Setaria italica
  Peptide Sequence Number=SeqID_93287
gggttgctgatctccgggggcgtgcctcgccgcgccgcggcgctggaggagggcgagccgccgctggcattggtggccgccgccgccgccgcggacggcggttcttgcgccgccggcccggacgacgagtcgaagcagatggagacggcctttcccgaggaggtctggagctggaactcggagggggagagcgggaggaaggcgctgttgcacgagtgctcgttgtagtaggtgaccgcgtacaatggcgggtcgctgtggtccttctgctgcacctgcttcgtcgccgggcagttcatgttgtccttgtaggtgcatctgtagtagtacctggggaagttggtgttgttgatcttcttctcgccgtacttcctccattggtgtccgtcgttgtgcggcgcgaaggtgtccaccttcctcatgcgcttctccttcctcgaattcatctgcgactgatgcgagctcggcgccggagacattgtttgtttccggtggaagaaggaatcgagaaatgcggggagggcgggcggagaggacgacggccggccggggagggagagcaggcaggccagagcgcttttaattcggaagcgta

SEQ ID NO: 27314 - DNA, 313 bp, Setaria italica
  Peptide Sequence Number=SeqID_93288
tacagtacatcaatgctggtcagatatcagattatgtaacactagaaaaggacagtttaaccaggagatgtctttggggggcgcgtcaatgtgcaacatgttgcgtacctcttcttcgggacattgatggccctctccataaggcccttacaaggcgtgatgcatgcactttcgcttgctgcgtgcttttccctgctgtcatgacaggagttcatgaagaaaggggtgctatggtgccaagggggacaagaaaactgaaagagttgcacacattgcgggaagtgaatgtcggaaggggaaatgccgttctacg

SEQ ID NO: 27315 - DNA, 239 bp, Setaria italica
  Peptide Sequence Number=SeqID_93289
tattagtgccgagcctattagtgccgggccataccgggctagggtcgggcggcccatgtggaaatctataatgtatactggtttatttaattcgccactgcgcgttcaatgatgagaggcacaatagcgctaccatccttagaactaattcaatttgtacatcaaacctatgaagttcatattgttttattttgaaaccccttaaacatttcagccttgtaataaaaaaaaaaaaaaaa

SEQ ID NO: 27316 - DNA, 536 bp, Setaria italica
  Peptide Sequence Number=SeqID_93290
gcgggactcgtcagggccttccacggcaccagcagctacctgcgccacggcggcggcgccaacgagctcgccgccggctactccaagggggccgggctggccgccgagatcgtcggcaccttcgtcctcgtctacaccgtgttctcggccaccgaccccaagcgcaaggtcagggacacgcacgtcccggtgctggcgccgctgcccatcgggttcgcggtgttcatggtgcacctggccaccatccccatcaccggcaccggcatcaacccggccaggagcctggggccggccgtggtgtacaaccagcggaaggcctgggaggatcactggatgttctgggtcggcccgctcatcggctccgccgccgccatggtctaccaccagctggtcctccgcgctggcgccgctaaggccttcgcgtcctggcgcaacaacaaccacaccggaatctgatcgaagcaccaggaggtcgtcggcatccgtcgacacgatgattaattacttggattctacttggcgtgcgtgtattccgt

SEQ ID NO: 27317 - DNA, 496 bp, Setaria italica
  Peptide Sequence Number=SeqID_93291
tttttttttctacatagtgattgttgtagtttgtaaaattaagccatttatcacaaaacattatttagtattttacacggacatgacaaattaaatgtggccacatacaataaagatactgtcggtgtgcgcatacacacataccacgaccagtatacgtgcttattttcgtacgtacgtgtacggagacgttggatgaattcacttggcagccgcgtcaagcgtgaggaacggccgctggccgttgatgttgcccggggggtcgtagctgcagacgatgaagaccccccggttggcggcgcagacgacgcgcgcgcagccgatgcgggtggacctgcgccacaccacctgcgtgtagtggccgcacaccttgccggggtcgcaggtgttggtgctcaggtggtagtacctcttctcctccacccacgaccgcaccgcgtcggcggcgctccacgcccgccccgccgagccccagaagatgttctcccgaatggcc

SEQ ID NO: 27318 - DNA, 1134 bp, Setaria italica
  misc_feature (10)..(10): n is a, c, g, or t
  Peptide Sequence Number=SeqID_93292
tttttttttntttttttttttttttttattggaatcgatgggttagttccagcaagcaagagaatcaccagatcacacgcctgacgtacaaacttgatgctttctaacatggacttgcaagttgtgttggaatcagaccttttttttttgctgaccctagctaaacaatagcctgcccttgttcacctctcaaactaaaactatgcctcctcgcatcccatgcacatgctcaatccacacaaggaaacggggcaaggaaccgaaaaaaagtcaaaactaacgacaagaagaaaaaaaatagcagaaggatcgataatccccatgggactcaggatcctcctctcctgaggggcatgtgtgtatgtacaccggccaccggggtggccacgtgctgctaccaccaaccgggaaccttcttcccgccgccgcccgcggcggccactgcggcggcgcgctcgaaccgggacgccgcgcacgggatggtgatcccggccggggtgctcgaagccgaactcctcctcggcctcccgcagcagctccccgaagagcgggtggttgaagtacaccacggggaccacgtaccgcatcgactccccgccgggctcggcgccgcccacgtacaccgccacctgccccttgggcgtggtggcctccgcggcggcgtcctccagcagccggtccttggcgccgccgccccgcgccggcgcagttgcagcctcatccgccgcgccagcgaccgcccccacgtcagcatccgcggcgaggaggcgtcgttgtcgtcgcgctgcaccacgaactgctgctcgtgctgctgcttcttggcgcacaccgctgcagccgccaggggggacctcttgctgttggcgccccctgctgcttggaagggctgcaggcggaggtacccgcggccgcggcggcgccggcggcggcagagcgcccagcgccagacgctgagcagcttccggccgagccggaaccctccgtgccgcctcgtcagcatcgcaccggtagctagagcgaagaaaagggagcgcactcgaccgtgcaaagccgcctcccgctttgttgctgtgctttgtgtcgttaggaggagtggaataagcgacgtcggaattaaaagaaacgaaacgtaac

SEQ ID NO: 27319 - DNA, 409 bp, Setaria italica
  Peptide Sequence Number=SeqID_93293
tttactgaagtcttcctcccctttccaatctgagttggcgccatgagaccactggctgtcttggtcgttcttgctgatgatgcaaccctagaaactctctctgatttttcaacgactttgcgcttcgtcatcacaggcctggcgttattgcatctgatgctgttgaagcctggcttggcctcaccgagctgccccatggccatctgtgtgctctgtttctgtttctcgccacagagcggcttgtctcgtccctttccacgattgtatttgtccgttggcatcactcctctgtttgcatccttgagtactgccatggagttattctccgcgaagggctgccttttttctggttttgcttctttttgcactcctctttcatcagtcctcagcctgaatggctaggattgga

SEQ ID NO: 27320 - DNA, 198 bp, Setaria italica
  Peptide Sequence Number=SeqID_93294
ggtaaggaatgggaagattggtgaggcacaggagctgctgagggagatgacacatgagggaatccagcctaatagctacacatacaacattattgtctcaggattgtgcaaggagggcaaggcgtttgatgtgaggagagtagaggatttcattaggagtggtgtgatgaccccagatgttgtgacttacactagttt

SEQ ID NO: 27321 - DNA, 831 bp, Setaria italica
  Peptide Sequence Number=SeqID_93295
tgtagctccatcgcgaaggctgccgccgcggccgccaaggaggagaaaggggagaagggtgagactgataaggaggagaacgaggcgagcaagaaggcaggtggcaccaaggacaaggcgcgggggttgaggacgaacaagacccgcgccgcccctgtcaggaaggcagctccaaatcagaagactgaggacaatggctcggacagcgacgcgcctgccgaagggacgaagaagcctggcaagaaaggtggaagcagcgcggtggggagcggcgcgggggtcgccaagaaacggaacgccgtgaacttcctgaaccggatgaagcaaggctcggcaccctcgacggagcgcgtgtcgctgctggagacgctgaagctctccgcggcggcggagcagaagaaggccgggaagggcagcgagggcaagaaggagcctgccggcggctctggctccaagaggggcaggggcaccccaccggggaggagaaacatcggcaggccccctaagcgtgctgcggcgcccccatctccgccgccagcgaagagggcaagggggggcgggacaaagcgtgggggaggaagtgaagggacgggaatgggaaggcagtaggaattgatagactcagtctcagctgtgtgtaaatgctgtagggttgtaggagcgttccgagcttgtactgtatgccagtgttgtaggggtggtacttggttttcgaatggggaaactggatggactgacctgcgcctctcatggtctcctttcatgggacttgaaggaaaacggttcctccttggaaactgttgttgtgtatgaaaaaaaaaaaaaacaaac

SEQ ID NO: 27322 - DNA, 814 bp, Setaria italica
  Peptide Sequence Number=SeqID_93296
ccgagcccgtcccgccgccgcgagcgggagggcggcggcggcgccggtgtggaggaggcagaagccgaggaagcgtcggcgtcgacgtcggcgcgcgcggccctccccgcggcggaggccgaggcgctgctcgcgttcctcgagtcggtgcggaccagcaagccgggctccgtgttcgagcggcggctcgagagccaggatgacgcgaaatacaggagcaccatcaggcgccacgtggacctggagacggtcagatcgaagctggaaggcggcggcggcgcgtgctactcgtccgcgtccgagttctaccgcgacctgctcctgctctgcaccaacgcgctcgtcttcttcccgcgcggctcgcccgagcactccgcggcgacgcggacgcgcgccctcgtctccaagcacattcccgcgtccctccgcaaggaccagcccgggacctcggggaaggctgcggcgccggcgtccaagaaggccaaggcggaggccgacgtcgggtcgctgctggagaagacggcgccgatcatcgtctgccggaagcggagctccatcgcgaaggctgccgccgcggccgccaaggaggagaaaggggagaagggtgagactgataaggaggagaacgaggcgagcaagaaggcaggtggcaccaaggacaaggccttgaggacgaaaaaaaaaacaaacaatcctccctctcccgtcccggtttttctccacacgcagtaaaactgtaaaaatgaaaaatgaccctctcctaaatcaatttacgaagccgtccaaacacaagcgcccaaaccggctgtcagct

SEQ ID NO: 27323 - DNA, 246 bp, Setaria italica
  Peptide Sequence Number=SeqID_93297
gatccaattccctctcatcatgaacctcgacaagagcagtcattccgagactccggcagacacgaagcatgtacttgatgtcaaggtccggtagcacggcggcgatcaggaggaccgcatcggcacccttggaacgggcgtagtagatttgccagacgtcgatgacaaagtccttgcagaggagagggcacttcacaccagagttgcgcacggtctccagattctcgaagctccccagaaagtgct

SEQ ID NO: 27324 - DNA, 392 bp, Setaria italica
  Peptide Sequence Number=SeqID_93298
aaccaaaagtaaccaaagtaccaaccaaaattgcacttgaatattctcggcatgctgggaagcctttacagccttacaggtagcgtagctgggatgggacagacaaatgatgcgtttcttgaggtgttatgcaatccaaaccaatccacagcgcaaaaagatctgagctttccgacatctacctagctagctagcttgcttgcttgcttgtacaataatattcgaatcagagctgggtctgcagtagagagaagaggtttgagctctttctttgggcggacctggggacagatatggagacgcgcagcaccagagctgccgcctacttgctattcttcttcttgctcgtgcctcagaggcttgggtcttgtgccttcatcaatcgacaaggg

SEQ ID NO: 27325 - DNA, 250 bp, Setaria italica
  Peptide Sequence Number=SeqID_93299
acaaagtgagatattatatccttgttcaaagtttctgctggatcctggtgcctcatgtgtgtcttccacaactcactgaccagcttctccatctcctccggcctcttcccccgcgagagcccatccgagatccccttgagaacacggaggcggtcgatggcgaagagctcgaactcctccagccgcacctccagctgtggcgccgcccggtaggtcggcagggcacccgtgccgccgctgccggcggcgg

SEQ ID NO: 27326 - DNA, 316 bp, Setaria italica
  Peptide Sequence Number=SeqID_93300
tccacgccaatgttatgctcttctcggcttgtactctgatcatagccatcacggcgaagttgttcgcttgaccaggttgaggagggtttcaccataacaaaagaggagattgttgacagactcgactctgcattactgaaccagcatagcagctgcaacagcactgaacaagcagaaacctgttgaagaagctagcttgcggaatacataattaaataaacacatgcaacggtatgaaacgtccgacggcgaggtggtgtgtcgtagtatattaatgacacatgggtgtttctctttttgtttaggatttatgcgg

SEQ ID NO: 27327 - DNA, 234 bp, Setaria italica
  Peptide Sequence Number=SeqID_93301
tccaatccgtgcagcagcgaaccagctcgaggcaacatggcggccaccacttgcttcgctgctagaacccacttgcgggcgctagtggcgagccgcgacagccaccaccaccccgtagcaattcaatacgctccagctatcctgaaccctggatgcatgccagcacgagctgctgccgccgccgccgccgcacaccaacacaaaagctactactagtatagtagcagtaaaagg

SEQ ID NO: 27328 - DNA, 536 bp, Setaria italica
  Peptide Sequence Number=SeqID_93302
atgtaatgcttgatgtcagttatgtggcttgcggtgtgaaacatgctgcccttgttacaagacaggcagaggtatttacatggggagaagaatgcagtgggcgtcttgctcatggggttggaacaaatgttttccagccacgtcttgttgagtcattatctatctgcaacgtcgaactaatcgcttgtggtgaattccatacttgtgctgtcactgcaactggtgatctctacacttggggagatgctacacacaatgcagggctgcttggtcatggtagtaacgtgagccactggatcccgagaagagtttcaggtccactggatggtcttcaggtatctactgtatcttgcggcacatggcatacagccttgataactagttctggaaagttatacacatttggtgatggcacatttggagtcttgggtcatggaaatcgaaaatcatgctcatatccaaaggaagtggaatctttgaagggtttgaggacaatttctgtttcctgtggtgtgtggcatactgctgctgttgtg

SEQ ID NO: 27329 - DNA, 965 bp, Setaria italica
  Peptide Sequence Number=SeqID_93303
gtggctaacatgtacacgtgcgttatactagctcgtgcacgggcgccggggtgcacgggatacaaccatctatcggtcggcggggtgctctgctctggtgctccctccgaccgtctggtccatcgctagtccctgcagcagagcagctggaggccgagcttgaggggcgccgtctcgggctccggcggcggcgaaggtggcgcggcccggctcggcgtgtgcaggaacttgcagttggggcacgcggggctggcgcggcacatcatcaccagcatgtggcaccgcacgcacaccgccgcgaccatctcccggctgtcctcggcctccgcgggctgtcgccgctgtgctgcagctggcggtggcgaagctggcttgggcttcttcttctcgggagcggacggccggcgcggcgagaacgtgaggttcagctccaggtccagccccggcggcgcgcagttcgccgactcctcgtcgtcgtcgtcgtcggcgggcgcggcgcggaagtcctgctcgcctcttgggtccttcaacgtccgcttctgcgtcctcgtgttgtagtagtggatctgccccgactggatgtcgaggcagcgttgccactcgggtggcagtggcgcagcgtcgaaattgagctcgatcccgtccacgacctcgccgcggctgttctcgccgtcgtcgtcgctgccgtcccgcttccgcttcttgctggtggcggtggaggcgacggcgccgcccacgagggagaggcacggccgccgcttgttggcctccggcaggagcgccgactgcagggacaccatctgctgctgtcgttgcaccctcggtcggtgcggtgcagcagtggtagtagcgtacttgcctcggtcggggcgggccgggtgctggttcctggtgatgtatccgagtggatcaggggatcgatggtgttggctgctggctccggcgtgatgcgtgtgtggggggcg

SEQ ID NO: 27330 - DNA, 875 bp, Setaria italica
  Peptide Sequence Number=SeqID_93304
ctgcaggtgttccttgaagcctggtcttcaatgcattcttcagggtagaaattctattgccatgttcagcaaactcgctaaccaaagaataagcctcctggtttgccactttaccattggatagaggagtagcactgaagagtttctgccttttcaagcgtagggaggatatagagccttgtggaacttgcaattgctgatctacagttctcggagtatgtagaatggtttctctatccatcacttcattttgctggtgcagctgctcagcatccatcagcaaaatggcaagagctgcacttgataattgggaagcatcagtaacgttatttgttccaggtgattgatccaacagattgggttctgagtcaacattacacgtagaggaagcacttgcagtgcaatttgatccagatggttgatctttcaacaaggattgatctaacagatgggattgcatgtcaacgttattcacgaaggatttacatgctggagaaagctttgcaggaggttctacggtattatcaacaccagggtcaataaccatggggtcatggtttccgttctgtgaattctcatgaccatcagttatcatttcactatcttcttgaatttgatatgtgctgtttgaaactggattactcatggaaatgtgctccgcgatagtattaacagtgcccagctcatcagaagatataacattgtcattgcataagttttcttccctattttcttcctcagatgaaggcaaggttaaaacagaatcaggagttacatcagcaatgccagctttaggagactctgtttgctggcccacttttaccttctgtatcatactgctcagtgtgggtgatagcttgccataattgtaactt

SEQ ID NO: 27331 - DNA, 288 bp, Setaria italica
  Peptide Sequence Number=SeqID_93305
gatgatctcgtggttgaagagacggttttggtgattacatgagggaaaagaagactgtgcatgcattcgtccatgcaaggatctagggggaagaagaaacatggtcctaggctcctagctagatgatgctttaatttgcttcgttttcaagcttgggcaatggcggctgctcaatcttggaagggtactactacttttggtgtactgtacgcaatggacgaaggaggaagaagatgcggtggatgtgcgtggtggacacgttgcatgggaacgcaccattggggagat

SEQ ID NO: 27332 - DNA, 520 bp, Setaria italica
  Peptide Sequence Number=SeqID_93306
tgtcacactggctgaggcagactgccacctagtacgacatcaaagtgacccagtcaggctcacttatgagttggttgagggctcgtgtctccagtggcggtgctgctgccactgcttcttgtcatgggctggcgaacatgggtgcttgcatgtcaaggaggctgcggtgctgggcattatgctggctgggttggatattatgctaggcacagcagcataatcgtaagcgatacaatccaagtgaaagttaaaaaagccaaaatgattttttgcgaaggttataacaatgacatttcctgttagttccaagcaagtcttggtcgaagggtgtgtttgcaaaattatcccgataaccttccttgattctacccatgccagttgccagcagcactgcctggatgccaggcgaacacaattggcgcaccttcccacgacctcatgtccatgtcatctaatcctcccaccaatcaacttttgtgactagtctgagcattttgcaagacaatgatttacttctcac

SEQ ID NO: 27333 - DNA, 816 bp, Setaria italica
  Peptide Sequence Number=SeqID_93307
aagtgtcccacttgcagcaggacgcgtcatcgtctcttcctcctctgctcccccaccggccgcgtttcccccgatctctgcttctcgacctccggcaatgtcgctctctcggcctcgtcggggcagggaggaggaggaggaggtggaggaggagcagggcggtggccctgctggtggtgaggggtcaacgccggcgaagcgaccacggtgctcctgcccctgctgcttccgccaccagtgttcaaaagatttctacgagggccagattgacatcctcaagaaggaaatgcaatgtatgtcaaagggctttatcgaggagcgcaaagtcttccagagggagatgcaagaattttaccagaattcccaactgcagctccaggaacagatcagtgagcaaaataggagtatggaactgatccgggaacagctcaacaccttgatttcggatatacgtacacctggagaccatgttccagaaaacagtaatcttaggaccttgcctcatcaaaggaaagttagaacatgtcggttgaaatttgagagcaagtgctgcgaggacaagtactcgggacatgtcataactgcagatgatggtaaccctattacagtagctatatacgatcatgacaataagatcatcagaaatggacccttatcctcacttcaagttaagattgttgtcttggacggtgagtttaacaaggaaaataaagagcaatggagtagagagtccttccttaataacatcagagtatatggccggactgggaaaccacctttgcttgcttagtgtaacttgttattgttaaggtcttt

SEQ ID NO: 27334 - DNA, 424 bp, Setaria italica
  Peptide Sequence Number=SeqID_93308
tgggataagcgccaatgatgactgaccatgtggtggaatattttatataattttagcatggactataaaggccatatttacacaacttgatttggaaaggtttggttgcccattactccaaaaccaaagtaaagtatatatattttacttgaaataatgtgttccacagacaaaatgattgttttggattttggtcgaaggctcaaacaccttatacattgaaggcatacctactggctgtacacgtcgagaagtttcacatatcttcccatctatatcttttctgccactctctttccctacacatatattgcatggactgcaggtgagatcaagtatgatacacctgcttcgtttggttattggtccttcacttttcccctagatatcttccgaccgtttgttggcttccgtgaagttaggc

SEQ ID NO: 27335 - DNA, 701 bp, Setaria italica
  Peptide Sequence Number=SeqID_93309
caaattactacttagctggttatggtatcggtgtgctgagggtgtccccattattctgctgtcgtgtctttcaaaacatgcacaggacaatataaagttgggaagcattatcaaatgaaattcattccatcaagtgggataagcgccaatgatgactgaccatgtggtggaatattttatataattttagcatggactataaaggccatatttacacaacttgatttggaaaggtttggttgcccattactccaaaaccaaagtaaagtatatatattttacttgaaataatgtgttccacagacaaaatgattgttttggattttggtcgaaggctcaatactaccatcccctcgaagcaaaaggtgcactcaggggaaaaaaggatatcaaaagaggacttagctactcgtccattctcttttgcttgtcatttggacatccattgatagccacaatacacacatatgaacattagctttcaaaccttatacattgaaggcatacctactggctgtacacgtcgagaagtttcacgtatccttaaatctatatcttttctgccactctctttccctacacatatattgcatggactgcaggtgagatcaagtatgatacacctgcttcgtttggttattggtccttcacttttcccctagatatcttccgaccgtttgttggcttccgtgaagttaggc

SEQ ID NO: 27336 - DNA, 513 bp, Setaria italica
  Peptide Sequence Number=SeqID_93310
actaggtaggtgaccctattgtcctctgttttgttgattttgctgaagctactcaagctgctattgccatggatgctttgcaaggctataagtttgatgagcatgatcgcaattcatccaacctgcgtctgcagtttgctcgttttacgggtccaagggggaattcaggacctggtggacctcgtggtaggcgataagtttatggcgttcaaattgccagtgtaggcagcatcttgttctcggtggcgtttgtggagaacgacttctgctgatgctgtccctgtatgccaaataatttggcctgatggacgagttgtattgtgctccctcaatcccaatgcaggtccggttgttttggtttttttaatgcatagtttttctacgtatccatccacactgagggagtattagcattgctaacacaagtgatcactgttcgatacaataataataaccagaggcaacacagccagaatcgaagaaataaaacacagtatcaggtagaggcagtaa

SEQ ID NO: 27337 - DNA, 1241 bp, Setaria italica
  misc_feature (1154)..(1241): n is a, c, g, or t
  Peptide Sequence Number=SeqID_93311
ggcgggggccagcagcccatgaagcgcccccgccccaccgacttctcagatggacctggtgcacctgacatgaccggctattatcctcgtgatgaagaaagggcagggtatcgtgctgctagagataccgaggctcttaatgcgtcctacgaacgttttctgcgtactgggcaaattcaatcctatggtgctggacctgctggagaacctattaggcctgctgttggaggcaatgctggctaccctgttgatgagcgttcaatgatggctgctaggggtatggatagcagaaatattggtggttatggtggtggaatgccagagccaccccttccacctgatgcctcaaacaccttatacattgaaggcatacctactggctgtacacgtcgagaagtttcacatatcttccgaccgtttgttggcttccgtgaagttaggcttgtaaacaaagaaccgaaacatcctggtggtgaccctattgtcctctgttttgttgattttgctgaagctactcaagctgctattgccatggatgctttgcaaggctataagtttgatgagcatgatcgcaattcatccaacctgcgtctgcagtttgctcgttttacgggtccaagggggaattcaggacctggtggacctcgtggtaggcgataagtttatggcgttcaaattgccaggcctgatcgcattgaatacccatgagggatgttgttagtttgatcgtcgtttcagagatattacccccatagtaataggatcgttagcttgtgccttcagcggttccagctttgcgaccctggtcttgctagatgttttctagactgagtaaactagctgaacgtgataggtcagaatgttttgcgcgatcccgtagacgtgatgcctatcgctgaagccgtttgtaatgtgctgatttgtatcttcaggcagttttgccatttaatcggtggagtttgacgaatattgacctggctggtacattagagagcttgcatatttctccatctcgcataaaaggcttcgtagtctgtatttattttcgatttatatgaccatgcatttagtttactgtctcatctggcatgggtaaacaccccgagtgttgcatatccacatgatcttgtggaaaatatcagttttttctaccnnnnnnnnnnnnnnnnnnnnnnnnnnnnnnnnnnnnnnnnnnnnnnnnnnnnnnnnnnnnnnnnnnnnnnnnnnnnnnnnnnnnnnnn

SEQ ID NO: 27338 - DNA, 368 bp, Setaria italica
  Peptide Sequence Number=SeqID_93312
tctttggcttggggggcttggctggtagtggaggggtggatcaagccctccttgtttgacggcattccgaacagggacatgcttgatggcacgcaggtgcagctcaagtcagtggggcgtcagaaatacgtgagcacgggtgatggtggtggcggcaacgtgacagtggatcgggatgccgcttcttcgtgggagaccttcaagctgtggagaatttcaatgaatgaatttcagttccgctgcttcaacggtcagttcttgacagcaagtgatggcgacgccatctcagcgacagcagattcaccaggggactcggaaacattttacattgagaggaacaatacactgcttcatatcaagcttttaaa

SEQ ID NO: 27339 - DNA, 250 bp, Setaria italica
  Peptide Sequence Number=SeqID_93313
gcggcggccttgacgcgccgttcgcgtcctgctccttcttggatctgctcttccacggcgtgatgaaggccttgtgcttcggcttgtcggaagccgccgcggaggcggggggaggtgggtcctggaggtcgatctccgaccactcctcggcagaggcctccgcgtcggggcagtcaacgacgacgccgagcgcggcgaggcgctgcacgaggggcgccttggaggcgttgtactccgtggccgagatgca

SEQ ID NO: 27340 - DNA, 290 bp, Setaria italica
  Peptide Sequence Number=SeqID_93314
acacgtgggtgttgaaggcgaccccggccctcgccatttcgtcgaacaccctgcgcgcggtggccgtcatccgggccctggcgagggcggtgaggagagccgtcaaggcgtgggcgtcgggggcgatgccgcgggcgcgcatttggtcgaacacccgaacggcgtcgtcggggcgtgcggattgggagaggacgaggaggagccagctggggacgtgggggccgtcgtcggcgaggagggaggggagcaggagcggggaggagagcgggtggcgcagggagaggtcccgg

SEQ ID NO: 27341 - DNA, 900 bp, Setaria italica
  Peptide Sequence Number=SeqID_93315
gctaaaaatcgcccagctttgtttgtcaatgctaaaaatgctgcatctcatgatttcctttcatcttggtttcgcaggtgcagggagaagacggagaggtgagctagtccgcagagctatgtcaggttcgacgaactcaactgtagcggcggagttgacggtgcctgtcgagcagctgccttttgtgaatgacaagcatgggggtgttattattgagatggtggtgccaatggatcctggagtgttttcagcttcactgaaagcagcattggcgaaatggagggagcagggaataagaggtgtatggatcaaactgcccatcaccctttccaaccttattacaccagctgtggaggaaggtttctggtaccatcatgcagaggaaacatacttgatgcttgcatactggcttcctaatacaacacatacgctaccagtaaatgcaacccaccgtgtgggtgttggagcctttataatgaatgacaaaagagaggtcttggttgtacaagaaaagagcggtgtacttcgaggccttggtgtatggaaatttccaactggcgtagttgaaccgggggaagatataaatgtcggtgctgtaagagaagtaaagaagagacagggattgatgcagaatttgttgaagtgctagctttcaggtaacgactgtactcctgatcccagttctttcctatatttatctagtacagacttaccaggtatcttgtcacacttagctttattgtcccatactcccatttatccaatatatataccaacacgaagaaagagaagtattgttcaacatacttatgtgcagatatttttagttcctagctgctgctgctgctttgatcctagagaaccaaaaatatctgcacagaagtattgttcaacatactt

SEQ ID NO: 27342 - DNA, 1180 bp, Setaria italica
  Peptide Sequence Number=SeqID_93316
agtaaataaggttggaaaggtgatgggcagtttgatccatacacctcttattccaccagctgtggaggaaggtttctggtaccatcaagtatgtttcctctgcatgatggtaccagaaaccttcctccacagctagtaggaagtaaaggtttactaggtaaccaatcatgcagaggaaacatacttgatgcttgcatactggcttcctaatacaacacatacgctaccagtaaatgcaacccaccgtgtgggtgttggagcctttataatgaatgacaaaagagaggtcttggttgtacaagaaaagagcggtgtacttcgaggccttggtgtatggaaatttccaactggcgtagttgaaccgggggaagatataaatgtcggtgctgtaagagaagtaaaagaagagacagggattgatgcagaatttgttgaagtgctagctttcaggcagagccacaaatccttttttgaaaaatcggacctattttttgtatgcctgctacgaccactttcatatgacattactaagcaagactcggaaatagaggcatgccagtggatgccagtggaggaatttgcagcacaaccattcgtccagaaacacgaactcgtgaagtacatcctcgaagtcagtttggctaaagttgacaaggaatatgcagggttttcgccaatctccataaaatcagcattcacagacaaactgtccttgttttacttgaaccggagggaccttgacagggcctcaggatcaagcaaacagtaatgcacactttggtctgtgaaaaaagggtctgaatcattcatacagtacctgattgttttgttcaccaattggtagcttggggccttgggcatttgattttgaccgaacgttgtctgccggacgtgtctatgattcaaaggaggtatagcaacgcaaacgtatagctgaaactgttgcacttatgaatttgtatttgtaggtttacagacaataaaatgttggttgggcttgacaggagacttttgttgaaattagaaaattttatacagaattactaacgtgtcacttttcttgactcctgattcatacatatggtatatgtgtcagtgtcatgactcatgaatcgatccacagatgattgatgtgtcacaggtttagaaaaggaaaggagaaaaacagaatgagtgaaga

SEQ ID NO: 27343 - DNA, 497 bp, Setaria italica
  Peptide Sequence Number=SeqID_93317
ggttggcgaaaggcacttccttaacctcctggccggtgcggagggtgcagtagactccgagggcattgaccttgtcgaagacctccatggcgaggagccggagcgggctgcagtaaaccccggacttggcggcggcgaagcgggtgagtgcgttgtgcgtcttgccgctgttggtggggccgcagtggtacacgatcttgcggcgcatggcgcgcgcgaaggggtaccaggtgtccggcgccgtgaggtcggcggcggtcatcaccgacctgtgctgcttcagctcgtccgcgaagttggcgatgcagaactcggcgaaggccgggaggagtagcgcgtgcgcttcctcggcagggagggagaggagatgcgccgcggattccctggagaggcgcgggaggaggaacgtgcggaagcggcggacgtaggtggggaaggcggaggatgggacgtagagcgcgaggacgcggactcatcttgggctagtctactattga

SEQ ID NO: 27344 - DNA, 2032 bp, Setaria italica
  Peptide Sequence Number=SeqID_93318
gacgacgctcgcgggccgggcgctggcggccgccggcgcgcgccacatgttcggcgtggtgggcatccccgtcacctccctcgcctcccgcgccgccgccgcgggggtccgcttcctcgccttccgcaacgagcagtccgcgggctacgccgccgccgcctacggcttcctcaccggcaccccgggcctcctcctcaccgtctccggcccagggtgcgtccacggcctcgctggcgtctcccacgccaccgccaacgcctggccgctcctcatggtctccggctcctgcgaccaggccgacgccggcaggggcgacttccaggagctcgaccagatcgccgccaccaagcccttcgccaagttcgccgtcaaggccaccaccatcgccgacatcccgcgcctcgtattccaggccctcgccgccgcaacctccggccgccctggcggctgctacctcgacatcccctccgacgtcctccaccaaaccatccctgaatccgaggccgcggatctcatagcctccgccgccgccgagtcagccgcgtccaatccttccccgcccaagcaaaagtccctggatgagggcatcgagaaagctgccgacctgctccgccgtgcggagcggcctcttgtcgtgattgggaagggcgcggcgtacgcgcgcgcggaggaagccatccagaagctggtggacaccacgggcatccccttcctcccgacgcccatggggaagggggtcgtgcctgactcgcatccgctctccgccacggcggcgcgctcgctcgccatcggccagtgcgatgtggctctggtcgtcggtgccaggctgaattggttgcttcactttggcgagccgcccaagtggtccaaggatgtcaagttcatactcgtggacgtctgtgaggaggagattgagctccggaagccacatgtggggattgttggggatgccaagagggtagttgagctgatcaatagggagatcaaagacaatccattctgcttggcaaggtcgcacccgtgggttgaagccatcaccaagaaggccaaggacaatgttcttaagatggaggcacagctagcgaaggatgttgtgccgttcaatttcatgacaccactgcggataatcagggatgcgatccttgccgaggggagccctgctccggtggtggtctcggaaggggcaaacaccatggatgttggcagggcggtgcttgtgcagaatgaaccaaggacaaggctggatgcagggacatgggggacgatgggggtcggattggggtattgtattgcagctgcagtagccgaacccgaacgacttgtggttgctgtggagggtgactccggattcggattcagtgcaatggaggttgagacgttggtgaggtaccagctgcctgttgtcgtaattgttttcaacaacaacggcgtctacggcggtgaccggaggggccctgatgagataactggaccctacaaagatgaccctgccccaacttcttttgtcccagcagcaggctacgataaaaatgatggaagcgtttggaggaaaaggctatcttgtgaaaacaccagacgagcttaaatctgccctttcggaatcgttccgcgccaggaaaccagcagtcatcaattgtatcattgatccttacgccggcgcagagagcggccggatgcagcacaagaactgagtgagggtgtttgtaccatatcatagcgagatgtgcagatgcgactgaataagcaacgtcctccagcgtccagccattttcaaaatcttttctttgttttgcatccaggtgtgactgtgagatgctctgtaaacttagctcaacggttggatttgaaccgggtattcgcggaatgtagcttcatgttatccatttaaaaagacagtttgtagaccggtatgttccttttgttttcacttacaatgtaatgaggagtaagctgtaaaagggtcaacattactgccatggcttaatttggcatttcaagatgtgacactgtatgtatacttaatgaaaagaaa

SEQ ID NO: 27345 - DNA, 764 bp, Setaria italica
  Peptide Sequence Number=SeqID_93319
ctctttcattttgcttgccttcaactgattcagtcgctggacttcagattcaacctattttcattcaatatggtaaaattaattacttatcagctttcaagaagttactgatgtacttcatgtttttattttagtttcatatctgggctttacctgttgaattgtctcaagtgtgaggcttccaggacctaacataccatttactgaagtcattgcgagtatcttaatttgcccatatggttggcgctcctccatggtagtatcgagagtatcccataagtttgttaatgcttttacaaggttttggagctacaaaacaatacctgcatcagtaggcaaaaatgtatgcagttccaagattctttctttaatattctcacagtatatttcctgttggaactagcaacagcaataacttggtaatgctaaagttgtttataacttcaaaggtgatattttgtaagaagactaatggagtgtctggttaatgcattaagccagtttgctttctggtattcttgaactaagtatgctaattattttttatatgtatcactccctgagagcctgaatgtattaacctaaccaagcaaagtgtggctacattggttggtaccagaagtatgatagatcaccttctccctcctattgttcttctcttctttaagctgctgaacagtcatgttgagctttttgaggatgtcatcactgatattctttgtctgttgctcaatttaggtaaccaaataactaaaagaaacaaa

SEQ ID NO: 27346 - DNA, 1094 bp, Setaria italica
  Peptide Sequence Number=SeqID_93320
acaatggagttctatagtgaaatcatctggcatgtggaagtgactgtgactatggtggctcagctgtggtacaattatgggatattgattctccagagtcttacttatctttctctgcaagtgattcttatattacttcccttaaagtcaaccctgctggcaacactatcattacaggttctggtgatggtactattggcatatttgacatccgtacttgttctgcaattaaccatttgtcagtgggatctggttgtgaggttacatctgtttcatttagcaactgtggcacctatttttctgcttctagcacatcaaataatactttggtttgggatacaagattagtcccaataaatcaaagcaaggatgtttcgcaaagcagagacatgcggttttttcggcctttacattgcctgagccatgggaatcagatgcctactgcagaatttacaagccaactgccaggtcacgttgacgagggtgatcagggggtaaatgccacacagtggctgcatggtgaacctgtacttgttactgtaagtggagatggcagcgttggaatgtgggacgttactctaggtcaaccttgcgtcagacatatcgtcactcatactcgatgtgctaatgcggttgctgtagccccgaatgacgaatacatctccacaggaggaagtgatcagaaagttgttttataccataatagaagtgggcgcacacatcttaattggcgtctctcacatcctctgcaagggaatgattgatatgctgccagaaatcatagaattgttccactaatgtgctggtgagttctctgagtcaggtagtagttgaactttggcagaaacttggctgctccacatggatgtggagccatgactattgaagcctctgcttgatggacgactgaagcttgtgttaggccttaacattaatgtattctcatgcctctttacaagtagagtctgtatctttttattctcctgtaaagaaatgtttatgaaaccaacattatctcgactggtaataggtgaaattcgtagatcctgtttggatgggggggttggaatccaaacccttaggatctagttcga

SEQ ID NO: 27347 - DNA, 1978 bp, Setaria italica
  Peptide Sequence Number=SeqID_93321
aggtgcatacaaacatgctgctattcattttttttctaatagcattaggcagtagctgtaacttcacatattggacagagaacctgctgtagacatttaaaggggtaaaaaaagaaggaaaatcatattggtgaaaggccttgcttcactttggagactgatgttttatcttcttgagggattgaacagcttctgttattccccaacgcactctgcataactctgttcctaattctttttgcatgcatatctttttcagctggtgagttctctgagtcaggtagtagttgaactttggcagaaacttggctgctccacatggatgtggagccatgactattgaagcctctgcttgatggacgactgaagcttgtgttaggccttaacattaatgtattctcatgcctctttacaagtagagtctgtatctttttattctcccgttccctgtatttctcttcttctttttctttgagtgtcaacatgtagtctttcagcattgccagaagcggaagctcatcatagtagaagatcttgtttctctcctcttcccagaattgtgtcttggctattaactgttctaccaagcctggaattttgttaactatgattctggcacgctctgcccttttcaagtgcttgtgggctcctctgcttattgaataccttctctcatccctgctgtattcttctagccatcgctcttcatcacatgaagccatccatttctcaaccttgtccattatgtctttccggcttgtggcctcctcttttgctttgtatatatattcatccattgtctttaatagatcatcgtggacaacatctcctgacattatcagattcattattttgtccatttctttttggtaaggcatgtccatgtgtgatctcttgcaaatttcgtcgacttctgctctcttttttaggaataactctttcattttgcttgccttcaactgattcagtcgctggacttcagattcaacctgttgaattgtctcaagtgtgaggcttccaggacctaacataccatttactgaagtcattgcgagtatcttaatttgcccatatggttggcgctcctccatggtagtatcgagagtatcccataagtttgttaatgcttttacaaggttttggagcttctccctcctattgttcttctcttctttaagctgctgaacagtcatgttgagctttttgaggatgtcatcactgatattctttgtctgttgctcatttggtccatctagcaaccttgggtgaacattagcaagtatctttgaaggatccattcccatgacttttgcaaaattgtgaattagaactttgtattcttcaactttgcagagacgatcactcttttctcttttcagtctttgcaattcgctttggaattcctcgagtttcttcagtgacagatcttcttcattcagagtgacagcttcgttccccaagcgtcctgcaatttcagaagcaattctttgtatttcagtttgaacctccatgaactgctttactctggcttcttttctcatctgcatttcttgtagggctggtgtaatggaattcagctgctcctttagagtgcctgccattttctcaggtcggcctgggaatgatctttctccaagggataggagcaggttggtaaattcagcttcagattcagctaatgcttgatgcagctgaatccgagacatattcgcactattaacttttcttctgtaaacttcttggcactcctgctcgaaagaaatgtttatgaaaccaacattatctcgactggtaataggtgaaattcgtagatcctgtttggatgggggggttggaatccaaacccttaggatctagttcgaagtttaaactaaattcctagagcaacccccttatccaaccacccctgtatgagccaggttaggtgattccctgtaccaataccatcaaccagttgagaactcacccgttccctgta

SEQ ID NO: 27348 - DNA, 365 bp, Setaria italica
  Peptide Sequence Number=SeqID_93322
gggtgaaaagaccctctcgccgaaagcccaaggtttcctgttcaacgttcatcggagcagggtgagtcggcccctaaggcgaggcagagatgcgtagctgatgggaagcaggttaatattcctgcaccgtcgtatgatgcgatggggggacggatcgcggaaggttgtccaactgttggaatagttggttcttgactcatagaaggcgcttaggcaaatccgggcgcgtaattcaaggggtcgagacgtgtgcccttgtggcacgaagcaatcggaagtggttccaagaaaagcctctaagcttcagtcatacgagaccgtaccgcaaaccgacacaggtgggcgagatgagtattctaaggcaa

SEQ ID NO: 27349 - DNA, 926 bp, Setaria italica
  Peptide Sequence Number=SeqID_93323
tttatgagccaccacaggtcattctgcctcacatggcagcagtgcaccttacacaagctgagcaccggatgattgattctgtggaaacgttgataggggaaccgctgagagatgatgggccagtgcttggtgttgagtttgatccacttcctcctggtgcatttggtgcgcctattgttccagagcaaccgaagcagccctaccgatcttatgaacccaagatgttttctgggcgtgatcccaagcccatgaaggcatcagcatttttgcctactatcgaccctttgcttccaaatacagttaatgggaaacggaagtccttggttgggtcttcttctcatcttggttcacaggcagtacatgaataccagtttcttccggagcagccaagtgatgtatatgagagggcaagccagtcgcgcttctatgatacttcaacagaggcatcaaattcgaggatagcttctctgtctacgggatcacgatttctccatggagttgagcaggcacctagctatgcgtttcacggtcaattatctggttctagccatttagctcaacatggcagatcacccattccatcaggatcaacagatcatgagggggctttgtcaaatattaatgttagcccagctccatttcatgggcaattcggcattcctcaagttgctgggtttgaaaccccccttgcatcctctgaaagaatgggttatcatgatgaagatacctatcgtgtggatagaaagcgcaagcataatgaggaagctaagatcgcgaaggaagttgaggctcatgaaaaacgatcagaaaggagcttgagaagcaagatctgctgaacagaaagagagaagaacaaatgcggagggaaacagagagacatgatcgtgaaagacgtaaagaagaggagaggttgatgcgtgaaaggc

SEQ ID NO: 27350 - DNA, 1438 bp, Setaria italica
  Peptide Sequence Number=SeqID_93324
cccattgaaggatgacgtccccctgactaggataggcatatcaaatttggatgatggattagaaacagtatttaccactgccgacacctgatcagctgggtaatcattgacaggtattgcaggggtaccatgcatatcacattggtttgcagttatagcaaactctggcttcttagaaacatcaatctcatcaactggtgaatcctccaactgagaccttcccattcggacccttgcccttttgaccagtggcaagtgctcatctccatctgacttattcacgtcattcttcgaatttggagaatctggaaggatttcactgtactcagcctgcaattcttcatctttgtttgatgctgtacaatctttataatgaggtggctttctatctgcttttctttttctcttgaaaattattgcagggtctattggaagaattgatgtaccatttgatttcaattctgtctctgaagctccattttcagatgcttcactattacaggtactatctgccttagcaggaggattcaactttccattgctgctaatagtccccaaagctacagattggttgaaggtgcctgcactagaatgcaaccaaacattatctgatgtagaaacagaacctgagttagctttgtcatcctctggatgcttatgacgatccgaaagattgccagaaccttgagcctttcttgattcaacacttactgaacttcttgacttccgcagcgatggaaccctactacgtgtataacaatttttcggttgtgcatcccttggcttatttgaaaatgaattagtacacagaggaatatccctcatttcatcaaggatggatacattttcagtaggctcatcaggagcagaatttacaacacaaggttcgtcacccttcacagtgacagaaggtccatcagaactgaccatatcatcactcctggtagtgatagaataatcttctatctttttatcactatgcacatttgagctattgaccagattttcagtatccatgcagctattattttcagcgagcttttctacacctggcttcacttcatcagcagccaagtcaagcttattattatctttgtccttcaaagaatcataaacttcaattatttcatcaactgctctcagaaagtcagcccctttaccatgtcgcttagcaagtagagacctttttttctcttcagtgaatgcctctagatcagcataattgcagaaagcaatctgtttagttccgtagaaatagaccagcggcttctttttggatgcaggaggagaaaggttccattgttctggttcacttatcatggcaggccacgccgggaagcccttcatcttagcgagcacgaggtcgcccaccttccactgcgccgccgcggcagctgcggcagcagccgcggccgcggccgcttcctcttcgccggcg

SEQ ID NO: 27351 - DNA, 366 bp, Setaria italica
  Peptide Sequence Number=SeqID_93325
ggcgttggcggcgggggagaagcagcggatgccgcagggaaacgccgcgcaggggtcgcgggagaagtcccacgacgcgaggcaggagtagggtgggacggaggacgcggccaccgcggacttgagcgccgccagcgccgccttgtcgcccgggaacgtggccgcgggaagcgccgccgcgcgccggggtgcgagcaggaggacgggcagcagcagcgctagcaggacgcgacggctaaccgaggccattgtcgcatcgatcgaggagcgctagctagcgcggtgtcgtgctttggctttgagaacggcgctaaaagtcgcggagaggttggctggctcctcgctttgagcgactgagtgggaagg

SEQ ID NO: 27352 - DNA, 787 bp, Setaria italica
  Peptide Sequence Number=SeqID_93326
tgggattctatcgatggctagctgccattcctcacacaaactgtaaatatcagagttctgggctttggtcagcgggtcgtgatggcagaatagcgataggcgaagccagccagtcagtgagtacacataatccctctgggacgtcacgaggctacagaaggccgaataccatctgtcaacctctatctcaagctgaagagctgcttgtcggtggacattggaagttgggttcgtattccgagctttcagatactcaagctgttgcacgatgtgggtctgaacttgatgacactcgtacatgcccctccacatgctcatcaagccagcaaccagctcaagaagctggggaaatagctctgattctctgagcctaattatctcagaagtggtggtttcgatggactggttagcaaccagcattttggactcgaggctctcaatctccatcttgttcttttccatcttcaagtaatccacgcccttgacctcctgcttcctcaacagactgaccttcttgtcatgctcttgcttatacccctcgtagctcttgacctcaagaaacagcttcttctcccatgcgtagagcttctccacggtggatgaatggctgagcattccaccgcctccgccactgcccatgctcatccctccgtctcctctcccaaaccttgtgaacccattcgctacctttcccataccctcctcctcccaccacccccaggtcccatcccatgggcttcaagctcttgctgtaactcagtaccttccctgggagctgctgtgttgc

SEQ ID NO: 27353 - DNA, 412 bp, Setaria italica
  Peptide Sequence Number=SeqID_93327
gagcgacgctgtcatggcgcggtggctgcagtccgcgggcctgcagcacctcgcgacgtcctccgctggcggcggcgactaccgtggcggtatggccggactcgggggtgccggcgccggaagcatgctgcctaaccttctcatgcagggctatgggccacaatcggttgaagaaaagcagagactttatacacttttaagaagcctaaattttaacggagagtctgcagcggtgtcaatgtctgagccctacacaccaacagctcagagctttggtggggggaaccctgtagaggggttttattcccctgaacttagaggtgaccttggggctggccttctagaccttcatgctatggatgacactgagctactgtccgaggatgtagtatccgaaccacttgaggcttcg

SEQ ID NO: 27354 - DNA, 657 bp, Setaria italica
  Peptide Sequence Number=SeqID_93328
actttaaccttttacctttaaatagacaatttaatagactagcactacctagaaccctacccgatgatccttgttaattacaccactagtggcagctgaggactttgaccttaatgaggcacgacgtgcagattgagttgctgaaggaattgatagtgccccagctgtggaaatagctgctccagattccgagttatttgcagatgacaatacaggttttgagactgactcagtgcgctgaactctaggccaaaggaattcttcaacagctgccagacttgccaacgggtcgataagaacaatattggatgaataatccttaagcgacttttcacctggcgctcgacaaaggcgcaacttgaagggctgtgaaagagttcctaaaccagtcaccagacgcgatcctcccaaagtttgtacccttccagaatggctaagcacaactggaaaatgctccaatgaagagagtgcaccttgcagtttctgaactagcaatgccataggagttctattcccatcttcataatttggaagggcaacagatataaatgccttatatcgcctcactgcctgatgacgcaaatttggtaagtttgcttcaggcaccttttccctcccaaatgacccacatgacagatagtttagcaatgctgtaac

SEQ ID NO: 27355 - DNA, 808 bp, Setaria italica
  Peptide Sequence Number=SeqID_93329
tccgaagatccagaggaggaggggcaccccggcgtagaagagccggttgccgacgaggttgagggtgaacccgcgctccaggacctcgccgatgtagtccctggcggacggcaggccgatcaggtcgccaccctcgccggagcctgacgaatcggcgacgaggcagccggaggtgttgatgaggaagctggcctggttgaggaagcagatggcgagggagtggcagaggaaggcgaagaggaaggcgagcagcagcgccacgtacttgagcgccatcatgtactcgccgtgcgccccgaagacggtgtcgctcagcggcttcttcaccgtgtaggtgctgctcagcaccgccgcgatgcccgtgcagaagaggatcgccgtcgtcgccatcagcgtcgagcccatgatcacgttccgcacggactgcacaaccgtcaccgcgttcttcgcgttgtccttcatcatgccggcggcccagaggcggcgcgcggcggcgttgatgccggcggcggtgcggagcgggcggaggcggatctcgcgccacagccagacgtggtacgccatggggaggagcaggctgagcgggatcagcgccaggtccaggaagctgtccctccactccatgaccggcgacaacacgaaatcaaccaacgaacgggacgctagcagctacacgcgagcaaaagcttcaagcctcttctcaggaatttctctaccaagttggagcctacttgtgctagcagaacgcttggctctgacctgttggttggaacgcgtcggattggtggtggggggagaggttgctttt

SEQ ID NO: 27356 - DNA, 592 bp, Setaria italica
  Peptide Sequence Number=SeqID_93330
aatacacatctcttataaatggatactgcagccagggagaaacagctaaggctgaagatcttttacaagaaatgatggataagggaatgaagccagatgcactcacttttttcagtattcaatcagagaaccgtgagaggttgaaaggttcattcatatttatgatgtaccagttgttgtgcattgatgaatggctgaagagatcatgccagcataaaggctgttgtgttctgagaatcctaccagattaggttaccattgattagtgggcttatgtctgtcaggaaggcagacacctggagcgcgggaagactgccctctcagcacagctttgggtcttcaaggagaacgaaatgctggtactttcagcgtcaggaccaatgactaccaatggtgctgtgcacatgccatcgtggcaaagcctgctgtggcagctgcgccaactatgaggttttaccggaccattttgtgcccgggactagtgctgtgttcccacaaccaagaggggaagttgaaagaggtaagctctccagggtcctggtcccaggccatggggagctctcgatgcccctgagtccatgctgcgccacat

SEQ ID NO: 27357 - DNA, 483 bp, Setaria italica
  Peptide Sequence Number=SeqID_93331
acattcagcttgccaaacttcacatgcaagattaactcgcaactcttgtgtgcagtctgttacaagtctataaggtccgttacgggtctctagctgaattggttagatggtctcagtagcactcctagagtcctgggttcaactccccgtgggagcgaattttaggctagggttaaaaaatcaggtcaaggcctagcccaggtcggctcgcggctgtggttggtttgggccctcctacttggtggtagttgcagtggtcgccagcccagcagtagtctcacaggggttatggaccatgtgtaagggggttttctcgacctgtgtaaggtcttctcttagcaagggttgtcttacccccgaaggtcaagttttttttaaaaggtccagggcataaactgggttcatgtttttcaaaagtgataacctatatgaagtccctcgaaaacagttgtttagccaagcatacacttgtgccaatttgtt

SEQ ID NO: 27358 - DNA, 608 bp, Setaria italica
  Peptide Sequence Number=SeqID_93332
agatggggaagaaatacaaggggataattcttgcctagacaagccggcaattcgatacaaattgactaggctccaattcctgaatttctttcacttgtagagaagaatactaaatggtggtggaaatctcaatacctacactaaccaacttcaaaagaatgtatcaccagcaatcactagcaaggtatgaggctagttgatttcagtaagtagcagcaactggtcaatcacagcaaaaaagaatatggtacctttcttgtttgatctgtgtttgtgtttgttctagactaccatatcatccagctggagctgctcaagccagctgccgatgacaccagcagtgttgtcctcgccgccaccgataccttcatgacttgctgcctgactcaaagtgccaatggactccattgcagttgtcccattgatgaatggttctcaggcgttggctccttcaccagggtattgacccatgagaggtccggctcatcaccgttggctccgctcctgagctcaaacgacgaggaccgcttgaggcggccgagttcctcatcgtcagcaccccaatctggggtgaaccggaaaaaagggaaaaaaaattaaaaaacccc

SEQ ID NO: 27359 - DNA, 275 bp, Setaria italica
  Peptide Sequence Number=SeqID_93333
accgtcgtcgtcgtcgcggcggacaccgtggtgagaggggtggtcgacgcggtggtctgcggcgtggccatgggcgactgcttgtcggagccatcggagatggacacggccttggtgccgccgcagccgcacatgaagccgcgggcattcttcttgatgcgcagcccgccgccggcgccgcgccggcgcgacatcatcaggaccttcatggaaaggcttctccgatctgacgacgggagagtgcagtgggcgtggatagagaggcggcggccgga

SEQ ID NO: 27360 - DNA, 571 bp, Setaria italica
  Peptide Sequence Number=SeqID_93334
gcgtcccgccatgggcaactcgctcgcctgcttctgctgcgccggcggcggcgcagccggccgtcgccgccacgtggcccccgccgggctcccctccgacccggcctacgacgagggcctcggccactccttctgctacgtccgcccggataaggtgctcgtgcccttctccgcggacgacctcgtcgccgacgccaaggccgccgccgcggccgaggaggccaccacgttccgggccatctcgggggccgcgctcagcgccaacgtctccacgccgctctccacctccgtgctcctcctcctgccggacgactccgcggcgtcgtcggccgccgccgcctcgtccgggttcgagagctccgagtccttcgccgccgtgccgctgcagccggtcccgaggttcccgtcggggccgatctgcgcgcccgcagggggcggcttcctatccgggcccatcgagagggggttcctctccgggccccttgacgccgcgctcatgtccggtcccctcccgggcgccgccacctccggccgcatgggaggcgccgtgcccgcgctccgccggagcctc

SEQ ID NO: 27361 - DNA, 361 bp, Setaria italica
  Peptide Sequence Number=SeqID_93335
tttttttatgtattgaattgtcacttgagatatgcatatattttccggtcatagaaaaatgatgatgctttctatggctattgtacatgaggaaacattaataggcaatgcatcttgctgtaaaactagtagctgtacaatgctcaaagttgcccacagtgcatactttgccgcaacaaatatttgacaaattgactcgtgagcatgaatctgttcaaactttgtactcatccattccaaattgtaagtcattccaaaaatcttggagagtcaaagtatctcaagtttgaccaaatttatatgataatataataatattaatgatgtcatctaagtatcattagattcttcatcaattata

SEQ ID NO: 27362 - DNA, 415 bp, Setaria italica
  Peptide Sequence Number=SeqID_93336
accaccggctctacccggcgtcggcggggagctcgccgtcgcgggcgcaggccatcgccgggtaccgccgcgagatgcttgacctcgtccgcggcctccccgagtccgcgtacgagctctccctccgcgacatcgtcgagcacccggcggcgtcctcctcgtcgccgtccccgccaacgcctcccgatcccctgccgcaaccgtccaacgccgccgccgccgcccgacaccaccacaccgatgccactgccgccgccgttcaggtgagcgacgagccagcagtcgcggcagcggccgtcgaggacggcaagaagcaggggaggaagcagaggacgatgcggaagcagaggagccggagcctggagcggagcgtgagcctggacaccggcctgctcatcaagctcttcctcccgct

SEQ ID NO: 27363 - DNA, 1546 bp, Setaria italica
  Peptide Sequence Number=SeqID_93337
gggtcgttctgtacataagcatcagtaagtacatggagaaatgtacacattttacatgtatggacacatgattaactatttatcgtaaaacaggggatttccccaaggtaaccactagccaggaaagtgcacctctcccttcgtagtaaactaaacgtgttcgctgttgcaggacctttctttacagtggcaacagatctggaactcctaagtacaaagaaccagtagtacacttgcagattatctgcttattcagtgaactctcatatcagtactacacatcattactcccacctatctccctagctgcttaccttgtcatactagctgaaggagtgctacaaaactttctgccacaggtcttaggtgttttagcggcagggaattagtgaaatgcatgctatccagatgcaacacagtgagtcaccggtctggaactccaggcttcggcgactcccccttcttgtgagcaccaagtttggccttctctttttctgcttccgtttgggctcttttcttttccagctccatctgtttcacgttctcggcatgggcacgctcgaacgttttcacgaagcttagcaatgttgagacaacttgctcgaaaggacatcgcacaggatcttcaccgaaataatgtgctagagagtcagcacttttgcccgcggtgctgtaaagcaaagctaatgaccttccttcagcttgggcatcagcaaggaattccttcaatttcctgtaaaatatctctgtctctggaggatccttttcagatgtcgctagttcctgctcgactttttccaatcctttagttattgcttgcatttcttctgccagctcctttagttgtatctttgaggcaggttctaaatgtgcaagatccgtgttgaagtcaagaacttcaggaagcttgtccgaaagaaccttgcatagataatgcatgagagtcatcctattattacgtgcccgtatatcactgagcttaagaagactatccaatctaaatccaacagctgcacccctagcagttccttggtttaatgcattccccaaagaaagaatcgtttgcatcactcgcttaagcttgacagagctcctaacctcttcagcaacagaattgatggtactcaaactattttttaggtctgcaacctgtgtaacaaactttatcttaaatgataagattctcagttttgattccaccctaggtactttcatcatttccatgaagaactgttcacagttccctaggttctcctttttgcctgtataacccttgagtagttccatttcttccttagttggacagaactttattaggtaatctacttgatcaccatcaactatggaatcatcaagagcaagcactgaacccattagatcaggcagtggcatcttaatgttcctcagcataatttcacaattttttgagcgctgaaggtcaatcagaagaactttttcttgttttgttgcaacagaagggtgttgtcgttgtcgttttgcctccatattcggcattctatttactagtagtaaaagtacttttcta

SEQ ID NO: 27364 - DNA, 623 bp, Setaria italica
  misc_feature (1)..(13): n is a, c, g, or t
  Peptide Sequence Number=SeqID_93338
nnnnnnnnnnnnnaaacaaagggcttattttgcaaacctgtaatattgactggacagaagttcagaccaacagattcgacatgtgtcaaagaagcatctccaaagctccaaaattcgaatctgcttacagttggattcactgaagccaaagaagaagaagaagaagaagaagagggacacgtgtgcgcccagattatgaagctgaccaaggctaacaaactcggtgtattcctagctacagtatcaagtgcaccacatctcattgacggtgggaacaaattttcacagcacccaacaaggttgtactgtaggctgggcttgaaacgaatcatgtagtacaacattgggaggatctattcttcataatctaagccgtcatcgtcgtctagctccgaactatcagccccgcccatcagtgataggaacacaaggactccaacaagcttgtgcggccaggaagtactttgatctttgcctgaatttcttttcctcctcggtccgttccttcttggctctgggtttcggcttataactttggccagcagatgctcttttcctggggggggatgatgatgaataggaactaagggtaagaaataagaaataacctaaaaccctaagaa

SEQ ID NO: 27365 - DNA, 1395 bp, Setaria italica
  Peptide Sequence Number=SeqID_93339
ttttttttttttaattttttgttctaaaccagtaatattgactggacagaagttcagaccaacagattcgacatgtgtcaaagaagcatctccaaagctccaaaattcgaatctgcttacagttggattcacttaagccacacaaaaaaaaagaggggcacggtgggcccagattatgaagccgaccaaggcccacaaactcggtgtattcatagttacagtatcaagtgcatcacatctcactgacggtgggaacaaattttcacagcacccaacaagggtgtaggctgggcttgaaacgaatcatgtagtacaacatagggaggatctaatcttcataatctaagccgtcgtcatcgtctagctccaaactatcagccccacccatcagtgataggaacacgaggactccaacaagctgtgcggccaggaagtactttgatctttgcctgaatttcttttcctcctcggtccgttccttcttggctctgggtttcggcttataactttggccagcagatgctcttttcctgggggggatgatgatgatggactgggtgatgatcctaaccctgatgatgatgagtcttccagcaattggatcttgtggtgctctacaaagttcaccaagttttcatgcttctgcaaagtgcccctcagcacagatgtgtcaggcaatgcattgagcacaaaaagagcatgtccaaggaaaagagcatcaacatctgtagggctattatcaaatagaaagacttgatcccctaatctcaaagacaatgtgtcatatgcagcacttgccttctggtatatctcctcttctttttctgcagcattaagcttcgttatatccagtagttgcttcacatctctagctttcttccaatggagtatctttccaatgggccaggggagatcagagaagtatatatcatgcgcgatgcttccatcagaaaccacccagagttcatactgcaaagcatccgcgagccaggtcgaaaccatggccttcgtggacagcacatcggcgggagaaatgcttgggtgctttgagttcaggtccaaaattttctccaccttgagatactcaatcacacctcctttctcattgttgaacgccacacaatcactgaattcgacatatggtatgtgatcggcgtcggggaaggaggtgtcgacgtggatgtcgaaggggacctgcgccatccggaggtagaggagcacggggaggctggtggggcaggcggtggggagcccgaagcacggcttccgcgccaccagcaccttccgctccgccgcctcccactccgcggcggccgccgccgatgccatccgaagcggtaagaaggggggtttgcctgaggaaggaggcgggcccttaagaaggcctaaagagcc

SEQ ID NO: 27366 - DNA, 320 bp, Setaria italica
  Peptide Sequence Number=SeqID_93340
tcacagaggagtgtatcagctcagccctccagaggacttgacactagccagaatgctggttaggccggcgcagatgttcctcggagacgaggccatgaccggggagaaggttctgacggagggcaggtacggcgcggtgagccgggtgtttgtggtcaccgaggaagacaagacgtggccggcggaggaacagcggcgggcggcggcttcctgcggccctggcgtggaggtgagagcgatcggtggagccgatcacgtgcccatgttctccaagccggcggagctcgcccagctcatcatggaagtagcgatgaaccagg

SEQ ID NO: 27367 - DNA, 185 bp, Setaria italica
  Peptide Sequence Number=SeqID_93341
atctgtttttgcaaccatcttgtctcgttcctgcttggcgccgtgctggcagggcaacatcatctgccatgatccccaagatgatccccaaggaaaaggaaggtcatcccgtacccttagacgacatgcaaggcaggaaagccggccaggggctgcatcaaactcatctactacttctcttcata

SEQ ID NO: 27368 - DNA, 473 bp, Setaria italica
  Peptide Sequence Number=SeqID_93342
agaagacaaggtggaatgttgctgtgctcgaggttggtttaggagggaaatatgatgcaacgaatgttggtccgagcacctgttgtttgtggaatatcatccctcgggtacgatcatatggaaattctgggaaacacacttggagaaattgctggagagaaggctgggatacttaagaaaggagttccggcctatacagttccacagctagaagaggcaatgtctgtactgaggcgccaagcttctgaattgggtgtttctcttcaagtagtccagcatttggacccaaagaaattagagggtcagcctcttggactccatggtgagcaccaatacacgaatgcaggtcttgctgttgccttggcgaatacgtggcttgagaagcaaggtcatttggatagaatgcatgccagacattctgatgccttgccagatcagttcatcaaggctgtcaagtgcttgtctgcaaggcc

SEQ ID NO: 27369 - DNA, 265 bp, Setaria italica
  Peptide Sequence Number=SeqID_93343
caagcttaggcagcttcaaaaggcagtttctcagcaagatgccctggtgggactctctgcgttttggtaagtacataatttgtcgcagcaagaagaaagaattttgaaattgatgtagtatatcgttaacactgttacaggaagtacctacctaccagcgctaaccgagaaataagaaagttggaggaggaagttcgcttactgatcctggatgtcataaaggaacacaataacagcgtggacaacgaccttcttcgcgtcatta

SEQ ID NO: 27370 - DNA, 1589 bp, Setaria italica
  Peptide Sequence Number=SeqID_93344
aagggctaaagattgtgcagacgcaagacgccaacaactacttgtcctctgtattcccttacctccttctctggagggaaacttatggcccggtgttcatatactcaacaggagctctagagatactgcatgttctgatccagaaatggtgaaggacattggtcaccgcacgccatcagagctggggaagcctaattatctaaaaagatctcgcaaagccttatttggtggaggtttgtttacattgaatggtaatgactgggcctatcagaggaagctcattgcgccggagttcttcatggataagattaagggtatgatagagctggttgaggatgctactgctccgttgttggaatcatgggagagtttgctcgacaatgtaggagggagtagggagatagttgtcgacgattacttgcggaagttgtcagcagatgtaatcgccagggtttgttttgggagtagtttcacaagaggagaagagatattttgcaagcttaggcagcttcaaaagacagtttctcagcaagatgccctggtgggactctctgcgttttggaagtacctacctaccagggctaaccgagaaataagaaagttggaggaggaagttcgcttactgatcctggatgtcataaaggaacacaataacagcgtggacaacgaccttcttcgcgtcattattgatggtgcacaaggtcggcaactgcaagggcatgatgccgaggacttcatcatcggcaactgcaagggcatgtactttgctgggcatgggaccacagcagtcaccctcatttggtgcctgatgttactgtccacacaccctgaatggcaggaacacgcccgagctgaggcagtagaggtctgccagggaggagcaacgcttgatgtggacgctctccgccgactcaaaattatcacgatggtgatccaggagactctccggctgtatcctccggcgtcgctgatgatgcgcgaagccctgacggacgtcaagattggtggcctggacgtccccggcggaacaattatccaggtggccagatcgatgctgcaccaggacaaggatgcctggggtccggacgccgccgagttccatccagaccggttcgccaacggcgtggctgcggcgtgcaggccggcacacatgtacatgccgttcggacacgggccccggacctgcatcgggcagaacctggcgatggttgagctgaaggtggtgctggcgcgactgctgagcaggttcgccttcgtgccgtcgcccaggtatcggcatgcgccggtattccggctgaccattgagcctggcttcggcatgcccctggtggtgacaaggctgtgatgatcagagcatggttcgcgtgtggcctgtgtctatcaatgtcgcagtgcttatagcttattggatgcgtctttggttgcaaagttaatcagcgatacattttggtagcaagatagaagaccctgctcctgctgtaaccagatagaagatgagcttgttactattagtgatctgcttgcaagaagcaagtacaatgcatattctataatctctatatacatattctgttggtgttattaaaaaa

SEQ ID NO: 27371 - DNA, 239 bp, Setaria italica
  Peptide Sequence Number=SeqID_93345
gaaggggaaaacaagaactaatgaccaagtagtagtagatgtacttggtggatgtatgcatcatctgaagtggctgaggtggctggtgtggtggtgcctgcattcgtcaaggccgcagcattgtatcatcgggtagcaggccacgaagaggcacctcccaatccctctgacgacggagccgagcacgtagcaggggcagcaggcgcgagccaggcaccggctttgcttctcgtaaggtg

SEQ ID NO: 27372 - DNA, 308 bp, Setaria italica
  Peptide Sequence Number=SeqID_93346
ttttttttagtacaagaatcaagcaaaactcaataacaaaatccacaacacgagatgctatttgaacaagctgcagtgtttcaacataacaccagcagccagctcatcataacataacaagtagttcactgattacaactgagacttttctaaattctaattcaaacctccccccttccacccttatccatatcctacacctacatcctttgccccaaacccccttgttgagttcaatccaccatccatacacaaaagagtaaattgctactaatatcacaagtcaacgactaccaagaactactagc

SEQ ID NO: 27373 - DNA, 399 bp, Setaria italica
  Peptide Sequence Number=SeqID_93347
actagacggaacgaccgtaccaagggccgatccgctcaccgtcgaccccctcgccacgctagagaagtatcgtgaggcggccgtggtgccccgcgagtcgatcgtgagggccgagtccgagtggctgagctccatcaaggcagacctagtggtatcggatgttgttcctgtggtgtgcagggtggctgcagatatgggcgtccgctctgtatgcattgggaattttagctgggacttcatatattctgaatatatcatggatgctggatatcatcaccgatctattgtttggcagatagcagaagattattcctattgtgacatcttacttcgattacctggatatggcccaatgccggctttccgcaatgtcattgatgtgcctctcattgtaagagg

SEQ ID NO: 27374 - DNA, 433 bp, Setaria italica
  Peptide Sequence Number=SeqID_93348
ctgtctgattggatcaatacagtgcagtgatctctacctgcttctggacgatagctcccttttcagcaagacaacgagaacaagcatggaagaattcatcaacttgaagaacaagaccgacaacaaacacagcactgctgaaaattcatctgcatgtgagggtcaaaacatcctcgccctcagaaacactgggcagcggatgatgggcctgccagtgagcaacctgaaatccgacaccctgaagcaagctatggagaagctgacagcgtcaaggagcagcttcagcttcatcgtcgatgagcaagggcatgtccaaggagtggtgacgacaagggacatcatctccgtgttctccccaccatgcatggactcgaggctcgacgggggctccttcttctcggctgcgcttgagcaggttggctgccgcgttgag

SEQ ID NO: 27375 - DNA, 282 bp, Setaria italica
  Peptide Sequence Number=SeqID_93349
ggcggcggccggacggcgctcacgaaccaccccgccgccagcgccgccgccatcagcgccatcagccccgccggggtgctcccggtgcccgacagccagtcgatcgcgcacgctacgcagatgagccggaagacgccgacgcacgcgtgcattgctgacgcgctggccgtgcgcttctcgcgccgcttgccatcgccagcggaagcatctgcggccattggagcgctaggagctggagctggaggtctgaatgggttgggttgtgcggtgttgttgaggcta

SEQ ID NO: 27376 - DNA, 414 bp, Setaria italica
  Peptide Sequence Number=SeqID_93350
tttagattttatagttcataaatattattatgcacctagatatctagatgcagaataatataatctagaaaattaaaacgacctacaaattggaacggagggagtacaaccaatgcaaaccaaaagaatgaatggaaccaagaaaaaccacaatgcaagtttatggctcaacttgatgtcaacattgtgctggctggcatcgcaagggcctcttcttcgaactacctgcatgtgaatttggcacccggcttagtacaggcggtggttgatgacgctgcacttcttcctgatctcgcccttgctcccggccggcatgggcagctcgctgagcttaaccagcgactcggcgaagtcctcgtcccagagcgtgccgttctcggcgtactccttgacatggccgaacgcctccttgtg

SEQ ID NO: 27377 - DNA, 1514 bp, Setaria italica
  misc_feature (1)..(66): n is a, c, g, or t
  Peptide Sequence Number=SeqID_93351
nnnnnnnnnnnnnnnnnnnnnnnnnnnnnnnnnnnnnnnnnnnnnnnnnnnnnnnnnnnnnnnnnnttttttttttttttgttaacaaaattgtagcgatttcatttgcttgagaccttttgcaacttgtaagacgtgtcaggaacatacatatacataatttatttccttaagacatgtatagtatgtaacagattggctgagatgaaaaatggacaacaaagtgtagtacaaccaatgcgaatcaaaagaatggatggaacaacaaaaaccaagcttaaggctcaacttgatctatgaacgtgtgtgttggctgggcacgcaacggcctcttcttcaacctccattgctgcaacaagtacgtcaaccttcttagtacaggcggtggttgatgacgctgcacttcttcctgatctcgcccttgctcccggccggcatgggcagctcgctgagcttaaccagcgactcggcgaagtcctcgtcccagagagtgccgttctcggcgtactccttgacatggccgaacgcctccttgtgcgtcagcagcgtccagtcggagtggaaggtgacgatcttggcgaggttgttgtggtagtacgagttgtcaaggaagtcggggatcttgcgaacacggctggtgaaccccggcatgaacctcgccacgacgtcgtagtcctcgtcgcggacgttgttgtccacgggggggttgcccttggcgcacttgtacttgaggaggttgcggtaggccggggtgatctggtcattgggctcggagaggcggccggtgaaggacgagcagtggccctggccgatggagtgcgcgccggagaggatgacgagctcctcgatggtgaagttcttcctggcgaagttgtcgatgagcttctgaacgtcgtcagcggagtcggggagctccgcctgggcctcctcggccttggagacgaagccgtcgaggcggccggcggggacgtcgaagtggacgtggccgttgctgaggatgctggccgcgtcacgggcggcgtagatgaggatgtcggagcaggaaacgacgtcagggcacctgtcctcgacagcggccttgatctcctccagaaggtcgaaggcggcgaggccgatgttcaccggcgcctccttctccgggtgagggttgtcgtaggacgcgtccaggaggacagagccatcgcaccccctgacgaagcagtcatggaagaggaggcggacaagagcggcgccggtgcggcggttagccttgagcgccctgatgacgtgccacttgacgacgttctccaggcccctgcatttcttgctgtagtacccgacctgcagctcgccggcctgcgctgacggcacggcggcgaggagcaccgccgcctggacggccacaagggcgaagagcacagccgccgagagcttcatgtttctgaataagcttgaccagcagctaggcctctagctacctggttgatgctgagctcaggcctcaggggctagctggtgctctgcgatatgatgtg

SEQ ID NO: 27378 - DNA, 352 bp, Setaria italica
  Peptide Sequence Number=SeqID_93352
ttgtttttttttaaataacatatctgctcttacttcatacaaataagtgcaaggtcacagaatagatacagggtctcggtgtcttggtgacacatagttgaataaaacaaacgttcacaaatatgtatacaaacaaccattctactatacacatctgcaaaagaaacagacttgcacccaagcatctactccctccgtttcaaattgcacgtcggagggaacaaatggcacttgtccttataagtaatacacatcacctgactatgagggatacaatacagtaatagaagtattcatcagagcattcaacattgaactcaaaaatttagaaatgttgtcagtgtgaatcctt

SEQ ID NO: 27379 - DNA, 311 bp, Setaria italica
  Peptide Sequence Number=SeqID_93353
gacacgatgccggcttcggccttgaaggcccaggagtaggcgtcccagccgcagctggagtacaccgtctggatggggagcggctcgccggactggacggggtagccggtcacagggacgatggtgaggctcagcttctcgtcctgggcgcaggtgcgggacgcgcggaatgtgacggagtagtagaggccccgcgtcacgctgatctgctgctggatggaggcgtcgctgcccaggcgcagggcgtgcgcgccctccggcaccgtcaggatcatgtccccctgctgctgcccggacccgatgtactcgac

SEQ ID NO: 27380 - DNA, 144 bp, Setaria italica
  Peptide Sequence Number=SeqID_93354
atggaattggagtgcgccccccactgcccatttactccgctccaaatatagtagctggcgcaagactattctcacagttcattcaaagtttcaggcattgcagtcttgcagactactccgtagcttgcagtaccaagtatccag

SEQ ID NO: 27381 - DNA, 365 bp, Setaria italica
  Peptide Sequence Number=SeqID_93355
gtctcaaaatccaatgggcagagcgtttcatcaaacccatcaacctcatccccactgtagtttctttgttgtgctccatgcccagaataatggaacaccaatgagtctccaggctgacaaccttgaacaagccaatacatggccatccttatgttatgctttgttgggattttgtaggggtcggtttgttcttcgtttagcatgatgatggagtcgtcggggaagttgaagcgcgtcatgagcaggtggcgcatgcacttggcgtcgttgatgcagcccttgagctcgtgccgcgagtaccggtacgagatcccgcacacgacggcgcgcttccgcccgtgcgctggcggcgggggcggacccca

SEQ ID NO: 27382 - DNA, 1095 bp, Setaria italica
  Peptide Sequence Number=SeqID_93356
tttttttggttacatcaaattggactactccttttccaaccgttcactgaacattatggggactgaacaagtaataaagcgcaatccctcgtattgtgaaacaattcaaaggcataaatgtgcgtcaaatccacaagcatacacgttagctctagtacgatggatggaccatatccaatattgaaaatgtacaccatgatatcgtgaaatgggagcagctatatagcttggggaataccaggacaacgtcatagcgagaagggcttcgcgtagacatcaaatggatcgcatgctgtcagctgtggctcctgtttcagaccaccagtagaaaggctccctcccgtcagaagcattgtaattagtgatgtgacggcaccaccaccaacacctgccgagtcacctgtattgcgtattgtcgaacgcatggagttcaaaatactaccgtaggtggtaccctggccccgttcaatagcttggatgaagcagaatgtcattgcgccggttgaagtgatctttgacaaagcagaagtatctgcagaggtctgatcatcgtcacaaccactaaatgaaatagcctccccaccactagtgcctttccagacaccagatcgtggccggtgatcttcccatacatattgcccactcctgttcattctgcagaggaaaggcaaatcaagcgcagtcccactatgacaagcatcaatgagtgcatgaagtttaactccatgaggaagtggtctaacaagtgctgcatttatctcatcgtcgacgatcattccttgtgtctcaaaatccaatgggcagagcgtttcatcaaacccatcaacctcatccccactgtagtttctttgttgtgctccatgcccagaataatggaacaccaatgagtctccaggctgacaaccttgaacaagccaatacatggccatccttatgttatgctttgttgggattttgtaggggtcggtttgttcttcgtttagcatgaagatggatgtgtttgatttttttgagagttcgagagtagaagcacagtacacattatcagaaaaacttacactaagtacctaaaaatttctaatcaaaactcaaata

SEQ ID NO: 27383 - DNA, 434 bp, Setaria italica
  Peptide Sequence Number=SeqID_93357
ggtacagagaagtgattgatccaagttaacttttgagttacagtgattggaacttaacaaatgaagaagttatagctgcagaaagtaggggagaccttacgttttaagtagagggaggagtggagttccttcgagaggaagtatgaagccatgtgcctaggatagcagttgtatctttctttggatcagctgaggaagtacagttgactttagcaactgctgcattttggtttgactagttattatttttctgatttgcacatcttttactacacttttgtacccctcctagtgttagcagtttgtacatgacttctgtgacagagaatacacttgaagcaaaaggcatcataataagctgatggggtgaactctatatctaagtaatctgttcatatggttccaattacaaattacatgggaacaggtagtga

SEQ ID NO: 27384 - DNA, 222 bp, Setaria italica
  Peptide Sequence Number=SeqID_93358
ggaccttcatgattgatgcaggtatgacatatgcccatgaaggataaaaatgatagcttttttgcttgtagaaacttggcagccttgcaatttgcatggtcatctctggaatgccatttagcataatgatgaagatggaataatataatgctcccatgtagtaatgagcatgagttaaatctgttgtcatatgacttcggaagaatacagacattgtcatgg

SEQ ID NO: 27385 - DNA, 1364 bp, Setaria italica
  Peptide Sequence Number=SeqID_93359
tggtccttaggtatttagtttgtaactaactttttctttgttcctacctattcttttagttattgttaccttacctcctttatcccccacctcaattggtccattatagacttgtctaacatatattgtgtaatcagtcatgtgtcatctgtttcttaactaagtgcgtgaagtaggagtattttcaatatattgattaggcctgttactcctgtattgcagacccctgtacctccactgcaaagagctgctgatgtaaccccagtattcaaccagatactgatgaatgaacaagaagaagaatatgatggcccccctccaaaggaaattcctgctttaattgtgtggacccttggaggaaagagtgtatatgttgaaggatcatgggataactggaaatcaagaaaagccatgcaaaaatctgggaaggatcactctcttttgctggtactcccatctggagtttaccggtacagatttgtagtagatggagaaaggaaatgtcttcctgatcttccctgcgaaactgatgccatgggcaacgcggttaaccttcttgatgttaatgactttgtacctgaaagtgtcgagagcgtggcagaatttgagccgcctccatctccagactctagctatagtttccaggcaccagaggacaaggactttacaaaggagcctcctgctcttccatcccagctccatctcggtgttcttaactcacagaactcggaagaaagctgcgcgcggccgcagcacatagtcctcaaccacctcttcatcgagaagggctggggcgcccacccactggtggcactcggtctaacccacaggtttgagtccaaatatgtaaccgtggtcctgtataagcccatcgaacgatagcccgcacatgaagagtgcaagttaatgctttgacaactcactgcgagagcagcgatgaacaacgcagaggtggtgcgtgcttgtaaaagctgttgaggttcaggagtattttttccattgcctttgacagcttgcagaacctctggttgatgttgtacatgctgcactatcatgatgttggcctcctggtttgtttatctatcctgttacagagagccaaggcgcccttagttcctacatgtccgcctgtcgtcattgttccccacctccccagggatgaaacgtgtgtagaggtgttcactgaaaaaccgtggaaatccacagaagttaggtgccagagatagatcatgtaattcctaggtttttgtttgtttttgactggtgaaagacggtgttgttatgtaataagatcagaggaattacaggatggcatactttctgtgttgttgtctgcgctagcgtttttcaggcacgaatccaat

SEQ ID NO: 27386 - DNA, 951 bp, Setaria italica
  Peptide Sequence Number=SeqID_93360
agttttgttttgggtttccacttttcccccaaatctttcaatgtatactggtcttccctgcctgtcaactccatggtagccctgaggataatagcatagcacctcgtctagctcttcaaaattgaagtcctctagtattgtatccgctccaaactctttcctccactggagcatctcagaccacatttggattgccttctcgatgtcaaattttctagccttcaaaaacctcagcagcaagtgataatcattatgcttgtcaggcagcaagttcctgttcaaaagttcttgttggaaggtaaagacagcacgctcctcttgctcgtccctgacatcttcgattgtgaaggacgaggcccgatgctccacctttctttttcccctcttcttaagtgaatgtgtgagcttgtttgatgcattcagtgcctttttcttcagtgacccaatggatagccgccttctctcgtcctctgagttctccacatcggacctccgttctttcctgtcatcaagcgtgaacagcccttccatgcttgttgagcgccgccgcactgacattttgtaggaagcagatgactgagagtctacagattctgtagttctgtaaagagatcgcacagatagacctcctccgcgaccgagttccgcgccggccgggggcgaggtcaacctgccgactccttcctgggccgcggctggaactgtatccggcgaccgcgctcagatcctcccccgccgcctccggccaaaaacccagggcgcgagcgaacacgccacgcaacgcctatatccttggggcgacgctgatgggcgacggcatgcaaggcgaggtgggagggaggaagaggacagggtgtccgcttgtctattcctcggcgtcgtcggccgttgtcccgtcgcgctgcgcctgctaattatacgcgaagaagggggaggccgctgctgtgatcg

SEQ ID NO: 27387 - DNA, 1982 bp, Setaria italica
  Peptide Sequence Number=SeqID_93361
cttgctgcctgacaagcataatgattatcacttgctgctgaggtttttgaaggctagaaaatttgacatcgagaaggcaatccaaatgtggtctgagatgctccagtggaggaaagagtttggagcggatacaatactagaggacttcaattttgaagagctagacgaggtgctatgctattatcctcagggctaccatggagttgacaggcagggaagaccagtatacattgaaagattggggaaagtggaaccaaacaaactgatgcacattactacggttgaccgctacatgaagtatcatgtgcaagaatttgagaaagccttcagggacaggtttcctgcgtgctctattgcagcgaaaaggcatattgattcgacaaccactatactagatgttgatggcgtgggtctcaagaacttcagcaaaacagcaagagatatgttaagtagaatgcagaagattgacagtgactattatcctgagacactgcatcagatgtttgttgtgaatgctggtagtggtttcaagctactatggaactctgtgaaaggctttcttgaccccaaaactgcttcaaagatacatgttttgggaacaaagtttcagaacagacttcttgaagtaatagatgcaagccaacttcctgaatttttgggtgggacatgcacctgtgctgctgagggaggatgtctcaggtctaacaaaggtccatggaatgatccaaatattatgaagtttgcacataacaaggaagcaaaatttacaagacataccaggcgtttatccgagattgagcaaaggaggagttcgtttgctaggctgcatcttttgaagggtagaaatagtgacacatcaactgtggagtcaggatctgacattgatgatctaggttctccgatgatgagaagcacagtggggtgtagtcgattggctccagtccgtgaagagatgcagatgagaggacgagactctgcagcttattatagttgcgatgatcactttgttgtggtggacaaaacggttgactatggtcgaggaggatcaatgtcagataaaagcagagcttcagaaccaagagctaaagttcggccactggataccagcacagcaacacacatggcaggtccctcaactaatagacgaggtacggtagtacctaaagatgttttggatgaaggaacattccatcgcttcatcaaattacttctggctttgattgtcaaaggctttgccttcttccacatagcatatggtcagcaggagacgacggtcaacaacccactacctccagctgaaccggaacccgtgtctgatgattatccagcagtagagactttcagtgtagaccacatcagtcctatcatagagcgccttcagaggctcgaagggaaggttgatgaacttggcagcaagcccccagagattcccctggagaaagaacgatctctgttggagtcatgggatagaataaaatgtatcgagtctgatctggagcgaacaaagaaggtgttgcaagctacggtgatgaagcaactggaaattgcggaatcactagaggaagtgattaggtcaaatctaaggaggcggagattctgtgcataataagcaatcacggcttctgaatgaacgacatacttcatcaggggattgagagttgagggtacatgtcgcgaaggaagtgcatgagaattcgatcgggtgaggtgaagaccgtgcattgtggttttcaccttattggcacaaaggatgatgactgcagatagtaatcaaaagaggcctgtccatttttcatgttaaaagagaagatgttaggatggatggcaacggttagaaaggtagaaatgtggaaaataggtggtacagatatgagacagtgtgcctgaacaaatgtgtcacatgcacgtttgtgttctttgccaaagaatggtgctgtgttataaacttgtagaaattaaagaaaatgctcttccatcagaga

SEQ ID NO: 27388 - DNA, 372 bp, Setaria italica
  Peptide Sequence Number=SeqID_93362
gcacctgatccgccgccaggcgcctcttcttctcgccgaggccgccgcgggaccccgcgagctcgtcgtcctcctcctcctcctcgtcgtacgccccggcctccacgtcgtcgcgctcagccgcggccgcgccgcaatcgccgccgtccactccgtgccgctgctccatgtacctgcagctgtcttcttgttgatctgtggttgcttggcagaccatcgaggatcctctgctggtgggcctcttcatgttttaagagagaaatgaagcggcagagagatggatctcgctgtaggagaggcagaataggaaggacgctgcacttgctgagctagagaggatggggcaggagagcctgggatctacaagtaaac

SEQ ID NO: 27389 - DNA, 404 bp, Setaria italica
  Peptide Sequence Number=SeqID_93363
cccggctgcttcctcccctcgtctccgcgttttcaaaatcaaaccccggccgtaacggcgaaaaccccatcctccatcggagagggagagccggagcagtggttgcggttcccctccccgtcgctctcgccacccgccgcccgcggccggctctgtgtccggggcggaaggcggtaggcacctctgctccgcgccccttcatcccccaccggcggcccccttccttcgtcaggtcaccaatccacttcgttcgcccacccttttcagtttgccccccggtcgatctccttctcgctaagcaaaccctcttcttaaccccccgcggccgtcgccgggagaaagctccccgcttttcgtccaggcatccttccaccacttcgctttgctagtcctgtgctgcgcta

SEQ ID NO: 27390 - DNA, 314 bp, Setaria italica
  Peptide Sequence Number=SeqID_93364
cataatagggttaagaagtaaaaaaaaatcaaaatttaccatcgcagtggtccaaaagagtggcctttgatttttttttaaatcaactctgatatcaaagtgaaatttaggactgaccgtgtgtcctcaagaatgcatctcgctctgcaaattaaattatccatcttcatcagaactttgtccatgtctggtcgatgccgtgaccgtgatctggtggcgagctctgaatctgacttgacaagagagctctactatatatctgcaggtggcaacaccactgccggctggggaagctacagcattcccaaggacaa

SEQ ID NO: 27391 - DNA, 504 bp, Setaria italica
  Peptide Sequence Number=SeqID_93365
gggaagaaagggccggcaacatgcactgcatttgattattcctttttgttttttgttttttctttgcaaagacgcatggatgttgccaagattcaatattttatcaatcaagacgcatggttcatctgttgattcattttcttattatctgttttctttccttttcatagagcaatagtgctagcaaccgtgtattccatctttgcagtgtgagatttgtagctttgaatgcaggaggttccatgctggaacttgtcaatccttgtgtagagataccaatgtgtaatcgaaatttgtatggcgttgcatatgtaacatttgtaatcgaagtttgtatggcattgcttatgcaacaatttgtaatttgcttgatttttgtaagatcaaatttctgcgtttcaagtagttggaaatataggcaattttgttgtgtgttatgttgtttaagaaaaacattaatttttgttcatgtattgaatgaaaaaaacatgtaactgttgtgat

SEQ ID NO: 27392 - DNA, 537 bp, Setaria italica
  misc_feature (525)..(525): n is a, c, g, or t
  misc_feature (530)..(530): n is a, c, g, or t
  Peptide Sequence Number=SeqID_93366
aatgaggagagctgtcaggggaggcataggtggaaaccggagattcagtccagatattgggccatttaacggggatgcacaggcatctttatcattgtccatggcaaacctaaagagttcagaggaatatcgaagatcaaattgttgccatgatgcttgggatggtcccaactctggttattccccaacatattcaactaaaacatcgattaggaaggaagcaaaaagacgcctatctgatagatggaagatggctcaccaatatcagcacccgtcacaagatgctaattcattcagtacactaggggacatgcttgccctctctgacaaagaggtatcaaaatttacttcagggtcactaacttgctgcaaatgcccaaagagagagttgcatagggatggaatgccggggtcatgcagttatcctcttggtatcagcagcaatgatggttggaaagatgagagtgtgcccaatacgacaaggttgaagtctctttcttcttcatgcatcagccggaagagtcngaagntgaccag

SEQ ID NO: 27393 - DNA, 349 bp, Setaria italica
  Peptide Sequence Number=SeqID_93367
tttttttgtatcatgaatgtacatgtgatgctcattaatctggagtgacatggtacattattatctttcagttacagctcaataatctggagggaacatggtacatactacataatctcaatatgcgtcgtcctaaaactacatagggtacactatagataacagagagagaggcagggggaggggaggaagtgaacatttgcatcttctaatctcctgcaatggggcagaagtcccacagtgaaggtgggaaggggaactcgtatatcactttccatcttggaattcttctgtagtatggtgtaaattcattattatcttcgagagttcagagagtcttggatctcct

SEQ ID NO: 27394 - DNA, 253 bp, Setaria italica
  Peptide Sequence Number=SeqID_93368
ccgctgcccgccggccccccactcggcgctgcacgtcgggccagctctccggggacgcgggctcccgccgcaccgtcacgccgtcgtcgtcgtcgctgctgaacaggtgcacaaggaacggtgcctccccgatgttccgcacgatctccgcgatcgactcccgcatccacccctccaccttctcctccccgaccttctccacccgctcccatgaccccgcccccgtctccgcccatggcaccgcctccggcca

SEQ ID NO: 27395 - DNA, 280 bp, Setaria italica
  Peptide Sequence Number=SeqID_93369
ggcccccaccggccccatcagtgtcggggcttgggcggagtgccatcgctccccatctgagccggggctggggccgggcgacgccgcttcccagcgccggctgacggaagcttgtcccttgctctcggtggaggcggcgctctagcgctctccctccacaaaaacgaggcagctcccaccaccagcagcaacacacccctctccatctccacgaaatcccaggtcccgtcagccccaactcaacaccatgaactagcaaatccctcgcctctaaatccca

SEQ ID NO: 27396 - DNA, 1087 bp, Setaria italica
  Peptide Sequence Number=SeqID_93370
gatgtattggaggaccgaggggtgcttgtatagtgtcacatacacaaaatttgctgagacctttggctatggaaaggcagatgctagacgtcccaagattcataggaagagttctatgccggcgagtgagttgaagttcatgtatcccaaggatcacaccggtgattatggcaaggttaagggtctgtattcctactattccactcttaaccgtatgtttaggtagaccctaacacctagagatgataacaacacagacatatctttctatgctaaggatttgcttgctagagatgaggcccggtggggaaagcttttgtgttgctgattttctttgggaggagatcaaggatatttctgagagtctcatcaaggcttgtggttatggtccttacatcatgggactcattgagaaggtggttggcaggagttttcctacggacatggtgcataagcctctcaagattttacctacgaagaagcccattgttccctcatctggtagatatgatgagcaggaggatgagcagcaggatgcagcacagcagcatgatcagcagccacatgcaccacagccctctcagcgggacatgcacagtagacagccgagtgaaccttcttctcgctcccatggaaagcctcctcccgtaaggtggcttttcaaccttttcatcggcatgtgcaagattcagcgtgacatacatgttgagttgaggcagcagaggattaatagcaagaaggggagagatgcaatcaagaagatgcatgctgccatgaacctcgagacacctcctcctatctctcctgagcatgttgagcccgagatacctccacttgagaccatgttgatagggtttcagcaggccggatactatgagcagtatgagcacatctttgctcctgggagcagcagccagcagggcatggatgcatgtggatcttctttggcacctatccacctcctccaccgctagagggttcttcaggagatgcctatgtagcatactatggcttcactctttggtcctactagtggtatgtctcatggccttttcacggctgctgacgcatgcactttgctctccaa

SEQ ID NO: 27397 - DNA, 927 bp, Setaria italica
  misc_feature (918)..(927): n is a, c, g, or t
  Peptide Sequence Number=SeqID_93371
cccccttccctccgtcccatgctccgccgctgacacgttgccccatctcaaccttccaatggcagccgcctccgcctccgccaccgccgccgtctccggcgtcgtgcttccccacgccttcctctcccaccgctcgccgccgccgcaggtcgtcgccgtggcctcctcgttccgccggctctccctgtgcgcctcccctcgccgggccgcccacctagtcgcccgcgccgacgccagcgccgaagccggggaaccggagcctgaggctgaggccgagcctgtcactgcctcagctgacgccgaggagggggaggccgagggggctgtcgcagtggcggaggccgaggaaccgccgccgccgccgagcaagccgaaggttaagttcggcgaaatcatcgggattctgaacaagcagttcattgaggaggctgagaaggtgaagactgtaccggatctgaggcctggcgacatcattgagcttagaatgcaacggcccaacaagaggagattatcactctttaagggcataatcatcgcaaagcacaaagctggtgttcacaccacaatccgtgtcaggaggatcattgctggtgtaggagttgagattaccttcccagtgtattcacccaggattaaggagatcacagtaatcaggcacaagaaagtgaggcgagcaaagttgtactacctgaaacacaagcttccccgcttttcaactttcaagtaaaatcagatatgatgacagaacagcctctccctccattttgatttctcttagcaaacattttttcgcttcactgcccaatcagtgcatttcactgtaatccactggatatcaaatgtgtaatatatacagctttatagtgtattttggcttgcagtgcaaaaaaaaaaaaaaaaaaaaaaaaaaaaaaaaannnnnnnnnn

SEQ ID NO: 27398 - DNA, 332 bp, Setaria italica
  Peptide Sequence Number=SeqID_93372
agactagtaactccggccggtgataatactgcagatggtgttggtcttgagagcatctcttgaggcacaaaagttgatgcactcactgcatgcaagtttgaaccatctctgcttgagtttaccggcctactatcactattgagattaatgaactgatcaaactcattgatggacgcatttactccttgcccacctgatgaattcgtccatcaatgaactgatcaaactcattgatggacgcatttactccttgcccacctgatgaattcgtagctattccatccatcccgtttatggcagcaacatactggatcccggaatcactatccata

SEQ ID NO: 27399 - DNA, 447 bp, Setaria italica
  Peptide Sequence Number=SeqID_93373
cggcccaagggattagtattcttggatacaacccaagcactacctaatatgtaaaaggacatcacaacaaggaaagtgcataaacttctctgcaagccaaaactacttatacctgcaagtattcaaaatcagtgtccttaaaggaagcatccatgactggtccaacagctctagcctcttcagtcttctgttcctcgaaatcaggatgagatggcatcatttcacgcatatttgtaaaaggattatcaacttggaacccttcaacattcttcattgtcgttggattgtcaatctgtgatgaaattaaacctggtggtgaaatgctagaatcaacattggtgtggggagctactggaggcacttccatgtgaatatcattctgaggagccaaattcttcacattagttgtatcatgctctaagcgatcaaagggataagctccctcct

SEQ ID NO: 27400 - DNA, 601 bp, Setaria italica
  Peptide Sequence Number=SeqID_93374
gttctttctttatgaagaagggttttaaccaatgaccttttgatgccttatttttggatacaacaatatagagtatcactcagtcactcccataaaagtacatacagtagtactagcagtcgcccacagaatgatcagcagagctaataatcaaataaaatgaaatcaagttttcctcacaataaccgaaaaccgattatttctcggtctatttcgggacagtcgccgtgaccaggaagcctttgccgtcggggatcacgacgacgagcgcttcgtcgccgccggtcacgatgctgtaggacacgtgcacgggcttgctctccctgagcgcgaactcctcgagcccgagttcctgccactgcgcaacctcgagctcgtgcccggaacccccggacgccggcgggctatcgcccgccgcgcacgtctccacggtcatccctctcgggttgcccccgacgccgtccctggcgacggcgacgagcgagaacgaccgcggcgccttgcccgcgccgagcctctcgctggcctcgtcgacgcaggccctggcgagcgctcggtggtcaagcgccccgccgccggcggcggccctgaagagcaccgt

SEQ ID NO: 27401 - DNA, 4375 bp, Setaria italica
  Peptide Sequence Number=SeqID_93375
gtaaagaaacatgtagcataattaagtccaaaggtgttgtatgtatggagcttcttatccacagttttgagtatatattacaacaaacactgatttctgtttctgaggtgctaataaccattcaacaaattccagttaaagctttacacatcacaaccttcaaaccgagtccggtatattgtcagatacagtccagcccatgagatggtataaatcgaagcactattgtttacaccactctataacatacatgtatatgtatactccccagccaaacaaaaaacacagagagaagaagagaaccccccaacatattagggcctgaaaggaagtactccacctgcctcttatttggctgccttcgcctgactcgccgcgaccgacatggcccgaagtcgtccagcaatctctgtgaacgctgggcgctgtgctggatcgggggcccaacactgctccatgagccttctccactcaggatcacatgttgctggcacaggtggcctcagagtgttgtttacgatgccccctataattgcgccatagtgcatattggcatatggttcttcgccagtgaggatttcccacataacaataccaaaggaaaatacatcaaccttctctgacaccttattgctgcttccattgagtaattctggagccatccatgggagagtccctcttacaccacctgaaaccagggtatttctttttattttggacaagccaaagtcaccaactttacatatgggacgtgattgatctttaagatttacgagcaagttatcacacttcaaatcgaagtgcacaatatttttcgagtgcaaatactccaggccgaatgcagcatccattgctatgataagccgcttgcgacgatcaaggtacttgtccttgcgctgcaaaacatgtcgaagtgagccattaaccatgaactcagttacagttgccaatgtaccacctggcccatctttcacaacaccataaaacgccacaacatttggatgatgaagctttgaaagaatttcagcttctcgccagaattcatgtgctagtctttctagctctgaagaccgtcctgtgaagcagcttttctttatccttttaatggctacatcacttcccctccattttccgtggtacacagttccaaatgtgcctgaaccgagttccctaagctcttcaaggtcttcattcttgatgatctgcaagtattcaaaatcagtgtccttaaaggaagcatccatgactggtccaacagctctagcctcttcagtcttctgttcctcgaaatcaggatgagatggcatcatttcacgcatatttgtaaaaggattatcaacttggaacccttcaacattcttcattgtcgttggattgtcaatctgtgatgaaattaaacctggtggtgaaatgctagaatcaacattggtgtggggagctactggaggcacttccatgtgaatatcattctgaggagccaaattcttcacattagttgtatcatgctctaagcgatcaaagggataagctccctcctcaatctttgccagatcttgggtctcatccttttgtggaaactcgttttgtgcaaggtttctgaagaatgaccaccgttggggttcataattaggcatgtttaagctatggacaggatcaatgaaaggactggatgattgtgctgcagagtcagcatttgcaaagaaatcagaaagaatgtcaggggaggtcctttctgtaccaccagcaatgtctctattctgtgtgctggagataataggttccttgtgtgaaacatccacagagctggtggatggtacagcaggatcacatttaacatcagttggcaatgttggctttggagcatcccaactaatatgatgtggcatagcagaatgagatcccagatgattaggtgcttctacatcttgttgagtttcctcattgtgtttacctttagcaagaacctgttcagctgcatgggtaagtttctccacattccgactacttgtgttatcagaggacctcttttcagcaagcagctgttcactgaatggagaagtttgctgtacagtattggtaaattctttctcaaactgtatgagactatcatcaacagctggatcattcaaatttattgcatgggaagatagatttgttttttcagtcccctcaaaagtagagtcagtattttctgcaatgttttcacttgcaacaccagactgtgattgacgaattagaaattcaggattaagtgaatcctcagatttagatagccggttcagaaagcctgcttgctcccttggaatcctctcagaatgaaagactcgcccagggtgaggaggcggattcttatagctgtgatctatcatgtcaacctgaaagtcagaacagccagatgcaaaagctccaccagagtggcgatcatcttcactgatatctgaaccctgtgttgtcgacctagctcttggtgcagtacaagtctctagactcttcacactgtcacttggttgaagagaagatgttacaccttcttgaagagaagcagtaggggggactcctgaagcagatgattcatgatgcgccgtgtgaccactcagattttcaagcgattgaaagtaatctagctcattgttttgatgaggcatgttaccagaaacccgtttttcctccttcgttgatgtttctttctcagcatcctgataagcctgttgatcaagagatcgctgtgaagtagttcctgagaaaggcgcatactgggacatatatctataatcagaaggtgtagatagaggaatagatgtctggccctcaatgtcataaaatccatcattggtagctggattagcgtaattaccctgcaaattctgcatcccatggccatagtaggaatgcaaatttgcagtattatcaccggatacagcagatggtgttggtcttgagagcatctcttgaggcacaaaagttgatgcactcactgcatgcaagtttgaaccatctctgcttgagtttaccggcctactatcactattgagattaatgaactgatcaaactcattgatggacgcatttactccttgcccacctgatgaattcgtagctattccatccatcccgtttatggcagcaacatactggatcccggaatcactatccatacttcccaggctgaaactcatgtcatcatattcaatagaggaaacgaggaatatcctaagcttctgggacccatccgcattatcaaggaaaccgcattcttccatcatgtttctcaaatcttcatcatttgaaactgaaatcaaggcatcaagatcttcaccgggtaactgatacttgataacatgaggttgattaaatatggctgttgtcttctgtttaagctcctgccaggaaatgttcctactgatccgaattatatgtgtttcaccaccgacatatctaagcttcccatcacttggtcggggtaatattttacccccgaagctgcagagaattttaattgttctggaagtttctgaggcctcagaagaagcatagccacgggacagtccctgactacttccaccagcagatggaactcgtggaactgatgtacctgacatgtgccttcttctgttttcattttcagaaaaaggttttctttcaatctcatctgtttgatgagtatcggaggtcaaaaatattgatgcatcaaatctagtttcagctcctgttcgatgagcaccaaggcttactctagaatctttgtgaccagcaccaggaatgacattctgattatgaggcataccaggaacaggatgcttcttgggtatagctctcataaattcaagagaaaactcctccccggtctgaattgagtaattaagaacaggcttattggtgcctgcaacagggtattctggaacgggataattggtgcatgctgagctcgaggatccacgcacagaaccttgggctgcagagcggacatcatcttttctaggttccatcaagctgtcttggctaaagaatatggatgaaacaggatacacaattcattgtcacactatctatttagctgatattggtccatttccctctatcctttttatctgacaagcgaagcaatgtgccagtagtaggagaacacagaacaccaagtaaagggtaggtcaaccgacggacgagaagacgggccccccacggattcgcagttcctgtagaagaagacgacggcttgtgaagtgcaacggcgggcgcggcgagccggcgcgggtccgggtctgggaggggttagggtttggatcggagcggcgggggaaactcggatgaagcggaggcgacggctggggctgggagggagcgtcaagcggaggaaggggggggttcgagattgcag

SEQ ID NO: 27402 - DNA, 549 bp, Setaria italica
  Peptide Sequence Number=SeqID_93376
tattgtcctggatggacaaaatggtttgagagtacagcagggcctgcttgcacacagttattgttctacagactccacaggtttaacacgcgagagaattcgacagcatgaataatagtactacaactacaaatacacactagatggaacatacaaagtctagggaggcagaggcttgctctacactgcttctcccacggagacgaccgccggcgaggatcgccggctggctgaaccacctaggtgaggtgaacggtgcactggctcttccgcggcctgccccatttctcctgctcctccaactgttctatcatgaagtgggggacgtgcacgcgcttcgacccatccgccagccgcttgcagggcagccggggctctgccgcagcgaactcgttcaggacctggttcctgatcgcgccgatcagcatgtcacggcacccattgacgtgcacgtctttcagcttcgggcactggatcaggagccgttctggatggagattcgtgcaggagttgaggttcagatcaaccagctccgggcaattcacatac

SEQ ID NO: 27403 - DNA, 317 bp, Setaria italica
  Peptide Sequence Number=SeqID_93377
ccacccgaccacgtagtagtcctcgttggcggccttgctgagcttgagcacgtgcctcaccccggggccgtttgccgacgtgtcgagcccctccgtgccgtgctccaccacggggaagaagtcggggcactcccagcaggggacgcccggcgcggcgtgcagcggcgcggcgttccgctcccaggtaatgaagtcggcgctgcggtagatcacggtggagcccacgccggcgacctcggcggcgacggcgaacctccagaggccgtcgtggccgagccacgccgtggtggggtcgcggaagttgttgcgcgtgatgt

SEQ ID NO: 27404 - DNA, 820 bp, Setaria italica
  Peptide Sequence Number=SeqID_93378
caacttgcaccaacgaggattgcaacacatttacgtgcatgaaacatctcaaactgcttcatgcaacattgcaaaaaaaagcatctcttacaaaattgcaacaacgaaaaagaagaggtcgaaacaaagaaaataactatatgcaacatcgtgaacaagttggtgcaacacccgattgctagcaagtcggactgttgcaaacatatgcaaatcaaaagtcaactgttgcaacatccaaaaatctttactgcaacaccaggaggtacctattgcaacatggccatttggaagagaactatctttggatctacaaacagcttgaacgtcgtgacggccttccggctggagctggagatgccgcccacaaccgcctcgaggttggcttcgaatgtcaggagcaggccggcgacgctgtcgccggggtcgaggcccgggacgtcgtcaaggccgagggtcttcttgtggccgacggcgagcaggggccccatccacgagaaagtgagcacgctgaggaagcccgccccggtgaacttggacgcctcgacagcgctgcggctgttctcgtcggccatctcatgcgtgtcgttcagcagaggctcctcggcagcagagccgccttcctccctcccgcctaagagcccggcgcatagcagaaccacagctgcgaccaccaagacggcgtcgagcgcccacgagtgcgcgggcacggggcacccgtcgaggctcgtcgtgacatgggtggcggcggcgagtacggagagcagcaggaagagcgcccaccagagcctgagatcgaactggaggtacttggccagcagca

SEQ ID NO: 27405 - DNA, 609 bp, Setaria italica
  Peptide Sequence Number=SeqID_93379
gcgcgcgtgctcaagacccacccgccgctccagaaggccttcctcttcttccgcctcgccgccgccgcgtcgcccaccttccgccacgaccgtttcacctacacctccatgatccacctcctcggcgaggccggccgcgtgccggccatgctccgactcctcgccgagatgctccgagccggggtggcgcccgacgccgccaccttcaccaccgtcatgcactggctggcgcgggccggggacgtggacggtgccatgcgggtgtgggtggagatgaaggcgaggagcaggcccaccgtcgtcagctacacggcgtgcgtcaagatcttgtttgacgccgggagggcggaggaggcgcggagggtgtttgggggagatggtggccgaggggctgcgccgacctgcaagacgtacacggtgctcatcgagcatctcgctgacgcaggaaaatttgaagctactcttgagattatggacaagatgaatgaagcatgcatagaaccagacaaagcactttgcaatattctagtccagaaatgctccagggctggtgagacatcagttatgactcgcattcttcagtacatgaaggagcatttcattgttctt

SEQ ID NO: 27406 - DNA, 401 bp, Setaria italica
  Peptide Sequence Number=SeqID_93380
acaaaatgccattttggctgacatatatcattgatatgatttgtatatacttacattacaagtctttgtaccatcatatattaatataaatctaactgaacacaggaaaatttgaagctactcttgagattatggacaagatgaatgaagcatgcatagaaccagacaaagcactttgcaatattctagtccagaaatgctccagggctggtgagacatcagttatgactcgcattcttcagtacatgaaggagcatttcattgttcttcgccggcctatttttttggaagcactagaagctctaaaagctagtggtgatagcgatgaacttcttcgggaagtaaaccctcatctttcatatgaaggcattgaatgtgacccaatattatctgatcaaggc

SEQ ID NO: 27407 - DNA, 228 bp, Setaria italica
  Peptide Sequence Number=SeqID_93381
cccgtagtatagtattggaattgccaccagggggctccccgacggttctgcaacacgcccgggggaccggcgccgcctgcgcaacccacccgggggaactcgtcgccgccgtctgcgcgtagcaacacgcccgggggaccggcgccgcctgcgcaacccacccggggaactcgtcgccgccgtctgcgcgcactacctgggagggttcacgacagccttcgcccgcta

SEQ ID NO: 27408 - DNA, 607 bp, Setaria italica
  misc_feature (568)..(568): n is a, c, g, or t
  Peptide Sequence Number=SeqID_93382
gcgcatcaaaatgaaggtttaccctgataataaaaccaaagagttgacagaaggagaccctggcacagatgaactggaagaggcagaaaatatacaccaccttggcacagatgaattggaagaggcagaaagtatacaccttgatgatgaattggaagaagcagcaagctcaggccttgacaggaatgtgttggacgatgcagcttctggagactttgaatatgtatagatcagagcttctgtttggtatttttgcacctgcttaatcaaagtgggcaagagcaaaatggactgttgcattgcagcttgaggttttggtgatagccagtttgctactgctgccatatttggaatggaaaagcaactctcgtgctcagtggatgtccagcaggttagcgtcgcataatcgtcaaatgatctggtaatcctaatccatagttagctgtatccgactgcttcgtgaagaacctgttgttgattactattaaagatgatatcctggacatcagacacggcggtagtaatggataactttgccatagtagagcccaaaaaaaaaaaaaaaaanaaaaaaaaaaaaactaaagagaacaacgacaacaagggg

SEQ ID NO: 27409 - DNA, 559 bp, Setaria italica
  Peptide Sequence Number=SeqID_93383
aataccgatacatcaaaggcaagcgcatcaaaatgaaggtttaccctgataataaaaccaaagagttgacagaaggagaccctggcacagatgaactggaagaggcagaaaatatacaccaccttggcacagatgaattggaagaggcagaaagtatacaccttgatgatgaattggaagaagcagcaagctcaggccttgacaggaatgtgttggacgatgcagcttctggagactttgaatatgtatagatcagagcttctgtttggtatttttgcacctgcttaatcaaagtgggcaagagcaaaatggactggtatgaatgtgctcactctgttttgatttgacatcctaggacccgtgttgttatactgtaaagcagggcgtcgatatcttcagatctatttagattgactagatgaaatctctatgtctagttttgccatgaacagtgctctcatgagattgttacttgatttctacaccgagatatgttcttcagagtttggttactagatcgttgatttctcagattagcttgcataatgctcatgctttg

SEQ ID NO: 27410 - DNA, 979 bp, Setaria italica
  misc_feature (929)..(979): n is a, c, g, or t
  Peptide Sequence Number=SeqID_93384
tcctgtcactcaatgtctttgattcgataccgggatctggttggttttgcctatacgggaaagaggaaacaaaggcaatggctgctgagattgaggtggttgatggtcctaatgatgaaggtgaaatgttcacacgcccaggtaagctgagtgaccgttttccacaaccatatgcaaatgagcaagcagctcgatatgcaaatggtggggcataccccccagacctcagtctaatcacaaaggccagacacaatggccagaactacgtgtttgctcttctcactggttatcgtgatccacctgctggtgtttcgattcgtgaaggcttgcattacaatccctactttcctggtggcgccatagcgatgcccaagatgttgatggatggagcagttgagtatgaagacggaactcctgcaacagaggcccagatgggcaaagatgttgtctcattcctatcatgggcggcggagcctgagatggaagaaagaaagctgatgggagtcaaatggattttcctgctctcgctcgcgcttctgcaagctgcatactaccggcgcatgaagtggtccatcttcaagtcccgcaagctggtccttgatgtggttaactgaggactggtgcctcatttcttcaaggatccagtccataatttgaagtatatggaataacctgtatacatttcgcatgcctgaaatgtatatttcttgtttaccattaccctcagctgtgggggactgggggttgctgttttcggattttgcccggataatgctaccagctagcatatagtagaatgtatgtatatatagtcgatacagctttgaagtcatgatatgtttgtgcttttgaactcctgcaatgttcagtgtttcactggggaaataaattgtttacgctacctcttttgctaaaaaaaaaaaaaaaannnnnnnnnnnnnnnnnnnnnnnnnnnnnnnnnnnnnnnnnnnnnnnnnnn

SEQ ID NO: 27411 - DNA, 232 bp, Setaria italica
  Peptide Sequence Number=SeqID_93385
gcacggacaccactgagtaattagaagctaaaacccgtagaaaccaggtggtcaatctagcaatggctaattctgcggcggggaacaagaagctccagctgacagtgctgtaactgctggcgcttgtcgtggcggcggcggcggtggatcagcagcagtacacggtgccgaaggaggtggacgcatgcgtcgagcagataaagaaggccatcgtaacggtgccgcttctcga

SEQ ID NO: 27412 - DNA, 2375 bp, Setaria italica
  Peptide Sequence Number=SeqID_93386
cggctctgctcaaccaaaccggcgaaccgctcctccctctcccccctcttccagatccacctctcctcctccgaaccatctggggattccggacttggccggggacgacgagcgcgaccagcacccgcacggcgaggtggcggcgtctaggcgcgcgggcgagatggagagcctggcgcagcgcgcagcgctgctgcgggagtccctgcagaagagccagcaggtcacggacgccgtcgtctccatcctcggctccttcgacagccgcctctccgctctcgactccgctatgcgccccatccaggtgaggacgcacgccgtgcggacagcacacgagaacatcgaccgcacgctgcgctccgcggatgtcatcctcactcagttcgatcggactcgagaggcagagcgtgaaatacagaaggggccgcatgagaaccttcaaggttttctagatgcagttgatcggttgagaagcatcgagcgtttctttagctcaaataggagttaccggagtagtgatggggtgctcaaccatgtgaatgccctcctttctaaggcccttgtgaagatggagggagaatttcagaaccaattgtcccagcgcagcaaacctatggaacctgatcggctttttgactgtcttccaagcacacttcgaccgtcgtctgaatctcagcctgaaggtgggaaaaacccatcaactggttcacagtctgataatcagcagaactcagaggctgctgtatacagccctcctgctcttattgagccaaagtttgttccattactctctaaattagcacaacagttggttcaagctggatgccagcagcaatgctcagaaatatacagcgaagctcgtgcttcagcattagagtcaagtttgaagaacttgggtgttgaaaaactgagcaaagatgaagtgcagaaaatgccttgggaaattttggattctaaaataggaaattggattcatttcatgcgaattgctgtcaaacttctttttgctggggagcgccagctttgcgaccaagtttttgaatgcagtcaatctttgagggataagtgctttgctgcaataacaaaaaacagtttggctacactactcagttttggagaggcaattgctatgagtaaacgatcaccggagaaactttttgttctgctagacatgtacgagataatgtgtgaacttcaaacagagattgacaccatctttgttggagaatcatgctctcaaatgcgtgattctgcactgagtttgacgaaatgcttagcgcaaacggcgcagaagactttcagtgattttgaagaagcggttgaaaaggatgcaaccaagaatatacatactgatggaacagtgcatcctttaacgagctatgtgatcaactatgttaaatttttatttgactaccagtcaactctaaagcagcttttccaggagttcaaaaaggaagatggaacaggttctgagttggcagctgtgaccatgaaaatcatgcaagctttacaaaataatttggatgcaaaagcaaagcaatacaaggatcctgctttgatgcacatatttttgatgaacaacattcactacattgtcaaatctgtccgcagatcagaagccaaggatttgttgggtgatgattggattcaaaggcatcgaaggattgtacagcaaaatgcaaatcagtatagaaggattgcttggtcaaaggtgttgcaatgcctctctggtcaaggtttgacttcatcaggaggtagtggtcaagtagggagtgagggtggcaatagcagtggagcttcaagagcagctgtcaaggagagattcaggtctttcaatgtgttatttgaagagatctatcagaagcaatgtagctggtcggttccagataccgagttgcgcgagtcacttagacttgcggttgctgaaattctgttgcctgcgtacagatctttcataaagcgctttgggccactcattgagaacagcaaagcgcctggaaaatacgtcaagcacacgcccgagcaactggagctgctgcttggcaatttgtttgaggggaaacaagaacgtgcttgatagattctcgctgcctatcatacctcaacaagaacgtgatggcgttctatgtaaattggagcctcctgttagcattgattgtgatctagccatgggagtcaaacagctgctatgcgcaccgttccttgtttcggtgcatgatttgtacagaatgtatgtcagttatgtcctgggtcgatctggtaggttctaggattttttttttggagatttgagttcttagcagtgcgcaaagaatccgactggcaatgctgacgcgttaattgaatgcatcattgagatttagttcggcatattt

SEQ ID NO: 27413 - DNA, 1024 bp, Setaria italica
  Peptide Sequence Number=SeqID_93387
tttgcaggggaatacagtcacgcaacacataacccattcaagctcaagcttcgtagctaagcaaaacgatctactcctgctacttcagcagctggcgcagcgagtgggccggagagctcgctccccggcggctagcgggtgcgcgcggccgggaggtcctggccccggaggaagtggtagagcatggcgagcgagcgggccggcgcgaagagcggcacctggtggcccgcgccgcgcaccgtcaccagcgtgagaccctcttcgtactccaccgcccacccggccacctgctgccggtagtaccacgcccgccacccgccccactgcgccaccgcgtcggcggacgcgttcgccctcagcctctcccgcggccgcagccccatggcgttgatgctgtaccgcgtcgacgtcaccggcacccgcccgtccgtgtcgccgctgtagacccagacgcgcagcccggcggccatgagcttcttgaggatgggcagtatggtggccggcgagtcgttccatttccttatcacctcactgcagggcgagtacgggtagggcaggcctgtccggttggcgtgcagcgcgcgctgcacgtccccgcggttgaagtacttggtcacgtacgcctccgtgcacgggtcgtatcccgccggcacacgcttcagcctgtgccacgcatcatgcttggagaggaggcgcggcgcggcgacgagactcgccgggcgccggggcttggcggcggcggctggcagcaggcacgtcggcgtgtagatgctgtagatgtcgatgtcgtcgtaggcgcccaggaaggcgcggagcgccggggagcagcccttgccgggccgcccgccgtcggcctcctccttgaaggagtcgcactcgcggcgcaccgccgagtagagctcgtcggagatgatggcgtggctccaagcgtactccaccatgcccagctggtccgtcgcgtcgttcagcaccgcgttcccgatcatgaaacctttgatgttgatggctctttccctgctcgccc

SEQ ID NO: 27414 - DNA, 321 bp, Setaria italica
  Peptide Sequence Number=SeqID_93388
ctgaatatttgtcattgctggaatgatatatgattggaactgaccctggtagcttgtcaggaaaggctcattgcccacagcaatatatcggatgtcgacgacgccgcggccgacgtagcgcgacacgttctgcgcgacccaggcgtcggcggccgcctgcgaccctgcgatgctcgcgagctcgccgttggtgacgccgaccatgacctggatgccgctgccggcgagctcgcgcagcacgcccgggtcggcgtcgaagagcttcaccttgctgatccggttcgcgcgcatcaggtccaccaccacgcccggcggcgcgcg

SEQ ID NO: 27415 - DNA, 212 bp, Setaria italica
  Peptide Sequence Number=SeqID_93389
ggccgccggggttgcgggcgtcgccgtcgagctctggtggggcgtcgtcgagcgccagggccccggggagtacgactgggccggctacctcgacctcgccgccatggcccgacaccacggcctccgcgtgcgcgccatcctcgccttccaccagtgcggcgctggcccgcacgacccgctctggattcctttaccacaatgggtgcttgagg

SEQ ID NO: 27416 - DNA, 342 bp, Setaria italica
  Peptide Sequence Number=SeqID_93390
ggtccaccagcattcacagtgacagagtatattaggaagtcagaatttgatcatgatgaataatgaaagtagctatacaaagtatgcagcaggagaaggagcataagcataatgcaccaaaccagaacccctaaggaatcgcctcatcctaggatatttttcatcagtcatgggatcattgcacgatcttggtaagatgacagcattcctatctttacaccagttgtcaaaacattgcatgcttcaagccaaagaagtactgctgcatataaagttaggacctaatgcatttatgaaaccatttcccaaatccaacacgctttgtcaaaaccatggacctta

SEQ ID NO: 27417 - DNA, 308 bp, Setaria italica
  Peptide Sequence Number=SeqID_93391
aattagacaaaataatttcaaggtgtgtttttgcactcatgataccaaccgcaacaatgcttttcatgctgagggtgatgcgttttcagtttctggataccatgctaggcacagaaaggcctgactgaacatcgttgaaaacttgcaaagcttgggcaatcgttttggttaaatagtgcagctgcaggagcaggaaccatgcttctagatactttgaattgtatagctatattgtagtgcaggaactagaccatattactgagcatcataccgaacacaagaaacatcactgtgtaagaaatatttac

SEQ ID NO: 27418 - DNA, 377 bp, Setaria italica
  Peptide Sequence Number=SeqID_93392
cttccctactgattgcaacgacttggtgggcgagagctccatgcatcactcgtcaccctgcaaaacaagttccagacaccaacaataccagtgaggttgggattcagaggcaaagtgaaaaacaccatcggaatgtacaaggaagaggaaggtggcgctgctctcacctcctcatcctcgtcgttcacctcggacttggacttgtcagagtcaccagacgcggtagggcctccagactgcaaagcagatgtcacaggaaacacatcacttccatgtacagtagagacgaatgtgcaggcattgtcaggagatgcaagtggagactggggagtgaagcataccggcttgttgttgtaggcgtccatcttcttggtgta

SEQ ID NO: 27419 - DNA, 535 bp, Setaria italica
  Peptide Sequence Number=SeqID_93393
aggcagtttagctgtagtgtgttcgcttcttcggcactcgaccgttgggggtaagtacagactgcagactgacattccaacaacggtcgagtgccgaagaagcgaacacactacagctaaactgcctcacttcagggacactagcaactaccaactccaagaggggacaactactactgctacatctagaaggacagacagcatccagaggctaaggagcagcgacagcagcaccgccggttaggcagacgacgacgaagacttccctactgattgcaacgacttggtgggcgagagctccatgcatcactcgtcaccctcctcatcctcgtcgttcacctcggacttggacttgtcagagtcaccagacgcggtagggcctccagacggcttgttgttgtaggcgtccatcttcttggtgtactcagccttgacgcttcttcggccttggtcacgaagggggccttctacaagacctaacggaaacaaagggaaaacttaaaaccaaaaacttaaaaagtaaaaaacaaaaaaa

SEQ ID NO: 27420 - DNA, 756 bp, Setaria italica
  Peptide Sequence Number=SeqID_93394
taggcaagttcatcgacaatacacttatatggatgaacaggtttcaacacggaatggaacaaaacatagttcaaattcataatctcttgaaccgaaaagtaagaatccggagaatagaagcggacatcaccagctcatagatctaagactgagactggtacaagcatccccaacttatccactagttaacactcctaaccataagacatgagcgaaatttgaactggcaaccacctaatagagcataaccgtcaaaatttgaacgaggaacactagaaatttcgcagatctaacattgcaataggtaaccacaggatagcacaacgcagaggacccaaaaccggaagaaatttgaacactcaaactaccaaagggcacatcgaaaccaactacgcagttcacacggttcagaggggagaaagcgaactcacagcctcggacagggacttccacttgtcaccaccagccttgccaatcacagagacttgcttcacattggggtgcttctccttgtagtccttcctgaactcctccatgaagacgaagaacgcgctcggaggcctcttgggcttgttcgggtccttctcggccttgctcttcctcaccgagagcctgcacagaccccatcagaacccccaagcaaaaacgaatcgaaaccaccaccaaaataccacgagaatggggggaaggagacggtaggatcggatcgtacctggagtcggcgccgctggacctcgccctcgacttcatctcgga

SEQ ID NO: 27421 - DNA, 957 bp, Setaria italica
  Peptide Sequence Number=SeqID_93395
caataatcgaactgacaacatgaacagatgatgcaaaattgctgatccagaattcagttctcttatttgcaattttgcatcatctgttcatgttgtcagatcacaataatcgaactgacaacatgaacagatgatgctagtttgttatttttttttttattttttatcagcaaaaactcatctattaagatgtgagataaaacaggcacggtcgcacggatgcttgggggtaagtacagactgcagactgacattccaacaacggtcgagtgccgaagaagcgaacacactacagctaaactgcctcacttcagggacactagcaactaccaactccaagaggggacaactactactgctacatctagaaggacagacagcatccagaggctaaggagcagcgacagcagcaccgccgggttaggcagacgacgacgaagacttccctactgattgcaacgacttggtgggcgagagctccatgcatcactcgtcaccctcctcatcctcgtcgttcacctcggacttggacttgtcagagtcaccagacgcggtagggcctccagacggcttgttgttgtaggcgtccatcttcttggtgtactcagccttgagcttctcggccttggtcacgaagggggccttctcagcctcggacagggacttccacttgtcaccaccagccttgccaatcacagagacttgcttcacattggggtgcttctccttgtagtccttcctgaactcctccatgaagacgaagaacgcgctcggaggcctcttgggcttgttcgggtccttctcggccttgctcttcctcaccgagagcctggagtcggcgccgctggacctcgccctcgacttcatctcggaaccttcgggtgggatcggcgacgtgggagtggatgcgtgctcgtgcgccgcgtgacgggtggtgcctgtgtgcgttgcgacgtt

SEQ ID NO: 27422 - DNA, 402 bp, Setaria italica
  Peptide Sequence Number=SeqID_93396
gcggtgggggtgggggattcttgccatagcatcagcattcagcagtagttggccggttgattgcctgacgggcgggcccatactcggtcccggtagttgagctgcccccatctccccgtggcccacatgtcagtagcggagcgaagatcccctccaaaagcaatggaaaaagaaagggagaagaataactagaaatgtgattctttttgtgcaaccttttggagttctccaacttgagctttgctttgtgggggcctggcatctgttggaagcttgcaatcgctgtaaactgtaaaaacatgtgaattgggggtaaaaaaatatggagtgtatttgtactgtatagagcttgtagaacactactagataggattaaaagcaagggtaattcattttcacaag

SEQ ID NO: 27423 - DNA, 851 bp, Setaria italica
  Peptide Sequence Number=SeqID_93397
gacaaagcagttttttgacaacaaattcagagagtggttggagctttgtagtcttctcttgtagagagaagaaacttcattgaattttccacatgaccaagctggtcattctgactatcactacatgaccaatttgtctcatcctccatttcagatttcagcttatcctgtgctgaactaagctcaacagtagcccatatgtgaagccaatcagggtgttcaccatatattgaaaagactgataatgacctagacagtccttcagaaagagatgcggctttctgaattcctgaatctgccagaagctgcattcttttatcaaaagaaatcattaggtcatttaagtgcatccaagaggactctacttcaggtttgccaacagtagactgatcctgattagaggtgacgagtgctgggaaaatttgcctctcaaggtatcctacaagcattttcaccattccagttacccaagattctttggcacttaagcctgctaaccttgcatgatcgatcaaaggctgcaatatatcatccaccccatccatgaaatcctttgttatcttgtaaacaagggtaaaaatgaactctggctgctcagaccatttcgcaaaatgatattccatccttgaagcaacagggtgaactaattcatcaattgcccagagtccattttccaagcaagcagttttatcaaagcacttcaaatctgcccaggcaggagttgctgctgctaattggcattgacggacttcacggttttgcttgtacatgctgcagtgcacagagtgctaggaagctttgagaatatttctctttattttcaccgttcatcaggactagaggatttggga

SEQ ID NO: 27424 - DNA, 1868 bp, Setaria italica
  Peptide Sequence Number=SeqID_93398
tagccggctgagccagaatgccggtattttccacccatctatctggggagatttctttcttggctactccaacccagcagcttcatcgcagcaacagactcagatggaagaacgagccgacaaactcaaggaagaagtggccgaaataatggcaagttcaacatttagcggcctgcatgagaggctacatctcatcgatactttggagcgtctgtgcttggatcacctgtttgaagaagagattaatgctgcattaccacaaatgcagactgctgatgtcagtgactacgatcttgggacggtagctctgtggttttgctacttcgcaaacatgggtataaggtttcaccagacgtgcttgcgagattcaaagatgaagatggagattttctagcagataaccctgcagacctactgagcctttacaatgctgcgcatatgaggacccatggggagataatacttgatgaagccatactattcacacgaagttgtttagaaacaacattacccaacatggaagaatcattattagcacgtgaaataaaatatgcacttgagatccctctgcctagaagggttagaatatatgagtcaaagtattacatctctgcatatgagaaagatgctacagtacatgaaacgatattgcagcttgcaaagttgaactcaaatattatgcagctccatcatcagcgtgagctgataaccattacaaggtggtggaaggatttacatattgaatcgaggcttccatttgctcgagatagagttgtggaatgctacctgtggatgttaggagtatactttgaaccatgttattcacgaagccgaataatagtgacaatgattattgctatagtaactctcttggatgatatttatgattcttatgcaactccagaagaatgtgaattacttaccaagtgcattgaaagctgggatgctaaggcggctcatgacctcccggagtgcctgaaatttgctttggggaagatgttggatagctttcaaaccattgcgaatatgctccaccaggaggagaaatatcgcatgtcctatctaagatactttattgaagatctggttagaagctttagcatggaagtaaaaatgcttgaagaaggctacattccagagtctgttgaagagcacctgcaagtttcaataagaactggagggtgtcctcttttgtcatgtgcttccttcattgggatgaatgatgtggcaacaaaagattgttttaattgggtttctagtgtacctaacatggtcaaggcactttccagaattctcagactattagatgacctccaatcatatgagcgggagcaattgatccctcatgttgcgtcaacaatcgatagctacatgaaggagcacaatgtctcgattgaagtggcacgtgagaagatacacactctaaaagaggagtcatggaaagattttaacaacgagtggttgaattcagacaataccatcccaaagcaactattggagaggatattcaacttgacgaggacgatggaattcatgtacaaccaagaggacaatttcacaaacagcaccaacctaaaggataccatccattcattgttcgtggaaccatatacaaagcttatttaggatttgtttgttggcaaccaacaaacaaattgttggcccaaataatataatgtgggattagctcatcctccagcacccatgcatgtttcatttgatatagtaggactgaaattgcactttaccaaatgttgattatgcagaccaactattctctactatcactatcagattttcttatttgaccacatgtataattggttgcaatttatggctatttacccttctttttaacaaaaaaaaaa

SEQ ID NO: 27425 - DNA, 312 bp, Setaria italica
  Peptide Sequence Number=SeqID_93399
cgcctcacctgcccggcccggtgcttcaggtccttcagctacaagggcgcccacggcggcggcggcgggggaggcggcgggtgcagcttcgactgcaccacccgatgcgtcgccacctgctgaacccgcctccgcggacgacgacgggttggatcatatggatggcgcgcacgcacgtgttgctctgtgtgtcagactgtcagtagcttgattagctagctagctagtagtaatactaccagtggtttggttgtgatggagctgagtgagagagacttgattagtggcagtgacgagcggtgctcgtgatgt

SEQ ID NO: 27426 - DNA, 315 bp, Setaria italica
  Peptide Sequence Number=SeqID_93400
tcgaaggcctcccgagcggccttcacggcgaggtcgacgtcggccttgtcgccctcggcgatgttggcaatgacctcgccggtgcgcgggtcccgggtctcgaacgtcttgccggagacggcgtcgacgaattggccgttgatgaagagcttggtgaacctgacctccaccttgggcacctcgaaccccttgtcgccgccgctcccgttcgcagccgccatggcgccgcccgccgcagacgcagggatggagggagatgtgtagtgtcgtgtgcgcgtggacgcgggagaaaggaagaggaggatagatggagga

SEQ ID NO: 27427 - DNA, 1828 bp, Setaria italica
  Peptide Sequence Number=SeqID_93401
ttttagttagtcagtaaaatcctgaaacatattctttccctgaacagattagacaccagccaattcaaccaacagttccaaacatgtctttattgttctggaacaagtccatgctacattgtacatcatcaatccatgcaggtacagagctacaaacaacccacgctcttcttttatctgtataagacatgtttcttcttttccccccttgtgctgttcaattgtcttggaaaagaatgagatcagagccagggtgtgttatataggggtgtgaccacggtcttcgtctggagatacttctcaaggccatccatgcccatgtcctttccgaacccgctcatcttgtacccaccaaatggcgcatcggggtcgaaggcaaagtagcagttgatccagatggcgcctgcacggatcgatcgcgacaccgtgtttgcgatgtcaatgttcttggtcacgatgccagcggccaggccataccgagtgttgttcgctttctgaatgacctcctcaatggtcttgaatttcatgagcgccatcaccggcccaaagatttcatcttgtgcgatcgccatgccatccttgacgtccgtgaagatggtgggctcaatgtagtaccccttgtcgccacagggcttccctccagtgaccagcgtggcaccttcccgcttcccgatatcaatgtacttgagaaccttctcatactggtccttgtcaacctgagggccttggttgacacgaggattgaacgggtcaccgaccaccgatttcttggcgagctcggccgccttcttcacgaacgcgtcgtagatcccttcctgcacgtagatgcgcgtgccggcgacacagatctcgcccttgttggtgtatgtagcaaagttgacgaggttcacggccatgtcgaggtcggcgtcatcgaagacgacgatcggagacttgccgcccagctcgagggacactgacttgagattgctttcggcggccgccttcatgacgaggcgaccgacctccgtggacccggtgaagctgagcttgtcgacgtccatgtgcgatgcgacggcggcaccggcggtgggcccgaacccggtcacgacgttgaggacgccgtcggggacccctgcctccttggcgaggtgcgcgtagaagagcgcggagagcggcgtctgctcggcgggcttgacgacgacggcgcaccccgcggcgagggccgggctgaccttgaagaagaacatggtggtggggtagttccagggcacgatgtggccgacgacgccgacgggctccttgagcgtgtacccgtgcatccgctgcgccatcttgagcgtctcgccgtggatcttgtcggcggcgccggcgtagtagcgcagcaggtgcgccgcgccggggatgtcccggaccttgccgacgaggaagagcttgccggcgtccaccgtgtccagcatcgccagctcctccacgtgctgatcgatcaggtctgcgaacttgtgcaggatccggccccgctcatagcccgtcatcctgggccagggcccattgtcgaaggcctcccgagcggccttcacggcgaggtcgacgtcggccttgtcgccctcggcgatgttggcaatgacctcgccggtgcgcgggtcccgggtctcgaacgtcttgccggagacggcgtcgacgaagttgccgttgatgaagagtttggtgaacctgacctccaccctgggcacctcgaaccccttgccgccgccgccgccgccgccgctcccgttcgtcgcgcccgccatggcgccgcagacgttcagagcgagaggtgtgggtgtggccgcgagagaggagaggagag

SEQ ID NO: 27428 - DNA, 743 bp, Setaria italica
  Peptide Sequence Number=SeqID_93402
cgctgctgtctcacggccatgagccaccaccacggacaatgagcaaggagcacagcggcttgctgtgttggccagagagcttcaggaggtcccggggaggccacagtgccagcctagctgagatcagaaaccagccgggtagcttctctgccagggcgctgcagctgagcatgtacggcagcatggtgaacctcacctctggccagcagggtcaccggcggcagaagccccatcgcatgccggcggcgaaccataggcacagctcttcctacccccgggtgccgtcgaggccatccaacacgcggcctctgctctccgtgcagtcggagggttccaacatgaagcgagtggcggcgccgaaagacgccactgctggcgaggccacaactgctgctccagcgacctccgcaggccagcagcaacggacggcggtgcaagacgacaactcgagcgacgactccggcggggaagaggtcatcgtcagagtcgactctcccagcatgctctctttccgtcagtccgccgccgcggttcattcgccgccaccgccgccgcaggaccagtaacattgttttgtcctgtaacatgagcgcatcgttgctgcgtgtattgtatagcaaaagtaaaagggacacattcttctcccttcactttgtattgatactctgctaagtagggacatctccatgctgtatatgcagggccttttggaatcctggttacatggattctgataaaaaaaa

SEQ ID NO: 27429 - DNA, 270 bp, Setaria italica
  Peptide Sequence Number=SeqID_93403
cctagttcgaatgcgggacacgaatttcggtttccctcgcgtgccgcccacctcctcctccccacccgccgaagcagcagccgagccgagccccaagcggaggagagtaggagaggccgccgaggagccaccgacgccgccggagatgagggaggaggcgctggagcggctgcgcggggtggtgcgggacagcgtcgggaagcacctgtactcgtcggccatcttcctcgccgacaaggtggccgccgccgacgggggaccccgctgact

SEQ ID NO: 27430 - DNA, 287 bp, Setaria italica
  Peptide Sequence Number=SeqID_93404
gcacagtagtgttgttattggctattgggtaacccacttgtgcagattgatctttcgccgaactagtacttccctgaggactagcagttgattcaatctgcttattctctgaactgctgcttccatctgaagcagctgaacttctagtatggttcttgttatctgcaggagactgaatcagcagagtctggttgttgcctgcagctccactgctgtgagatgcagttccattaccatccatggccgctgcaactgcacttgtagcatgattaatgaatggaacagca

SEQ ID NO: 27431 - DNA, 447 bp, Setaria italica
  misc_feature (15)..(15): n is a, c, g, or t
  misc_feature (21)..(21): n is a, c, g, or t
  misc_feature (287)..(287): n is a, c, g, or t
  Peptide Sequence Number=SeqID_93405
cgctactccctgtgngtgtcncttagttttttttttttaggattgcacctagcaaagctgctgttatagtgagatattgtgagtccatttacaagtctacaccttttaagtaacatcagaatatcgacagaacaaagtatgctactgcataaacaaaagacagtcagcacatcaccgcctaccagagtaccagaacatgcagggatcaacagcattacccgttgcacattctgatagacaaaaagctgtaagcaaccaacagatcacttgttgtctaaaaaaaaacngagcaatgccggtggcaatcagcaatcaccagagtcaatcagatcagatgaacttggccttctatggtgcttttcatggaagtaagctctcccttgacaaggagttcagcaggaatacgaaaccccagccacgaacattgccatcttgctatcacagtat

SEQ ID NO: 27432 - DNA, 321 bp, Setaria italica
  Peptide Sequence Number=SeqID_93406
aatgatgatgaacatggggtgtatttgttgatgaggtgaaaattatccaaagaaccgcctcgaagttctttcttgtattccatttccaagtgactgaatcgattccagacccatttccctgcatcatcacttggtatgacaccaccatacattttatttactttggatgctgcaggttgttcatgattcataaatggtaaagcaattgatttctccacagaggtctcgaactgatgtgaacccactttcagcaactttgccttgagaagaaagagatgatcttacatcatgatcttagaataaagtgggcagctcatgctt

SEQ ID NO: 27433 - DNA, 313 bp, Setaria italica
  Peptide Sequence Number=SeqID_93407
gcacatgtttggcaacattttatagataaatacagaagtggaatacaacaagtcaaggaatgtaagaaacatttgaaaattgcaaccattgagaggagggccatcacactaggaccgaaaaccttagtagcgtgtcagcagtcagcatccagtgcacctgagcactcaagattgaccatagatttctgatcacataggcatacgtccataccttataccagcaggaaaatgtcatccaccacaacactagtgtaagttcacaaaaggaaaacttctttcagattgaaaaaaaaatctagtttattactagttt

SEQ ID NO: 27434 - DNA, 1230 bp, Setaria italica
  Peptide Sequence Number=SeqID_93408
ccgaagtctcgagtggaaaccacacttccattcaacgcgcagcccacgaaggcacctttgctacaactgagcctctgccgctcgtccaagatgaccagcagaggcactaataccagccccaattgacatatgtgcatttccactgaaagttttgatggcatctgtgttcctaagaacaataatgtagtcagctaactcgcctccagcctgaactccatatccaagaccacaagtagagatggcagaaggaggggaccaagaaccatcagctctgcgagaaaccactagcccagtaccaattttgtatgtaagcatcattccaacctttaccacagtgattattgcaagcccttttgcttctctgagaattgaatcagggatcgacttctcagcttttagctctcccaccttacaatagccatatatggaatttgcagctttgtatatttcatactccattttggttgcccatgggatgtttatccacgacctcaaggtgctcaggtctgttaagtcttgagttggaaattgacaagcacgactgaatcgattcatcaaataaggttgaatgcactcaagacgcactccacaaacatcacagaccctttgaggatctgaagtcatgaacttcgggggcatcaagcttctaccctttgaacagccaccacaaaatatcccaccacaaaatcggcaatgatggcgagtgcaaattattggatgaaaacgtgctccgcaaagcatgcaagaaggggcagcactatcaggcaaccactttgttggttctgtctcaaggagagcatgttcagagccagcactgatatcttcaagtgtttgagccttatccttcaaagcctcctcaaggaaaaaatctgaaaccatcgacatgccatacctcccaagatcaaatgacgcaatagataatattttatcttttcctgcaacaaccatctcagacagcacatcccacattgtgatctccatattttcttcatcaatatcccactgatattcttcttctggaaagcatctactattataaccaaaccccttttgccactcctcatgatcatgttttgtcattggtggaacagaagcaggtacccatatgcctgtttgctcacaaagtgggaaactatcacagattttttctccggattccttcatggttgtcatctcatcgctgaactcataagcattggcaacaccaaggcttccttccttgaaaattta

SEQ ID NO: 27435 - DNA, 389 bp, Setaria italica
  Peptide Sequence Number=SeqID_93409
atgaacattctgatcagaataatattgaccataagaatgaagcattatgcagcatgtcaggaaaaggagctctaggtctaccaggctcataggctgccaagcttgctggtgacatttattttagtgcatatcaactctaccttattaatgaagacattccattcaaattaaatgttggattctgaagataagatactgggtactacaaaatgaatgcaacaaaatggattgtgaaaacctcccgtccactttcaaatctgaacaactgcttttctgatttcttccacatactactcaatatttaaatccaagcaattggttctggattctagaacactccgcttggaagacaattattgtcagtttgacacacattgtatagttgtgat

SEQ ID NO: 27436 - DNA, 415 bp, Setaria italica
  Peptide Sequence Number=SeqID_93410
gttcgggttggagtcgggagatttgagaggagagcgagcgctgccactgggagggagacgcggacggagacggacgggacggatgcttattcctgtgcgctgctcgctgccatggtgagtgaggcgctgctggtatgcagcaggagctaggaggcaggcaaccaccggacgagcagagcagcgccacactgcgcgtcctgcccaatctctagcagcagcagggggattcgtgagcgcggggctgcgaatcttgaagaacgcggctgcggcggcggccatgccggagtcctggagacccgccgaggcgagcgcctcgccgtccgatgcaggggccgccggcgcctcggctcagagccagggcacgggcaatggcggcaaggggcacgcggcggcggcgacagcgacgcgggtgccg

SEQ ID NO: 27437 - DNA, 460 bp, Setaria italica
  Peptide Sequence Number=SeqID_93411
gtgatcgatgaatccaggccatgactggaggcaggatcccaaacaagaagcagtttgcgtaaaccccggccaaaatccaatgccctggagaaggctgctgagaagaatgacgcaataaagataggaatgattaacaccatccaagtcagaatcacccaatttcttccataaccactactagaatcagaatgctgcatgcttccttgcttcggagaaaacctctgaacaatcaactcgaatgtgtctgccaactgcttcggaaagctcactgcatatcctatcaggctcgttgccaatgcagcaaaggcaaagcctcgaacagcaggtaatgcggctggattcaccgagagaagcagcttaataggatcacctattccagcattaccaccagcacttgccagcccgagtaattgtaccgtctatttcctacgttacttagttcttaccttattttgttcct

SEQ ID NO: 27438 - DNA, 291 bp, Setaria italica
  Peptide Sequence Number=SeqID_93412
gggcacaggatcggccgtcttcccaccaaaaacagcatagatagcaaggtcttgaggcaagaaaccagtggacagcccctcatacagctgttcaggtgggtaaggtccacacatctgcccatgctcgttcatatacatgcaaccttccaagtattgatgttggaggtatgcaccatatgttccattttgaccggctgaaaagccgagcccagattttggataaaccacaccgctgttagcggttgtacaaacactttcctgcattgcaggaaagacaccagtattctgtgt

SEQ ID NO: 27439 - DNA, 420 bp, Setaria italica
  Peptide Sequence Number=SeqID_93413
gcgggacttccgcgcggaggccgagcctcaggagtcggccgggagcaacagcgtctccggtcacccgtggacgctgtcaagggagccaacctcggtggagtccacggaccggacatggagcaccggcgacgaggttgtcgagcagtccggcagccacggagcccactgcagcccgatgaacaggccccggcagagcaagcagaggccgtcgcagcccgagcccagcggccggtcgcgcgctggctccggcaacggtaacacgttgcatcgtggacgcagcgcacatcgtggcagcagcagcagcgtggcgagcggccggtccggtgttcgggtcgtctcggccgcttcgtagtggatcagaattgttagatcaggcatgttgctgcaatcgttgttctaatctaggtgttggtagtggca

SEQ ID NO: 27440 - DNA, 473 bp, Setaria italica
  misc_feature (74)..(74): n is a, c, g, or t
  Peptide Sequence Number=SeqID_93414
aacatagtattgtttttcatgcgttatgaggttactaatagtattccaaccatctaatgtaacaatcaaatagngttaaaaaaaagtgatgcggttttcatcaaaagcatagtctctgacaagtgctggaactaaatgatacactgatcaggcatggaccgaatacatgtagcgacaccattggtaacaaaaaatatacaatataggaaaagtatgagcaatttcgaaaggtagctgaccaacctgctagcctcaatcagtggcaaatggtcatactgtggtttctcaatcaagttttgtactttggacaacagttcttggctttcaggaggttgcttctttagactctgaggtaaaattacagtaagcaactctggcttttcagctcttaaagcgcccctgataacagctgcattagttccggaagccccagatgtggtagtattaataatagaattttactagacaaatta

SEQ ID NO: 27441 - DNA, 488 bp, Setaria italica
  Peptide Sequence Number=SeqID_93415
cagtacccttgacaagagtctctgtctgagtaggaatctttacaccatcatcatctggcccaaacataatagtatcatctcttccttgactcctcacatcaccttcatgcccatctctttgcatgtatccgcagagcaactatacgagcacaataaaaacagaacccggttcagccgtgcctctgccggcggctgcttggtcgcctgagcccatcccagcaagacgccgccggggctcctcgcggccgaggaacagtgcaagaagccgccgagtctcaagttcattcgcggcggcgtcctcaacgagggaagaccgccaacgggcgccgcggcgcaagaacccgccatcgtcatccggccgccgattccaatctacgcagaggagggagggggagaaccgcgtgaactgctgtgcgtggcggcgctctcgtgaccaaaccgaggatggccgcgcggcgcggcgcaggtcatgtcagagggagggggag

SEQ ID NO: 27442 - DNA, 556 bp, Setaria italica
  misc_feature (1)..(74): n is a, c, g, or t
  Peptide Sequence Number=SeqID_93416
nnnnnnnnnnnnnnnnnnnnnnnnnnnnnnnnnnnnnnnnnnnnnnnnnnnnnnnnnnnnnnnnnnnnnnnnnnagtcaacaataaactttaactttataatcttattcctttccctgacgaactaggcatatcgacaagattatctgtttatttgtgacaagaatcaaaacaatgggtggaccaaaaatgactttcttctccaatggaaggtcatcgcagcacctataccataatataggaactaactaaaccgttcagcttgcttttccccccaccaccagcctacctcacggacaaaaaagagagaagatctccgattagaagctaatccaagtagaaaagcgtcacgatcttccgaaggttcttggcctcctggcatgtctccatcagcagcttgctgtcatggaacgcgaagcagatcacctgttggatcttcgagatgatgtccatgttgcataacccttggcccttgggcagaccccaatctagagctatagttcatggcatcaacctgtccaatgcttgtttcgcgtaagttctgctagcctcaatca

SEQ ID NO: 27443 - DNA, 1098 bp, Setaria italica
  misc_feature (1)..(61): n is a, c, g, or t
  Peptide Sequence Number=SeqID_93417
nnnnnnnnnnnnnnnnnnnnnnnnnnnnnnnnnnnnnnnnnnnnnnnnnnnnnnnnnnnnnctaattagttccttgagatcttcagcaacaataaataaacttttaataatattattcctttcaccgccgaactaggcatatcgacaagattacctccggtttattcgcgacaagaatcgaaacaatgggtgaaacaaaaaatgactttctccagtgggaggtcatcgcaccacacctattcccattataccgaaactaactaaacctttcagcttgccttttaatccccagccaccacagcctacccccaccacggacaaaaaggagagaagatccctgagcaggagctaatccaagtagagaagctgctaatccaagtagaaaagcgtcacgatcttccgaaggttcttggcctcctggcatgtctccatcagcagcttgctgtcatggaatgcgaagcagatcacctgttggaccttcgagatgatgtccatgttgcataacctgctagcctcaatcagtggcaaatggtcatactgtggtttctcaatcaagttttgtactttggacaacagttcttggctttcaggaggctgcttctttagactttgaggtaaaattacagtaagcaactctggcttttcagcccttaaagcgcccctgataacagctgcattagttccggaagccccagatgtgaatatatgattttttgttatgaccatagcatagctcaggatctcaataagctgttgatgcatataccccatgttgcgggttccaaagaaacctattgcacgaggtccttgctgctgaatagccaacagctcctgtaggtaatctaggtcagggataggcttgtattctggttcagcaaccattgcagtacccttgacgagagtctctgtctgagtaggaatctttacaccatcatcatctggcccaaacataatagcatcatctcttccttgactcctcacatcaccttcgtgcccatctcttcgcatgtatccgcagagcaactatacgagcacaataaaaacagcccctggctgagcctcattagtggaaaaggcgtcggggtctgcttcttggct

SEQ ID NO: 27444 - DNA, 686 bp, Setaria italica
  Peptide Sequence Number=SeqID_93418
aggaggaggcaaggaggagctgatcagccatgcagtgggaggagaagagggggaaggtgaagaaggggtggctggcggtgcgcgtcggcgccgagggcgacgagggcggcttccagcggttcgtcatccccatcgcctacctctaccacccgctcttccggcgcctgctcgaggccgcgcgcgacgcctacggctacgactactcggcggggccgctgcgcctgccgtgctccgttgacgagttcctccgcctgcgcgcgctcgtcgaccgcgagacgcaggccgcgccctcctcgtcgtcgcaccgcgtgcacgccggcggacacggccactactccctgtccccgtgcacccgcgccaaggtcagctcctgagatgcctgtgcctggttgcctggtcgactcgagttctgctgcttggcttccattcatgccgtgcgcgcgcgcgcggcgaccgcgaggagtccatgtccatcgatcgagccggaggtgtagagagagaggggggagaggcagtagtagtagattagtcttgggggtgcttcctctttgatttcgagtgttggctttggccttctccttttgcgtctgatttggcagatgcgcatgtactatacagatacatcgatgtataattactagctgaattgacactccatacatatacagatcttcacggcttgatag

SEQ ID NO: 27445 - DNA, 250 bp, Setaria italica
  Peptide Sequence Number=SeqID_93419
cggcggaggcggaggtggaggggcggaggacggcatgtacacggagctctggaacctctgcgccgcatcctccgccgctgcgccccccgcccgcagaggcgaaggttcctccgcttccacgccgcctcccctgctgctccgctcgcgaccgcacggagaatattttgccaatctatcaactcagctaatgtgttgggggcttcttcaccggcatctgatgaggcagtcccagttccagttgtcatgatag

SEQ ID NO: 27446 - DNA, 695 bp, Setaria italica
  Peptide Sequence Number=SeqID_93420
tgaaatggaaaatgtaagtgtcaaatttatgctgttatgctatggtttgtgttttgatgctttcatcctgaacttacttctttaatatttgaactggcaggttgacattgatattgcaactcatgtggttgttgaagatgatggaccaaaacgaagcatgctttacatagagacagctgatcggcctggcctacttctggaaataatcaagatcattgctgacacaaacgttgatgtggaatctgctgagattgatactgaaggtttggttgtcaaggacaagtttcatgtgagttacagaggcgcaaaactaaacagctccttatctcaggtgctgattaattgtctgcgctattacctccgaaggcccgagacagatgaagacagctattgatcgttatggtgcccagccttccaaggacttcagatcagaaagctgtgaactctgccttgatttccttttcctgtgaagtgccttgtacaaaatatgcctactctgttcccaaaatgctgccatatagaagatggcattggcttatcaaatcagttgggatatttttagaagcttcaggtttaggtttcagtagctgtatcccatttgattccgattgtaagggtaacagtggaaggtcctccattgtgcatgtaaaatacttggctacgatgtcttctgtgatgaaataaaggagcattga

SEQ ID NO: 27447 - DNA, 347 bp, Setaria italica
  Peptide Sequence Number=SeqID_93421
tagttttaggcaagcagatgaaggcactcaagggaccttggccttgatgtcacgaaaggaactgtaggacaactgactcagctgccacacaaacaaagttccacatcatgcgattgtgggtgcttgccactttctgtttactgtatttttgtatacagaatctatttgtctgtgtctatgtatagaaaactaaagagcactcactgtccatgcacttgtataaccacactcacctttttgaattcttcgatttgtttaagtgcacaatgtcagcagtcagcacatctatgcttgtgcctgtattcatcttcatgtgatcagtttcctgactatctctgtccctggaa

SEQ ID NO: 27448 - DNA, 211 bp, Setaria italica
  Peptide Sequence Number=SeqID_93422
agaggtgcgaaactaaacagctccttatctcaggtgctgatcaattgtctgcgctattacctccgaaggcctgagacggatgaagacagctattgattgttatgttgtccagcattacaaggcctcacagaaaaggaactcaaggcagagttccgtagcttctgatttgaagcccttggaatgctggacaacataacaatcaatagctgtt

SEQ ID NO: 27449 - DNA, 1713 bp, Setaria italica
  misc_feature (1)..(64): n is a, c, g, or t
  Peptide Sequence Number=SeqID_93423
nnnnnnnnnnnnnnnnnnnnnnnnnnnnnnnnnnnnnnnnnnnnnnnnnnnnnnnnnnnnnnnngggggttaaagggcactgttttctcggctccaacgcaacactacgatttttctcaaaaccaaattgactatcgagagcgtaatctagctagatgatattacaacaacattttcatgtttgattttatcaagagtaactcctccgcggtcacctttttccaaacaccaccaaccagtaatctacccttcaaaggataggtcagttctggcatatctgaaatatcatactctggtgatcttggtatgttcagaatgctttcatcctccaactcctcagactgggattcaaacctttcagaatgatcaacctcctcaaaatttccatgctgttctaatgtggcaacttccggtccatgatccacaacatcaaaggcaggaagaacagcacatgaactaaatgaacagggtattgttcctattggacagggagtccatgactttgccacagaccatctgttatgcttctctggtgtgctcgtgttgaatgatccttcagtggtgccagtttccgttaagcatccattcttctgcctcttcaactgcaacttgaacatttccagtgtctctgttgccttttcaattgatccaagttcgttgcatatggttcttgattgtcggagaactttagccaaattaggaagtgataagacaggaagtttcctcaatttctcctccacattattattgttgaccatctcaatcaacagcagcgctgcatctatgatacatttttcacctatagtggatagattcagtaacttccatagaagttttgcgaggcaaaaacgagggactgcattcttgtctgaagaaagtactcctatctcatgaacaaatccaatgtagcctgaatccttgagctcttttatgcttgtgataagccatagaaccaaggagtatagccttttcacttcaaatggcgcaactggtagacaagcaaaagatacacctttgtttgtgagttcttccttggcatcgatcatttcaattactgacttcagtacactaagcagcaatcttggttctttctctgaaagtttcattatgatagttttcatatcactgttcgatatttgagtgtcagatgagtgattaacagcaaaactatgagtttcttgcatgtcactgctttcaggggactctggagcatcgagttgcataagatccaataggacagagacaacctcaaagggataagcgtagtatagccgtcgagtgtactttatggctttgactatcagtttctcagaacgtttccttttggaacctgattttgtttcttttgaatcattctccttcagaaagcaagcaatctcatgcaatctcaaccgcagttccacttgaacatcaggaattgaattactctggcgatcccagtaaatacacttcaaccaatcaaatgccttaatgcttgccaggcgtaacagtcgcagggagggaagattgcgatgagaactctcatgccgaatgtccactagaactcgtggtattccaacagcctcagctagttcagatattgaacggccagttttcttatgtggattctccacaaaaccatttacgagcctcatgattgccatactgtacagcatcgcgagcatctcctctgactccatcgcatcagcagctagtcctaattccgtcttccgt

SEQ ID NO: 27450 - DNA, 317 bp, Setaria italica
  Peptide Sequence Number=SeqID_93424
atccagttactgtaccaagaaccgtcacaaatgtaggcgaggtcgatgcagtttaccacgttgcgattgagagcccggctggagtcaggattgaagttgagccgtctgttcttgtgttcaatgccgcaaacaaagttcatacattccaggtcaagttatcacctatgtggaggttacaaggagactacacgtttggcagcataacgtggtacaatgatcataggacggtgcgaattcctgttgcagcccggatcacgattcatgatctgtttgcagatgttgcataagaaaggtgaaacaggcaaaatcataaagtg

SEQ ID NO: 27451 - DNA, 256 bp, Setaria italica
  Peptide Sequence Number=SeqID_93425
cctgtttccacttcccccagccggcgcggctcaggctccgcgctaatggcggtcgacccgcggcaggtggtggcggggttcctcaccctctccatgttcgtcatgctcggcaacatgatcaagcacgaccacttctcctcccccggcccccagctgggcttggaggcaacaggtgcagagtttaacacaatgaagcttgacgataatgctgaaatgagcaatatcaatacgggtggagttgagaacctaatggacg

SEQ ID NO: 27452 - DNA, 680 bp, Setaria italica
  misc_feature (229)..(229): n is a, c, g, or t
  Peptide Sequence Number=SeqID_93426
caactggagatgagaaatttactgaagcatttaatctgttgttgcacccttcaagccgctttgatgacagtgaaggcccaaagttatatacataatggggaaaagaatcaatgaacagtttgggacaaaactgagaaacaaaacgagaaacatgtttacagtgttctccagtttctgtatgttacacattgataaccaaactggattcgatctctgtcccccccctttnttgaggctgttaggtcagatcctcgacatcggatggatcgtctttcgtgagattcacctcgtggcgggagagctcccacaggagctgctcgatccccagcttcctcagctcgtgcaagccttgctcgacatctacagcgtcatgtgaagttggttcctggctgtgtcgatcaatccacatctgcaatcgctcctcagcaatatcttcttccacgttatgggttttagcccttctccagaagtagataagccaagcctgcttgaacttgacatcttcctcttcctccttgcttagatcaaatgcttcagtaaatttctcatctccagttgatttaatatctggatctgctggaccgaccacattagaacgatgatgttgggcaagggcaaaaagtactgcatcctcaaccttcaggaaagctagttcttgtagtcctttgtcaacagaaagc

SEQ ID NO: 27453 - DNA, 831 bp, Setaria italica
  Peptide Sequence Number=SeqID_93427
ttaaggtttacccaaacaagaaaccaaacaaaggccaggcaaccaataaatgttgaaagaaaattaaaaaataacagtaccaaatgcttcagtaaatttctcatctccagttgatttaatatctggatctgctggaccgaccacattagaacgatgatgttgggcaagggcaaaaagtactgcatcctcaaccttcaggaaagctagttcttgtagtcctttgtcaacagaaagcatggtttctacgttgccttcccctgctgtaacagtcaaatcatgaacaagcttgtctgcatcttccagaccatcactccctgtttcagatccgttcttagccctctgtccagcagatgttacatactcaaacggcagaggtgcaagcgaagaccaatattcatgttttgacatggatatgtccggatatatgccatattgaacagccaaaccccagtatcgagctagccaacacctcttcatgacaacttcttccatttcttctttgcttaagaccatcctgcgtgtcattgtacgcaagtcttttgtttcggattccgcttctttgagtttcttcacagcagcagatgcctcttcttttgcagactgtagctgctgttgaagagcggtgagttcctcgcttttaccattcttggatataagagcttttcttatctcttgctcctttcttacaagcatctcctcccgccttttcataagctttacttccatagataacccatcaccaagattagcaacctgtttctcaagctcgattgtccgggcttcagattgtctaagtttctcttcggctaggccaagcttctaccaaaagat

SEQ ID NO: 27454 - DNA, 470 bp, Setaria italica
  Peptide Sequence Number=SeqID_93428
gtgggacaagggcaacgcactccagttcttgctggaggctctcggttttgcggacagtaaaaatgttttcccgatctatattggagacgatcgcactgatgaggacgctttcaaggtgctgcgcaacatgggacaaggggtcggaatcctcgtgtccaagatcccaaaggagaccagtgcatcctactccctgcgcgaaccttccgaggtgaaggagttcctgcacaagctggtaaagtccaagcagcgggactaatgatgtgaaagatcaagcagttgagatccaagcacagaccgtcccaacggacgagaagcgatgacaatctcacgtttgattcggtcgtccatggccgcggtgactcagattaactgatgaccagacgttaactggattcagaaaaacacccggatttaactattgcaatcgcgaggtaaagttttttttttattaattttttgagaggaggagc

SEQ ID NO: 27455 - DNA, 167 bp, Setaria italica
  Peptide Sequence Number=SeqID_93429
ccaattcgcaccaggccagcgcctaccggatcaataagcagtacttgcccgagctcaccgaggctgaggagcagaagggtacatgctatcagtggtggtagggtcagcactacgagtgctagtggtcatcggagaagtgttgcgaggaggagcttcgccgtcgtgaa

SEQ ID NO: 27456 - DNA, 369 bp, Setaria italica
  Peptide Sequence Number=SeqID_93430
cgatttttggcttcccgctgccgcgcgctagtcgtcccgccaaggattcgcgcgttccccagcccaccgccgtccgccagcaaaatctccctccggccacccggatcctcctgcaaaatctcccagcggcgccccggatccccgatgcctccaccgggggagctgcggcggcgccgatgcggaactctacgccgacaccgccgacaccacccccacccaggcaacagctcccggtcctccgatcccgggggctcccgaagccatggagggggaggagggccccggcgcgtacatggaggcgctcgtaccgactagacctagaaggactaccaaaccgaacgaacggaaccccctaaccccgtaaacgaa

SEQ ID NO: 27457 - DNA, 275 bp, Setaria italica
  Peptide Sequence Number=SeqID_93431
aaaataaagaactaacgaaaatttacaagtacaacctaggaagaggggcagacagcttgatgtggatgcagatccaagctatactgggattgagcataaatggcgagttggaatcatgaccgaaatggcgtcagttgttgagtggtcgcaaaatctttgattcttatgaagatgaatttgttctggagccagggatagctgctgctggtcacaggtttgggggagagtcaagttcgctggctagtgctcgtgcaatgtcagggggctgctgctta

SEQ ID NO: 27458 - DNA, 403 bp, Setaria italica
  Peptide Sequence Number=SeqID_93432
tctaatatgtatgatcctggatgtgcaatccagtcagtctgacttaagctgctgtacctgtttaattctttttctctgccacttacctgggattgagctgaatcctccaccttcagaagctctgaaaaggatgcacatgcttgcatgtgaccctggtataattgcgatcatgaacaagcataaatggcgagttggaatcatgaccgaaatggctcctgtcggatatgtaggcgtcagtccgaaatgcattttaggcttcaataagaacatgggagaggaaatatctcttcgcctacgaactgatgacttgaagggattcaggaagtatgaaagtatcaagaagactctacttcatgaacttgcacatatggtgcattctgagcacgatgctaaacttttttag

SEQ ID NO: 27459 - DNA, 903 bp, Setaria italica
  Peptide Sequence Number=SeqID_93433
gctcgtcatcgcgcgggtagctgccgccgccgtcgacggctcgacgccgcgttcgcgaacgttccggtcgcctacaaatatccggcatccaaggccggcgcgccgacgaggccaaccgaactcactcgcatctggaagcgacccgacccggtttccccttcctccaccagctgattcacgcgctcgacgacgggaagcgtctgtctaggaacaagatggaagagagcagaatagctcgaatttcagtcacctggaggggcagacagcttgatgtggatgcagatccaagttgtactgtgaaagaatttgggcaactgctgcaggatttgaccagtgttaaaccagagacattgaagctcattgtaccacaatctactagcaaaggctccaagttaatcacaccattttcggatcctcattcaagcttgtcactgaatgaagcagctatcagcgagggaaaacctatcagaatgatgggtgtttttgatgatgaaatcgaggaagtatctgacaatggaaaaaggccagatctacgtataattggatttgatgaggaagaacaacggcttaggcaacgatcatcaggcaggccacagatatcactcaaacttcctcagggacaatatatcttctgtgattttcgtacacttcacttacctgggattgagctgaatcctccaccttcagaagctctgaaaaggatgcacatgcttgcatgtgaccctggtataattgcgatcatgaacaagcataaatggcgagttggaatcatgaccgaaatggctcctgtcggatatgtaggcgtcagtccgaaatgcattttaggcttcaagaacatgggaaacaaagacaataaaataggacgaagttaggtaaaattaactaaattaagtaaaccgtaaa

SEQ ID NO: 27460 - DNA, 1803 bp, Setaria italica
  Peptide Sequence Number=SeqID_93434
acagatgttgctgcaaggggcttggatattccactgctggataatgtagtgaactgggacttccctgcaaagcctaagttatttgttcatagagttggtcgagtagctagacaaggtagaagtggaacagcatatacatttgtgacttcagaggacatgccatatttactggacctacatcttttcctttcaaggcctctcaaacctgctccaacggaagaggagcttctaagagacatggatggtataaatatgaaaatcgatcaagccattgcaaatggggaatcagtgtatggccgttttcctcaaacagtccttgatcttgcctctgatggaataaaagaagtcattagtggatgtacggagttgaatgcgttggaaaagccatgtgctaatgctttcagattgtatctgaaaactcgtgctgtgccttcgaaagaatctatcaaaagggtaaaagatttgcctcgtgagggtcttcatccaattttcagggatgttcttcggtcagatgagctttctgctcttgcattctcagaacgtctgaaatcatttcggccaaagcagactattttagaggctgaaggtgaagctgctaaagcaagaaattttaagggttctaatcaatggctagatgtgatgaagaagaaacgagaagttcatgaggggattataaatttagttcatcaaaagagttctgttgatccaaggccggaggaagaagaggatggcattttaaattgggagaagaaagaagtttgtggtacgaaacggaagtcacagagctttagagacgaggactactacataagttcagtacctcagaaccatcatttggaagctgggttgtcagtgaggaacaatgaaggatttgttcaaaacagattggatgctgctgttcttgatttagtcgatgatgaagcctctggtatgcaagcacagaaaactcgatatcactggatgaagaacaagtttgtcaagttgaacagtggggatcgtgtgacagctactggaaagattaaaacggaaggtggtgcgaagataaaggcatcagcaacagggatctataagagatggcagcagaggacacacaaatcaatcaatattggtgggaaatctggcagctttgcagaagagcgcacatccagtgcaggtggttatcatggagggaacaataaacacttctcaggtggccgtggacgcaggtccataccgaacgccaacgtaccctccgagataaggaaccctgatcagatgcagaagagtaggcagaagaaggcgatggagatcacacggttgaagaacaaatccgcaaaggatggcaaattccagaacaagttccagaagaaccggaggcccgacgggaacggcaaggggaggggaaacgggaagggagctgggaaaggtgggtttgggaaagggctcggtaaaggcgggaaagggcccaacaaaggcgggaaaggcaagggtaaagtgaaggggaagggtggcaggtgattgatgccccgacttaccggatccggtgccgagcgtctaacgatcgtggaatgtcgccggtgaagcagaagggtggtgtttcagcgttgcaggggacaccacctgtgctgctcacagttttgtttgatttgtggtagtgggcaaagataggccttagtgtgaaactaccgtgtcatgtgttttgatgagtggatcaatgacggagcaagattctcctgatgactgatataattctcgtttgcatacagattctaatccctccgttccaaattataggtcgttttagtttttttagttcatagatta

SEQ ID NO: 27461 - DNA, 251 bp, Setaria italica
  misc_feature (247)..(247): n is a, c, g, or t
  Peptide Sequence Number=SeqID_93435
ggcgatgggtgggagccagttgtgggcgaagtcgaggatgatccagtcaggcctcttggcgtgcccctccccgccggcgccggcgaaggcctccgcgaggaaggaggcgacggggccggcgaggccgtcgaaggccagtttgaggagctcgaccttctccggcgggacgtcggccgtggactcagcgccatcagggagtccatccacggccggcaggggcagggacacgaggcggatgcgcgggganagct

SEQ ID NO: 27462 - DNA, 249 bp, Setaria italica
  Peptide Sequence Number=SeqID_93436
cgtggagggcgccatggccgggctcggcgaggacgacgatgacccggcggccgcggccaccgcgttccgggagctcgcgcggctccggcaccccaacattcttccactcattggctactgcattgcaggcaaggagaagctgctactgtacgagtacatggagaagggcgacctgcaccggtggctgcacgagctgccaagacggggacggccggacatggacgacacgggcagcggcgacatctggga

SEQ ID NO: 27463 - DNA, 371 bp, Setaria italica
  Peptide Sequence Number=SeqID_93437
tgttctttcttatttgttctttgctcttgcaaaccatttatgtgccagagatgatcgcttaagatgcccaaaataaatatcgcaatgcttcataataaaaaggggacagccacctgcaatatgaaaaaaagggagccttaacctcatgtacacaacgaacaaatataaatatgataaccaacagaaaggactaaatcaaaagaaaaacatgcatacctgctactaagatggctggagcttgaaccagtacagcaaacatctgatcaacatcacatcgtgataaaatcatgaaactagatcaccaggggacatttgaagtccggtcctttttacctcaatgatgttgtattgtatggtgagggtcaaagcaa

SEQ ID NO: 27464 - DNA, 711 bp, Setaria italica
  Peptide Sequence Number=SeqID_93438
tttttttttttttaaaccgttcagatcacagcatagcatctacacccgttaaccagacatcacagagaaacaccacaattacaagtcatacaggtgacgtcgcaactactacatcatacaatagatcttaactagaagatagcccaaaaaggcatgtgaccggctcaatcttcaggagcgcaagatctgaaagaatctataagccaatcgcacatctaaccagctatttacggaatttgcgcacaattaaatgctcggaagcataacactcttcgagccggtgatgcatataccttgatgtcctcgttcgagacgccaaaatccaggttggagatgtagagtttggtgcccgtctcgatagccgagaccctcccgccgctgcctcctccagcggcgaccccggggtacatgtcgtgctgccacgccgcgtcaggggcctggatcgatcgcgtcaccacgtgagaaaaccatccgaccacctcctcccgcggtgccgcccgactcagcgaagtcggaagccccgcatcctccgccgggcgacgcggagccactagcccgtttgattcgttcgtaccttcggcggctggtagggagcctgcctgttcccggccctcttgaaggggcgcctggtcgggccgaccccaccgctgccgctgccgccgcccgaggcggatccgccgcggctgcggcggcccccgcggaggaggggtt

SEQ ID NO: 27465 - DNA, 409 bp, Setaria italica
  Peptide Sequence Number=SeqID_93439
ggggtgggtggaaggcgtggtggtggagtctggtggtcgtcgtggcaaagagcgtagtaagccaaggtctgctgaagaacttgatgctgacttggagaagtatcatgctgatgcgatgcagaccaactaaataccttcaccaagttggtattcgacgtcaaatatgaaggacattagtcctttcattccttctgtttgtgctactatgttctggggacaactatctctatcttcatgggattcccatcaagttgcacgttgttatatttcttcacggctgctacagcatcagcacgccttgcaaatacaacttcagctgttcccttggacctcccacttcgatcataatttattgaggatcgctttagatcacctagttcggagaaaagcttcctttgtatttttcctt

SEQ ID NO: 27466 - DNA, 2049 bp, Setaria italica
  Peptide Sequence Number=SeqID_93440
tttttttttttttttttgtattaaaacattttgcaatagaactgaaggaataatgaaaagaaagaattgttcccacatcgcaaaaatgatataccaattatactgaaactgtcgacctcagcacattaacaagaaataccatcaccacaagtcaaccatggtctccagtaatcccatgcagaattgggatgccaggatgattgagagattgccaccagaaatgaagttgaaacgagttccaactccacaatgacaggcaagaaaaaaggaggtctaaagttaaaaactaaattttcagggcaagaggcacaggactccatgtgcatcctcaagcaagttgatataatttcaaccaagcacagttgttgagatcaaccatcatagagggcccatatgcttgcaccaaaatataagaaagcaaagagccaaagtccaaaaggatgtagtatcgttgatgtagtagcatcaacagttactcacagctaccactaactaccaatagctgatcttgaagcaggatttgaaccatgatgtttcaatcagattagcgacagccagatccacaatgacttgttgacaactgaagcgatgaggattatgcaagaaaggaatcaacttttaaaagaacgaggcacctcttagctcatgcaaaccatttatgtgccagagatgatcgcttaagatgcccaaaataaatatcgcaatgcttcataataaaaaggggacagccacctgctactaagatggctggagcttgaaccagtacagcaaacatctgatcaacatcacatcgtgataaaatcatgaaactagatcaccaggggacatttgaagtccggtcctttttacctcaatgatgttgtattgtatggtgagggtcaaagcaaatgagagagccttcatacatcaactttcacatgcggaggcggagcaacttggatgattcttcactccgcagcattagatacagaaactaaaggtaaccaagtaatttccatagcagtgttcagcatcacccacttaactctagttctatgtaaacacataaaattcagtaaagcaagacccccacaaacataaggttttgttgtccccagaacatagtagcacaaacagaaggaatgaaaggactaatgtccttcatatttgacgtcgaataccaacttggtgaaggtatttagttggtctgcatcgcatcagcatgatacttctccaagtcagcatcaagttcttcagcagaccttggcttactacgctctttgccacgacgaccaccagatccaccaccacgccttccaccacccctttgatgaggtctacgctgcggcataccggttgggccacccctcggtgcactcttcacagcattcctagcctggcctccattaacgactggaagggcagcagctgctgttggagtattggtcccaactatctctatcttcatgggcttcccatcaagttgcacgttgttatatttcttcacggctgctacagcatcagcacgccttgcaaatacaacttcagctgttcccttggacctcccacttcgatcataatttattgaggatcgctttagatcacctagttcggagaaaagctccttgatgtcctcgttcgagacgccaaaatccaggttggagatgtagagtttggtgcccgtctcgatagccgagaccctcccgccgctgcctcctccagcggcgaccccggggtacatgtcgtgctgccacgccgcgtcaggggccttcggcggctggtagggagcctgcctgttcccggccctcttgaaggggcgcctggtcgggccgaccccaccgctgccgctgccgccgcccgaggcggatccgccgcggctgcggcggcccccgccggaggaggggttgctcttcttgttgttcttgatgatgtcgtcgagggtcatgtcgagcgtatccgccatggctgctctcgcggggcagatctcgcggtgggctgggctagggttagcgagagaagggagaagtcgacggggtggaggcggcgaaatgcgattagggttgcgagttg

SEQ ID NO: 27467 - DNA, 388 bp, Setaria italica
  misc_feature (7)..(7): n is a, c, g, or t
  misc_feature (27)..(27): n is a, c, g, or t
  Peptide Sequence Number=SeqID_93441
aattaanactttctgcttaatagaagngaaaaaaatggacgtgctcctccacattccgtagatataactttagcaattccattgctaagacttctatgcgttgttgcctccaaatcaatatggtgacatagtttttccccaacccttttatttgaagaccaatatactcatattatataattgcatagcatgtatgttctaccatgaccgcataatcctaacaaagtaagcagttaacatcttccgatatgaaaaggtggaaactagttgaccatgttgcacagcaagacacaaaataattagttcacataaataaaagtttcaagcttttttagagttataagagagagagtcctctaaggtttataatcaaagccaatataattta

SEQ ID NO: 27468 - DNA, 509 bp, Setaria italica
  Peptide Sequence Number=SeqID_93442
tagcccaggaataaatgctcaacagtagaaagattaaattggaacaattgacaagggaaacagtccgatttcccaactaaatcacgcaattggcatatgtaaagcatcctatagaattcataaataacatggcactagagtacggaattagacctaacaagccaattgaccctaagaaacctagttaaggtaagtgtccacacatctataatatctatacatccccaactaactgcaattaactttaagtcatgtagcatgaattgcaaagcaaaaggacatttcgggaggtatatttctagttaaggaattgggggagaaaacaccaattaacttttgtaaagcatgtgacatgaattcaagcttgtattaactacatcctagatccagatccgaagagctatacgatctagatccaaacagctattcgtcgtaactaacaagggaacgtgataggaacacagcatcgacatgtctgaatctggattcaaccaacgcatcaaaccaat

SEQ ID NO: 27469 - DNA, 412 bp, Setaria italica
  Peptide Sequence Number=SeqID_93443
ttctccaggctgctgaacctttccttgtaggtagcatttcttccatctggaatttcattgttaagttttggaagaaacctgcaactcttcaaataatctgccatatcctgaaaaacagtttttagttacttcattcacccaaaacattctcatcaaacacagccccaattttacttccagtaatctgatcaattaaccctcaatctctgtttatatttgtgaatcatcaaaacttttacccttaaagcaaaatataatcacctaaaaaaattaaaagtgaggagcagaatagaacaacttaacaggcttaccacatggctataaatctcaaagttaatatacttattaaatagaaaaataacccaaactaattattcagcattacatagcttgctattctgtcgtccttcgt

SEQ ID NO: 27470 - DNA, 251 bp, Setaria italica
  Peptide Sequence Number=SeqID_93444
tgccaacaacctgcagccgttaggctgctgcccacaagagcacgcttggcatcaatagcctagtgcagaaagttttagcatccgttgtgtagctcaatttccaaacttgtatgccaggtaagcggcaccactgatgaactaagcaaaataccaataatcatagtatccgccaagaactcagaaatccacttgtatttaggccaattcgacgaattctacgaatccctagtctcctactccctccagctagg

SEQ ID NO: 27471 - DNA, 520 bp, Setaria italica
  Peptide Sequence Number=SeqID_93445
gaagcaccatatcgatctcctcccccctgcaaggctgcaagagatcgatcgagaagatgaccggagggggcgctctcgctgtcggctcggacggcggcggcggcggcggcgcgataacattcacggttgtggtgagctgcctcaccgcggcctccggcgggctcctacttggatacgacatcagtgttacaggattttttttcaggaggattgatgcagatggaatcattcctccaggcgttcttcccggagatcctccggaagacgaacaacgcgcagcaggacgcgtactgcatctttaaaaaccagacgctcaccatgttcgtctcctcgttatacctcgccggcataatctcctctctggtctccggccacctgaccaggacggtgggccggaggaactccatgctgatcggcggcttgctgttcttggccggcgtcgtgctcaatttcactgccgtcaacatcagcatgctcgtcatcggccgcgtcctcctcggcctcgccatcggcttcacca

SEQ ID NO: 27472 - DNA, 1030 bp, Setaria italica
  Peptide Sequence Number=SeqID_93446
cgtcttctcccccgcggtgagagcgagagacacagcgcgtaggaggagagtgtgtggaagcagcagcgagcacgcggccatggcgggcggcgccggcgcgcgggacccgctcgtcgcctccgagatccacggcttcctcacctgcgcagacttgaactttgacaagctgatggcagaggcgggaacacgctggttccggcccaatgagatctacgcagtgctggccaaccatgcgaggttcaaggtccatgcacagcccatcgacaagccagcgagtggtactgttgttctatatgatcgtaaagttgtccgaaacttccgtaaagatggccataattggaagaaaaagaaggatggaaagactgtccaagaagcccatgaaaaattaaagattggcaatgaagaaaaggttcatgtgtattatgctcgaggagaggatgatccaaatttctttcgtagatgctactggttgcttgacaaagagttggagcgcatagttcttgtgcattatcgtcaaacatctgaggaaaatgccataccacaaccacatatagaagctgaagttgcagaagtgcctccaatcaatattattcattacacatctcctctgacatcaacggattcagtctctgctcgtactgagctatcttcttgtgctgctgcggctgcaccagaagaaattaactcacatggtggcagagcgatttcttgtgaaaccgacgatcatgattctagcctggaatcgttttgggcagatctattggagtcatctatgaagaatgatacttctgtccgtggtggatctttaacacccaatcaacagactaattatgggatgatggattctggaaataatatcttcaataccaatgccacaagtaatgctatctttccttcaccagctaatgtagtttcagaagcttatgctaccaatcctggcctcaatcaaatatcagagagttactatggagctctgaaacatcaagcgaaccagtctccatctctttaacatcagatctggattctcaat

SEQ ID NO: 27473 - DNA, 2568 bp, Setaria italica
  misc_feature (2506)..(2568): n is a, c, g, or t
  Peptide Sequence Number=SeqID_93447
tttttacttttaagtttagttaaaaaccgttaacgttaatttacttaatttagttaatttcttagtccttggaatcgttttgggcagatctattggagtcatctatgaagaatgatacttctgtccgtggtggatctttaacacccaatcaacagactaattatgggatgatggattctggaaataatatcttcaataccaatgccacaagtaatgctatctttccttcaccagctaatgtagtttcagaagcttatgctaccaatcctggcctcaatcaaatatcagagagttactatggagctctgaaacatcaagcgaaccagtctccatctcttttaacatcagatctggattctcaatcaaagccacttgcaaattctttgatgagaactccagtggatggtaacatgcccagttatgcgcctactaggcagaacagtcttggactgtggaaatacttggatgatgatattacaagtttaggggataatccaagctcagccatacccaccactcgaccagtgaacgacgaaataccctttcacatcattgagatctcctcagaatgggcttattgtacagaggatacaaaggtccttgtggttggatacttccatgagaactacaaacatctggctgggaccaatctgtactgtgttattggcgaccaatgcgttaacacagacattgtccaaactggcgtttatcgtttcatggctagaccacatgtgcctggacgagtgaatctttatttgactttggatgggaaaactccaatcagcaaggttttgagttttgactaccgtgaaattcctggcagttcagatgatgatgaaccgaaaaagtcaaagcttcagatgcagatgagactagctcgtttgttgttctctacaagcaagaaaaagatagcgccaaagttccttgcagaaggaagtagagtttccaatctcttgtcagcatcaacagagaaggaatggatggatatgttcaaatatgttactgattctaaaggcactaacattcctgctactgagggcttgcttgaacttgtgttgcgaaatagattacaagagtggcttgtcgaaaaaataattgaaggacagaagtcaacagaccgtgatgatctaggacgaggacctatacatctgtgttctttcttgggctatacctgggccattcgcttattttctttgtcgggattctccttggattttcgcgattcttctggttggacagctctgcactgggccgcatactatgggagggaaaaaatggttgctgctcttttgtctgctggagcaaatccaagcttggttacagatcctactcatgatgaccctggtggacacactgctgctgatctagctgcaagacaaggttttgatggcttagctgcatatcttgctgagaaagggttgacggctcattttgaggcaatgtcgctgtccaaggataagcgatcaacatcaaggacacaatcaataaaacaacattccaaggaagttgaaaaccttagtgaacaagaactgtgcttgcgagaatctttagcagcctaccgtaatgctgctgatgctgctagcaatatccaagccgctcttagggagcgaactcttaagcttcaaacgaaagcaattcagttggccaatcctgagattgaagcagctacgatagttgctgctatgaggattcaacatgcattccggaactacaacagaaagaaagagatgcgagctgccgcacgaatacaaagtcatttccgaacatggcagatgaggaggaacttcataaacatgcgaagacaagctataaaaatacaagctgcataccgaggtcaccaagtgagaaggcagtaccgcaaggtaatatggtccgttggagtcgtggagaaagctatcttgcgatggaggaagaagagaaaaggcctgcgtggcattgcaactggaatgccagtagcaatggctacagatgcagaagcagcaagcactgcagaagaggattactaccaggttggccggcaacaagctgaggacaggtttaacagatctgtggtacgtgtccaagctctgttccgttctcatcgggcacaacaggagtaccggaggatgaaggttgctcatgaggaggccaaggtggagttcagtcaaaagtagttagggctggcatacattgtaggggttgctagttcttctaattcttgtatattggaagggacaaccgtagcttgctgatgctgtacattttaggaccatctgatgcttgtggtcaggtctggcaaatgtacctgccgttagccttctactcttggtgtgcatttggctggtttttagtttggcgaaaatggcactgtgctttgtaggcctgggttttatgtggatgctagtacaaataaggttgtacatgctaataatcaattccacctgactatatccaggtgaattgcaggcaaaatttgcaatatgttggccagttcttacctaaactaaaaaaaagaactagaccaaannnnnnnnnnnnnnnnnnnnnnnnnnnnnnnnnnnnnnnnnnnnnnnnnnnnnnnnnnnnnnn

SEQ ID NO: 27474 - DNA, 360 bp, Setaria italica
  Peptide Sequence Number=SeqID_93448
accgatccgccatgggcgacgtcgattatgccaatgtccccggcggatacttcatgggcccgccggcgaacgcggccgccgccgaacccaagcctgctgccaccacacagactcccggcgattacttcatcgggaccccggagaacctccggcagcaggggatggaggctgaaccagcacggccagccggcgagctgaagagatcgaggagcttcatggaatggttcccttgcctccgcggatgacaagttgcaaactagaggagccgtcgggcaagcccggcgccatgataacttgagaatacgaggcctcgtctgttatctctggatgatgttctgcttttgctcgatttgatacctc

SEQ ID NO: 27475 - DNA, 433 bp, Setaria italica
  Peptide Sequence Number=SeqID_93449
cgccttcccaggccacacctcgagtcctcgactcgatccacccatggcaggctccggcgccatcgacgacgaggtcgtcttcgagatagcgcagtgcatccgcgtctacaagagcggccgcgtggagcgctacttcggctccgaccccgtcccggcctccacggacgccgccacgggcgtcacctccaaggaccgcgccatctcccccgacgtcgccgtccgcctctacctccctccggcagccaacccgaccgaggacgacggtggaagcatcaagaagctcccaatcctcgtctacttccacggcggcggcttctgcctccacaccgcgttcaacttcgtcttccacgcgtacctcacctccctcgccgcgcggacccgcgccatcgtcgtctccgtcgagtaccgcctggcgcccgagcacccgctcccg

SEQ ID NO: 27476 - DNA, 1514 bp, Setaria italica
  Peptide Sequence Number=SeqID_93450
ctctggtgcaggagctcacaatactaataaaccagtggtgtgaaccttttcctatgggtcatgaacccgttttcactatgagaaaaaccctatacactcttcctggtgtgcactctgcaaagtcggtgtgccaacaattctgatgagctctgcttcctccatatgtctacacttctcaacacatgaagccaactgaaaagaagacgacagtctcatcactttctcttatgtgaagttgccccctttgattgttttgcagaggctttcttcgcatttgggtgtggagttactctctgaatgacccttttcggttcatccggcttcatatggggatcaacctcctcatactgtatcggcttaatgataacaccaggcttcttaacaatcgcaggtcgattgagagcagaaactgatatcgctgggttgaaatcaggtccaataggcatacggatgctctgctcgtagacatccttcgaagtgtaagggaaaggcaaattcctcactaaatacttctcaaccttcttatccacatgttcagaaataataacgtgcttaagctttgagtccttcctcctcttcaaggcttcttctctattccttttagcaattgcatgttctttgatcatccatgatggaagtccttttttctgttggatgtccgtccactggccccagccaggaacaagagcaggtttttcaggttcagggttctcttcatttaaaacttccattttgtccttctcaaactcagcttcaacatcatcaccagcaaaagcctggcgtatgagttcagcttgcgatggaagttcatagttttcctttgtgtcagacatggtcaagaagccctcaaccatctcttcctctgaatctgaatcaggattgctaccctgttgcttaggatttggatctacaataggtggagcctgtaatttggatttattggtaacgccattgacattgctattgccatttcctttgctactgttgacctttttccaggaatcaccagctaacattccaacttcaaatgttgtcttaggacctggatttttcatgatatcatcgaagcttttgtaaagatcattctgttcatcatccagcagtgcagtcccaagttgtatgtcatcttgctttgtagttggttcattgttgcccaagtgttgggcagggtcagaatcatactcactatcactactctcagtttcgtgtagtttttgcctcttatttacatcttcatgtgtatttttggcaggcccaaatgttcttttacctgtcaccttaattgaatcttcattctgttcagtgttatcatcctccaatttcctcaaggaatcatcgtagtcttcaagagcttgtcgtgcttcctcataagctgcttcctcctgttttttcatagcacgctccatgaaaggcaacgaaaaaactcctgaatttggtatctctttatcttcttcaagaactttaagaatcttttctttccctctgtttaagatttttgcttctgagtcattctc

SEQ ID NO: 27477 - DNA, 589 bp, Setaria italica
  Peptide Sequence Number=SeqID_93451
tccgcggagcgggcgtcgcagtcgccagcggagccggaggccgtgcgcatgacggagggttgcgtccggagattaaaacaattacatggtaaggaaccatctgctgaaggtaagatgctgcggttaagcgttgaagctggtggatgttctgggttccagtattctttctctctcgatgacaagaaaaacccagatgacagggtctttgagactgatggtgttaaattggttgtggatgacatctcgtatgactttgtgaaaggcgccactgtggattatgaggaggaacttatacgttcagcatttgtggtctctacaaatcctagtgctgttgggggctgcagctgcaagagttctttcatggtcaaatagcttcaactttgttagcttgaagagaggggtagccggaaatagtattttgtagtgaaatataccttttagatacagagtgcacacttcatttttggtagtcctgatgatgtttctttatgggttttattgctgttagatatatcatcacaaacagcctgatcctatttgtaccgctctaccttgatcacttgatgacacatttatgtacatgtaatca

SEQ ID NO: 27478 - DNA, 352 bp, Setaria italica
  Peptide Sequence Number=SeqID_93452
cttttccccaactctaaatcagcagcaatcagctcacctgggttcccaagaggcaagagggtcgacggagattggcagagggcactaggcaccaaatcggtgcggcagcggcgacccacctcctctgcaccccgcccgccagaggcctacctccgcacctccgttgcgcccgagcagcctcccttgttgagctctggcagccaccctcccttgttggctgtcaataggagcattgcatttctgaagatgatcaacactctagtatatgacatacaagttgatcttgttctatctaggattagtcgattcattccaatgggatgatccgacgagtttggcaattggcatgcag

SEQ ID NO: 27479 - DNA, 348 bp, Setaria italica
  Peptide Sequence Number=SeqID_93453
ttaaacagagcatatttatccatacatttctcataaatctaaggctagttttagtggaggtttcatcaaaaatttcatgaccattaaataacatgacacatcaacaattttgttgacgtggcaaggtcattatgaggagagaggagagagagtttcatcatatgtgagagagagtttcatcaccatgaaacccagcaggcaaagtaaccaagttctctgccttggtaactgtgccatgaaactgtgcactgagactggcctaagatatgggtgatattaacaagatcatttagtccatggtgcgagtataatgagaatttaatgtgaaaagcgtactgtatcaagaag

SEQ ID NO: 27480 - DNA, 519 bp, Setaria italica
  Peptide Sequence Number=SeqID_93454
ccctgaatgactttctatatgagacctacagcagcgattgcttgaccttcttcaccacattggtggcttgatccaggtgtcccttcaccttctacagcttagcggcagtcacttcaagctccatattagcctttgcgcattcttccttccacatccttacatcattttcagctttcagattccttttatcatttcccatttttaggtgagacatcactacatcgtgtctaattttcttcgtcgtgttcatcagctcattggttgtatccctaaagtatcatcgcttcatcatgtgaatcttatagattttgttattggcctccttcttagcaattctccattcttcttcccacgaccttgcttcctcttcagcttttccttcatcttcatcagcttgactagaatacctttagtcctagcatcccattcaggatcaacccacttaaacaccacgcatttaaccccttcaggctacagacactgattatgttcatgcaatttgctatttacaacactaac

SEQ ID NO: 27481 - DNA, 411 bp, Setaria italica
  Peptide Sequence Number=SeqID_93455
taccccctacgaccggcccaagaaagcgcccgcgcacggtgcagcggcagctcgacttgctgtacccgggattgagcctcgcagatgtgacgccgggctcctacaagatcgaagagaggtgattgggtgctttcttgaagcttcggatggacggagttttcagtttctctcatctttttctgttttcttctgatggctaacatgtctgtttcatatgtgtttcgttctgggtggaatagaggatgttgaggtggaattgcctgtgattatctatcgggctgtggttggcgaggagtaggttcagctttttcgcaatttggttactgggcttgtaggattgtcaattgtacaaaggattacgatccttaggtggggaagtgtgttgtcatgtacatggtctaatttatgaag

SEQ ID NO: 27482 - DNA, 656 bp, Setaria italica
  Peptide Sequence Number=SeqID_93456
tagtctaaaaaggcaaaggcaatttgtctgactgtcagttgagttattcagttcactctgaacaagtatcttagaagtctagtggcattccaaacatattgttgatctccaccatgacatcacgagtggtgattgtgggctcaaatagaccattctcatccccaaatttgcaggaattgctctgactggctttgcaggtgttctcttttaggtcatcatcagctaatatggagaaaccagaaactgaaactgcttttccatctgacagcgcattagttttccgctttgtcttctcacccttgaagttcaatggtctcccaaacatgttatttatatcatccatagcttcctttagattgacagttggatcgactaatccatgatggcatgcattttctaccttagactcatcatcaatagtggatccaacaaacctatgaatgactgtgtcttcttgaagcccagaactcgcaggacgaggaccttcatgatatcgtgttcctgaatcagcttgaaccaggcagagcaaagtattattgtcacgagtaggctgcacacttctggaatttatagttacaccagcagttttctcacattgttcttcttcatcatctggcaatattgcaaatcctccaacaaatggcttctggaagtca

SEQ ID NO: 27483 - DNA, 294 bp, Setaria italica
  Peptide Sequence Number=SeqID_93457
gccgaggcggtgccggctccccgcaccacgtccggcctgacgatccacaggaagtcgtggccgctgccggccagcccccacgcgaactccgccagctcctcgccgctcatcaccgtcacgctgccgaagttcacgtacaccaccgaccggggctccctgccctccagccacgcgaggcaggtggggtcctctcgccacaggcttgagctgatcgcgtcgacggggccgccggtggggacgacggcctgctcggcgacggacgcgagcgggccgatggtgtacacggccgggatg

SEQ ID NO: 27484 - DNA, 421 bp, Setaria italica
  Peptide Sequence Number=SeqID_93458
cgagaatcgtgagcgcaaggagagaggaagagagaggagagggagcgaagcaacaatgccgacgggtaggctgagcggcaacatcacccaggactgggagccggtggtgctgcgccggacgaagccgaaggcggccgacctcaagtctgcgaaggcggtgaaccaggcgctgcggtcgggcgccgccgtggagacggtgcgcaagtcggcggcggggacgaacaagcactcggcgccggcggcacccgcgcggaagctggacgagacgacggagccggcggccgtggagcgggtggccgcggaggtgcgcgccgcgatccagaaggcgcgcgtcgccaaggggtggagccaggcggagctggcgaagcgcatcagcgagcgcgcgcaggtggtgcaggagtacgagagcggcaaggcggcg

SEQ ID NO: 27485 - DNA, 371 bp, Setaria italica
  Peptide Sequence Number=SeqID_93459
gatttcagaactgctttcagcgaagcaagaatgaaatgcatctagaagtttcttattggacctaacaaggtctattgaggagcgcaaaggtgaatctacttgcagtagtcggtggaaaaggccactgtcgaatattttctgcaagttgtggactacttgatcaaggaagtctacatcttcaacggacataccaaatatatcgacctctgatttcactttactcatcatccttgagaacagggataagtagctcttgacatgcccattgtgcctcaagatttcatccaataacaggaataccgtaagcccctcaccaagcgatccaaacactgtccttaaatcaaaattcctgaatgagttcaatggccgaa

SEQ ID NO: 27486 - DNA, 391 bp, Setaria italica
  Peptide Sequence Number=SeqID_93460
aaataaaataatcccgaaatcaaaaacctgcattacatgtgttgaggccattattacattattgtttcctatctttcctagtttttcagagggttcaatttgccttcttcaacgtgataatgtctaaatgagctttcctagttttttggcggtataagaagacaataaaattttcaagtggataataatgaaatcaaaaattacacagttcactcgcatttcaatgttttgtaatgagatgagttcatggagacaggaaactattataatgaataaaaaaacatgaatcagtgacgatgacattaaagaaaacaatgaatcatgctcactacgaacaaacggatcttacagtcaaaaaggccaacataaatcgcatgtgttgcactcaatt

SEQ ID NO: 27487 - DNA, 321 bp, Setaria italica
  Peptide Sequence Number=SeqID_93461
cagagagaaaggggcataattccactcacactgcccaaccacaggacattctctctccccctcctcttcgctgaagcagaagctcctcctcatcttcttcctccctgctctcctcgtactcctccgacacccaagaagcaagaattgtgggggtagcgaaggaattggaggagatcttgcatggatgcagcccactggcagcagagcttagggctggtgaagcccatggaggagatgctgatggcggccaacgcgggcgccgccgccgcgaacacgggccagggctcgaatccgaacccgccggcgccggcgccgtcgtac

SEQ ID NO: 27488 - DNA, 288 bp, Setaria italica
  Peptide Sequence Number=SeqID_93462
gtttggttagggcgcacgaggggcgatctctctcgcggcgaagcaaagccaccaccagctaccggccatggtcgggggaagcatccgcgcggccgccaaggccgcgatgatcggcggctaccgctccgccgcgtacatgcggcgcgccgtcatcccgtcgtccaactcctcctcttcctcgtcggccgccgacaaccggaaggcgtccacgttggtagcggacgactgggtcatcccggaccgcgaggtgttcggccccgtgcccacccacgaggaggccatggcccg

SEQ ID NO: 27489 - DNA, 269 bp, Setaria italica
  Peptide Sequence Number=SeqID_93463
cgcggctgcacgtcttgcagacgaactcgccctcgccgccgccgccgcccgtgcggcgcggcttcttggcgccgtgctcgcccggcagcaggccgccgagggagagcgcgagggacagggtcacgtcgccggcggcggcgtctctcgggtgcttcgtcatggacgaaacggggattggaggtggttgatgaggaccaagcggatggtgaatcgatgagctcaagatcttcggggaggcgagaggatgaaggtcggatcggagctggcag

SEQ ID NO: 27490 - DNA, 462 bp, Setaria italica
  Peptide Sequence Number=SeqID_93464
ctatccttaaaccccgtggatgcgatcatgcgaagctgtgtgcatgagctccctcctcggaaattaattaaagtttagttacaagatcaaccatattaattaatgcaatggtgtaaccagggtaaatctcattatcaagttcgtcctgctgtctgatctgttgtcctggtttggtgatcgagaggttcgacgcttaaaccttggatgcctggttctccggtgacgacgacgcctcgtcggcgtccggttcgttcagcgggtgcactttcgtcgtcgtcatctcggattccccctttttgtcgtcgtcatcatcgtcgtcgtcgtcgtcgtcgtcgacctgcttgaagttcgcaagggtcgccagctcgtcgacggcgtccacgacgccctcgaccctcgctgctatctccaccagcagagacgccacggtgaagacgggcatcgtgtccaccagcgacgtct

SEQ ID NO: 27491 - DNA, 390 bp, Setaria italica
  Peptide Sequence Number=SeqID_93465
gcaattctgtctgctccacgctctcaacaaccttatgcaggaaaaggaatgtttcacccgagctgagttggacaggattgctggaaatcttgttcttagtgatccaaacaaggaccaatggactcctctatctttcatttttagacctcaccacaatgtggtaactgggaactatgatgtaaatgttctcatcgcggcattagaagctagaaagaagaaggtggtttggcatgatcgtcgaaaaggagcatcatcaatcgagctggatgcagaagtgttggtaggccttatgatccaatgtgcctttgaggaggttcaggggcctctggaccggcaggcatttgggtagcaattcgaagcattgatggtacctggtttaatttggatagt

SEQ ID NO: 27492 - DNA, 415 bp, Setaria italica
  Peptide Sequence Number=SeqID_93466
cttcgactccaagcaagcagcagttttgactggccaaccgactagtaagctacgtagcagccatggcgcgccgcttcccctaaccctaaccccaaccgattctaatggggtcccagccgccggcctcccgcgcggccctcgagcccctcgccacgctcgaccccgctgcgctcgccggcttccctgcctcctcccccctcaccgtccgcgctgccgccctctccgcccacctgctctacctgggcaccggcggcggcaagctcctcctcttctccctccaggatccctccactccggagttcctccgcctcctccccatcggcgccaccctccccgtctccgcgatcctcccgctcccctccgtcgcccgcctcctagtccttgccgacggcctcctcctcctcgccgacccgct

SEQ ID NO: 27493 - DNA, 325 bp, Setaria italica
  Peptide Sequence Number=SeqID_93467
ggcgggcctcccgaggggacaccgcggcgtagagcggcggcttctggaacgggacgaaggccctgacgccgcggcaggagatggagctgatggtgatgcgctggccgccgaccgacgacatggccggcttcttggcttcggagctcccggcgcggtgggaaggaagctacctgatgccgggctgccggctttgacggtggactctcgaggcggtgccttgcggatttgaggattggtgtgaccttgtgctcttggtttcttggatctcggtgcaatcaatttgctgatgcctttgttgctctgatggatgctatctagcgtgact

SEQ ID NO: 27494 - DNA, 425 bp, Setaria italica
  Peptide Sequence Number=SeqID_93468
tttttaaaccggaagaaccagcacaatgcacatagaaaaatgaaaggagaggcactgagaaaaaggcagcagattcttgtagtcactactacctagctagccattcatgaatatgatgctcccaatctcccatcaagaactagcaatagtttgctccactacccaaccaagtcgatcgaatgatcatcaagaaagaaactaactaaagctatgtagaaatatgtatgtagctgatgctagtacacagtagcaatataatgctgcctcgtcatatgtttctgaatcctgctgaacaaatcaacaaagaagaaggaacctggggaagaagagaggagcaaaatggagatcaagtgccgcggctaaaccacgatcagcaggccggcagcagcagcgagtgccgccgcggcaagggcagaaagcccccg

SEQ ID NO: 27495 - DNA, 419 bp, Setaria italica
  Peptide Sequence Number=SeqID_93469
cgccgacgtcgacctcaacaagtgcgagccatgggatctcccaagcaaagctagcatgggtgagaaggagtggtacttcttcagcatgcgcgaccgcaagtacccgaccggcatccgcacgaaccgcgccaccgactccggctactggaagaccaccggcaaggacaaggagatcttccactgcggcatgctcgtggggatgaagaaaacattagtcttctacaggggtagggctcccaagggagagaagaccagctgggtcatgcacgagtacaggctccagaacaagttcccctacaaacccaacaaggaggaatgggtggtgtgcagggtgttcaagaagtcccagatcatcaagataaggccgccacaaggaagccccacgatggacgactccctaggccacgacgccaacgcct

SEQ ID NO: 27496 - DNA, 538 bp, Setaria italica
  Peptide Sequence Number=SeqID_93470
tccacgcaaggaagccgccgccaatggcgctcccaaatcagcagacagtcgactaccccagcttcaagctcgtcatcgtcggcgacgggggcaccggcaagaccaccttcgtgaagaggcatctgactggcgagtttgagaagaagtatgaacccaccattggtgttgaggtccatcccttggatttccacaccaactgcgggaagatccgcttctactgctgggacactgcagggcaggagaagtttggtgggctcagggatggatactacatccacgggcagtgtggtatcattatgtttgatgtaacttcacggctgacttacaagaacgttccaacttggcaccgtgatttatgcagggtctgtgaaaacatccctattgtgctttgtgggaacaaggtcgatgtgaagaataggcaggtcaaagcaaagcaggtgactttccacaggaagaagagcctgcagtacttacgaggtctcagctaagagcaactacaacttcgagaagcctttcttgtaccttgccaagaagcttg

SEQ ID NO: 27497 - DNA, 730 bp, Setaria italica
  Peptide Sequence Number=SeqID_93471
gaagaagccggcccagcacacgcagctgccgatgaccatggcgacgccgtagagccaggcgccgccgctttggctcgccgccgtgccggcggccaccgcagcatggtggtgggcgccgccgctggaccacgggaacggcacgacggggccgtggtagaggaccatgagtacggcgccggcgacggtgcagaccgtgccgaggatcttggcctggctgtggaggctccgcagcctgagcttctccatcctgaggaccagcgccatgaggaaggtgaccgccgggagcatgttgacgagggccgaggcgaagcccgcggaggtcagcttcgcgcccaggtagtacatgttctggtccagcacaggctccagcaaggcgagccccatgaccttgacgaagatgagcggcgtcatcttgggcctcactcccctctcgaagaggagcgcgaagggggtcataaggacggtgccgacgaagttgcggtagacgacgaggacgaagtggctcatgccgcgccggagggaggcgacggagacgatgtacatcccggagaaccccaccatcaggagcaccatgtacaggtacggcttcacctcgttcaggaccttgcccacgcccatggctgatgatgtcgcagccggattatattactagctatacaactcgagctaggctgctgcagtggcctgtgaggctagaaggcttgagctgctagctctcgctcacttgtgc

SEQ ID NO: 27498 - DNA, 2024 bp, Setaria italica
  Peptide Sequence Number=SeqID_93472
ctggaactttccaccgttcacattgcctttccccttcgtctctcctcccttcccagcctcgcgctctcacccaacgaacggcaaaggagttaagcgcacacaccacacagcgagccttcgcagcttttgcgaacgcaaccccggttcgtcgagctcgcatcgagtccgcgcccgcgcccgcgcccggatccagcggagatgagccgcgcacacgacgggcacaggtccttcttccccgtcgggaaccccttcaggatgatccttccaagaggagcccgcctgacgccaaagctgaccgaggtgctcacgtcgtacgaggatggcctagcctcgagcttgaggaagctcaagccagaggctgcctcaagtgtgctcaccctgtcatggatgaggcttgcggtggattgcttatcggagctgcacaccaacatagcgaccctgatcaccgagcttgagctgcctgtctcggattgggacgaaaaatgggtggacatttatctgaacagcagtgtgaagctgctggacatctgcatcgcattgagctctgagcttgctcggttggatcaagggcagctgctagtgcagtatgtcctgcatgtgttggactctggaaaccaagtgccgtcacaagagcaactgaagagagctgaggtgtcgcttaaggaatggatggagcgctcaagcgagaggtctccgaggcttgataattgctcgacagcattacaggagctttctgggaacttttgcttgatgaaggttaagcattctgctaaggggaaggttctcatgcgggcattgtatggaattgaggccgttacggtcttcatctgcagtgtgcttgtagccgtactgttgggaagctcaaagccgctgatggagttcaatgtccctgagaaatttggttggtctaaagccttcaatgatctccataaggccataagtggggaacttagcaggcaactatccggagatcgtgttgcagctgtaaaagagctggaggaagttgaggtatgtgctagacagctgcatgcattgactagtgctgctcagcttgaagaggataatgccagtctggttcatgctgttagtcattcaaaggaagtggccatgtcagatactacctcccaggaaggaggccatgaggataatcttaagctgactgaggacaatagtcgtgagcgtgaagtaatcatgcttcagagtattactaaagaagatggaatagatacagccggcattaaggaggatggcaagactatcagccatacaaaagaattgatggtgcttgagggaaccagtggtggacaccaagatgataacagaaatcagcaagatgataacagaaatcagtccgctggtgtcggcagcgagatcactggcttggaaaggagagagcagctgctgaactgcatctccagcatgtcgaaaagcgccaaagggctccggctggggttggactcgctgtcaaagcgggttggggacttcttccagatcgtgcttacaggccgcgatgcattgctctgcaacctcaggatttcagatgggagcaaggttggtgctgaggtcaggtcttagtatgctacgtcatgtttgtgctgtctaatgtgtttatatgcagctcgacagctcatctttatgataggtgcttctgacttctggcacctgctcagtctcaacaacactaagctggggccagatctcagaagtattgtgcataatcatgtgctgctagttgcaatgaagcttttatttatgccttgtagcacgaggtttctgtggagcggaactgtggtaaacctacataccacagtccttgccctcattttggtgtgtagtaactagagtgttgtgagtaaatagtgtggtgttgagatggtgttggtggaatgcacaatggcgagactagagtaactgtatgtatgctcatgtgtgctggtaatggagatgaaaatgagttgcaaaatgttaatccctgtcttagttaacttggactggtgcctaacgttttgactttaaaaaaaaaa

SEQ ID NO: 27499 - DNA, 981 bp, Setaria italica
  misc_feature (930)..(981): n is a, c, g, or t
  Peptide Sequence Number=SeqID_93473
cgcgcctataaaaagggctatactataccccaaaaccaacaaaccgactcaagcacgaaactccctccaagtcactcctagccacttctcagtcactcgcttcgaagatccaccgtacccatggcgccgtcgtccaagctcgcagtggccctgctcctggcggtggccgtgctcgccgccgcctcgccggcggcgacggcgcagacgaaccacaaaaactgcgacaaggacaagaagatcacggtgcagaacctgtgcgcgcacgacgtggtgctgaccctggagccgctcgccaacagcccgcacctcttcaacggggcggcgaactacacgctgcacccgcacagccacgccgagtgcccggtgtgctggtggacggggcggctccacgcgacgggggcccccaccgccgagttccacgtcggccccgatggcgggtcgttctacctcgccgccaacacccgcagccccgggcagggggttccggtcatcatctccccgcatggcgcgccgctcgtcggcgagtgccccgccgtcgggtgccccgtctccggccggtgctccgtgtcccaggtgcctagcggaaggtgcagccacgtccaggagatcaaggtcatctactgcagcccgcacgtgtgatgagcgtgtgaccgagctggaagaagaagatgtcgtccggccatggccgatcgagtgctgttgtcgccggtgtcttcgtcgtcgtgttcgttcggatcggattagccggccgtttgctttagtcttgattaggagttgtcgctgatagctcaggtcgatgtgagccacgcgtgcgtgtcaggtgtgtcgtgtcatgtcacgtgttcgcaggcagcgatgcgtgcctgcctttgtgtttgtcgagtcatcaataattttagtgtctttccatgcattggctttttgctctgnnnnnnnnnnnnnnnnnnnnnnnnnnnnnnnnnnnnnnnnnnnnnnnnnnnn

SEQ ID NO: 27500 - DNA, 314 bp, Setaria italica
  Peptide Sequence Number=SeqID_93474
ccctcttcttcctcctcctgctcctgtcccagatcccacgcccccagcatcagatcagggatcggcgcgcgcggcagccggtcgggcaggcgccacctccattgcccgtgccgtgactcctgcgatgcgagcaggaggaacagcgagggaggagggagcgcgcgcgggtaggagagattagagaagggaggagcccggcccgggggaaggggagggacctcctcccccagatgagaacgatgaaggcgcagcacagcgaacggggaggggcagggacgccccttcctcacgtcctacgccctcacgctcgcctt

SEQ ID NO: 27501 - DNA, 2243 bp, Setaria italica
  Peptide Sequence Number=SeqID_93475
atcgagtgtactggccgccaccactcgtcccctcccctcgaaagcccgcacgagccctcccccttcctcctccaatcagtttccgatccgacccgagccggccggccatggcgattagggctggcggctccgccctcctcgccctcgccgtcctcctcgccgcctcctcctgcctccaagctcgagtggatcaacttcatcatggaagacaggtatccgactggagtaggaaacacaactttgaactgcaaaatttgtcctcaagtcaaatggacgaccttcatctcctgggaaggccagaagaaataacacgcaggaaattaagggatagaagaactggtgtgaggaagaaaatggaagtagtgcagcaggatgatgaagccctagtgaaacttgagaacacgggtatcgaacgctcgaaagctgttgattctgctgttctgggaaaatatagcatatggagacgtgaaaatgaaaatgagaaggcagactcaagggttcgtcagatgcgagatcaaatgatcatggccagaatatattctgttcttgccaaatccagggacaagcttgatctttatcaggaattactcgcaaggctcaaggaaagccagcgctcccttggggaagctactgctgacgctgaacttcctaagagtgcttcggagagaatcaaagcaatgagtcaagttttgtcaaaagcaagggatttattgtacgattgcaaggctattacccatcgtttaagagcgatgcttctgtcagctgatgaacaggtccggagcttaaagaagcagagcaccttccttagccagttggcagctaagacaatcccaaatggcatccattgtctttccatgcgcttaacaatagactattaccttctctctccagagaaaagaaagttccctaacagcgagaacttggaaaatccagatctttatcattatgctcttttctcagacaatgttttggcagcatcagttgtggtcaactcaaccatcatgaatgcgaaggagcctgaaaaacatgtatttcatcttgttactgacaaactgaactttggggctatgaacatgtggtttttgctgaatccacctggggatgcaacaatccatgttgaaaatgtcgatgacttcaaatggctaaattcctcttactgtcctgttctgaagcagcttgagtctgcggctatgaaagagtactatttcaaggctgatcgtccgaaaacactctctgctggttcctctaatctgaagtatcgaaacccaaaatatctttccatgctcaaccatctaagattttacctccctcaagtctatcccaagttgaataaaatccttttcctagatgatgacatagttgtccagagggacctgactggactctgggaggtcgatcttaatggaaatgttaatggggcggtggaaacatgtggagagagctttcaccgatttgacaagtacctcaacttctcaaatccaaatatttctcagaatttcgatcctaatgcttgcggttgggcttatggaatgaacatgtttgatctggaagaatggaagaggaaagatattactggaatttaccacaaatggcagaacatgaacgaaaacaggctgctctggaaattggggacactgccaccaggtcttctaactttctacaagctgacacaccctctggacaaatcatggcatgtgcttggcctaggatacaacccaaccattgaacgctcagaaatagacaatgccgcggtcatccactacaatgggaacatgaagccttggctggagattgcaatgacgaagtaccgaccttactggacaaagtacatcaattatgagcatccctatattcatggatgcaagatcagccaatagacaccagctaaagtaaagtattcttctgtgatgaacattggatttagatggggctacaaatgaagtcccctgttagtagtataactctacaatatgttctttattcgtgttattaggattgttaggtatcctgtgtatgtagttccgtcacccatttgtggtgccttctcccctaggccattattggttcttgtttaaattccttcacttttcgtcatgaaaagaagaaaaatgagctttgtgcatcagcagataaatgcaatctgtctgaatttgagtcaaaaaaaaaaaaaaaaactaaaaaaacgtaaggaacgtaacgtccgaaccggaacggaccaaccaacggggaaggggtaaggtagg

SEQ ID NO: 27502 - DNA, 255 bp, Setaria italica
  Peptide Sequence Number=SeqID_93476
atacaggactgggttgctcttgctttttcgttggcttccatcaggagaaaattgtgatatcaactcgattggtgcacttgatcggggagttgtgggctcttggcattctgttgcatcattctcaggggagcttgaaaccatgccaacatgctcttgtactggttctgctacttccaccatatccttcaatttaaagtacacaaatttatcaaattaagaaaagcgacggaaacaagatctaacagatttgtattt

SEQ ID NO: 27503 - DNA, 2024 bp, Setaria italica
  misc_feature (1005)..(1005): n is a, c, g, or t
  Peptide Sequence Number=SeqID_93477
ggtgtattgtagtctcaagatatcttcgtgcaactcacattttatgatgttttcattgttaggactgttgacatcttcgtggaagaaaaaatcaagaacagatacaggactgggttgctcttgcttttcgtggcttccatcaggagaaaattgtgatatcaactcgattggtgcacttgatcggggagttgtgggctcttggcattctgttgcatcattctcaggggagcttgaaaccatgccaacatgctcttgtactggttctgctacttccaccatatcttgcaatggtttatgtctgcattgctctactgggatgtgccacgcacttccatttttttctaagcaatccagtttgtcaatttcttccgtgcgcagagtgttaggttcaacatcgtcttgtgttgtttcctgactatcttctttgacccaatgcccatcctgctcatgctgtgcttcacatgcaacactttctgaaatttctcccgtttggctttcttcttttgcaagctcttctctctttgccttgtatatggcatcaacgtttgcttcttcaggtgaaaggtaaatgcagtcttttgccctagggctactcctaggtgatggtgtgctgcattgagggagggaaagcatccttaccaaggaccttgagatccgaagtgtggggtacttggccatttgacttttgtcctttagaatctctgctagatgtttcttggcctcatcataaaagacagatccatcctttgatgatgtaattatgttactgttaatttcgtttggtccatcattcctttgcttttgcctactgctggttgaagatctagaatcttttattgcagtagatgaaaatttctcttctgaggtctgttcagtgagctgtctggtattcgttttttatcgtgaaaggtgaacttttgaaccaatgttgattctttttggaggctatcttcacacaccgagggtctccttttctagcttcactagtcacgattgtgaatcttntcctaacttccttaattgaaaattttgaactttcagatgcacttaattctggatcttgagttgaactagcagacacagcaggttcaatccctcctattggatttggtttcagtataacgatttttttaattggctgagaaatattggttccttctgcagaatgccttctgtttggtctttccttcttccagaaagggatatgcctactccctttacccatgtgtcttggtggccaactcaggctgactcagacttttagtatctttgtttgagttgttattctctggtatttgcactagcctggtccctatatgtctgttttggtgcccttggacgctctccaaaatatgtgaattcggcttctgtagtatcttcaagaaaagttcagtgtctgagcttagcatctcgagtgcatctctgaattttttgggttgagttacactgctgctacaaagacgtttgccatcaaccatatccttttcctcacactcaggagtttgctcataagcaagactgcaaggagcattatctaactcattaagctttgtttggattaagaccttcagctctgaacatagctcacccttattcttggaattttgatgtggctgctcatcatggcacctatggatttgtcctaagaaatctgccacggcaaattcgagttcattttcttctgcttcttccatgcagttggaaccactaggatccaaagatctggctggggcagacatggtgatgcttgtgctgtgatttgggtctccctttgatttgctgttctgcgttgaacttttgtccagacagacatcatgtcccaggtcagctaatattctttgaacctcatcatttggaaccttcaactgttttacctttcctagctcgtcctccataagtcttttgaccgttggtttgcttggactgcattcgtccatgttagcaccgtcttcatctatttcgtccaagtccctggaattctttcttgagtggcctcttccaggaaagcctacttgtaaagttgt

SEQ ID NO: 27504 - DNA, 235 bp, Setaria italica
  Peptide Sequence Number=SeqID_93478
gcagctctagacccagcagtccgcaggcatgcccctctaggccaagactccaagctgcagttgcggcctgatctgcttcctccttatctgcatctcgcttcgaccccttgctccactgctccaatcctccaagattttgacggaaaaaaggacattttcaatcaaagagaagtctgtggctgaggctgaggctgactaaaatctggatgtgcttgatttataagacgtactgttt

SEQ ID NO: 27505 - DNA, 445 bp, Setaria italica
  Peptide Sequence Number=SeqID_93479
gcgcggatggtgtcgttgaacagtactggctcttgggcaactagccccacttgctgccgaagccagccaactttgaaggcttgaagttccacatcgtcgaagaggatcttaccggagtccggatcatagaacctttcgagtagcgcgatcactgtggacttcccactcccactctccccaactagtgcgacagactgcaaggatagcaaccactaaaatttagtaccggtggaaatgtgcaaattggtgctttgttctgattgaatttgacctttccagaaggaatcctcatagatagatccttgaagatttgaacatttggtcgtaacggatacttgaagaacacattctggaaatcaatgtcacccctcacacttgtgatgatcacaccctcttcgctgactgtaaattcgaatacttaggaacttcttcggttgtaacttta

SEQ ID NO: 27506 - DNA, 2038 bp, Setaria italica
  Peptide Sequence Number=SeqID_93480
caatatttacctatacaaacttggatagatcctaactagtcaattcccataaatcgtacgaaaatttgcacatagaaacgagtgatgcatgctgactcttcgcttatcaccagaataagagttaacttaaagtagaaccttgagtagcaaccatttacatattatccctatccaatccatgtgagcatcatctaagttttgaataatgcccaagctctcatcaggtcatgcagaactagagctaagctcaacaagcgaagcgtaggttccgtcctttatccgcatcaactcttcatgcctgcctttctcggctacggccccgttcttcagtacagcaatgatatctgcacctctgatcgtcgctaaacggtgtgctaccaccacggtcgtcctaccgaccatcacctggtccagcgcctcctgcaccactcgctccgactccgaatctagcgcgcttgttgcctcatccagcagcagcaccttggggtcctttatgatggccctcgcaatggcaatacgctgcttctgcccacctgacaattggatccctctttcgccagcgatggtgttgtacccgtcaggcaacgcggagatgaactgatgtgcgttggcagcttcagcagcagcaacgatttcatcttcagatgcttccccttgcttcccataagctatgttggcgcggatggtgtcgttgaacagtactggctcttgggcaactagccccacttgctgccgaagccagccaactttgaaggcttgaagttccacatcgtcgaagaggatcttaccggagtccggatcatagaacctttcgagtagcgcgatcactgtggacttcccactcccactctccccaactagtgcgacagactttccagaaggaatcctcatagatagatccttgaagatttgaacatttggtcgtaacggatacttgaagaacacattctggaaatcaatgtcacccctcacacttgtgatgatcacaccctcttcgctgctgtaatcgatcttggacttacggtcaagaatttcaaagacagatgctgccgcatcattagccttggtgctgtccacaccaaaagcacttgctcgtgagattgcacttgctcctaaaactaatacgaagaagaccctaaacacttcaggaaatgtggccgttccttgctgaacaaacttggcaccaacatagaagcacagagcatatgtaaagtagaaggtgaggaatgagaatccgaaccccaagccaccaataacaccttctcttattcctttctttgttggagattcacatttcttctcataggcatccatcaccttcttctcggcagaaaacgatgccacagttctgatgccgccaactgcatcagttgctacttgacttgcttcttcatacttcaactttgcatttctattgagaccaccaaggaacttcatttgagcataggcttggaaacccacaaaaggaaccaccacagtgataatcagtgccaacttccagtttgccaccattgctattgtgaagccggatatgacagttgacagagtctggacattcagtgctaaattgtccccaacaagttgcttaacattcagagcatcagttgatagccttgcaccaattgatccactcgagtgttcaggtttatcaaaccagttgatctcttggcgcattacactctggaatgtcagtgaccgtacgcgctccacaagcttcccaccagctaatccaaacaggaagtattctattggaatcagaacaaacacacaaacgcctaggacaacaaacatacttgccaagaacctggattccttcagtagttctgctggtggctcataaaacacctttatcgcagttgaaatcaatatcccatatattggaaaaatgactccatgcatcgcagcaattatagaaccaagtccaagtacaaaagcttctggtttgttcagatagaagagtctaccaattggagctttccttggagcactagtaattttgtctgtggtctcctgtacatcaggagcttcactgaattcc

SEQ ID NO: 27507 - DNA, 253 bp, Setaria italica
  Peptide Sequence Number=SeqID_93481
gggagtacaagcttcagaggctggtgggggcagggatccttcgccaaggtgttccgcgccgcgcaccgccgcaccggcgcgcgcgtggcggtgaaggcgatcgaccgccggcgggtcgagaagcgcgtccacgaagggatcctcaaggagagggagatcctcaagagcatcgatcaccccaacatcctccgcctcctcgacaccatcgacacgacgaatatgatgtacctggtactggagtactgcgatggag

SEQ ID NO: 27508 - DNA, 251 bp, Setaria italica
  Peptide Sequence Number=SeqID_93482
gcgtaaccaatttatcaagaaatcccctttcctcatctatccatacaccatcacgctgcttatcttcagcttcttcaacgagaagccttcgcctctctttctccctgctattctcccatatgtacagctttgcatggtaatcctccatttccatctcatactgttggagtcttctgagtaagttgtctaactcggaagctacattttcctggtaactgtcatgggtgagtctccttggcttacatactaga

SEQ ID NO: 27509 - DNA, 361 bp, Setaria italica
  Peptide Sequence Number=SeqID_93483
ctgcactagaactgagagcttctcaactcatccgttaatggaggccatagtcagggcaggtgtatcttcctcggcgccggcgcagctacgcccgtgcccgatgccgtgccgcaaccgctgcctaccgtcctccgtgcgccgtcccggacgccggggagttgcctgctcggcctcggcggccgacgccgacgtcgtcgatctcttcgatgccgccaagctcacggtggacaggttcgtgcagagcggcatggtggtcgggctaggctccggcccggcgtccgccctggcggtccagtacctcggcacgcgcctccgccggggatctctcaccgacatcgtcgcagtaacctcgtccgtgctc

SEQ ID NO: 27510 - DNA, 566 bp, Setaria italica
  Peptide Sequence Number=SeqID_93484
caaaataagacaatatgaaaatagacaggaaaagttcataagtaatctataccattaaagagaaagcctgctacttaacataaccacaggaaaaaattaatgaatgcttgtgcaaaattgaaatttcagaacatgcgtacaattccagtcagcattttttttcatcgtgatgatttcagtagtaataaaagagagcatcctatgtatatagatatcctatagagtgaaatgcttcaacaaaacaactacataagtgacagagaattacaccctatccaacaaaattcaaatgcttggaagttggaaagactacaaacttagcaattcatcagcaaaaagatggaagtatcaggggtaagctccttccctgattaatcaggaaaattagaacaatttccaactctatcatttaaatgtatacgctacctgatcattgaactggtcgttgaacatcgcattagcaacggctgccacttctccacaatctccctgcactccctgacccagaggctgctgcaatggggcagccgcccccagccacagcttcaccctgttgaccgagattg

SEQ ID NO: 27511 - DNA, 240 bp, Setaria italica
  Peptide Sequence Number=SeqID_93485
ttgagctgcccaagagggacgatggggtttgctacttcgggctgcatctgcaaaggctcatttgggcgcagaagccgaacctgtttgaggcggtggatggtggggagagaggggaggccgtcccagaggcgtctgtggatggagatatggagatgggccaggaggatggggatgaggatgctgatactgatgtgaaaagcaagagcttggaggagctggagctgggggatggagaggcag

SEQ ID NO: 27512 - DNA, 283 bp, Setaria italica
  Peptide Sequence Number=SeqID_93486
cgggggagcctgtggatggccaacgacggcttggcggcggcgacgcggtcgacggtggcggcgagggcgacatcttggtcgagggtgaggtcgattagcgcgacggcgacggcgtagccgtccgccaggaggacgtcggcgagctgcatcatggggacgaagtggctgacgaagacgccggggtacaggacgatggtcttctccatggcctgttttagattctgggcctggctctcggtgccggatgctaatcggcactatctttgcagtagaactacgtggc

SEQ ID NO: 27513 - DNA, 360 bp, Setaria italica
  Peptide Sequence Number=SeqID_93487
tgtacatcctctagctacaatttcccaccccgtccctccatttccaaacccccaagctctcactttagtcaaacaaacttcatcgatctctcaagaacagccaaaaaggacaatgctggacaagaaggaagacaggacgcggatgctccccaagagctcgagccagaagacgctccgtgccgccatgcaggaggagcgggccaccatggccagccgcctgctctccaaggacccctcctccgtctccaacccctccttccgcgtctactacggcgtcgcctccgcgggctccgtgcccttcatgtgggagtcggcgccgggcacgcccaagaactccatctccgacaccaccctcccgtc

SEQ ID NO: 27514 - DNA, 244 bp, Setaria italica
  Peptide Sequence Number=SeqID_93488
ctgcacgtggtggtggccgtcgatgaggagaaatcgctgcacgtggtggccaccgaggagagcgggcggcggccacggcgagggcggcggcgcagggggcgttgggaggaggagagtgaggagacagggcaacgacagccccggcgctggaggcggcgcatggggagcgtggggaggaagcaaaatggatctgtgagagagaggacgtggtcacctggctcgttggcgcgatgaacgtgagtag

SEQ ID NO: 27515 - DNA, 556 bp, Setaria italica
  Peptide Sequence Number=SeqID_93489
gccggcgcaacctgcgtcgccgacggcagggcttcgttccttcctccccactccctcacccctctcttcggcccgcatagcctgtttatcccacttggtcctgtaggaaatgaagaggagtatggccgtctggagcagcgtgcccagcgtcatgccccacccaaattccccattgcgtccattttgagcttgaagccgaagagcgctgcgagcgggatgccgacaaagtagtagctgccgatgttgacgaaggcgacgagcgcctgccaccctgcgccgatggccacgccggagagcacgggctggatgctgttgaggaagatggagccggcgaggaggtagcccagtttggcggcctccctcagcacgtcctcgtcctcgctgaagaaccggggcagcccggtcctccaggtcaggaacacggcgaagaagacggcgccgatggagcccgacgtcagcaccgccatgatcaccgagaacttggcggccttgggccggttcgcgcccagctcgttcgacaccctcacgctgactgctgcgttgaagcccagtgcaa

SEQ ID NO: 27516 - DNA, 227 bp, Setaria italica
  Peptide Sequence Number=SeqID_93490
taggaggagatggtgagaacaaaggcagcccgtcagccggagcaaagctattcagcgctttggctatctgctcatggatctgcatacttctgtgtgaggaagtcatgcagtggaatggctcgtgtgccggaacccaacggcaggtccaagacccggagagctgcaaagaggaaacgttagaagattgagatgatctgcttatgattgccctacaagagatgcttcag

SEQ ID NO: 27517 - DNA, 718 bp, Setaria italica
  Peptide Sequence Number=SeqID_93491
ttagttatttgttaatttgttagttctttttgttattcctattgtcttcccggttagtccgtccctagtccgttagtctttgatgagatgccaacgcactcgatggaattggtgtggccgactaatggaaccgacgacctggccagagtttacattcacaatgtgcacagaattatccttggagccactaacaactgtttgtgagtccaaagtaattgataagcatgtcaatccatcagtatgatagccatggcctcgaacaacatgtctgctttgtgcacttcttgggtcccatatcctcaaagttgcatcatccgacccagtacatataagtttaccatctggagtaaaatcaccacatgtcactgtgctactatgtccagcaaaggtattaagaaaggcattatggtcagcattccacatccatacattacagtcctccgatcctgcgattatcaaatgtcctcgtggatgccatttaagccactacaaaacatgtaaattactctgtgagactaatcatcgaatagtgatgtatttcgtgatgagaaagcaagggttctacactggaaatcagtcgaaggagaccagaacatctgacctcaaaacctgacccagaaccctcaagggttccatgaagagaacgtatagctgtattccacacatttatctgcccatcaaaacttccacaggccaactaaattttccttattcttga

SEQ ID NO: 27518 - DNA, 1475 bp, Setaria italica
  Peptide Sequence Number=SeqID_93492
ttttttttttagtagaagaaaaggggcagtacattcatacctccaaatacattctttgttcatctataataacttggagtacggttgagtcgtagaatatcatattatcatgccatgccatcatcttacaccacaaaggagagccatagcacacaaaacaaccatctactacatcccagtatccttcacttaaacatggagatgtcgaacacacgggcggagccatctgttgaggccgagaccaaggcgttgccatcggcggtggtggccagcgactgcaccacatctgcatggccgctgaactccctggcacagtccccagagaggctgtcccagatgcgcaccttgccatcgatgcatcctgacgcaacataccttgacgaacccagccatgccagcgatgtcacgccctcgtcatgctcgcaaatgcagcggcttgattgatgcgcgaggtcccagatgatgagcttttgatccatgctcccggtagccgcccagccgtagcttgatgagatgccaacgcactcgatggaattggtgtggccgactaatgaaccgacgacctggccagagtttacattcacaatgtgcacagaattatccttggagccactaacaactgtttgtgagtccaaagtaattgataagcatgtcaatccatcagtatgatagccatggcctcgaacaacatgtctgctttgtgcacttcttgggtcccatatcctcaaagttgcatcatccgacccagtacatataagtttaccatctggagtaaaatcaccacatgtcactgtgctactatgtccagcaaaggtattaagaaaggcattatggtcagcattccacatccatacattacagtcctccgatcctgcgattatcaaatgtcctcgtggatgccatttaagccactcaaaacctgacccagaaccctcaagggttccatgaagagaacgtatagctgtattccacacatttatctgcccatcaaaacttccacaggccaacaaatttccatctgaactaaaagcgacggtgctgacagtatcgctatgtccagtcagctccaaagcaccctctgctgatccaatcctccacagaaatcctctatcatctttgcctccagaagccacaagtgatgcatctgtaggactgcacgcaacagtgaagacttcatctttgtggccttgaaatatgtatgtagaatcatcaacgtcttctgaatcacccatcccgtcgccgccgtcttcatcgtcgtcgtcgcggtcggggagatcttcgtcgtcgatggttatctcgtggatgatgtcctcctcgttgatgaagacttcctcctcgccgtcggagccttcgccgggaagctcgcctgagatactcatcgccgccaacgccgccgctgcgccccctcgcgtggctcgcctcgcgcacagccccgcttgatagctcctcgccgccgcagcttcccgaccgtgcga

SEQ ID NO: 27519 - DNA, 329 bp, Setaria italica
  Peptide Sequence Number=SeqID_93493
tgaacatatactgaccaattgcttttgggtttttggactttcttttagtctcagagcacaagctaaactgcagaatttggcatctacgcgttaaattaaacaaaagtgaataatctgggcccatgaccacatcctgataagtctgtgcgactcaagttaagccatgtatttaattatgccgtgattttggtttgttcaattctgaaaagagccctaaaatagttttagctgtgacaagaaaaccaggtgacagataaccaactatccatgttggacggcttgttggtcagaacaggccattttgtgctggtactcctatttaaatcata

SEQ ID NO: 27520 - DNA, 279 bp, Setaria italica
  Peptide Sequence Number=SeqID_93494
caaacagagttatcactgccaacactagaggaaaatgttgaagttttccaactcccaccaaaactaccagagcagaaggcaacccctagtggggcagttattggatctcgagcttgctgtgcaatcgcttccatattttctctgtcaacaacatcaagacagttgctatttggggactcagataaatttgaatatgcattttccacacgtaatcttttggacagtggttccacaaggtcactttgttcaggctgtggaaatctcttcagtttggtcaaa

SEQ ID NO: 27521 - DNA, 665 bp, Setaria italica
  Peptide Sequence Number=SeqID_93495
taactactactaccattcatgctctctggaagagcacatctaataacataccatgcagaagcatcccagatgtcatcaattacaatgaggtacctcttgtccaataagatctttttcactgaactaatcagttcaggctcttcccacatttcaatgttggtgtccttaggaggtacaaagccaacttgagatagtattgttctcagaatcttcctgatgtttggtttctgggacacagaaacaaatgcttgacactggaacttctcaagcttgcgataaatctcatttgcaagagtagtctttccaagacctccaaaccccacaatagagagcacctttagctgatgtgcaggcacaccctctgcatccatcaactgaatcagctggtcccttggtcccgtgacgccaacaaggctcgccgtctcagcatggagcgccagcaagcgaagatcgatggctgtgttgtttgactttggggcaacatcatccatcttgtacctcgtacgccgctcactcacctccttgacacggttcttaaggccttcaaactctttggcaatctcatgcctagtgttcacggttgtcattaacttcatgctcctaacgatgaaccctttgaatccgtgtggcttgctggagtcgcattccacgcggagcatgaactc

SEQ ID NO: 27522 - DNA, 364 bp, Setaria italica
  Peptide Sequence Number=SeqID_93496
gtcccaaacccgctctgctactgaacaaacacacagcaagtcatcaacctcctgccgtttcagcgcgcgccatgaagctggaggtcccggcgaggcagaggagccaggacgcggagcagaacgacaaggccgcgggcgtcctcggcattgagccatggaaccacccgacgacgaagctccctttcccagaggcgggggccggcgacgacgccctggtgccgccggtcaacttcgccatggtcgacgacggcatcttccgctcgggcctccccgacgccgccaacttcagcttcctgctctccctcaacctgcgctccatcgtgtacctgtgcccggagccgtacccggaggagaacgcgacgga

SEQ ID NO: 27523 - DNA, 287 bp, Setaria italica
  Peptide Sequence Number=SeqID_93497
cggggcccggcgcctgcgccagcgccgcgggaaccaccgccagcgccaggaacgccgccgccgccacggcgatgcgcctcgccattatgggttgtgtgggctgctgcggagcgcggcggtgtaaggtcgactagctggtggtgagcgtagagtagcgtagtgtgctatcggtagagaggctagagcggtggggtaggttgatatagggaggcggaggcggagcggggctgggtggggtagagcttcatggctggagctgagctggtggtggggcgtactgagcggtg

SEQ ID NO: 27524 - DNA, 1158 bp, Setaria italica
  Peptide Sequence Number=SeqID_93498
ggcgcgcgcgcgcgcccgcgaggcaagcagcgtcgcctccgtcatgcgcctccagttccacgactgcttcgtcaacgggtgcgacgggtcggtgctgatggacgccacgccgacgatgcccggcgagaaggacgcgctgtccaacatcaactccctgcgctcgttcgaggtcgtcgacgagatcaaggaggcgctggaggagcgctgccccggcgtcgtctcctgcgccgacatcgtcatcatggccgcccgcgacgccgtcgtcctgaccggtgggcccagctgggaggtgcggctcgggcgcgacgacagcctgacggcgagccaggaggactcggacagcatcatgccgagcccgcgcgccaacgccagcgcgctcatccgcctcttcgcggggctcaacctcagcgtcaccgacctcgtcgcgctctccggctcgcactccatcggcgaggctcgctgcttctccatcgtcttccgcctctacaaccagtccggctccggccgccccgacccccacatggacgccgcctaccgctgcgcgctcgacgcgctctgccccaagggcggcgacgaggaggtcacgggcggcatggacgccaccccgcgcgccttcgacaaccagtacttcaaggacctcgtcgccctccgcggcttcctcaactccgaccagacgctcttctccgacaacgccaggacccgccgcgtcgtcaagcgcttcagcaaggaccagaacgccttcttcagggccttcgccgaggggatgatcaagatgggcgagctgcagaaccccaggaagggggagatacggcgtaactgccgcgtcgccaacaactcgccggcgacgacacccaaggaggtggcggcgtaccgcgtcatggacttctgatcgagctccggctggattactgtttcagaagagatcgtcgagctctgatatggtggtactaatatgttgacaaggtttttgatcgtgtgtaagtcctgcctgcacctacctatgattgtggtgcgcgagcttttgtgctcattgctgatgtcggaaataattgagatagtgtgcctatatacatgataagggtagcttagccgaaaattgcctcatgtgatttaggtcattctgctgaccagttttattcacaaaacaaataattaaaa

SEQ ID NO: 27525 - DNA, 1128 bp, Setaria italica
  misc_feature (1104)..(1128): n is a, c, g, or t
  Peptide Sequence Number=SeqID_93499
tccccgtcagacgacgggcacgagcctgtctacaagctgacgacggcctcccgcctcctcctcaccagcaacaacgacaacggcggcggcgagggctcgacggtgaccttgtctccggtgctcaaccacgtgctcaatcccttccgcgactcggtgctcagcatggggctcaccgcgtggttccggcacgacggcgagcagcacggcccctgtccattcgccctgatgcacggcgagaccctgtgggaggtgtccgggcgcgacgacgcactgaacgcgtccgtcaacgacgccatggccgcggacagccgcatcctgatgcgggtcgtcttgaaggagtgcggcgaggtcttcggcgggatcgactcgctggtcgacgttgccggcgggattggcggagccgccaccgtcatcgcgtcggcgttcccgagtctgaagtgcagcgtgctggacctgcctcacgttgtcgccaaggctccatctggtagcaacgtgcagtttgtcgcaggcgacatgtttcagaggattccacctgcaaatgctgtcttcctcaagtggattttgcatgactggggtgatgatgagtgtattaatatactgaagaattgcaaacaagcaatcccttcaagagatgcaggaggaaaggtgataatcatagatattgtggttggatccaagtcatcagatgccaagcttctagagacacaggttttgtatgatttcgatatcatgaaaattggtggggttgaacgagatgagcaagagtggaagaagatattcctcgaggctggattcaacgactacactattatgccggttctaggcctccgatcaatcattgtcctctatccatgaacgctcatcagtgaacaagtccgccacagaaattaaagcatagcatggtcagggtactagtgactttgttctgttggattactatagctgaagtctcagtttgaacgagtcttaatgttcagtgttcaaactcagtcagtttgagtctgttcagataaattgtgacgacctatcactcccagctatcacctattctagattactcgattactcgattcaggctccatgaatacattatgatttttcttnnnnnnnnnnnnnnnnnnnnnnnnn

SEQ ID NO: 27526 - DNA, 465 bp, Setaria italica
  Peptide Sequence Number=SeqID_93500
ttggccgaaaggattatgaaaaatgtgctcaggatatctacttctttcttcaggtacatattcttggaggaatgaactcatatcgagtgcaaacttacttctttctgagttccgtacagtgtgtatggttccacactatgagcagtgccgacttgcattggtggtcccttaaggttctctttccataggcactgcaaatgccatccttttccataatcattgcctaagcagctaagcgccaccctccccattttatcgccccaaattctcagtcttgcacgagagcccctcgatgaccaactcggccagctatcacctattctagattactcgattactcgattcaggctccatgaatacattatgattttcttcaaggttcaagcaatcaaatagccccacaagattactcaaaaatatggtattcatttcgcaaatacctgcatcgtggcatgcttccagttg

SEQ ID NO: 27527 - DNA, 178 bp, Setaria italica
  Peptide Sequence Number=SeqID_93501
taatctaacatactccgtgtgtaacaaggttataaaaagatgcgtccaaaaagtgacatggatagtctccaatggttggctcttgcttggaagctttcgtgttgatttttccacagcgctgaagaggaatcatagtatgggtttgaagcagtaggcacagaaaggtgtccggttcaaa

SEQ ID NO: 27528 - DNA, 587 bp, Setaria italica
  Peptide Sequence Number=SeqID_93502
ctgccgtttctgaccccggacagcactttcaagattgttgtggacagcttcggcaaggtgatcagctcccaagagcagaacgagatcatgcagagcctcacttacataccattcaagggccgtgttaatctgaagaagcctgatcacaggttctttgtcatggagacagatgattatgggtcaaacaatggcctcccgccagttgcgaagaggactatattctttggccgggaggttggagcggctgataggcatctcctgccaacttatcagctcaagagcaggaagtacattggcccgactgcaatggatgctgaaatggctttccttatggccaatcaaggtctcgcacggcctggaaagcttgtgtatgacccctttgtcggcaccggtagcattttggttgcagctgcacattttggagctatgacaatgggtgcagatatcgatataagggttgtgcgggatggtcgtggcccagattgcaatgtttggagcaactttgaacagtacaagttaccagagcccttaggtttgctaagggcagacaacaacctcccaccttggcgtcctggattgaaggagat

SEQ ID NO: 27529 - DNA, 376 bp, Setaria italica
  Peptide Sequence Number=SeqID_93503
gtttcagtgattgaacgtacaaatttgagatatctttctgaattgctacaaccagtcgacttggtgacactagacctgtcatttatctcgattcttttgaatgccagtcaagatagttctggtggccttttacaattttctagttgcaatcttgcaatagtggttcaaggcgttggaaaattctctatatattcttgggttctgttcacaaaactcattcttggtaaagttagcgtgatataaggggtcattgggcctcaaaatcaagttcttgtgccctcgcaactgcacagatgagctgcaccaaccgtcagatgttattaggaacgagatcatcttcactaaaggagtagaggaaaaaatgcatcaggaggta

SEQ ID NO: 27530 - DNA, 979 bp, Setaria italica
  Peptide Sequence Number=SeqID_93504
accaatagacaatgtttctgaagttaataaaatcataaaattcttcctagcacacactcatattatctgtacaacctaggttatgcctgctgttatcaaagtaatgaagatggactctacgttggtaacgcttatcaagcctcaatttgaagctcgtagatcacaggtaggaagtggtgggattgttcgagaccttctggttcataaagaggtactggataataatttcaggcgtggaagagtttggattctgcaataaaggctggattgaatctcccataaagggtgcagaaaggaacacggagtttcttgcttgcttccacagggtcccaatatcagaatggcaaccagaagtagagactaaggcagagatcgaagttacatgataggaaatgctgctgaaaaccagtcaaggatgatatgtcatcaatcagagcgcaccataaagtatctggaagctgcacatgaacttatgctggaaagatctgttgatagtgttcacaaataggttgagtatggtcagtgagatattcgtgagaggtataaaattttgagacgcttaactctgaatgaagtttcaggggtccgcttgctgttccccgagggagaacaaacacgcagagatgaccagccttttattcattgcagagcatcgtcagcttattgtgatattcattgaccgctcagtttcctaccaaacactgattcgggcagttgttcagttagcacgaggtatacttgttcagttggtcagcctttcgttcattttgcatgtaatttattcaggggtctgcatgaggtatgcccttcttgctccagcaaaattgtaaagttgttcagttgtctgcatgaggtatgcccttctgatcgaatttggaggccatgtctcctactcgtgcacgctggacgcatgcataaacccaatacactgattctctgtaacagtataccaaagtaattaatcacattcagagtcatg

SEQ ID NO: 27531 - DNA, 1030 bp, Setaria italica
  Peptide Sequence Number=SeqID_93505
ttaaaggctgaaatcccaaaattatagcgggacataagcttgaggcagctatcaaagaatttggtattggttgtgatggaaagatagcccttgattcgggattatccacaggtggctttacagactgtttacttcagaatggagcatcacatgtttatggtgtagatgttggctacggacaggtggccgaaaaaattcgtacacatgagcgtgtttcagtgattgaacgtacaaatttgagatatctttctcaattgccacaaccagttgacttggtgacactggacctagtcatttatctcaattctattggttatgcctgctgttatcaaagtaatgaagatggactctacattgataacacttatcaagcctcagtttgaagctcgtagatcacaggtaggaggtggtgggattgttcgagatcctcttgttcacaaagaggtactggatagaataatttcaggcgtggaagagtttgggttctgtaataaaggctggatcgaatctcccataaagggtgcagaagggaacaaggagtttcttgcatgcttccacaggatcccaatatcagaatctcaaccagaagtagagacaaagacagaggccgaggctacatggtagggaatgcagcttgaaacctgtaaccaaggatgatatatcaagttatcaacaatcagaacacgccataaagttctggaagctctgcatgatgtcatgctgggaataggaagttctgttgatacagtgttaaaaaataggccgattatggtcagtgagatacctattagagatacaaaattggaatacttaattctgaacttcaggggaacgcttgctgttccccgggtgagtaagaacaaacacgcagagcgtggtcagccttttgttcgtcgtagagcgtcgtcacctgattgtgctatacattatatacatacattggccggtctgtttcttactgaacactgactcgggcagtttttgtatgtaatttgttcaggggtctctctttctcaagcaaaattcacaa

SEQ ID NO: 27532 - DNA, 657 bp, Setaria italica
  Peptide Sequence Number=SeqID_93506
ttgtttattggttgttagtattgtttggtcttacggtactaggttggtccgtaattggtattggttgtgatggaaagatagcccttgattcgggattatccacaggtggctttactgactgtttacttcagcatggagcatcacatgtttatggtgtagatgttgggtagctgaaaaaaatccgtatacacaaatgtgtttcagtgattgaacgtacaaatttgagatatctttctgaattgctacaaccagtcgacttggtgacactagacctgtcatttatctcgattcttttggtatgatttagtgtgcactgtattatcattcatatttagtggccagaaggttatccacttggataacgtttctaacaaaactcatatcgtatagcacaatatcataataaagtgaataaatgccttttagcttagttattcaaattctacatcacttttatgtcttttgttatctgttctattttgtttttccgtgttcaaaatttcctttctttttgttgtaatgctttcttggtgtagttagtgtgatataaagagttaatgggctttaaaatcaacttctcatgaagctactttgccatttctaaagcaaccacaacaactgcgctgatgaccacataaatttcatcaattattagag

SEQ ID NO: 27533 - DNA, 325 bp, Setaria italica
  Peptide Sequence Number=SeqID_93507
cgtacgtccccccacgtcaccgcacccaccttcctcctcttcgccgcttcataggacacccacccctcgtagcctcccgtcggcgcgtcacggcggggcgcctcgctcgcttgttttgttggttgcgggtttgatatagtttgggtgtgcagatgagcgcggacgcgggtgctgcgatggagaagatccgggcggcggggctgctcaggacgcaggggctcatcgccgggcagtgggtcgacgcatacgacggcaagaccatcgaggtgcaaaacccagccactggtgaggtccttgcaagtgtgtcctgtatgggcagcagaga

SEQ ID NO: 27534 - DNA, 618 bp, Setaria italica
  Peptide Sequence Number=SeqID_93508
cagagcccactgaaaccaagtatgatctgaatcgtcgatgcgataataagagccccctgcgttcccctcattgtccgcaagaatttctcgcgagggtctgcttcgttgctgtaccgcccggccaagatgatggatatggtaggtgccacaagaaggtatatgagccaagcgcattcatcaaggctgttcagagtctgcaggtcggtaatgggctagaagagagcacatcacagggtcctctgattaatgaagctgctgtccaaaaggtggagaagttcataaatgatgcgacttcaaaggtaatctcaatcactataagggtgtgtgttttccctccaaaaccagaaagcaaaggttcaaaaagaaagcaaggaacaggacatcttcctgaatccaggccctcttggattgtctggactcaggacaggccagtttctggaatttctttcggaaaaatgataagttggctgaaataggagcaggctgaattggttatagctaggcttcagtcggaacctcttgtgcttgcttacttcatcgagaattgggaacttgtttgtttggcgttggtcagctcatgtgaagtaccctctccaatcattttgtagggagcaaacg

SEQ ID NO: 27535 - DNA, 965 bp, Setaria italica
  misc_feature (838)..(838): n is a, c, g, or t
  Peptide Sequence Number=SeqID_93509
atggctgtcgagagcagtttagaataaagcgaataagccgccgcggagcatgaataaaaaggtccgaatgagttgtaaatgacgtgaacaataaagcatatccgagcttttgtatacacaatcatgacgctactcgtcgatggcgtctttggagacgttcatgagtgatatgggcgtcacagcatcaggtagcggcgccgatctttgaatcagatcggtatatcagaatgctaccatagttaccagattcatcgatcatggcacccctaatcggtggggctttgcatccggttctgtttgtcagttctagtcttgatttgttccctctcttcactcttcaatctcatgccaagaagaagagagcctgcctgccagaccctgggcaggcagtacctgggccaccaccacctcagcaagctgtatccttgcaaaccgtatgctacagtatactagtatacggcagcagctgcaggtaggagaaggaataaacgaagcttcctagctctcaccatcaccaacgggctccagtccaaaggctgcttgtcccaccggcagtgcggagcccgataaggccgcccgggcaatcaatcaaggttgcctttgatgcgccccaagatgatctgcctcgaaacccgtgctctcacataccactgctaccagtagagtagtctagccagtagcggtagggctacagttagcggctcggatctgggcgtcggacacgcagcttttggaattcactctcccagtcctgcatgcaatgcaagaagaagcttcctcgaaatctctgcatgcatctgcctgtctgctgctacgctacgctatatacgcttccgtntcatgcaccgataaagctgctcatcaggctggcgtacagtaccgctctactctttcgtcctttgtccttttttttactcgttaccaaagacctgtatggacggaggaggaagaggcaaaagatagtc

SEQ ID NO: 27536 - DNA, 2052 bp, Setaria italica
  Peptide Sequence Number=SeqID_93510
cgggttccaatttccaaatggcgatggcgatagggatgatgacgatgcgacgcgcggcggcgctcggcgcccgccacatcctggcggcatcctcctcctcccgcgtcgtacccctccgccacatgagcgcggacgcgggtgctgcgatggagaagatccgggcggcggggctgctcaggacgcaggggctcatcgccgggcagtgggtcgacgcatacgacggcaagaccatcgaggtgcaaaacccagccactggtgaggtccttgcaagtgtgtcctgtatgggcagcagagaaacatccgatgctatagcttctgctcatagtacattctattcttggagtaaactcactgcaaatgagaggagcaaggcactgagaaaatggtatgatctaattattgcacacaaggaagagcttgcacttctcatgacactggagcaggggaaacccatgaaagaagcccttggtgaggtcaattatggcgcaagtttcatagaatatttcgctgaggaagcaaagcgtatatacggtgacatcattcccccaactctgtcagaccgcagactgttggttctgaagcagcctgttggggtagttggagctatcacaccatggaattttccattagcaatgataacccgaaaggttgggccagctttggcatgtggctgcactgttgttgtcaagccatcggagttcacacctctgacagcattagctgcagcagaccttgctcttcaagctggaataccagcgggtgcactaaatgttgtgatgggtaatgctcctgagataggtgatgcattactgcagagtacacaggtcaggaagattacgttcactggatcaacagctgttggcaaaaaactgatggcaggatctgcagatactgtgaaaaaggtctctttggaacttggtgggaatgcaccttgcattgttttcgatgatgcagacatcgatgttgctgttaaaggcagtcttgctgccaagttccgtaacagtggacagacatgtgtttgtgcaaacaggatattggtgcaagaaggtatctatgaaaaatttgcaagcgcattcatcaaggctgttcagagtctgcaggtcggtaatgggctagaagagagcacatcacagggtcctctgattaatgaagctgctgtccaaaaggtggagaagttcataaatgatgcgacttcaaagggagcaaacgtcatgctaggtggtaaaaggcacagcctggggatgacattttatgagccaactgtagtagggaatgtcagcaatgatatgcttcttttcagggaagaagtttttggtccagttgcacctcttataccattcaaaactgaggaagaagcaatccatttggccaatgatacaaacgcaggcttagctgcatacatatttaccaggagcatacctcgatcgtggcgtgtctctgaatctcttgaatacggcttagttggggtaaacgagggaattatttcaacagaggtggcaccatttggcggagtaaagcagtcaggtcttgggagagaaggatcaaaatacggcgtcgacgagtacctggagctcaagtatatatgcatgggcaacatgggctgagtcctgaaatcggcctggttagagaaacgcctgatggaccgatgaaccgaggaacaataggaggcaggtgtgctgacgagggtgggaagtttatctgcaaagatgggaggggaagggacctggtcaggcggtcagtggctgtcgagagcagtttagaataaagcgaataagccgccgcggagcatgaataaaaaggtccgaatgagttgtaaatgacgtgaacaataaagcatatccgagcttttgtatacacaatcatgacgctactcgtcgatggcgtctttggagacgttcatgttagtacaaaataaaagcctcgtggggtggataacatcttgacagatgctacgttacagtctgtcggtggtatgtacgccatgccttattcctgacgaaaggtggatcctgcaggagtgatatgggcgtcacagcatcaggtagcggcgcc

SEQ ID NO: 27537 - DNA, 204 bp, Setaria italica
  Peptide Sequence Number=SeqID_93511
tggccatccgcgaccgcgtgttcgacgtgtgcgagtccgcggcagcgcgcggccggtgcgggctggtggactgcagccacggcctcgagggcagcatcacctgccggacggcggcgaagctcgtcgccctgttcgcctcggcgcggttctgcctgcagccgcggggggactcgttcatgcgccgctcctccatcgactccgtca

SEQ ID NO: 27538 - DNA, 439 bp, Setaria italica
  Peptide Sequence Number=SeqID_93512
agttcagtatggcaacaagcaagagctgccgaaggagaaggacgtcccatccagtgatattccagtgtcaccagagatgcctgaccagcatgacatgattacatcgttctacttccatggaaacctgacaggcctacaccatccccagcacctggaggtgccgaagcatgttgatgagcgcctgttcatcacactcggcctgggctccatctgccggggaggacaatcttcctgcaagaggagcgagaacaatgagtccgtggatgtagcgaccatgaacaacttctcctaccagcaacctgcggtcgctacaccactcctggagctacactcttacaacaccgacaactgcgtgctgagcatgctgcaagagctcccagacaagccgccgagggtgttcaactacaccgacccagcccttatccacctggacgcaaag

SEQ ID NO: 27539 - DNA, 259 bp, Setaria italica
  Peptide Sequence Number=SeqID_93513
cggttgtcttgagagaggttgttagcaggtgttttcttgccgagattgagggaggttattagcaggtgttttcttgccgagattgagagaggtttcgggatcaacagaccggttttgcctcccagacctcgcgtgtttcaagttctcgagtgatttcagttcacagattaggctaaaatattcttcttcctcctacagcgacctagctaccattttcggtggtctgtgctgttcattatttctctgcgactataccata

SEQ ID NO: 27540 - DNA, 484 bp, Setaria italica
  Peptide Sequence Number=SeqID_93514
ttgtcttagtttgctagtccactccaccggcggcctcctccccgtcaacgagtacggcgtcctcatgcagagcctgcagatgggcgagagctacttcctggtgacgaggggctagccagcacggcgcattcttggatgctattctcggagatagatgcatcatgctgcgtactgcaaagtgccagacgatcatcagtagcttgcaagctagctacgtacacctagtaggtaggatatgtgcacgcgtcgtcaggctgcagctacctagctgctggtcatctagctctgacatggagggtataccgagacgtgtgtgatggaattattcaggcaggcaggcaggcaggcatgcgtgcatgcatggatacgggcagtatataaacagcaagcagggacgacatgatcgatatactagagagatatagtactacatatatgtgcatccacatcacatttccatccatctatgtgtaatcaatcatta

SEQ ID NO: 27541 - DNA, 241 bp, Setaria italica
  Peptide Sequence Number=SeqID_93515
gtcctccccatcacgtaccctgcttctgcctatggcccacacaatcttctcgagcgcaggagctgcgtcggcggcgaggaaggtgacggtggtgatggggccaccctcgaggacgaggatcttgagagctttgaactggaggaccctgaagacgagttcttgctcggtgaatgcgccgccgctgagcttgaggcaacgcaggcttaggacactggcaagcctcctcatagcattttctccg

SEQ ID NO: 27542 - DNA, 434 bp, Setaria italica
  Peptide Sequence Number=SeqID_93516
ttagctcaacaagactagacaatgcactttcctctatttggacttgggcgacatgaggggcaccaaatatatttagatatcggagcttgggaaatgacattgctcggaagtgtagcttcttcccttcaaaagcattagtgagctgaagagagcataatctttgcaatactaacaggcgggaaaatgattcttcatccagtctggataagaccaactgcagccgagttaggttctgaagatgtaataacgatgacataacctgaagcatggatgctgcttctaaacgtccctcaaaaccaagccaagaaagggtttgaggtaaatggagtccttgcagctgcagctcctcctcattttgagccataatttctagatgaacaaggcaactcaagttacttactgcattgcacaggtaatcacagtgttcacttctt

SEQ ID NO: 27543 - DNA, 602 bp, Setaria italica
  Peptide Sequence Number=SeqID_93517
tgattgtatcactgactcccaacaatcaagtggccactataatgtcttcgatgtgcttcattactcaaaacctcatggctggcttcgtagtgcctggtccacaaataccaaagtggtggatatggctttatcgcatctccccaacatcatggatgctgaacgtcctcttcaccacgcaattcttgtacgatgatgataagaacatcatggtgtctggagagatcatacctatgacatcatttgtcaaaaattactttggttatagccgtgatcttttgccactagcagctgttatgctgaccatattccctatcctcttcggcactatatttgcctacaacatttcgaagctaaatttccagaggagatagatatgaaacagcagtactcatggaagcaagttcaaatatcacttgtttttcactcttaaagaatcagtaatgattgtaatgcgatggtatacaaggtgtagtgttaaaaatttctcccgttccaagttgctttgagaattcaaggtagttttcaatgtagcctgtatacaagtacactgactgcaaagtccccatgccgaagaggcgttcagacaaccctgcaaactattg

SEQ ID NO: 27544 - DNA, 699 bp, Setaria italica
  Peptide Sequence Number=SeqID_93518
ccacctcatcagcatgtccaacaacgccaccatgcgcatgatggcgttgttggacatgctgatgaggtggcggctgacgtccacggcctcgcccctcgccgccgcgtcgcgcgccgcccgcagcacggccgccagctccgcctcccgcacggggcggcagctgctcgacggtcctcgggcccagcagctccgacatgcagaggcgcttcatgaagcgccagtgctggccgtagggcgcgaaggcgaagccggcgtcgtcgtaggccaggtggcgcgtcaccaccgtcagcggccgctccgggatgctggcctcgaacttgaggaggtcgcgcgcggcgtcggcggtgccggcgacgacgcagtgcgtggaggggccgaggcgcaggtacacgaggggcccgtagcgcgccaggatgcggtcgaaggcccggtgcggcggcgggcggatcaggtgcaggtggccgatcagcgggagagccatcgggctcgggggcaaccggtggctaccgctcctcctcctgctgacgagcgccgccgagagtgcgaggaggagcaggagggcggccacagcagcggcggcctccatttctggttgcttttttccgttcctggtgtgctagctagcttctctccggcggcgacgacagagcttagatttttttgccttaacatatataacaattatatggtgggacgagg

SEQ ID NO: 27545 - DNA, 883 bp, Setaria italica
  Peptide Sequence Number=SeqID_93519
cgcggcgaggaacgccggcacagacaccatggcgaggcccatgccggggcaggcgcggcggccgctcccgaaggggatgagctgcatgtgctggcccttggggtcgacgccggcgccggcgccgccgggcatgaagcgctccgggcggaactggaggggctcctcccacgatcccgggtcgcggccgatggagaagatgttgaagaagacggaggtcttgggcgggatggtgtagccgcggacgtgcacgggctcgatggtctcccgctgcgcgaacacggccggcggctgcaggcgcagggtctccttgaagacggcctgcagatagggaagccgcgcgacgtcgtgctcgcccaccagccgcgcgccgcccacgacgtcgtccacctccgcgcgcagcctgtccaggcacgccgggtggttgatgaggtgcgacagcatccactccacgctggtggcggtcgtgtcggacccagcggtgaagatgtcgaggatgaaggccttgatgttctccctggtgagcttgacctcggcgttctggtcctccgcggcgtccatgaggatgtccagcaggtccttggtggcggcctttggttggccggccgccgccggcgaccgccgcgcctcctcctttgccgtgatcatgatctccatgagcgcgtcgaacttgtccctcacctcgcgcgtcctcctcgtgagcccctgcaggtcccacccccggcagatgccgacgtagtcctcgaggttgaaggcccccacgacctcggcgacgtgcttggcgcagtccctcgccgcctccgtcatgtggcccggcagcgcgctggccaccatgcgcatgatggcgttgttggacatgctgatgaggtggcggctgacgtccacg

SEQ ID NO: 27546 - DNA, 188 bp, Setaria italica
  Peptide Sequence Number=SeqID_93520
agtttgtccacaccacaccacaccacacagatgcatgatgaacatgaaccaggtgggtgggtattcagatttcaggctgacagtttgtccacaccacaccacaccacacagatggatccatctacctatgatgaatgtaaatatttgtgtggagatgaaatgaaatgaaacgccatatataaaaaaaa

SEQ ID NO: 27547 - DNA, 280 bp, Setaria italica
  Peptide Sequence Number=SeqID_93521
cgcgcacgcaacctcttcccgtgcgacctcattcaggctgcggcgggccgggacgccaacggcgagcaccaggcggcggcgggtcggggcgcgacctcttcccgcgctacctcttccaggcagcggcgggttgggacgccgacggcgagcgccaggcagcggcgggctggggcggcgtccgggtggacggcgagcgctaggcggcggtacgctcctctccttcctacgcaagaggccgggcgggtccaatatgtgacctgccgcaagctcgccgacatga

SEQ ID NO: 27548 - DNA, 481 bp, Setaria italica
  Peptide Sequence Number=SeqID_93522
gaatggttgcaaatcctgaatggccattccatggaatgggaaataggtagttttccctaaatataatatataattttgccatgctagaagcaaaccgcaaactttctcaccttatgctgtaagcatatttccccccactttaatcagattttcttatgaaagtttgcttaactagaatatttatgatgacatgtttttatcatatacatggtcccactcctaggcagtcccttcgccaatatatcgtatgatgttccttcatagatcatcatactaagaactgagtgcctggttagacttgtgggcctgtcaacttgctgatgccaataatgccagttcatagttcagtcaataaatcagaatgctgatgtgtaacatacaaaaaatgtgcaaaaaatgcttgcagatgcaaggaccaatagtaattactagaagaacaagactaagtaggggtaggactaagaaggaagtaagaagggta

SEQ ID NO: 27549 - DNA, 193 bp, Setaria italica
  Peptide Sequence Number=SeqID_93523
actgccttgtgtggacttctagtttgaggaagaggagagcgctggtaagtaggtaaaaatgaaccatatccaccaaatttggaccctagattctctgcagacacgcctccttcaaagtccttctggaaatggccaagtacatcttgaagtttttcgtcaatgtaagagagcgcgacgtcggggtcgacgaagg

SEQ ID NO: 27550 - DNA, 355 bp, Setaria italica
  Peptide Sequence Number=SeqID_93524
cgccaccatctccgaacaaggggatcgcctcgaaaggatcgaccgtgtcggggtcgtcgtcgaagacgggcttgtcgaacacgggcggcggcgtcgacggcgaggaagaagccttgggtgatggctcggggggctcggccgcccggttgaagtaggagtcgaacatgtcgtcgtagacggaggccggcggggccttggagggaccgaggtcgtcgaagaggacggagtcgtccatagcggatcgaccgcgcctccggcgaggcgctggaatggatgcgcggtcgccgccggccgccggagtcgggagcggccaggggcgaggtggtctctacgcgggctttgggcgctgacggct

SEQ ID NO: 27551 - DNA, 645 bp, Setaria italica
  Peptide Sequence Number=SeqID_93525
aggtgctgtattacaaaccccatggctcgcttcaagagtgccagtttagtgcctgccatacttccactaacatcaagcacggtaacaagatccacaggggcacgagatgtaggatacccatttgaggtcacattgaccgatctgcctgtgacctgctcagggttagcatatggggcctttagatggatcagaacggcaaaatcatcttgagatgattgtggaatagctgaaaactctggatatgccttaatttccacagttctactagatccaatgttagcagactccatcttctgcaaaggttcatcatcattgaagtctactggctcagaaccaagtaagacaggagcttctcgctgacggttcggaaccgggcggagaagagccatgtaggcatcttgctggggtaatcgagcttggtttgcattgagcccacctcttcctcggggaactatagaagataatgagcgattgaaggggatctctttccactttgcccggcaaattgggcatacatggtttccatgcttcacactggaggagatgcagtggaagtgaaacatatgagaacattcagcagtgaatagggcttgcccgtgacctggcttcatggaatcaaaacatatagcgcacattctcttggag

SEQ ID NO: 27552 - DNA, 476 bp, Setaria italica
  Peptide Sequence Number=SeqID_93526
ggggtctgcagcgcgcagggcttcgtctacggaatcatccccgagaacggcaagcccgtcaccggcgcctccgacaacctccgcgcctggtggaaggagaaggtccgcttcgaccgcaacgggcccgccgccgtcgccaggtaccagggcgctggtggtggcgacggcggcgccgtggccgcggcgccggcggggccgcactccctgcacgagctgcaggacaccacgctgggatccctgctctccgcgctcatgcagcactgcgacccgccgcagcgccgcttcccgctcgagaagggcgtgccgccgccgtggtggccgcaaggcgccgagccgtggtggcccgaggccggcgtgcccagggagctgggcccgccgccgtacaagaagcctcacgacctcaaaaaggcctggaaggtggccgtgctcaccgccgtcatcaagcacatcgtccccgacgtcgacaaggtccgccg

SEQ ID NO: 27553 - DNA, 412 bp, Setaria italica
  Peptide Sequence Number=SeqID_93527
ttcgttccgttccgtttggtttggttccgtctaaggtcgtccgtagtccgttggttggcccgaggccggcgtgcccagggagctgggcccgccgccgtacaagaagcctcacgacctcaaaaaggcctggaaggtggccgtgctcaccgccgtcatcaagcacatgtcccccgacgtcgacaaggtccgccgcctcgtgcgccagtccaagtgcctgcaggacaagatgacagccagggagatcgtcacctggctcgccgtgctcaagcaggaggaggacctctacctcatgctgcacccgggcgcccaccccccgccgtgctccaccaacgccgcggcgctcccgttcagcgccagctccggcgagtacgacgtggacggcgccgacgacggcgaagagactgcccggaac

SEQ ID NO: 27554 - DNA, 975 bp, Setaria italica
  Peptide Sequence Number=SeqID_93528
ttttaattcgactgaataattagattgcttaaaagcgcagcacgggagaaatcgtatgtgacaacatgaacatttttttttacttctacgatgtgaagtacagacttctgaatatataagcaaactgatgaaagtatcatagaggaagcagtaagctaccgtgatctttcagagacaaaagcgaccatctactatgacacatgacaacctcgtgggcaaaatgggcgtcttacagtaggccacagatctcactgcacatgtggaaaaagacttagcacttcagataaaacatcgctcccttcagcgccatcgtaaactctgttacattcacgattccgtgcacggcaaggcaccctatttgttccgtccaatctgttccagtgatcttggagccatgccagcagcatcagaacctctcatgattctaagttttcgacaaatcgtagtgaacaagtcccaaggcagatcaccaacaagcatccagtcagcatctttgtcttcataggtaaggacatattcttggtcctgaagggcatcagccctagaaccatcagtaagcctctcccttggtggcttgactgaactgcttttaccagtgatgaagcaactgaacattttctcaagaccaagcgagagatcctcatagctcgaataggtcttgaggtccaccttccttaggtatggagctccatccatgctgactttaacataacagcatcctgcctcactcctaccttcatcttccccctttgtctttgcggcactcgcagctagtgtatgctttcggtaattccgaacaggaggccatccaacaacttgcaccttggcagcccgcggagctccagcagcggtttcagccacacccttctcctcctccccctcacgaccccatcagcgtcaccggcatcagcatcccgcttcgcgggccggtcgagggagtcagcgaacccgcgcttggcgccacccctgggaggc

SEQ ID NO: 27555 - DNA, 723 bp, Setaria italica
  Peptide Sequence Number=SeqID_93529
gagacagaacacgcgctccttcgcctccggccatcgctgcttccattccagtcggaggagacgacggatcgatggcggccgcggcgccggtgtaccggcgggtgctgagggcggtgcagaagcacgtcggcggggacgcctccaagcagcacttccgtgacttcatcgccgccgagttccgcgcccccgccggcacggaggccgacgccagggcgaggctgcggctcgccggggactacgcctacctcctcaccagcgtccatcaccacaaggacctgctattctcatacaatattgctgtggaccgatctgatgaaatgaagaagatattgaacaaatctgctgccagtgtaggccttcaacttccagatgtctaccagccttgagtgcttctgttgtgcacgtatgtgtgacccattgaactgtttttagttacaagactttgctttgagtcgcaaattatttgccctgcaaatgtcagcttgttaaatgtactcttttcccaataaggagcacttgcaattgtctgttaatgatgtcttgttccatgccatatgtttgctttcctgctgtaactcacaaagcattttagactgtgttacttctttgattcttcctttccgatgtcccttccattttataagtctgacctggcattacaaaggcaggaaactccatcagtgcacatacttttatgatacatctactttctctccaaggtca

SEQ ID NO: 27556 - DNA, 461 bp, Setaria italica
  Peptide Sequence Number=SeqID_93530
ctggcggcccggccaggtctacgacaccggcgtccggatcgccgacgtggccagggacggctgccagcgctgcgtcggcggcgccgcctccgccgccgcgctggactggaagtgatcgaggttgacggctagctgctgggtagatatagtcaaaaaaacatgtagtacatactaacacctgtggtcactcgctcgccgagagagtaaggagacagcatcaatggcgctggtggagaaagagcaccgtagtgcctccagccgcttgctgtcgagaggaggaagaaagaagacggcttcgtcttgcagtttgtacattactgaatcacatcatgcatgttctctgcggcgcgtgtgcgtgtgtgcaggaggagacgcatcgtcgtcaaggtctgatgagctaggtaggtggatggcaaacaaatgtggctggctgcccggcagctacccggcctgctgaacga

SEQ ID NO: 27557 - DNA, 238 bp, Setaria italica
  Peptide Sequence Number=SeqID_93531
ctcactcccattcccactccactcccaatccgagcccagatccgcgctaaaatgctggggcgggcggcggggctgtcggggccgcggtggcgcggcgggtcgctcgacctgcgcgccgcgctgcggtcggggggcaacctcctcttcgcgctcttcgtggcggccgtgctcgccttcacgctcctcgcggcggtccacagccccgacgacccgctcctccacccgtcctcgcaccagc

SEQ ID NO: 27558 - DNA, 1005 bp, Setaria italica
  Peptide Sequence Number=SeqID_93532
caaaaaactacaacttgagacattgcaaaaacctacaactctgcccaaaacctataactatttcgatgaagctgtagtttgtcacaaagcttgtcaaatagttataggattttgaaataagcaccaacaaatgtcaaaattgttgtaggtttttaaaattttactctctaagtattgacttggtaggactcaaggataactttaacttggttgaaaaaagagaaacggaaacaaggcagcctttaccaaggcactaccttcggcgttaacagcaatccttcgttgttggtacatggtcaaaggcatgaaacaacgatagatatgtccccttggataccactggatacattgaaatggccacctaacacagtgaaatcagttctacataaaattttcgccacagcagtaggatgttcagaacagctggccaactcttgactaaaattcactgtcacataggcaaacaggccaaaattttctgtgagaaaacttactgtcaccactggagctctatagcaagcagctttacttttgttgcccaaggacggatttgcatgcatctgtacgacaacctacatctgctgttctactcgtctaatgggatcttggaagtattggagggaaatgagaagggcctcctctgttcttattgttctgctcccttggttggggcacgtattcaaataagatgtgaatacatcattcgcatgcttacctttcaaatttgtatcttcttcaatgctttcttccaaaccagcaagtccaccaaacgcaatcagaaggtgcctaaaagaaggtaaggtcagctccgaagaattaattatttgtccatgctctgaagtgccaataatatggtcatattcttccttgtatggggaattttttaaaacaccacttaaatttgaagcataacgcactttatagccccaataagatcgtatctcttccctaggggtggagggggaacaacttcccttatgcaagcttatctgtgtttcttgcatg

SEQ ID NO: 27559 - DNA, 905 bp, Setaria italica
  Peptide Sequence Number=SeqID_93533
gccttttgagcatgcttttgggccaaagggctcaacatcaagcaaatgggctctcgcttgcttttgatgatccttttgagcatgcttttgggccaaagggcaagaggaaacgcccgaaactaactgctcttgactatgaatctttgctgaagaaagctgatgattctcaagatgcatttgagcaaaaatatgcttcctcaaaagttgccaagggaggaagaagaagatggcttacgggatctagtgaggcatacaatgtttgagaagggtcagagcaaaagaatctgggggtgaactctacaaagttattgattcttcagatgttgttgtgcaggtgttggatgctagggatccaatgggcactcgatgctaccatctagagaaacatttaagggagaattaacacataacaaagttaaattaatcaacaactaacggtacgaaagaagtgtttgcaaggtcgcgcccattcctggagagacaaaagtgtggcagtacatcactctcactaaaaagatctttttgatcgattgtcctggcgttgtgtatcaaaataatgattcagaaactgatatagttttaaagggtgtggtacgagtgacaaatttggcggatgctgctgagcacattggtgaagttctgaggcgtgttaaaaaagagcatctgcaaagagcgtacaaaattcaagattgggctgatgataacgattttcttgtccagctgtgcaggactactggaaaacttctcaagggtggggagcctgacctgacaacggtagccaagatggttcttcatgactggcagagggtaaattcccttttttgtaccccctcctcaacagagtgacgatggtgcattcttgtaaggttgtccgtagtccttgtttgttagttaaaactttgtta

SEQ ID NO: 27560 - DNA, 702 bp, Setaria italica
  misc_feature (617)..(617): n is a, c, g, or t
  Peptide Sequence Number=SeqID_93534
ttttgagcaaaaatatgcttcctcaaagtttccaagggaggaagaagaagatggcttacgggatctagtgttggatgctagggatccaatgggcactcgatgctaccatctagagaaacatctaaaggagaattgcaaacacaaacacttagttttcttactaaacaagtgtgatctaatccctgcttgggctacaaaaggatggttaaggaccctgtcaaagaactatcccaccctagcattccatgctagcatcaacaagtcatttggcaaaggatctcttttgtcagtattgaggcagtttgctcgtttgaagaatgactcttaagctatatctgtcggatttgagggtaccccctggcagggtcatcagttagtaattcactacggtcgaagtactaactttctagttgttctatcctgaaagagcggaagctgcctctatcactactgcaggatcatcaaaagcaagcgagagcccatttgcttgatgttgagccttttgagcatgcttttgggccaaagggcaagaggaaacgcccgaaactaactgctcttgactatgaatctttgctgaagaaagctgatgattctcaagatgcatttgagcaaaaatntgcttcctcaaagttgccaagggaggaagaagaagatggcttacgggatctagtgaggcatacaatgtttgagaagggtcagagc

SEQ ID NO: 27561 - DNA, 2110 bp, Setaria italica
  Peptide Sequence Number=SeqID_93535
ccgcctctcctacgactcttctcgccggtcgccgccccctcgcgaacccacaagagaatcaagaacaagagggagggacatggcgaagaagaaggagaaggcggtgaacgtgtcgggcaagccgcggcactcgaacgacgtcaaccgccccaatgacaagaagggcgcgggcggcggcgccggcggcggggcccggtccgcggcgaccgtgcggcggctccagatgtacaagacgcggcccaagagggaccgctccgggaaggtgctcagaaacgagttccagtccaaggagctccccaacacccgcatcgagcccgaccgccggtggttcggcaatacccgggttgtgggccagccacagcttgcattgtttcgggaggaactccagaatcatctttctgacaacttcagtgtcatcctgaaagagcggaagctgcctctatcactactgcaggatcatcaaaagcaagcgagagcccatttgcttgatgttgagccttttgagcatgcttttgggccaaagggcaagaggaaacgcccgaaactaactgctcttgactatgaatctttgctgaagaaagctgatgattctcaagatgcatttgagcaaaaatatgcttcctcaaagttgccaagggaggaagaagaagatggcttacgggatctagtgaggcatacaatgtttgagaagggtcagagcaaaagaatctggggtgaactctacaaagttattgattcttcagatgttgttgtgcaggtgttggatgctagggatccaatgggcactcgatgctaccatctagagaaacatctaaaggagaattgcaaacacaaacacttagttttcttactaaacaagtgtgatctaatccctgcttgggctacaaaaggatggttaaggaccctgtcaaagaactatcccaccctagcattccatgctagcatcaacaagtcatttggcaaaggatctcttttgtcagtattgaggcagtttgctcgtttgaagaatgacaaacaagctatatctgttggatttgttgggtaccccaatgttgggaagtcatcagttattaacacactacggtcgaagagtgtttgcaaggtcgcgcccattcctggagagacaaaagtgtggcagtacatcactctcactaaaaagatctttttgatcgattgtcctggcgttgtgtatcaaaataatgattcagaaactgatatagttttaaagggtgtggtacgagtgacaaatttggcggatgctgctgagcacattggtgaagttctgaggcgtgttaaaaaagagcatctgcaaagagcgtacaaaattcaagattgggctgatgataacgattttcttgtccagctgtgcaggactactggaaaacttctcaagggtggggagcctgacctgacaacggtagccaagatggttcttcatgactggcagaggggtaaaattcccttttttgtaccccctcctcaacagagtgacgatggtgcatctgaaggtgccgagcctgttgagaaaactgaagaggacggagtaagcagcgataggactgctgctgccatgaaagccattgcaggaataatttcatcgcagcagaacatgaatgtaccctgccataaggaacatgatggagataatgaagacagcgaaagtgaagataatgaagacagcgaagttcctgagcaatcagagtaatcttgggtacagatatggactaaagttgatatgtcagggctcaggagtgtgtagctacttaacctcattatcactgtagtgccagaaaaaggattcatgttggttcagctgctacaaagatggtgatttgcttagcgattcgtctccttttttgtaactttattatcgtacctaaatcttgtaatagggcaagtagagcagtttgctagcctacctcgttggatcgcaatgtttatctgtacaacaattacagttacatatcttacttcaaaaaatcgagtcaggtcatccttttttttttaaaaaaaaagctaactgtaattgttaccccttgtcctattaaggtaactattgtattggtagtattaattgtaagtactagtcgtaaagttgtaagtattaatt

SEQ ID NO: 27562 - DNA, 200 bp, Setaria italica
  Peptide Sequence Number=SeqID_93536
ggaaaggaacggatactcgcgccgccccgccgccgccgcctcaactatggcgccggcgttctcggcgcacgtccccgcgcttcgacgcggagcgctgtgcgcgcggtgggtaactgcggcgctgttctcgtcggggatcctcgccggcaacaaccccattctggtgcgcgacttcgtgaggtctgcgctctaccgacccc

SEQ ID NO: 27563 - DNA, 287 bp, Setaria italica
  Peptide Sequence Number=SeqID_93537
caaacaactcaaagatcattctttcactatcctgttcatcacctatggatacatccagaaagacaattgggttcctctttctagccatattctcgaatggacacaatccctgagccaactggagctccacacgcgaggggagggtccggggtggctcgacggcgccgatcgcgtcggagccgcgcgaggtctcgcggcgggggagcgggggtgtctcgctcgctcgggatcggagcgcggccgcagcgccgcggcaggcagctccacgcggccgcacaaacggagtg

SEQ ID NO: 27564 - DNA, 474 bp, Setaria italica
  Peptide Sequence Number=SeqID_93538
tttaattaaacaaatactaactaggacaaataaactacttaaactaataatgtctgtcttctactgtagaatatgcagcatagaggctttactaatttactgaacagaagtttaaatgtcatgtacccattcaaaggctagagaaagaatttatattcctgaaagagaagagcttccagctacaaacatttagaaaatgtatatacatatacaaagaaaggtcggccaattttatttatataagcaggcggcatgcaggtgtcatccattctcgcaatataaatgcgtgatattgtcctttccccttctctacatcgtggatgaatttcaacattaaatttttaagtgtacataaagctagatgtgctatatgtgtacttgtattttgctttggttgtactcttatgtgaccactttactaattttgaagcaaagtactaacgggttatgatcatggtcaattgtgtaattcca

SEQ ID NO: 27565 - DNA, 310 bp, Setaria italica
  Peptide Sequence Number=SeqID_93539
ctcgtctctttgtagaggccggtgtgtcagacagacagacagacagagatagcatagaggaggagcgttctagttgtttttgaattgggaacaaactcaagtttttccccaccccaatccattcctagatttaggccaaaagagaagtaaaactccttaattgttcaaattaggcttcttttcctttgttttcctttcttgattggaacatgacaccgtttttctgttttttttcccctgtgaatgaaggagacgaagaagcaaattgaaacaattcaatttcatttcaaaaaaaaaacaaaaaaaaaaa

SEQ ID NO: 27566 - DNA, 880 bp, Setaria italica
  Peptide Sequence Number=SeqID_93540
ctgaaaactttgatcgactttgcataaacatttcagactgtacgcaaccaatacggaaaaatagtaacaaagcacactactcgccgcattgcgcgtccaatccaacttcagtttattggagcaaaaccaggctacagagccgcttacaccattgaacaacaaattattcgaccacgctcgcgcgtgcgatcaaggcttcggggccatgctggcgccgagcttcttcatagacggcctcgccatgagcctctcccaccaggccttgacgtgcgggtacgagtcgaagagcgatgcgtgcggcgtggccatgaagtagaaggtgtaggggaagtggttgaggtccgcgaagctgaggaagtccccggcgaggtacttgctcttggacaggcgcgcctcgtagacatggagcaccttccggagcttctccaggctctcgtccaccaccttctggttggtggggacgcctcgcatggtcgggttgatgaggcactcgtacacgacgggcgagagcgccgggttgtactggtgcgcctccacctccgtccacacgtccaccatggccgcttccctgaggttgccttctcgcaggaggtcggtctcagctgatttgtacttgcggagaatgtacttggagattgctcgggactcgaagagcacgacgtcaccgtcctggaacgcggggatttggccgaatgggttcctggcgaggtgctcggggcccttgtgctccttggcctggaagtcgatgttgacgacctcgtactcggcgcccacctcctccaggcacaccagcacccgcgccacgttcgtcgacatcgccggtccgaacaccttcaccggcgccattgctgccgctgccgtcccttcccaaactgcgagg

SEQ ID NO: 27567 - DNA, 185 bp, Setaria italica
  Peptide Sequence Number=SeqID_93541
atgcagaaagggagatcaattacactgtaaaaccagcaaagagaccaattacactgtaaaacgagtaaagactaacagaataatactcatgcatacacatgaagctaaactgcagaaaagcaacaattgctgaaactagagttatctgatacgaaattaatcacgtgattaattcgtaaccgatt

SEQ ID NO: 27568 - DNA, 544 bp, Setaria italica
  Peptide Sequence Number=SeqID_93542
gcagtggttgggtgttgcacgagcttgtccatagattgcaacgtacatttgttacaaccatgctaggcagctagggcaactattgaaggaacagaggcaggcttctgcatctatcagactggttaattataggtgctaaattagaactattgtcgcccttcaaaattccaaatctattcaatagtccatataataaactctacagagagtgccagtcaagcatggcggaccttatgacactgttcttccatagcaaatggaagctaagtacagatttttcgcccatttatccttcacatgttgactggggaaagcagatgttcttagggtttcctgtgtttcatcagcaggctttctcttggggatgctcaagataaatgctgcctggtcccatgttgcagctgtcgaggtgatgcgaaatccattatcccaacgccgatggataccctcacttggatacaagaaatcaagctccacaacctgagctgtaaagccagcattacgtgacatgaccacttgcccaccggtctttccttgtctagtt

SEQ ID NO: 27569 - DNA, 415 bp, Setaria italica
  Peptide Sequence Number=SeqID_93543
ttgctgaaactagagttatctgatacgaaattaatcacgtgatagattcatacagtatagattaccacattagcactcactgcatacacatgaagctaaaggggcagaaatgcaacagtatgcagaaagggagatcaattacacttatgacactgttcttccatagcaaatggaagctaagtacagatttttcgcccatttatccttcacatgttgactggggaaagcagatgttcttagggtttcctgtgtttcatcagcaggctttctcttggggatgctcaagataaatgctgcctggtcccatgttgcagctgtcgaggtgatgcgaaatccattatcccaacgccgatggataccctcacttggatacaagaatcaagctccacaacctgagctgtaaagccagcattac

SEQ ID NO: 27570 - DNA, 2520 bp, Setaria italica
  Peptide Sequence Number=SeqID_93544
gacaagaaaaagacaaacaaatttagactagaaactaagagttatctgatacgaaattaatcacgtgatagattcatacagtatagattaccacattatccaatttaacgaggagccaaagctctcaaacaaacacaggccaagacatattgtaagataactgaggtctatagaatcaaggtaccgctacaagggtccaaattcccaaacatggaaaagcaacaggacaagacaaagagacaacttagtttatacaacttaggtgcctaccttctgggttaaatattaacttgaaactatatgcatgataactaatcaaatttacaacttacaacaaaacaattttagcaatctatggacaagctcgtgcaacacccaaccactgcaacgtacatttgttacaaccatgctaggcagctagggcaactattgaaggaacagaggcaggcttctgcatctatcagactggttaattataggtgctaaattagaactattgtcgcccttcaaaattccaaatctattcaatagtccatataataaactctacagagagtgccagtcaagcatggcggaccttatgacactgttcttccatagcaaatggaagctaagtacagatttttcgcccatttatcctgcaaacatatcaattagtacgtgcaaatggcaaatggatggtccatctgaagttagaggaaagggacaaaagtatcaagtcaccttcacatgttgactggggaaagcagatgttcttagggtttcctgtgtttcatcagcaggctttctcttggggatgctcaagataaatgctgcctggtcccatgttgcagctgtcgaggtgatgcgaaatccattatcccaacgccgatggataccctcacttggatacaagaaatcaagctccacaacctgagctgtaaagccagcattacgtgacatgaccactgcccaccggcttcctgcagtggccatagaagtaacatagaaaccctccctccattttttgtttatccacttgaagggaaatgaatcgcttactttgtaggattgctgggcatattgtgttcctcttgacatgaccactagtgaactcccattgtttgcacctgctagtgcagttatatagaagtttttctcccactgctccattatccattccttgtgaagaaaatatggagaaagttcataaacttgagaagtaaatccagtgccagcatccattatcaaagcccacagatttgaacaagaggcgactgagcttatgaacaagccatcctcgttcccttttgaaatatgctgtgctaacctactgtctgcaacattatagtgatacctctgtttcataggccgcctggcattgtaaacactaatccattgggtcgcaggcatccccatcctaatcttcttcttaggttgctcatcatcatcttcctccatcataaggcggcctctcttctgacctacctgatatataagcttctgagcaccatctgtattgattggccttatgtctgggtttggaccaacaatgccatcaaaaagagaaatgcacttcgcgtaatttggttcttcatcaaactttaagttcacgacatactcgataaattgtcggaaaggttgcgggcagaagcaacataaagattctgaggaagttgccatctttttcttgcaaacaaggaaacctttattctccccctgatatccttgccaaggtaggcgcccacgcagaagaaaaacaagtgtgtatgcaagggattcaaggtcatcccgcctgcttccagttcttcccaaatgggcatgcacactagcataacgcacagttcccctaaagacgtcgggcctctgatcatattcaacatgctctcctgtgctagtgtctttccatctagtagctaaaccaaggtcaacaagaaaaagtttcttctcttctagggtgcctggaggtccgagcaaaaagttttcaggttttacatctccatggacatacccttttgaatgcatcttctccaatatggaaattgcttctatggcaatgcaagcaaccatttcaacagacatagagtgggagttattattccaaacatcccagaggcttggtcccaacatgtccataatcatgatataatactctccctgcttccctttgtagtgtactcttggcacgccatgaattccactaagagtgttgtacacttgccactcgtaaggagcaccgtagttgcaacctttgctggttcgatgttcaaattttattgcaacctccaaagcatttgcaccaggtgtcctttcactgacactaggagaggaaatacggcgaccgacatatacttgcccaaatcctccctttccaagttttctgtcaagtctgtaggtaggtgaattaccaatttgaaccgtctcggggagcggcgtggcgccgccgtcgtcgcccggggcggcgccggccctgtcgacgctccggacgacactgtctccgtcgtccatcccgcgcggaggcagcccctccctcctccctgg

SEQ ID NO: 27571 - DNA, 311 bp, Setaria italica
  Peptide Sequence Number=SeqID_93545
gtatctggagtcacctttgctgtactctttaaagaggtcgtcgaagtaattggggtcctccttgctgaagaaatccggggtgaagaggaagggcccctcgaggacgacgtgagtcagccccgtgaacgcccaccagcacatgagcaagcggtcggtcctcgataatctgccgccgcatcttcctgagacgagccagacggctagggcgacgaggagggacgcgcctaggaaaggcgcgaggatctcgacctgcgagagacgctgcggcacgaaccccggcagctccagcttccgccggcgagtaagggtgg

SEQ ID NO: 27572 - DNA, 352 bp, Setaria italica
  Peptide Sequence Number=SeqID_93546
cctcactctctctcactggagtggggaaggaagtggggaacgacgagctgagacaagaggggggagggagagggagatcggagcaagtaagacagggctcaccgatctcgggccgggatggggtgcacggcgtccaaggtggagcaggaggacacggtgcggcgatgcaaggagcgccgccgccacatgaaggacgcggtggcggcgcgccagctgctggcctccgcgcacgccgactacctccgctccctccgggtcacagccgccgcgctctcgcgcttcgcccagggccacccctcgctcgccgtctcccaccacaccgcccccgtcctcctctccgccgaccgacgac

SEQ ID NO: 27573 - DNA, 1021 bp, Setaria italica
  misc_feature (1005)..(1005): n is a, c, g, or t
  Peptide Sequence Number=SeqID_93547
taggggggtagggtcgtatgggggaggtcaggatcccgataggttggaaaagcaatgcaggggcaggttggggaggtgacgccaaaccatagccgcctctgtgtggaagatttgaaaccacaggtacgtggagtgctgagataggtgtgagggggaaacgaagggagatgccgatggggggcaggtcatttccgctacgagccttctagtacaaattacaagagctcggaagcgcttcccctgctcctccagtgtagcagcttgtatgtttgaagtttggtagagcccctcaagaagcaacatgatgagcaggagctgaagctctaacaaaaggggtctcaatgttgccgcagaggatggccagtttttttcctcccaaagctgtccatgcacatgcattccatgcaattgctactcctgtggttgcggccatatacctgatttcctatgcagaatccaccagatgttttatccaaaaaaaggcaaggtttcagtcaacaaaatataatatccgcggattccataaaatggatcactaaggtgacttttccctcaaaatccatgcatcaaatatatctaatgtgctatggtaagttttttgtacccacaaaaaagctacttgctggcccttaagttgttatgactgcctaaataaatttcctttgtgggtttacgcggttatctgttatctggagtgcggagctagagaattatgagagggaaatggaaagacacgggttggggattgttttaataccgttgactgcagagcccatcactccactggtcagtgaggcagggaggatggacaaacctcaagacatgacaaatataacagttactagcaaataagtagccctttattaaaaggcgtcttttgtttggtcttttaataaaatataaatgcagtaagtgtaacagattctcctacatggccaacttttatgtaaaaagacatttcttatttaataaaatatacgcagctgcctattcaagaacttttangtaaaactccaaattg

SEQ ID NO: 27574 - DNA, 582 bp, Setaria italica
  Peptide Sequence Number=SeqID_93548
gcacaagtctctagcaagtcgcttgcgaacacactcgatttctgtcaatctctctcccaatggcgccgactaggagcaaccaccccagggtgttcctggacatcaacatcggtggcgagcacgtcggccgcgttgtcatcgagctgttcgccgacgaggtgcccaacacggcggagaacttccggatgctgtgcaccggcgagcgcggcacggggcggtggtcgggcaagcgcctgcactacaagggcgcgccgttccaccgggtggtgcccggtttcatgtgccagggcggcgacatcaccgcgagcaacggcaccggcggggagtccgcgctcggctacggccggtacttccccgacgaagggttcagcgccgtcaagcacgacggccccggcgtggtgtccatggccaacgccgggcccaacaccaacggctcccagttcttcatcaccttcgccgagacgccgtggctggacgaccgccacgtcgcgttcggccgtgtcgtggaagggatggacgccgtgcgcgccatcgagaaggccgggtccatgagcggcaggacggtgaggcccgtcgtcatcg

SEQ ID NO: 27575 - DNA, 327 bp, Setaria italica
  Peptide Sequence Number=SeqID_93549
tcagctgatgctagtccatgttaggacgaatagcaaagtcagcatacgatttgcatcccatagtctttgcaagctcatcacgagcatctataagttcattaagaacaccaatattttctcgaggttcagagttcccaacaatgtatacctgtttcctgacctttggaaaattcgaaatatttagattgacactgtcactggataggtgatatgcaactgtacataacagataaagtaattgaatcaatcaagagcgaaactgggtggtgacataagaaatctaaatattgttcaatgctattgatacatctttatctgtgacacaaa

SEQ ID NO: 27576 - DNA, 263 bp, Setaria italica
  Peptide Sequence Number=SeqID_93550
gacatgccgtcatcgttggcgctgctgccggcaccgccaccaccagccgcaccacccttgacattattccccaacctgtcccgcggcggcacgtacggtggcgtggcgcaccggagcagcgcccagttgacgccgctgaagaacgggtgccgcttaatcgcggccgcgccaaccgtggcgccgagccgccgggcggggtccttggcgagcagcgcggtgacgaggtccttggcggccgacgacaccgagggctccttggggaa

SEQ ID NO: 27577 - DNA, 297 bp, Setaria italica
  Peptide Sequence Number=SeqID_93551
ggcctcgccaccaagaatagctttcgcccatttgcaagctctgcgttagaattccataatcgttgactgggaggagggcccccgtggagtgaacgagcatcacgtcctggccgaacatggctcgcaagtctattggacccctgggaacctccattgggactccgttgatgaacaccgtgatcgtcgctgcaggtgattggcatgagtaatactgctgctggtgcccggcggtgctcggcgccactactcacactgcggcgactgggctctccgcgaaccccatctgccgcgagatgg

SEQ ID NO: 27578 - DNA, 352 bp, Setaria italica
  Peptide Sequence Number=SeqID_93552
gcaaaagggtaggtaaaaactaatgttaaagacttgctgtgtcatatccttctcggtgacatgaatggtgggagcacaaagtagggaaggatatggccacatccaccaccacatgttgaacagaccctctcaatcttcgatgtcttgatctcaagtgtggaaaacgcacttcctccacagagaatgctagtgacttgttttgtaaatgtatcttgagcctcgtaggacaatatatccttctaatggagtagcgccaagactcaggaagaaatttaccaaaaatgcgaccaggtatcccaatctttccttcgccagcttccacaacaagaacctgtcgattttcatggttagg

SEQ ID NO: 27579 - DNA, 368 bp, Setaria italica
  Peptide Sequence Number=SeqID_93553
gagctgctgctgctgttgtggtgtcaaatctgaagcagtgacgcaggaaactgccttggaatctgctgtgcatgaagaagggaatttggatgttgcgactggagaacttgtaaatatgcaacataatctttatgtaggtaaagaaggaattttgtaatgcaaaagtaaaatgccatagaatttcactataacgcaattaacatcatttgcgtgatttggtttttaacttgttcatttgggatccctatcgaagcatggacaccttggctagtcatcaatttgaggcccctcacttactgctttctttattttgcttgttatatcagcagcctttaaccgaagctaatttctttaaacttactttgtct

SEQ ID NO: 27580 - DNA, 321 bp, Setaria italica
  Peptide Sequence Number=SeqID_93554
atggaagagtcaccacacgctcccgtcgcggcggaggccggcgccggcgccggcgcggaggccgccggcgactcctacattatccggccgctcgatctcgccgacctctccaagggcttcttcgaccttctcgcgcagctttccccatccccgccgctctcagaggaagccttccgcgcgcgcttcgcggagctcgcagcgctgggtgccgaccacctggttctcgtcgcggaggaagccgcgacgggccgcctcgccgccgcgggggcgatgctggtggagcgcaagttcatccggcgctgcggcctcgtgggccacctc

SEQ ID NO: 27581 - DNA, 698 bp, Setaria italica
  Peptide Sequence Number=SeqID_93555
tttttttttttaacatgtcaaaagatgcctctattccaggccgccatggttgacttacagggcaggaggaacttgacctgcacaagcagcagcataagcatctgcaagccctggaacactctccttgtgaggatcaagaaacctctcgacaaatttcttctcgattttacaaaccacaccatataagtcaacattttctttcaccaaccccttctccttcagaacctttaggacataataacggggcatcagccgcttcttcaggctataacctaacagtgccggcctatgcacaatgtacgcagcattcagaccaacctccatcttcaggaactccacagtacggctcagcctgtcctctgccgaagccagaatggaaggaagcttgccaatcgcgatgcccaactcagcctcagagcatccaagagcctttttcaagaaatcaagctttgcacccaccctccgaggggtgatgctggagatggccgaaaggacgcccttgaacatccttgagttgcgcggcacaccaagcatgtcggcacacaccacaatttccttgacagcctctggctccagtgcgagcgttcttggggaggccaaaaagagctttgcaatttcacaatcagtaaggccgcaatgcctcagaaaagccatattgggctcgaccacgctctcgaggcttcgactgaggaggagga

SEQ ID NO: 27582 - DNA, 424 bp, Setaria italica
  Peptide Sequence Number=SeqID_93556
cggcgcgccggcgcgccacgcctgcgcggcctaccgcacggcgacgacgtcgtcatcgaccggccagcaggaccccgccaccaccctctggccgcctccacgtccgacgccacccgtgggtccagcgtggcaacgtgaggctcgggaagcaagggcagttccggtattgtacacgcccatgtgcgccagtagttggagttgctcttgagtcactaacgtgtgggtccggtcccacatgtcagtgacccaactgcagacaatagtactgcagaggaaccacctccgtgcgccggcgtccgttgtatattaaacccgccattagcatcggttaagcgcggggtgtgggccatgcccgcggccctaatcgtggccggaggtgagtgagtggtcgcagtcaccgtagtttcttacgcattgtagatgg

SEQ ID NO: 27583 - DNA, 2931 bp, Setaria italica
  Peptide Sequence Number=SeqID_93557
taagcaaaattggcatggatctcttccatgtggcaaatgtaaaactggcgatcgaagagttgccatccagatggcaaaaaattaaatatccaaaaaaacagaggtcagcatccgaatccatgctgggccggggagcacactacccatcctgccgccgcttgctttgacgcgcagcgattcggctgctcaggacaagctcaactcatgcaggaatggcgatctccgtcgccaggagcccaggtggtgagcagagcaggtgcctggtgccactgccactggcaggcttgtgttgtttgagctgagacagtttcttgcacaagagaagccgtccctacatcaacatagtctgcaactggattctgattctgcagagatgtaatatgacctaactctcaaccaatctcacgacttacaatttacaagcctaaaattgcctgcctcagactaatattgagctgctgctgctctatgcacaagaggttgcacagcaacagccagaagagccacttccctcaagaccggcagaaagggccaatgaactgaccaatgtgaagaagcaccgccaggcctacacaaagggtcgacagagttcaagcctgagttggtagctgaaatcctcaaacaagattttccagcaacatccagaggaacttggaaattaagagtagcaagacttcagcatgtaatccccgagctcactacagtatgggttggtatcatgtgcagagcaggcataggaacattgtttaaatgtaaccagctattgcccttattatccttcagatgttcttggcaccaccaaaatttgaattggggcgtattgcagcatatgcaggcagatgatcctgtgatgtgcacaggggcattgtgtgcacattcggatgcatatacatctgatttggttggataggggcagttggaaaagcctgataataatatggccttccaatcgttgcattaccctgagcatcttgtgaaggttgatattgatgctcattagtttggacaatcagctccagaccagctgaggaagctgctggggcttgttttgctttttttgagtttggtccttttgatggttttttcttctttttctctctattactagcatctttggcagcttgagtgcgcatgtttctcatttcaaagaacacttcaagcgccttctctccagtttcaagggagtcccagaatatttttcttgattcttccaattcctggctcttcataattaggttatatgcgtactgcattgcccgattgcgatatgcaagttcagcctctgtgcattcctgttgggttgaatcatcttgagcaagtttaaacatgcttctccgggcatcttttgtccatcgtttcaaaacatatttttctggaattgtgtccacattctgcagggtgaagactttgagggcatgtgaacaaagaagacccatcctttcaaattttctgcaaccgcaagtgatttccatggtagaagtgtcaagagcaacagcccatacttttgaacctctcccctgcatcgtaatttcaaacctcaatagatttccaccacttgaagtttcatgacatgaagttgctccgcatccatccagaaattctgcctcaaataatttgtagatccgatgtgtatatgattctgcagcctgcttcagaactgtactatgcttaactgcacgaactggagcagtttggctacagcgaaaatcctcttcagattcatttctccgtagatccttaacaaccttttctagcaagagggcaaaacgtgtaagagaggtattttcatcagaaattccactgagaatattatttgaaacctccccccattgagaagaattgatccctccatcaaatgtatccttgttcaatgctgagcaccatttatgacggaacctatgaaggtcattcagccagctattatcctgtagtttgtattcacggagcattgcagtccatgattcctcaaaatcctcttctgagtcagatccttgcataaacaaatgttgaaatgcttgtgatgtatttagtgagcctaaatgagattgtgcattcttcagaatatgccagtaggaaaagcaatgttgtgtgttagggaaaacctgctcaactgcctgcataatggcttcatcctgatcagtgaatattgattttggtgacttccctcccattgactccaagaatgatttaaataaccagacataggaagctacagactcatctaacaagaatgcacagccaaaaacaacattctgccagtggtggtcaacaccaacaaatggggcacatatcaagttatatttattagtgcggtaggttgtatcaaatataatagcatctccaaagcagccataatcatttctacatttaccatccctatagaagaagttggtcatgcgcccttcttgatcaacttggacatcccaataaaacatgccttcctcgttggttctacgcttgaaatagctgacaagactttggccgtcgcctgcctcaataaccgtaataccctgcatgcccacttgattgtaacactcccttatagtataccctgaattatcagctgtatcaccttcgattgtatccgagaaaccatttattggatgtgactctgtagatgctgatggatctataacacctgatttgccaaaagcaagcgacttggctgatctcagcatgtgcctttccccaggtttcgccaattggtgattatgcacaggaacaaagcgtatgactgtccatcgccccttctcgtcaaccctaaagcggatcattgctttgcaatttggtgttttttatgatctttggtcatttgcttctgtaacaggctcttcatacttaagcccttcctttgagcagtagtagtcctttgttcgaatattcttggtaccgataaagtaggactgcttgccctttcgcacactaaaaccg

SEQ ID NO: 27584 - DNA, 366 bp, Setaria italica
  Peptide Sequence Number=SeqID_93558
ggcgcccagccccacggggagcaccgacatgaaggagtactgcaagaccggcgagatgggggtcatctccgacgccgccgcggccgccggtgatgagccggccgagccgtcgcgggagctcgcgttcctgaaccgcgccgcgcagtgccaggcgccgccgaacgggctgctcgcgtgcacggtgcaggaggtggaggacgtcaagatcgtgctcatggttctgcccatcttcttctccaccatcatgctcaactgctgcctggcgcagctgtccacgttctcggtcgagcaggcggccaccatggacacgcgagtgggcaagctcaccgtgccgccagcgtcgctccccgtgttcccggtcacctt

SEQ ID NO: 27585 - DNA, 1271 bp, Setaria italica
  Peptide Sequence Number=SeqID_93559
gcggcgggggagctggtggatgcgctggcgcggcggcgtttgtaccgggaggtgacactggcgctgcggtctggcctgcgcgatgccaaggcggacttctccttcctccgcgcgcgcggtctccgcagcctcctcggctttcttcgctccaccgcatccgaggcagatgacgcgcggctgctccttttccgccactcccaatccatccccgatctccaagttattcctgttctcttccagaattcgttgcatcaaccaaaggaagatcctgttgtgacattggatcatatagttgggactgaaccaatgaggattacaagccccccaacctgattctgaaattgctcttgctcttagagtcttggaaggttgttgccttttatatagccgatgcacagctctggcccacaaatacaaggctgtgaaggtgctcttgaatatattagccagccgaggtccaactgagcaaggcgtgtgcttggatgcgctgatatcactgatgttggactcaccctccaatcagatggatttcgaggaatacagcggactcgaaaaggttgctgaacttttaaaggatgtgcaagtagaaaagcaaataagattgaaatgcggggagttcctattgttgctcattggtcatgtttatgtgagggaaaactctcccatacatggacaaatgaaaaatctatttggtgagcagtgcgcgtcgctcatatgggcagcaagccggttcggctccaccctcgacgcagagcaaaggcagacgaccttgcaaatacaagcgatgagagttgtcgaatccttggagccctactaaggctgctgccttggtgtatgttccttacgattgatttgtgatttgacgactctaatttcagctgcttgctccattttgttcatggcaagctttgttgtcattttcttctgtgtaaagcctttcttattgtgcccttcgagcaaggtttgttgaaagggttgtattagtttccatttgagggccattgaactaggaaggaccatggatgatggataactgacaagattttggtaaatgggacttccagatatccatatcatgtggtagatatgagcgattgtacctgtgattcgaataaaagtagttaatccaaagtactagtagtgaatgttattgatcactttattactgatgaaagggaatagagccagatcttgtgctctattgtatacacttgcacactgtttgataccttcagggttccaaggcaaaagtacactcccttggtgccggc

SEQ ID NO: 27586 - DNA, 529 bp, Setaria italica
  Peptide Sequence Number=SeqID_93560
gaatcgtggagacgggaagtacgaggatcgagatctgctgcccgacaaaccccggggtgctgctgtcgacggtaagcgcgctggaggtgctggggctggagatcgagcagtgcgtggtgagctgcttcagcgactttggcatgcaggcctcttgcttacaagaggacggggagaggcaagtaataagcaccgaagagataaagcaggcattgtttaggagtgctggctatggagggaggtgtctctagcaggtcgaaatttcatccaggtcatataattaagttgcatgatgatcgattgatgatccttcttgttcttgatgccttgctccatgaattagtatagagctagtgttcacctatgagtgcagtatggtttatctgaatcccagcaaattaaagatttgctcaggtattgtaagttgatcatttcttgtggtttgtatcactttggatcatggtttgtatgtggattgatattttgatgtatcgcgcgacatggtttggttaaatgccaagaatccggattg

SEQ ID NO: 27587 - DNA, 524 bp, Setaria italica
  Peptide Sequence Number=SeqID_93561
ccagcactggaaggtctacttgtgttatagttcctgaggggcgtggagaccttgggctcttgtcctcccggcagtctcagatttcctataaaatattaaatttcactgctcaatgttaaacaataaatattcccacttttcaagtggttggtttgtttctctgttaagttatgttgcatcaggtgaagttaggttactatacctttgtaaatgagataagcttaaaaaaaatgcactgtcagcatatcctgtaagaactaacgtcccagagcttactgaaatgatttagttggaaccctgtgataactattattttgtgcatctagcttcaggcaacctaggcgaccataaactgaaacaacagagtctgtaaattcgaaaagaaaatgacaaagcctcttgcctgtaaacaagaatgatcaatataattgtatataaaatgttctttgctgtcatcatttgagcacttagtattggataccttactcttgtgttcttatacttagttttggaatagaaagtcc

SEQ ID NO: 27588 - DNA, 437 bp, Setaria italica
  misc_feature (410)..(410): n is a, c, g, or t
  Peptide Sequence Number=SeqID_93562
caaatggaaacaactgcagataatggaggctagaaaagctcctataactgcaaatggccagagaagaatagcaagaccagcaaatggcacacaagctgtctcaagaaaaaggtccttctctgccaataagatcttcaatcaaccgcttccatcctttgaaaagcataacggggaacttgtacaaggcaattagtgtgaacattatggcatccactacaagtccacaagcagcagcaagtattgcaccaggaatgtgaagcaatcttatttcatatggcttgccatctggaggtgcatgaagacgaacttcatccatgattgaaaaatatgagtgcaacaacatgtctttcatgtccctgactactgtacagcttcctgtgatagcgctccatgtgccataccaaaaaacngtgaacagtgtcttttctttcctccca

SEQ ID NO: 27589 - DNA, 255 bp, Setaria italica
  Peptide Sequence Number=SeqID_93563
caggtacaggcagctcgtcaccggcgccgccgaggaagcagcgtcgacgctgccgccttcaccgtcaccaccgtaccccgccaccgccggcagcgaggtcttggacgacaccatggaggacgacatggctgcgatcgacgcaaagcaagacaaaccgcttccttgaccttgattgatttcttagagcttgagtgacagagtgagctaagctagctagcacggtaatggcgatgtgtgagactgaagagagtgtgg

SEQ ID NO: 27590 - DNA, 277 bp, Setaria italica
  Peptide Sequence Number=SeqID_93564
ctgcatttcatcgatcgagttacctatcgattttcttgctccaccaccacattacacaatcaatggcttccaacaacaacgccgtcgccgccgaggtgagcaccgccgttgccaagctcaacgaccacctcgccgccgccctcaccggcgccaacgacgatgccgccaccaacaccatcatcacgctggcgggggagaacagcggcgccaccatggacgcctccgccgccgcgggcgacgtggaggacctcgtcgttgtcggcaacgcggacgccga

SEQ ID NO: 27591 - DNA, 481 bp, Setaria italica
  Peptide Sequence Number=SeqID_93565
ggttagacatggacgtcttgactaagcagagataggacgtgggggaggaaatgtggtttaggcctgattgggtgagctaacgtaccttgctttggtcgaaaatgacgtgcaaagttttttggttggaatccttccgatgagttctcaacttttttatgagaaaaattgacttttggtgaatttgaagtaattaagataagcagcgcaccctaaaaacttgggcgttgtcagagcaccacgtagcatagcagcactggaccaagtaaatcacaagattgtattgttatttcttcggtctctggtctgacacacgagcaggtgcccacgtccacgtgagcattagttgtattttttttaaacaaaccgggtagaggatgaaatgcgaaacaataaatggaaaaaaaataacagtaataccggcacgttggattggatcatcaacaccgcaccacgccatcgcactcaactcaacagcacatcg

SEQ ID NO: 27592 - DNA, 1549 bp, Setaria italica
  Peptide Sequence Number=SeqID_93566
aaccaaaaataaaataagaaaaaccgaaggaagaaaagtacaatacaactaaatagaacgatcgctccgaccgccccacgacgggagaaaggcgcccggccagacctcggcgacctccgcccgccgcgcgaggtgcaagtccaagagaaccgatcacagaattatatgaagtagcggacgttggatgaccttctctatggatttgaacgcatcgccattgcctgaagatgacgagcagcagccttacgaagaggcggctgaggttgagtatgctcaggaggagcatgttgagtccgctgtcgcgacaatgcgcagggagcgtgaagagagacgcaggagattaaagcgagagcagcaggatgatgggtcaaggctacattcccagcagattaggaatgattatgttcctcaacccaaaagacatagtcgcataaaagaggcacctcagggatggttggactgtcctgcatttggagagccaatagataaaatcataccatccaaagttcctcttgacgaaacattcaatgagtcggtgccgcctgggaagcgatactcctcgaagcaactagttaacaaacaaagaaaagctggtcgcgatataggtcttgtgattgatttgacaaataccactcggtattattcaccagcagaatggacgaagcaaggtactaagcatgtcaagattccatgcaagggaagagatgctgtacctgacaatgaatctgttaacgtgtttgtctatgaggcaatgatgttccttgatcgacagaagcaatcgaagaatcctaaatatatcctggttcactgtacccatggtcataatcgtacaggtttcatgattattcattaccttatgcgcacacatgtctcttgtgttgctgaggcaataaatatatttgctcaaaggcggccacctggcatatacaagagggactacattgaagcactgtattcattttaccacgaggtccctgaaaatatgatgataggatgccctccaacaccagaatggaagagacctgatgatcttgatttaaatggcgaagctaagcaggacgacgacgatgacaatggtgatattgaaccaccaaataatgaaaccgaggagaaagtcatcactaatgacgatgtgttaggggacgccgtgccgtatgaccaacaagaagctttgcgtgtcctgtgttatcggttgcttgaaatgccccttgtaagagggcacacacaatttccaggttcacatccagtctctcttaacagcgaaaatctacagctacttagacaacgatactactatgctacatggaaagctgacggaacacgttatatgatgcttataatgagatatggctgtttcttgattgatcggaatttctgctttagaagagtccagatgcgctttccccacaagagcctcgaagtaaagggtctgcatgatacgaccttgattgatggagaaatgattatagacacagtaccagattcaggactgaagagaaggtacttggcgtatgatctgatggcacttgattgcagtgtccaaaaaccg

SEQ ID NO: 27593 - DNA, 596 bp, Setaria italica
  Peptide Sequence Number=SeqID_93567
ggcgagagcgcgccggcagcgggggcagcggcgacggaggtgaagatccggatcacgaggaagcagctggaggagctgctgcggcgcgtagaggatggcaggaaagcggcgacggcgtgccggtccgggatgtcatctcggagctcctgtacgtggccagcaccagctccaacttccggcacagggatgaggggcagtggcggccgtcgctgcagagcatacccgagtgagatcgaatccatcctacctgttgctgcatctacagcaacacttccagcatgatgtcttatcgttgcctcctacagtcctataatcctattgcgttagtactatcctagcaagagcatactccgtagtattcattgggtgtccatttgttcaggtcttggatcaagacatgagcttgcgataggctatgtagagagtgaaacttgtgcttagttgagtagtgcatgtgaatttagcaactagtagctaggagtacataggagggtctttttccattgcttgcggtgtatgattttggatattggggttgcacaattgtgtacatagtactgttgttatattcagtttgctcctagtagtacggacta

SEQ ID NO: 27594 - DNA, 281 bp, Setaria italica
  Peptide Sequence Number=SeqID_93568
cgcgccgatgtcgttgcccacggcgtgggacgacgggcggcagggctcgtgccacgctagctcgccccggtgactgagctctccgtctcggttcctttcgcagtaatggctgcctcaacacgtacgtcgatcgatagataaatgtactgtgcccggaaagaggcattcgcgtatgcgtattgcctaccaggttaacactgtagcttgctcggatttatgctttttcgccgaagcgtccaatgctttttcccagaagactgatcatatatatgctacagtcg

SEQ ID NO: 27595 - DNA, 288 bp, Setaria italica
  Peptide Sequence Number=SeqID_93569
ccgcggggaatggcggcaaggagagggtctcgtacgtgtgcagccactgcggggagggccattggcggtggtggggctattgccaccactgcaatgtgccggggacccttcagaggagcagggagatggtgccgcagagccttcaggaggtgaattaggggatcgatcgggcggagtggcagcatacccctgtaacatttctcatccagctcaagtgctcaacatgttggcactatgacaaactgttattgagggtcatcatcagtagtttcttatctaatgcaccgg

SEQ ID NO: 27596 - DNA, 294 bp, Setaria italica
  Peptide Sequence Number=SeqID_93570
aacgcctcgcgattcttctacgggatccggccggatcgaatccgctgccgcccagccaccaccaccaccaccgccggttcctcctcccctgcgcccccgcccactgcacagcccgcgcatttgatgagtatttttctccccgtcccttggcgcgatccggtggatgcgagggacctgcccggcctcgacccgccttcaccccgatcttgcctccgccgccgccgcgccgcccgcggcggggaggctgctgctactatcccctgctctcgcctccccggcccggagctagccgca

SEQ ID NO: 27597 - DNA, 250 bp, Setaria italica
  Peptide Sequence Number=SeqID_93571
ggccggtggagtgcgaccgggcaagctgcgccgtcgccggccggcgcccgaccgcggccgcatggctctccgctgggaccctatctgctgcagctccagcgcctcctgcctccgctcctcttcctcctcctcggttaccacgtcgatcaccacggccaccggtagcggaccatcaccttgccgtgcaaccactgtttcgctggagatgctgctcgctaccggaatcgatccgaagctcggctcctcatcg

SEQ ID NO: 27598 - DNA, 648 bp, Setaria italica
  misc_feature (585)..(585): n is a, c, g, or t
  Peptide Sequence Number=SeqID_93572
gccgcagcctccgcctccaggcccaaaaccctagccccgccccctcaccctcccgcagggaccccaacccctccgacgacgatgaggacggggccgggagcgggcggcggcggcagaagcgcctcaagagcgtcctctccggcgtcgtcaaggaggagccgggggagggaaagaaggacgcagcgaaagcgacggggaaagggcttgctgcgttggatggcggtgggcccacggggacgcccctcccaacgacaaaaagttagctgctcttcatcctcgataggctccagaagaaggatacttatggagttttctcagagcctgtcgacccagaggagcttccagattaccatgagattattgagcatccaatggatttctcaacaatccgtgagaagctgttgaatgactcgtattctaacttggagcagtttgaggggccaaactgggctcgtaccatatgagttaatgtccttaatgaaaggatgatgtatttctacttacgtcaaatgctatgtcttacaattcagccgacacaatctacttccggcaggcacgatctattgaagctcttgccaaaaaggnttttgaaaacttgaggcaacctagcgatgaagaagaagaacccaagccaccagctcgaagagg

SEQ ID NO: 27599 - DNA, 395 bp, Setaria italica
  Peptide Sequence Number=SeqID_93573
ggagtacgtatgatcagcattactcacgtaatagctctctgttttggcgcctttgatgatgagaggaaactactggtgccagtaagcacatcctaaccagatacagtttattttgaagaattcacaaatttggttataggttgactttgtgtaaaccctactaacgttaactgtagtttgatcattgcaaccactgctttaatcatctatgctgactggaacttgctatgctaatatttctagtctattgttttttccttcctattgcgtgaaccaggtaggggttcagcagcaacatgcatatgctaggagcttggcgcggttcgcagcaaaattgggcccagttggctgggatatagcagcgaatcgtatccagaagggcactacccctgggg

SEQ ID NO: 27600 - DNA, 1368 bp, Setaria italica
  Peptide Sequence Number=SeqID_93574
gctcttcatcctcgataggctccagaagtgagtgccctggccccatcctgatgtaattctcgtccaataaggattgcttcggttatgtgtgtttatctgtctaccttgcactgctctcaggaaggatacttatggagttttctcagagcctgtcgacccagaggagcttccagattaccatgagattattgagcatccaatggatttctcaacaatccgtgagaagctgttgaatgactcgtattctaacttggagcagtttgaggatgatgtatttctacttacgtcaaatgctatgtcttacaattcagccgacacaatctacttccggcaggcacgatctattgaagctcttgccaaaaaggattttgaaaacttgaggcaacctagcgatgaagaagaagaacccaagccaccagctcgaagaggcaggccaccaaagaatccaaagacagaggatgatgtgtcaccagatctatcaaatgtaaaaacaaataaacctgaagacaatgctgatacaataagaaaaagatctactggagacagaactcgaaatactaccccattgaaagatccatccacttttcacagtatgtttggttcctttagtgcaaaaagaacagataaaatcggtgattattcaggttcatcaaagtgggggaagaaaccccctagtttagatgacgaccgccggagtacgtatgatcagcattactcacgtaatagctctctgtttggcgcctttgatgatgagaggaaactactggtgccagtaggggttcagcagcaacatgcatatgctaggagcttggcgcggttcgcagcaaaattgggcccagttggctgggatatagcagcgaatcgtatcagaagggcactaccccctgggacaaattttggtccaggatggattgtagatggtgagccaccccaaaactcccagtggcctcctgttgtcacatccaccaatccctctgagtccactgctccacccaacatgccatccaagattgatgtcctccatcacaagtctggaccgtcttcaaatggggctgttactggtgaggagcatctaactagaactcaaacagtaccttctacatcagcaagctttgataagagctctgaaattgccagtaaagtaatcaagcatgagaatggagctaacaagtcatgtggtggtatagataatactggaccagcgcctccattgcagcaccacagccacagtcgagaaatccactctaatatcaatggcttctccgctgtgtcaaacgccatgagtcaatttgctggacacgggttatttggatcaggcattcctatgacacatgctcaggtgcttgggggtattgtttttcttggtaa

SEQ ID NO: 27601 - DNA, 962 bp, Setaria italica
  Peptide Sequence Number=SeqID_93575
ttaagtctaatagcaaaacaaagctcaatctcttctggctgacccatttgaacccaaactggtttacaggatacaagctcaatgtcttcaggttctccagcatggaatgatacaccttcgcaggtctttgcttcagagggatggacattggtttgtccaaaggtaagatcggtaaatgcaataaaattgcaattgcattcgagtattcatcctgcacaccgtaaaaatgtccaagttctctgactatcttgaacaaacagattctggaaaggcaacacttaacaacttgaaaccttatgtagcaatcctttctgcttcaatctcaaactgtggaggagtggattctggatctttttcactgatacaattttcttgtgacaacggagttctaatgtctcaatatgagaaaataatgggagctgcagtatttgaccaacactccagaaaccctcaattttaatacattggagggaagggaaacttggcaactcgagtagactcacaattttttatacggagattttgcagtgcctggagactgggcaacccactcagtttgctacatctcataatggtgaggtgctgaagatgaggaaaatctgtggcctcaatctcatcccatagctcccaggagtccatgttcataaacttcagtgtctccaatacaggaaaggctctgctggtgctagatccataatcaccgcaggtagtttcatcatggacagaaagcattcgtctcacgtgcattatgctggtgagcgaattgattgaaagatgtttgagacaaggcaatcgaccaacagatggcagttctttactgttttgacaatcttttagttctaaaatggaaatgcaaaacatatgatttcccagccataaaggaaatctcacaccagagaagcccctgatagtcagctcctccagatcagggtgaggttgaagactatccaacacagatgatg

SEQ ID NO: 27602 - DNA, 387 bp, Setaria italica
  misc_feature (2)..(2): n is a, c, g, or t
  misc_feature (10)..(10): n is a, c, g, or t
  Peptide Sequence Number=SeqID_93576
gngtcctgcnctttgcttgctcaagcacctcgagctggtactgcctcgcctgctcctcggtgacaggcttttccttctgcgcggctactgtccgatccacctccaccttactctccacagggtttccatcttgagtcctggcacgctttccttggcggtccacttcagcctcccacatgccatggcggaacaccatcttgccgccacggtcacgctcccagaaaccccgggcctcgcgtcggtggtgatcatgggcgtagtgaccgtggtcacggtcgcgtttacgcggcctctcgtactcccgccgtccacgccggtcctcccaaccacgagagggaggaggcggcatcggacgccgccgacagtcgtggcgtgattccccggtac

SEQ ID NO: 27603 - DNA, 575 bp, Setaria italica
  Peptide Sequence Number=SeqID_93577
ccgggcctcgtctactccctcgccgacttctacggcttcacgcaggacgtcctggccgacccgggggcgtcggggttcaccgacatcgccggcgcgtgctgcgggagcgggcggctgggcggggagggggagtgcacgacgaactccacgctctgcaccaatcgtgaccagcacgtgttctgggaccgcgcgcacccgtctcagcggacaacttttctcgcggcccaggcgttttacaatgggccggccaagtataccactcctatcaacttcatgcaactggcctagtccagttagtgaaagtgaatttctctcagaaaaaagttggtggaagtgaaaccatggaggattacgatacttgacaattggcaatacatcttttttttgttcaagcttcaagattgtgtttttttgaaacgaaagcttcaagattgtgtttgaactcacatggaatggggatcgtgttccaggtttagttcgatccatttgaaatttgaaaacgcctcggcactgtaaggttcggaagaccacagcttaatttataaggttattataaaaaagtattgatcctccca

SEQ ID NO: 27604 - DNA, 182 bp, Setaria italica
  Peptide Sequence Number=SeqID_93578
gaatcctgattaacctcttctcctagtgcacacgagaccttgcccaataggggaactgcatgtgagaagataatcgaaggtatgtccagcttcttgtgcttatcatcagaaaaggtgctgagattgacactattaacaatgctttgatcctaggtttgtccaagataagctctccgtcagat

SEQ ID NO: 27605 - DNA, 160 bp, Setaria italica
  Peptide Sequence Number=SeqID_93579
gggaattaggactgaaaatggcaggcccaagcagacagagctgctgctggatggcttctcagcttctgggactggaaatggcaggtatgagcagacggagctgctgctgggtgggttctcagctcctgggactggaaatggcaggcctgagcagacagag

SEQ ID NO: 27606 - DNA, 815 bp, Setaria italica
  misc_feature (279)..(279): n is a, c, g, or t
  Peptide Sequence Number=SeqID_93580
ttccaccagctctaccacgtccggcggctgcatgactaccacacggacctgttccggaagcgcaagaccttccagctgctggcgccggccggccggcggcagatctacacgtgcgacccggccgtggtggagcacatcctccggaccaacttcgccaactacggcaagggcgcgttcaactacgagaatatgaccgacctgctcggcgacggcatcttcgccgtggacggcgacaagtggaagcagcagcgcaagatcgccagctacgacttctccacncgggcgctccgcgacttcagcggctccgtcttcaagaggaacgccgccaagctcgccagcatcgtcgccggcagcgcggcgtccgggcagtccatggacttccagggcctagcgctcagggcgaccatggactccatcttcaccatcgccttcggcctggaccttgacaccctgggcggctcgggggacggcacccgcttcgcggcggcgttcgacgacgccagcgagttcacgctgctccgctacgtcaacgcgttctggaaagcgctgaggttcctcaacgtcggctccgaggcggcgctcaaggacagggtcaaggtcgtcgacgagttcgtgtacaagcgcatccgcgacagggctcgggagctcgcggacagcaaggaacaggaccctgtaactgattcgaggcaagaagacatgctgtccagattcatccaaacggccacgagcgagtccgggacggtggactacaagtacctgagagacatcatactgaacatagtcatcgccggcaaggacacgacggcgggggcgct

SEQ ID NO: 27607 - DNA, 262 bp, Setaria italica
  Peptide Sequence Number=SeqID_93581
tgacgcgctgctcaccaacgagattctcatcatgaggaggatagtcgagaacgtcgcgccacaccccaacgttatcggccttcatgatgtgtatgaggatgtgcatggagtgcacctgatcctcgagctgtgctcaggtggtgaattgttcgataggatagtggggcgtgaccggtactcggaatttgatgcggcagctgtagttcgtcagattgcgagaggcttggaggctcttcataaggcaaacatcatacacagggac

SEQ ID NO: 27608 - DNA, 283 bp, Setaria italica
  Peptide Sequence Number=SeqID_93582
aaaaattgaaaatatttgaagacaaatatttgaagatgactatgaaaacacctccacccccaactgctggccatccatgatgatctactgttggattcgcaaaactaacccgtcatgacgtgacgtcccatactacatcatgttgtaattgctcccaccctaacattatcctcgtctaccggacctagctacgccaaactaacccgttatgacatgacgccccatactacatcatgttgtaatagctcccaccctaactatcatcctcatctaccgaatctag

SEQ ID NO: 27609 - DNA, 334 bp, Setaria italica
  Peptide Sequence Number=SeqID_93583
agctcctggtgctgctctccggccttctcccgaacccaaagctcgagacggccgtgctgtccatctgcttgaacactaatggcttcgcgttcatggtgcccctgggacttggtagcgccataagcacacgtgtctcaaacgagcttggcgcagggcggccagaagcggcccggctggcaacccgggtggtggtgctcctggcgctggcggtgggcatgtccgaagggctcgtgatggtgctggtgcgcaacctgtggggttacgcttacagcaacgaggaggaggtggcccggtacaccgccagaatgatgcccatcctcgcgatgtccatcgt

SEQ ID NO: 27610 - DNA, 327 bp, Setaria italica
  Peptide Sequence Number=SeqID_93584
tagtttgttaagtattttaaaaagtcttgggttgaagtgcgtatgcatgcgatgaggtacagtacagtggaaaaggaggaggagaagaatgcgtgacgatttgacatccaaatgcgaaaccaaggctggaagaattggcacggtacgcgggtacagtacagttcgatcagtagagccagaggtgcctagcatgaatgcacatggtacttgcggtcagccgtgagccgtgccgccgaccgacccagacccagatggccagatgccgttgccaatggacggacgggacgagacgagagagacgagacgacgacggtgtcagaaggaagg

SEQ ID NO: 27611 - DNA, 833 bp, Setaria italica
  Peptide Sequence Number=SeqID_93585
gatccaccagagaaccttatctcttccctccttcttccccaaccattctctcttttgctccattctttttcaatggccagtttggtggacttggtaaataccaaatgcggtgtcatacaaaggttgcgcggcggcgcatcgcggggccacagcaagcagcccgtggaggttgagccagcgtgcggtgggtgcttccctcaacgagatcatgctgctcgacaccatggcgaagcggagcagcgggagctcgtgcggttgtgcctaccgacaactccatcgacgaattgaagtgcaagccataggtgagctcaagttggccctcagggttgctgcgcttcacacctggcgagcactttaacaagcttctagttcaatattgcaacggatagtttgagatgttgaggttattgaacgttgcaaaaatcgatctggaatgctagactttttgttgacattgcaacagactgtatgttgcataaggtgttttttgatgtttcattagctaatttgtagagttgccatttttttactaaaaatatggaaacatccacatttgtcacggaaggaatttttttcttaagatctataggattgatgccagtaagctattgttttttatgttgcaaaaagttaattttgatgttgcagcctctctttttttatattgcaacggatcgtctgaagggaaatctattatggaccatattaatgcttctaatcaatttcagttttgtagtcagattatctagggaattcagagtgcagtgctgcgattctgcagttatttgttcaaaaaaatgacaattgccgaaccagccgaccattcaattgtg

SEQ ID NO: 27612 - DNA, 283 bp, Setaria italica
  Peptide Sequence Number=SeqID_93586
agatggtggtggagtgttcagttggtgccactcataaaggtaggaagacgaagaacccacacgatgatgatctggagatggaggagaggaagagcaaacaattggcattgtgcgatgaggagactgtccgagagatgtttgacaaagtccttttgtgtactgatgcaaattgcgagttccactcaccaatgccagctgaagcacaaatcaatggcagatatgtgaaaggatcgggaaatagaagaggccgaaggaagggaagatctggtactagtccagaaga

SEQ ID NO: 27613 - DNA, 236 bp, Setaria italica
  Peptide Sequence Number=SeqID_93587
gattgagaagcagcagcagaacctggcggtgcagaagcctgagtaacagaaccaacagctcctgcgggtgtagaggcagctaggcgacgaagcaacatgagcgtctcctatgtctcagaaccagcagaactccgctgagaacctccagtaccagaatcactagcaccactagtaccctgtgaagaacgaccacctcggcgagactgagcctcacgaaactgagccttcttcttcct

SEQ ID NO: 27614 - DNA, 491 bp, Setaria italica
  Peptide Sequence Number=SeqID_93588
gacgatcgaagcacgactggagtccgtccctgaaatgggctatgatgctctgtcagacacgccccggggtgagatctgcttgaggggtcataccttgttctccgggtactacaagcgccctagcctcactgaagaagtgttttcagatggctggttccatacaggtgaaaatttctttcacttcgttctagctaactgaatggttgattactgaagatgattaatttgttagaatctcgccatgcataaatcttgtgtttgtatgtgcaggtgatattggagagtggcaaccgaatggcgcgatgaagatcattgataggaagaagaacatcttcaagttgtcccagggagagtatgtagcagttgaggtcgtggaaagagcatacatgcagtcccctcttgtggcatcggtttgggtctatgggaacagctttgagtcattccttgttgccgttgttgtccctgagaggcaagctctcgacgaatgggca

SEQ ID NO: 27615 - DNA, 644 bp, Setaria italica
  Peptide Sequence Number=SeqID_93589
taagttcaagaagtaccccaagaataggatgctcggccggcgtcaagttacaggtggcaaggccggtgaatatgtgtggcaaacgtatgaggaagtgcaccagaaggttatgaggatcggatcagccatcagaagcttcggagttaagccggggtctcactgtggcatatatggatccaactgtccagaatgggttatggccatgcaggcatgcaacagtcaaggaatatgttatgtgccactgtatgacaccctcggagcaaatgctgttgaattcatcatggaccatgctgagatatccattgcctttgtccaggagagcaagatcaaatcagtaagacaaaacatttgccccctgttttgtcccctttgacagtattataaccctctgcatcataatgaataacaagcctgcaataaatgttacatgtgtttcagatctaaatttaatcacatgattaggtaatgcgtaccaaattactacagaactcggtctgaacatgataaaatcaattttactgatttgaaattagttttggagatcaatgccagatcacctttcttttcatctgacaagttgttgagttgcattttcaagaataagtaaacggtaagtaccctaaagtagacaacaagacccaaca

SEQ ID NO: 27616 - DNA, 545 bp, Setaria italica
  Peptide Sequence Number=SeqID_93590
aaatgatgcagagggttataatactgtcaaaggggacaaaacagggggcaaatgttacatgtgtttcagatctaaatttaatcacatgattaggtaatgcgtaccaaattactacagaactcggtctgaacatgataaaatcaattttactgatttgaaattagttttggagatcaatgccagatcaccttttcttttcatctgacaagttgttgagttgcatttttcagatagtaacggtagtccctaagtgcacagcccaccttaaagccattgttagttttggagattttacaagtgagatgaaaagggaagctgaggatttgggtgtatcttgcttttcttgggaagaattttcttcaatgggtaaacaaaactatgagcttcccgagaaacgaaaagatgatatttgtacgatcatgtataccagtggaacaactggagatcccaaaggtgtgataatcacaaacagagctatcattgctggtgttatgactacagaacaccttctcaaaagagacagaataaagtgatcactgaagaag

SEQ ID NO: 27617 - DNA, 2407 bp, Setaria italica
  Peptide Sequence Number=SeqID_93591
ttcgttccttaatttgttttttctttcttaatttgtatttggtaactagtaatactaacaaacccaccaccaagctccatctgcaagctaaaaattccaaaggagagagagctggagatccacatcgcattgtgcccaaaatcaccctgtgcagagaaggatggcggagatgttcaccgtgaaggtggaggaggcagcgccggccgccggcggcaggccgtcggccgggccagtctaccggagcatctacgccagggacggcctcatggagctcccgcaggacatccagtccccttgggacttcttcagtggggcagtcaagaagtaccccaagaataggatgctcggccggcgtcaagttacaggtggcaaggccggtgaatatgtgtggcaaacgtatgaggaagtgcaccagaaggttatgaggatcggatcagccatcagaagcttcggagttaagccggggtctcactgtggcatatatggatccaactgtccagaatgggttatggccatgcaggcatgcaacagtcaaggaatatgttatgtgccactgtatgacaccctcggagcaaatgctgttgaattcatcatggaccatgctgagatatccattgcctttgtccaggagagcaagatcaaatcaatagtaacggtagtccctaagtgcacagcccaccttaaagccattgttagttttggagattttacaagtgagatgaaaagggaagctgaggatttgggtgtatcttgcttttcttgggaagaattttcttcaatgggtaaacaaaactatgagcttcccgagaaacgaaaagatgatatttgtacgatcatgtataccagtggaacaactggagatcccaaaggtgtgataatcacaaacagagctatcattgctggtgttatgactacagaacaccttctcaaagagacagataaagtgatcactgaagaagattcatatttttcctaccttccattagcacatatatttgatcaagtaattgagaactactgtatctctaaaggcgcctccatcggattctggcaaggggacattaggtatctgatggaggatgtacacgtgatgaagccgacaatattttgtggtgttcctcgtgtttatgatcgtatatacacaggtataaaccagaaaattcagtctggagggatgatagccaaacacctttttcagtatgcctacaactacaaacttgccaacatgaagaaagggatgaagcagcatgaagcatcaccatttttcgacaagatagttttcaacaaaataaaggaagggcttggaggacgtatacgtctcatgatagcaggagcagcacctttgccagggcaaattgaagagttcatgcgggtaactagctgcagcgtctttgtgcaaggatatgggctcactgagagttgtgccggatgcttcacatcaatcgccaatgttttctcaatgattggaacagttggtcctcctgtcacgacgatcgaagcacgactggagtccgtccctgaaatgggctatgatgctctgtcagacacgccccggggtgagatctgcttgaggggtcataccttgttctccgggtactacaagcgccctagcctcactgaagaagtgttttcagatggctggttccatacaggtgatattggagagtggcaaccgaatggcgcgatgaagatcattgataggaagaagaacatcttcaagttgtcccagggagagtatgtagcagttgaggtcgtggaaagagcatacatgcagtcccctcttgtggcatcggtttgggtctatgggaacagctttgagtcattccttgttgccgttgttgtccctgagaggcaagctctcgacgaatgggcagcagccaacaacaagactagtgactttgcagagctgtgtaatgatccaaaagcaaaggggtacattcaggatgagctcaacaaaactggcaagaaactcgggttgagaggctttgagatgctgaaggcaattcacctggaaccagtgcctttcagcatagagaaggatctgataactccaacttttaagctcaagagaccccagctactcaaatattacaaggatcgtatcgatcagatgtacaatgatgctaaggaggggcgaactgtgtgacagtattaacaagtgcctatggccctgaacattgtgattctacagaagcatgtacatattaataatcacgatttttgagttaaaaggcatgtgtgttctatggcatatgccaaaatgtaagcagaaagtgaattggttaagagctggtgatagtttacatgaataaattttctttcactcgacacctcaaccccgtttggtattgtatggaagtttgaaatattattaataacatatttacctattagataaacaaaaaaa

SEQ ID NO: 27618 - DNA, 454 bp, Setaria italica
  misc_feature (15)..(15): n is a, c, g, or t
  Peptide Sequence Number=SeqID_93592
atctgtcctgtgccngttggtacattgcagggttccagtcactgtcatagaatatgacagtgtccgcacctactaggttgattccacaccaccactacgagtagacaaaatgaaaaggaaaaactttggatttgtattgaacctctgcatgagggtctgcctctcttctggcggtgtagaaccatctaaacgtaaatatgtatacccatataaatttatgaactcttccaagacatcaagcatcttagtcatctgagtaaatatcaaggctctgtgcccttctgacttcaaacgcctcagcagaatggcaagttcctgcaacttgccacaatcaaactggatcaaacgcctatcaggaaagtaaacttggcggcgaacaatagcagaccttataggagacagaatgggggaaaactcattcgtgcatttttctctatatgccggatcaataaaa

SEQ ID NO: 27619 - DNA, 349 bp, Setaria italica
  Peptide Sequence Number=SeqID_93593
tcgggggggcagttcaacagcattcgtactggtactttctgaaataaacaaataaggataatcgagtcagatgcaaacaagtcacaacaattaaagtataaaaaagtcaataagttcaaactacagatatagtttgaactttgtacttcaactttagttgatgatgaattcggacacctagtctgcccattaagaaattgacaatacaaaaccacagaaattaagaagcatgtagttttgcaattgaccaaagaaaaacctaacagagtgagaacatagatgagataaaaaaatgcttttcagccctcatgcaacccttttcttttcgtaccatccaaacattgtcatt

SEQ ID NO: 27620 - DNA, 546 bp, Setaria italica
  Peptide Sequence Number=SeqID_93594
tagacttaaccgaactaaggttaagaaatagaaaccaagttagttagattcttgcttcgggtccaggccggtcatcgccgccagcctcaccttatcctcttccgtagggtatggccagcggtagtgcgtgttccaccagtccatcagagctgaccgagcatcctttggtagcttccctttcttcctcttcttcaagaactcggaccgcaggcggctgagacagccactgtacttcttcagcagcatctccttgagctcacggtcagccaagcgcgagctgtgctcctgccccaggtcggtcgcatctgtgtctcctgagcatggttcatcctccgaggaccctaccatttcatcggagagcgaggcggcgccgccgcagagggtgctgagctgcgtccggacgctgctgaggaaggacgccgcctcgtcgaacggccgcgacagctcctccttgtaccgctccagcactccgcagtacgcctccatgaactcgtcgagctcggggtccaggccgacctccccgccggcggccgcggcggcgcgtct

SEQ ID NO: 27621 - DNA, 879 bp, Setaria italica
  Peptide Sequence Number=SeqID_93595
tttttttttgctacaagtattatcacttgtaatttccaattcccagtatctttttagatgtaataactgggtgatcaatgggcatacagacaattacatgttatggtacctccagacagagtttttacaggccacctgaacggcaactcccttgtacatactgttgttgcccatatacacaataatctgacaaaatgacgcggttattgattcaatatgactaatttccatatcaaccaacagttgcccatgacacaaccggtgcggtgcagtgcaaacaccggctgccagtaaatgtatgccatttgcctgccgaaatgggtgttggcctcgatcacggcccgatcgtgcccgtgtcgaagtagagcgtcgtcccagaggaggatccacctccagtgacgccctccatgagcgcgaaacgcatgtcctcagatggcttccagtgccgcttccgctggttgatgaaccagttgttgatctgcttcgggtccaggccggtcatcgccgccagcctcaccttatcctcttccgtagggtatggccagcggtagtgcgtgttccaccagtccatcagagctgaccgagcatcctttggtagcttccctttcttcctcttcttcaagaactcggaccgcaggcggctgagacagccactgtacttcttcagcagcatctccttgagctcacggtcagccaagcgcgagctgtgctcctgccccaggtcggtcgcatctgtgtctcctgagcatggttcatcctccgaggaccctaccatttcatcggagagcgaggcggcgccgccgcagagagtagcttgagtcttgtcgttccggtacgtcttgtcttgttaggttaaggttacgttccgttcctttcgtt

SEQ ID NO: 27622 - DNA, 501 bp, Setaria italica
  Peptide Sequence Number=SeqID_93596
cttttggcctcaccagtactgtcgcttgcagtttactcaattatccattacacaaaaatgcttcaccaacttttccgaacaactagcattcacaggcagattatcactgctcttgaggaaaggtcagttgagtcatgtaaaggatcagatgatacgacagtgttgaggagtgaacattctactggattcactaacaaagcacatggaaactctaaggttaaacagagaaaatcagttgcctccgggacagcttctgcaatgttccatgacactatgttagctaataaagagattcaggatgagggctccatattacttcttccatttgttctgcatctggccttcatgacatccaccgcgttctttgttatgcacgttcaggtgtcaacacggtttctgtctgctagtcccccgatttactgggctgctgctcacattttggcttccccaaactgctcctccaaaagatggggctacttgatctgtgtttatttcattgcg

SEQ ID NO: 27623 - DNA, 255 bp, Setaria italica
  Peptide Sequence Number=SeqID_93597
ccacaggcatcttcctgcacataagttccagtagcaccacaccataactgtagacatcactcttctcagtcaatctcgtgtttgtatccgtgctctggagcaatgtagccgagggtgccaacgacaacagacactgttgcatcagcatcatcatcatctatgattttccccatgccaaaatctgtgatcttaggtaccaaatcggcatccatcagtatgttgcttgacttgacatccctatgaacaatcattggc

SEQ ID NO: 27624 - DNA, 912 bp, Setaria italica
  Peptide Sequence Number=SeqID_93598
cgccgccgaagaagtggcccatcgagctcgggaaccgcccgcccagcgccgaccagatctccatcgggtgggaccgccagtagtcgcatgagccggggagggagccgaggctgtgggggtcgacggggaggaacggcgtcggcgacgaggtcccgatgccgccgtgcgacggggagccaccgtacgacggcgtgggggaagagctgcccccgtaggcgcctcctccgtgggatggcgagggggaaccgccaccgtaggcgccgccgctgggcgtcgaaggggaaccgccgtacccgccgccggtggacggggaagatccgtacccgccgccgccgtgggacggggtcgacggagagctaccgtaccctccaccagtggatggcgacgacccggagccaccgtgggacggggtggacggagagccgccatagcctccgccagttgaaggcgacgacccggagccgccgtgggacggggaaggcagctccccaccggtgcccccgtgggacggggaaggcagcgccccgcctgtgcccccgtgggacggggaaggcagcgccccaccggtgcccccgccgtgggacggagtcggcacgtacccgctgccgtgggacggcgtcgtgccgccggacggcacgggtgtgatgccaccgccgtgcccggggatcccggggaaggtgtgcgggtccactcccggcacgcagtccggcttcttcacgtcaccttggctggccttctccatggggctggtccgggcctcgaccacgccgacgaaggcctgcgcggccaacgccgcgagcacgaagctcgcaaggagagccctcgccgtcttccgcgcctccatggcagctgcttctccgcttctctcctcctcctctgctgctgctgctgtggagtgaagtggactgtgta

SEQ ID NO: 27625 - DNA, 466 bp, Setaria italica
  Peptide Sequence Number=SeqID_93599
tttagtagatcatggatacttgctgtgggaggactctaagagaatgaggctgattgtacgaggggagttccatcctgaaatgagggagttcctccgcaggcaaagatgaaaaatgaccctgtttttcctcttggatggaacaagcaattcgtgtgcataaagctcctctatgcaaatgccccacacaagtctaccattaccaacatggcgatggttcatgtgccgtgccttgtctcgtacgcatgccacaaggcgtttctaatcggagatgaaaagaagtgcaatcgcatctgcagacggctgcatacattgtagacatttgagattggtttagattagtgaaaattccatttgtagtaatatgattaacgcggcacagacacagttagtgggtaaaacccaggagtgatctctgtttccttattttaaatctgtgatgatgagatccaggtttaacaaaaaaaaa

SEQ ID NO: 27626 - DNA, 346 bp, Setaria italica
  Peptide Sequence Number=SeqID_93600
ttgttcgtttgtttctatcttctcgatgatgtccgggaagaaggcctccaggaacgagtgcatctgcgtcaggccacctgtgatactgatgtcgtagccgaagatgagcccgccggaggccgccatgaggcagctcatcaccaccgtgaaggtgatctcgctgctgtagccggcgcccggcccgccgccgccgttcaccgggagtactactcccccgccgtgcatcttcgctacctctccggtcctcttcttgcaacctctctctggtcgacggagatcgatcgatcgatcgatggatcagccggagctttgactcggagcaaggctagctagccgcgcgacgggg

SEQ ID NO: 27627 - DNA, 323 bp, Setaria italica
  Peptide Sequence Number=SeqID_93601
aggtcttcataatagccacttgacacatctggaagcaaagaaacagcctcatctttgaagggaaaaggccaacagttagagactggttatctagatttgtagatgagacaagacttcaagctcacagaatcaaggaaagcaaaaaacaggacttcctctcatgggtcaccaatgtacagctttagttttagccatagctcttagcctcctttgaggtctttctgcctcctttgaggtctttctgaagtcttttttccttttgggcattgaggtgccctttggacttttgtccttgtacagttttattttacccttttaatata

SEQ ID NO: 27628 - DNA, 712 bp, Setaria italica
  Peptide Sequence Number=SeqID_93602
gccaaagcaggtgcccgtcagacagtcaataatgacaacagtggtggaactagatcaatgagaggccggcaaaggatgcccaagaaaaggatgacaataagttgaataaagatgaaattcagaagcgcaagatagtggaagctgaagcaagagaagaaggtgaaatttctgaatcagaggctgagaccaaatatcgtctggacaaggaggaaaagtggcttgaatggtgctctgaagttttagatgaggagcaggaaactttgaagcgcctggataggctacagaatacaagtttaaacctcccaaaggaaaaggttctttcgagaattcgtaagtacctccagataattggggacaaaattgtggaggttgtccggcaacacagtgagtcatacaggcaatcccgtaagtctagtcgctcctcccgcatgaccatgaggttatggaattatgttgcaaccttttcaaatatgtccggggagcagttgcatgatctctatttgaaacttagtcaagatgtggaaggtggagttggcccatcccatggtggcaatttcacatcgaatcctccaagtaagggaggtacctcaaatcagcttcatccttcgagaaaccaaaggccaactaggtctctccagtacacttctgagtcttccataataatgagaactcttggtaagtttccgtaagtccttggtaagtcggtcggtct

SEQ ID NO: 27629 - DNA, 1324 bp, Setaria italica
  Peptide Sequence Number=SeqID_93603
aagtcaactaaacaacaaaaggaggaaccagaagaagaagatggagaaacaattgaaagagttctttggcatcaacccaagggtgttgcagaagaggcaatgaggaatgaccaatcagctcaacctactgtttccagcttaccatcagacttcaatcagcagtgggatgaactagaattctacataaaatggaaagggcagtcttacctgcactgccaatggaagacattatcagagctccaaagtgttagtggatataagaaggtattaaattacaccaaaagagttgctgaggaacagaggtataagagggcactgtcacgcgaagaggttgaggtgcatgacgtgggcaaggaaatggagctggatcttattaagcaatatagtcaggttgaacggatatttgctgatagggtcagtaaagctgatggagatgatctggttccgactagtgcgactgaatggcaaggacttccttatgcagaatctacctgggaaaaagatactgatattgaatttgctcaagatgcaattgatgaatataaggcccgtgaagctgccacagctatacttgggaaaactgttgatttccaaaggaagaaaagcaaagctagtttgaggaggcttgatgaccaaccagaatggctaaaaggtggtaaacttcgtgattatcagcttgaaggactaaactttctcgtcaatgggtggagaaacgacactaatgttatacttgctgatgaaatgggtctgggaaaaactatccaatccgtttccatgcttggcttccttcataatgctcaagaaattaatggaccatttcttgtagttgtgccactgtcaacattgtcgaattgggcaaaggaatttcggaagtggctgcccaacatgaacgttgtgatttatgttggaaaccgtgccagcagagagatgtgccagcagtacgaatttttttcagacaagaagggtggacggcatgtaaaattccacacgttgataactacctatgaggtgattctgaaggacaaagctgttctttccaagatcaaatggaactatcttatggttgatgaagcccaccggttgaaaaattgtgaagcatcactgtatacgacacttttggaattcagtactaagaataagctgcttatcactggaacacccttacagaacagtgttgaagagctttgggcgttacttcatttccttgatccagtcaaattcaacagcaaggatagttttgttgagaaatacaaaaatttgagttccttcaatgaaactgagcttgcgaatctgcacaaggattgaggcctcatattctaaggcg

SEQ ID NO: 27630 - DNA, 2771 bp, Setaria italica
  Peptide Sequence Number=SeqID_93604
ttaacttaagtaaaaggtaaacaaaaagtaacttaagtttaactttaaccaaagaatacaaaataggaactaatcttatggttgatgaagcccaccggttgaaaaattgtgaagcatcactgtatacgacacttttggaattcagtactaagaataagctgcttatcactggaacacccttacagaacagtgttgaagagctttgggcgttacttcatttccttgatccagtcaaattcaacagcaaggatagttttgttgagaaatacaaaaatttgagttccttcaatgaaactgagcttgcgaatctgcacaaggaattgaggcctcatattctaaggcgagttataaaggatgttgagaagtctttacctcctaaaattgagcggattctacgcgtcgagatgtcaccccttcagaaacagtactacaagtggattttggagcggaattttcagaatctgaataaaggagtccggggcaatcaggtctcacttttgaatattgttgttgaattgaagaaatgctgcaaccatccattcttgttcgaaagtgctgatcatggttatggtggagatagcattggtgatcgaaataaagttgaacgcattgttatgagtagcgggaaacttgttttgttggacaaattattggtgagattgcgggagactaaccatcgcgtgcttatattctcacagatggttaagatgttggacatccttgcggaatacctctctcttcggggattccagtttcagaggcttgatggtagtacaagagcagaccttcgtcaccaagccatggaacatttcaatgctcctggaagtgatgatttctgttttcttttatccacacgtgccggaggtcttggtattaatcttgcaacagcagatacagtgataatttttgactcagattggaatcctcaaaatgatctgcaggcaatgagtagggcacataggattggccaacaagagactgttaacatctaccgcttcgtcacgtgcaaaagcgtcgaagaggatatattggaacgcgcaaagaaaaagatggttcttgatcacttggttattcagaaactaaatgctgaaggcaggcttgagaagaaagaatccaaaaagggtggctccatgttcgacaagaatgaactttcagctatattgaggtttggggcagaggagttgttcaaagaagacaagacagatgaagaaaccaagagaaaccttgaaagtttggacattgatgaaattcttgagagagctgagaaagtcgaaacaaagggtggtgaaggggaggaaggaaatgagcttcttagcgctttcaaggttgctaacttttccagtggcgaagatgatgccacattctggagtagactaatacagccagatcctgcagatatggttcaggaaaccttggcacctcgtgctgcacgaagtagaaagagctatgttgaagatccccaactcgacaaaaataataataacaggaaaaggcgggcagttgaggcacaagaaaagccgaggaggcgttctggcagaatagtggaaacagttgtctcgttaccattggttgatggggcagttgctcaagtacgagagtggtcttttggcaatattccaaagaaggacgcttcccgttttgtacgagcggtcaaaaaatttgggaatgcaacccagattgatttaattgtggatgatgttggtggcgtcctagcaaaggcaccgcatgaagcacaaatagagctgtttgatttgctgattgatggttgtcaggaagcagttaaagagaacacagatatcaagggcacagttttggatttttttggtgtagctgtgaagccctatgaattgctggctcgtgttgaagagcttcagttcttggcaaagcgaattgcacgttacaaagatccaatcaagcaatatcggatccagttaccttacaagaagcctcagtggtcagcaagctgtggatggactgaaactgatgatgctagattgatggttggaattcattggtatggctacgggaattgggagaaaatacggttggatccaaagcttggcctgacaacaaaaattgcaccagcaacacttggtgaaagagagacatttttaccacgcgctccaaacttggataatcgtgctagtgctctcctccaaaaggaatatgccaagtttagtggtaagagctcaaaagccaaagcaggtgcccgtcagacagtcaataatgacaacagtggtggaactagatcaatgagaggccggcaaaaggatgcccaagaaaaggatgacaataagttgaataaagatgaaattcagaagcgcaagatagtggaagctgaagcaagagaagaaggtgaaatttctgaatcagaggctgagaccaaatatcgtctggacaaggaggaaaagtggcttgaatggtgctctgaagttttagatgaggagcaggaaactttgaagcgcctggataggctacagaatacaagtttaaacctcccaaaggaaaaggttctttcgagaattcgtaagtacctccagataattggggacaaaattgtggaggttgtccggcaacacagtgagtcatacaggcaatcccgcatgaccatgaggttatggaattatgttgcaaccttttcaaatatgtccggggagcagttgcatgatctctatttgaaacttagtcaagatgtggaaggtggagttggcccatcccatggtggcaatttcacatcgaatcctccaagtaagggaggtacctcaaatcag

SEQ ID NO: 27631 - DNA, 231 bp, Setaria italica
  Peptide Sequence Number=SeqID_93605
actgacatcttcagtgcaaaggtctctggtaccttcaaaaggaacaatcagtttcagtcatcatttcctctgcaggagacatgctacctcagaaatatctccttgaaaaacgtgcagttgttgatgttgacaatggcaaattgttaaatgaagatagtgatatcagatcagttcttcagtttttaatggatgatgtgtctgaattcttgtcaacactatttttcagtacaa

SEQ ID NO: 27632 - DNA, 154 bp, Setaria italica
  Peptide Sequence Number=SeqID_93606
catattccggggctccggcggcgcctcgtcgttgctggcgcggcgagccaagcccaggaagcggtagggaaaccaccaatcacggcgcatcaattgtaataagctcttcaacaaaagcatgagcgtcaaattgcaaaagatgacgaggtttgag

SEQ ID NO: 27633 - DNA, 333 bp, Setaria italica
  Peptide Sequence Number=SeqID_93607
ttgtattcaccttgcgaaattttaacttccgttatcgaagcattctgcagctgtttttacattcttagtctgcatgaatatgtcattgtcattctcctggtcacagtggcttgtttttgttagctccagtataagttggcattgacaattactccctccgttccaaattgtaggtcgttttggtatttctaagttcatagatgttattatgtatttagacatacgatatatctaggtacataacaaaaatcatgcacctagaaaagccaaaacgatctacaatttggaatggaggaagtacaattataattcatattttatctaatttttcaa

SEQ ID NO: 27634 - DNA, 244 bp, Setaria italica
  Peptide Sequence Number=SeqID_93608
tgttctgtgaaggccgtgccatccgtgatgcaactgagcacgttcacaaaggtcacatcgatacccagggagaagagctacagagagttcccggtgatggtgcgtgtcaaggcgccagaaatgaccgtgcaccagcactccccggtcgatatcgtcgcggtgatcgacgtcagctggagcatgggctgggatgacaaatacggaaaggaacccaacgacaggttgatccttgtgaagaaggcaa

SEQ ID NO: 27635 - DNA, 180 bp, Setaria italica
  Peptide Sequence Number=SeqID_93609
gcgacttccacttgcagcaccttggtgtagtcgagtctgtactcactctgtagtgatgtagtctgtacctggacaccgtccatgtttctgtacgcttcccaaagttgtacatatacgagtttgttggacttgaaacttggaagaaatgaaactactttgttcgtttaaaaaaaaaaaaaa

SEQ ID NO: 27636 - DNA, 269 bp, Setaria italica
  Peptide Sequence Number=SeqID_93610
acgtgcgcgcggcgtcgtagagctggttggtggcccacccctccgtctcctcgatcaccaccgtgtgctgcgacgacatgcgcgaccgcaggtagccgaggccggagaagaggaggtcccgcacctcgtaggggaccagctcgttcaccacgccgcgcaccagcatcgccgacgccgccagcgacgccgccgtcgtccccgccttcttgtacgactcgatcgccttgtcgtaggtcgccatggccggccgccggcggtcgaccgatcgg

SEQ ID NO: 27637 - DNA, 603 bp, Setaria italica
  Peptide Sequence Number=SeqID_93611
aatgtgagcctcaatttgttccagaaccagcgcaggatcaacagctcctgcttcaatagcctcagtgctaaattcagctgcataaccttcctcaccgatcagatgagcacgtctcctatgttcttcgagttctgtcttctttttcagaaccaggtctttcatcttgctcgctttcaattgttcaagccttaaaacttcagattcgacgtagctgaggtagtcaacagagagggtgttgggctcagttatttcatgttccgaagcagcaatattgcatgttacattctgaaacatctgctgctcttcaagtggtgtatccatgagattccaaagttcaagcatgctagatgccaaatcttgaagcttttgcatcctctggactttcatttcacgtaatccatttacagctgatgcgagtctctcaattgtactgttgctcaggttctttgatccatcagcctcgcccaggctaggatgcacatcatgtactgtttgtttgaagtctataccaagcacctcgcacaaggaatgcaaagtgttcaaatgttccatcacttgcttcagccgatcactcttctccttctgaagggattgtagctcctt

SEQ ID NO: 27638 - DNA, 406 bp, Setaria italica
  Peptide Sequence Number=SeqID_93612
tttggcaaggcgccagtggcaatggcaattcgagacccatcgatctgccggttgcttccgctccggccacttcttccctgtgccagttccgggcgcgggtgagcgaggcttttctcgccttggactggagtctggagacccggagggggaatgcacggtccacccgctgtgccgcgacttctgcaggtgtgggacggcggtgatggcgacacggtcgcgtccggggtggcgtgggtcagtggaaagcaaccgctgacggttgacatgcgtgacgtagcgccgatgcggtggtggtgatgtttggtgtcatgctgtcatgggagaccctggggaggcgcgccggtggtcgacgtcgcgggggcgctggcgcgtctggacgcgcccggccgcgcgctctcccggtaga

SEQ ID NO: 27639 - DNA, 416 bp, Setaria italica
  Peptide Sequence Number=SeqID_93613
gttcgacgtcatgtaccacggggtgccgctcggggtggcggcggtgcccgggttcgagcagcccgcgcacagcacccgcctgctccagacccgcgtcatcgtcgaccgcttcaacgtgctccaggccgacgcccaggatctcgtccgcgacgccgcgatccgcgacagcgtcgagctccgcatcaccggcgacgtcggcgccaagatcctcgtgctcggcttctcctcccctaaagtccaggtgtcggtggattgcgcgatcgccatcagtccaaggagccagtcgctgaaatacaagcagtgcggcgtggacgggctaagcgtgtaggccgccgttgccgtcgccgtcgccggagcagcagaagcagaagctgtaatccaatggggatagataaattggatggatctgtgcgtcg

SEQ ID NO: 27640 - DNA, 367 bp, Setaria italica
  Peptide Sequence Number=SeqID_93614
gcagcggtggcgaaccccacgggcgaccacgggatggtgttcttcatgcacgacatcctgggcggcacgaacccgtcggcgcgcatcgtggccggcatcgtcgacaacgcggcggtcacgggacagctccccttcgcgcggcccaacggcgccgtgctgccgctcagcagcggcgtcaacgtcaactccggcgcggcgagcgccatcgacaacaacaacatccccttcctcacgggcctcggcggcgccaccaacgccgtcaagtccatcaacaacaacaacaacaacaacggcggcaacggcgtgcccatcttcgccggcggcagcctgccgcagggcaccacgttgcagaagctcctcttcggga

SEQ ID NO: 27641 - DNA, 403 bp, Setaria italica
  Peptide Sequence Number=SeqID_93615
cgggcgggagcgagagggaggacacggcgggcgggagcgaggagaggaacgcgcgctgcgtcgccgacgccgtcgacgcgaaggtgatgagcgtcgccgtcgccccgtgccgcgacgccaggcgcttggccagctccgccagcgggatcaggtggcccatccctggggtcaccagcatcgccacgtgcggcggcggcggagacgccggcgccgccgcgccgttgccgttgcagcacgagccgttggcggcggcgtgctccatttctggggtgagcgcgagcggcggtgtttctagccggccggtggtggtggtacggtggaagccttttcgggtggttgtgatcgatctgatcaggaagctggtgctcctgtggtggcggcgcgcggtggtgtggtggtggtg

SEQ ID NO: 27642 - DNA, 325 bp, Setaria italica
  Peptide Sequence Number=SeqID_93616
cctatcccctgtgtgccttgcctatcccctgctgcgtgtctcagggtggaggagtcgatccggattcgccgcgaggcggagcctgttgagctcgtgcaagcggttaagaagctgcagaaggtttttgcgcgagaggagaagtggcggaaggagctgccactggtgctgaagcagaagatctcgtatgatattgtacgacggctgcaggagttggggggtaatggcagccttgcacagcaaagaggtattatgcttagtgctaccattttatgtactagagatagggcattgtctttactacacgtacttggccttaatgtatatt

SEQ ID NO: 27643 - DNA, 1049 bp, Setaria italica
  Peptide Sequence Number=SeqID_93617
cttgcggcaacgagagaaggagcagcgaaatcctgtgccccggccggattcgagaagtttctagcaccacggcgtcggcggcgatcgagcgtagcctgcgcattggtcattggtctttcctgcggtgcggcgctcgggcgagatcgaggtggggggctcgcgaatcggagaccaatgtcgcgtcggtagggatggcggcggcggcggaggcagcgccatggcgaggggcatagcgcgggcggtgtcgttcgggggccgcgcgaccgcggggtggttctcctaccggcgcgtcaccgtggccgtctgcctagggaacctcgtcgccgcgctgctcgtgctccgctccctcaccgcccccgcctccttcgccccgaccgctcccaacaacggtggagtggtgccgtacacggaggagcagattaaaagggtggaggagtcgatccggattcgccgcgaggcggagcctgttgagctcgtgcaagcggttaagaagctgcagaaggtttttgcgcgagaggagaagtggcggaaggagctgccactggtgctgaagcagaagatctcgtatgatattgtacgacggctgcaggagttggggggtaatggcagccttgcacagcaaagagaagttgttgaatcatggcgtgctgagaagttgaaagacatcaaaagtgcatctactcaaaatcagacaaatttggacctatccagtgacgaaactagaatgttaaaacgagccctggagttcaactggcgtatgcttatggaggatattggcctttggataccagaggaagtcacgcatactgtacatgatgacaaacctgaaaatgaaccagaagaagaagagataatagcaggtccacctttgtccccacaatgtaacgctgagctacatactgattacgatggtgctgctgttagatggggcttaacacaccacaaagaatctgctgctgattgttgtcaagcttgtcttgatcaagctaagaatgcaaagccaggggaactgaagtgcaatatatgggtttattgcccatcggaatttg

SEQ ID NO: 27644 - DNA, 1047 bp, Setaria italica
  Peptide Sequence Number=SeqID_93618
tctttcttacttctacatattttgatttctcaactgtagaacttgaatttgatttttccctataggaatgttaaaacgagccctggagttcaactggcgtatgcttatggaggatattggcctttggataccagaggaagtcacgcatactgtacatgatgacaaacctgaaaatgaaccagaagaagaagagataatagcaggtccacctttgtccccacaatgtaacgctgagctacatactgattacgatggtgctgctgttagatggggcttaacacaccacaaagaatctgctgctgattgttgtcaagcttgtcttgatcaagctaagaatgcaaagccaggggaactgaagtgcaatatatgggtttattgcccatcggaatttggatgctactcgccagacaaatatgaacataaacatcaggagtgctggttgaaacaggctgaccaccccaaactgaacttcaaggacaagtattcagagtcttacagagacgctcatcccactgctcctgttgttgtgccatggatgtctggtgtcatcggtgcatgagctaacagcctcccagcagccccattgaggccccgtttggttcccacccctaaaattttattttagtcctgtcacatcgaatgtttaaatactaattaggagtattaaatatagactatttataaaactcattgcacagatggaggttaattcgcgagatgaatctatctgtgtaattagttttataattaactcatattttgtcctcctaattagccttcgaagattcgatgtgacacggattaagggagctaaacaccccctgagattcctgatgcaaatgcaacttcaacacagccatacagcttttcttttctttttcttcttttttgccaatatactgctttgttttcttctttctgacccggtatatacgatgtaaaacgtagcttagtcgacttgggagttgggagcaaaagtttttgagggatgatgttgaagtacaattggagttggtggtggttaactcaatttaatgattcatctct

SEQ ID NO: 27645 - DNA, 373 bp, Setaria italica
  Peptide Sequence Number=SeqID_93619
ggcggccaggggcgcgacgaaagcgtcgccgtcgggccggaacggctcccccacaggccggccgccaccatgtggcgctgccgctcgtagatccccatggccccgccgctggccgccgccgcgggggcaccgtaccaccccgccggagcgccgctcgtcgtcgccagcggctggaggcggctgagtttgtggatgttgaagtggtcttcaagatacccgtggtagagctccatctcatgctccaattgatgaaccttccaaggacgagcagataagggaaaggtacgtacaccaatcaaacaacaagaatcagctcaagagagagctcacccatgtatgtatgtgtgagtgctcttgctcaagctccaaagag

SEQ ID NO: 27646 - DNA, 285 bp, Setaria italica
  Peptide Sequence Number=SeqID_93620
ggtcgcggtgagcaccgaggggtccagcggctgcgcgtggttgtggtcgttctcgtaggtgacgatcagcatgccggcgtcgctgcggcaccgctccacgtgcttcctcgccgggcagtccttcttgctgctgcaccggtagtacccccttgggtgaggagagcctttgattggtttctgcccatacttcctccatgagtagttgtccgccggtatatcggcgttcttgtcgctgatcgcacagcacccttctctctcctccaaacttcctcccccttcctcgcc

SEQ ID NO: 27647 - DNA, 889 bp, Setaria italica
  Peptide Sequence Number=SeqID_93621
cggagggcgccgaccgccacgtcgccggggcactcctcgcgttcctctccgcggcgctaccggcgctcccctctgcggtggtgcgctcacgtgggcatgaggtcgccaacgacgtggtacgcgtgctcgagttcccttcgacgcccgactcaggcgtgagggcggggttgaggtgcctggcgcatttgatatctgcagggtacagggccaactgggagacagtggagcctctctacgcggtgattctaaggctcgctactgatcaccggccgaaggtgagaaagcaagctcattcatgcttgagagatgttctccaaagttttcaaagacaagcaattttggttccagcaagtgaaggaatagcaagatgctttgaacggtttctgctgcttgcgggaggatcaagtgctgtgaatacaggtgtagcagaagaagggcccaagggggctaaggaagtcctgtatattttgaatggtctgaaatgctgccttcctcttatggcgtcgaaaccttccaatactatcttaaaatattttaaagcattgttagatctgcatcaactaattttgacaaggaatatactggagattctgaatgctgttggtgagagtccaactttacagctcaaatctgatgtgttattggacattatgtgctctttggggctgtcagtgtcttcagaaaggaaatcaggagatgaaatggcttcaattgcacggcttttacatgttggtactaagaaagtttacaatcagaataaggacatatgcattgtaaagcttccactggtttttacttcacttggagatatattgtcaagtgaatttgaagaggccagattttcatctgtggaggcttttaaaggttatagataactgcatcaatgaaa

SEQ ID NO: 27648 - DNA, 216 bp, Setaria italica
  Peptide Sequence Number=SeqID_93622
atccacagtcacagccgccgccggttcctctcctccgcatcctcctcgatgctgacccacggcgacgaggcctcgacccatgttgatgccaatggcgtcgtcgacgtcaacccgccgcgcggcaccagggacttcccgccagaggacatgcgcctccgcacctggctgttcgatcaattcagggaggtctcccgcctgatggccttcgaggagggt

SEQ ID NO: 27649 - DNA, 956 bp, Setaria italica
  Peptide Sequence Number=SeqID_93623
tttttttttttttttttagttagccaggctaaatgccagtcaaagacatatcatggaaaccttcaatatttgttacaccatagactgtaacaatacagccaccatatcaatatttgttactcaaaaaaaaacaccatactatttccaccaacaatacatgacagaattaccatgctctaaagtagtagcaaataaattagcatgagcttcaaaaaatatggtgttttcttaattccaggtatggatgtatctagtaccagtacaacagaaatatcgacagcttgtaaatcttcatcaaaccaaaggacctagaccagacagcgccgaaatggcaaacctcatgttcgttggtgggagaatggattcctccgaatcccattaataaaagtgagataggaatccaagtagaagctggtccacatgagggctcacaaaatcaaattgtgttcatttcctatttgaaacaacaaagttatagtagtcctcctccccgtatagtctcgctaaatctgctgatgtgtcacactttataacacctttcccttcaggaagttcaaggcaagaatagtgcattatcatttctttcaaggtatgtttcgtgctcttcacatcattgtcccacaatatgctctttcttacatactctcttttgacatcctcgtgcggtgtttttcctttggcacaaaagatagaggcattccacatggcacctctagcaaccataacagaagcggcacctgtagcatctttaactcttttaaaatcctcatactcaaagacatctccattagctataactggaattgacagtgctgacacaacatccgcaatctcatcccacttagcaggatctcttggtctgtctttaatttttcttccatgcacagcaagagcaggaacaccagctttttcaatccttcgtgccaattccacagtgtccttaggtgtgttcagaa

SEQ ID NO: 27650 - DNA, 268 bp, Setaria italica
  Peptide Sequence Number=SeqID_93624
gcacatcacgtagcacccctgctggtgccacgccgtccagaggatgatcccgtgcaccgccgggtgggagtacacctccctgagtatcttctcgaggttggccgcctggttgggtcccggcgcgacgtcgatctcggtgagccagatggggacgccggccttggacatggtgtcgagcgcggcccggatgtaggggatgttgggggtgctgaagtggccctcgagcccgatggccatcctgccgtcgttggtgttcccggggaacttt

SEQ ID NO: 27651 - DNA, 331 bp, Setaria italica
  Peptide Sequence Number=SeqID_93625
tgtaaggctattgtctagtttttttgtttattatgattgtgagttaatcatagtttaggtcactttgtgtatatgtgattgttattatagtttgtaggggcatcaagctttagcggctaatgcgttgacatttgagcgccatggtgctcctgaacattttgatgctcctagcttgttttttattaaaccccaacctgcttaagtggcctaccaacttgcttgtgagtaataggctttattgttgtttctgtatattttggttaaaccaataaaccccatgcaacatgaaaagtgctctgagtttatacttcacagacttgaaggacttcaa

SEQ ID NO: 27652 - DNA, 375 bp, Setaria italica
  Peptide Sequence Number=SeqID_93626
ctcaaccacacaccatcggtcggttggattgggacttcaaccgagtctctctcaactctgcccggtcggattgggatatcgacacgagcctcacgaaactccgcccggtcggattgggatatcgacacgagcctccacgaattcggtccggtcagattgggatgtcaacacgagccaccacacaaccaacaccacggaccggatctttttttctaaagaaaaggaaagtagaaagaaaggaaaagaaagaaaagcaccttttaggtgccaccgccgaagcaagtctccttgctggaattgcctgacatcgctttcaagaaggtcacgacaccgaggacgtcgtcgatgccagcctaaactgggttgggttctcac

SEQ ID NO: 27653 - DNA, 566 bp, Setaria italica
  misc_feature (219)..(219): n is a, c, g, or t
  Peptide Sequence Number=SeqID_93627
agacaagtaatactaaaaaccatgcacaggggagtggtacaagaacgatgggagatgaaggttggaccaactcttgctcttcctttcaacattcaagttgtcccggagaagattaattgggaagaccacgtaagaaagaattcggtagattgggactggcaagtggctgtctgcaaattgtttgatgagcgtcctgtgtggccaaggcaatcactttangaacggctgcaagatgatggtgtgcatgtctcacaaaaccaattcaaaaggcttctgtttagagctggatactacttctctactggaccctttggtaaattctggatcagaagaggatatgaccctcttaaagaccctgactcacgaatataccagagaattgattttcgcgtgcctcctgagctaaggaatcttctaaggacaaaggattctggtggccgtggtagagcaggggggagtggcaagcaagagggcctttcctccccctggcggcccctgggcatggagttggcagctgtaaccctggtggctgctgccttcaagaatactacaaaaagtagggacaa

SEQ ID NO: 27654 - DNA, 202 bp, Setaria italica
  Peptide Sequence Number=SeqID_93628
tgagggaggcaagagcctcactccgatgcccatctttcttgccgacttcttctcttctgtgaccctcttttttttggctctacataaacacaacaggtggataagaatcgtggtgattgcatgatttacggtggaataattgatcaatttataagaattcattggatgaccctaagacgatcacgaagtgctctgttcagcg

SEQ ID NO: 27655 - DNA, 1299 bp, Setaria italica
  Peptide Sequence Number=SeqID_93629
tacgtaggacggcttcaccctgcctgccatcagggcagtggctgcaccagcttttatattcctcctcttcaacgccaggtccaatttgccctttgaggctgagcttgatgactccgggaagatggaggcagctttgattgctgctctcttgtcctttctgctcttctcaaattttgatgcaaacttcactgaagctgcggtggcagcatcttctgctgagggaggcaagagcctcactccgatgcccatctttcttgccgacttcttctcttctgtgaccctcttttttggctcctaagacgatcacgaagtgctctgttcagcgcataatcatcagagtgacggctgtcagagagtcgttgaaggcgaaccaaaactggctcagcttctttcttcttccgaagatcctcttcctggtgttcaagccaatacataggatccgctagcttgtctcgatcttcatctgcaggcagcagcaatgtctctgcatcctcaacatcaaaatcttcagtcttcttctgggccccactgattatgacatattcagtattctttgggtctgtttgtatgacaatttcatgcttgcaacagggtgatttcatggtgaagctccatatcttggtagagtaataatttccaacttgtttcttctcagcattaaaccttactcccttcgctatcatggaattgcatccaccacaccaaatgttgaaaggcatctcaaatcttataatcaggatgccctgatcgagctttctcgcccgctccctgagcgcatgctggccatgaaatttgttcaatccacccttcttcgggctccattctggcgggtagtagaagttatcagctctcgccgcagcgagtgacgacatgttgcctctcactggaggaaagggatgacgagatcggcagagacggcgactttctggtcgcggtggcggcggcggctcccggcggcgatttgggagggattccctgatcgattagctgctgcgcgcggtccagctgttggggcagaagacagaggagcaggatgttggggcgttcgagccggatcgcgttggtggatggtggtggagccgtggaggaccggtgccggtccaacaggtgtggccaggaccagctgttgggagggcttcctgggcggcttctcgagcggcttcaggtgaaggccgtggatgagccggcggcgggaggccggggtccaggcgtagcggcgggggcgggccggcgggaccgcgggaggtgagggcgagtaggcggcgggaggcctgcgtggcggcggggaggaagaagacg

SEQ ID NO: 27656 - DNA, 342 bp, Setaria italica
  Peptide Sequence Number=SeqID_93630
gtcgctcttatccgttagctggcatgtcataaggtattcagggtccaggtacccgcaggtcccctgcaccaacgttgcaatctcggcctcatcactgggtgccagttttgatgccccgaaatctgaaactttcgcggtgagcttgtcatcaagcagaatgttcgccgtcttgacgtctccatggaggatcggcggcgatgcagacgagtgcatgtacgcaagtgcctcggctgactctgccgctatccggagacgggtgtcaaaggttttgtcagccttgagatccttgtggatgtaatggtagagagtgccgctggagacgaactcatagaccagcatggg

SEQ ID NO: 27657 - DNA, 277 bp, Setaria italica
  Peptide Sequence Number=SeqID_93631
aggagggcgtgtgatcagtgaactccgagtctccgagcatcagagcatgcacctgaccaaaactatggagatgatctcaaaacccttcctcttggcatctcttcttccgctcctcacatggctactctcgcgcttgctctcggcctcacaccgcaagaacaacgccggcggccaaggccggcgtagtatccctagcccgccggcgctccccgtcgtcggccacctccacctgctgaagaagccgctccatcactcgctcgccgccctcgccaagccg

SEQ ID NO: 27658 - DNA, 2355 bp, Setaria italica
  Peptide Sequence Number=SeqID_93632
gaccaatctaatttctggcttataaaccgatgattcaccacccatacctttacacataatcgatgatcacccgaaaccctatctaagataactataatcaccattccaggcttgttgtcaaaattgtcctcatcttatacatacatataaagaatttataatacacaggtgcaaaagcctcttgataaaatactcaaaaacaaaagaaaaaggagagaaaaggtggggaaaaaaaatgcagagccactagaaacatctgatcttagtcccttgtcagtactcttccagcaatacttgtacatttgcgtaacatgaatgaatgtttgccccgtgaatatcgggaatcttttatgtcctaagcttaccacacatccctcagatatctgccctccgtatggagattcttcacaaagctctctgctttggaactgtcaagtgaaccctgctcctgaacgatggtgtggagaactttgtgtacatctttggccatgcctttggcatcaccgcagacgtagatgtaagcaccttgggagatcatgtcccagatttcagatgctttctgcgccattttgtgttgcacatattccttggtagggccctggcgcgagaatgcaagaaccagctcagacagtgctccttgctcaaggaaattgttcaactcatcctcatagatgaagtccatcttgctgtttctgcatccaaagaagaacacggatcgaccaagctccactccagattctttttgagctagcctctcctgcaagaagccacggaagggtgctagaccggtcccagggccaatcatgataattggcactgaaggatcagctggcagtttgaagtttgattgcctcacaaatatcggagcccagctgcagtccttgctctcttctgatggaacagcattcttgatccaagttgagcagacccccttatgtacccttccagcaggtgttgtttcattcacaagcgcacatgtgacatgaatcctagttggtgccatacttggtgaagatgaaatagagtaatatctcggttgaagacgaggggccacagctgcaaagaagactcctaggggaggctttgccgaagggaactctgccatgacttccaacaggctcctctgatttgccacaacccattgagcgtactcatccttcccagcaggagaggccaagaacctcaaacgatcagcctcagcaagatctgaagcatgtgcagctaatgcaagcagcgaactcttctttggtgaattcagaagatcggcatatcgggcaagtgcattcctcacggtgattggggaggggaaaggaggagcaagagatccaccacctagtggagtaccatcctcattgtctgcatggatggtaaaaaatgtctccggtgagtagcctaacaacctctctgcctcctctacaacgtcagggcagttctcggtgtatacaccaacatggtcaccagtttcatacataagaccagatccagcaatgtcaaattccaagtgagtgcatgaacgatcagaagcaggactgtggagctcccgccgcacagccacattagcccggcaagggtgctgagcatcatggactgcatgaccatttgcaaggctgaagtttttctccaaatgagctgcctcctcaggcttcataaattcaacccggtattcagaaatagcagctgtgtaagtagtgcctgtggagacatcattttcatcacgaagtaaacgatccaactctggccagagagcttctttccatgcattgaagtcatcctcaatgcattgatcatcgtctccaagaccaaccggcacaaggcgttttccaccctgttcagttaggagctcgtcgaccaccttggcaaccttgttgaaatgctcgtactgtcgattgcccagaccaaacacagcatactcaaggtcactcaaccatactcccctctcattcccctcagtgaaccatttgtagaacctagcggcattgtctgttggctcaccatctccgtacgttgccacgaagaacaacgctagcttctccttcttcaacttctcctcgtattcctcatcctctgcggcataatcttccaagtccgcaactttaaagattgccttgtcgtatcttgcctttgcctcctcagcaagcgacttggcgaacccctcggcggtgccggtctgcgtgccgaagaagacggtgaccttcttcctgccgtcgtcggcgaaggcctcgtccgcggcgcccttggcgcccctggccttgacctgcgcggcctccgcgacggccacctcccgcttccgcttcttcccggcggcggcccgcctccagagcacgaagagcgcggcgccgagacaacggcggaccc

SEQ ID NO: 27659 - DNA, 1119 bp, Setaria italica
  Peptide Sequence Number=SeqID_93633
ttgcaccagaaggataacttggataggtttctagcatttcctgaggaacaacatcctattgtgctgcaaattggtggaagtaatctgaaaaatttggcgaaggcaactgaactggcaaatgcttattcatatgatgagatcaacctaaactgtggctgccccagcggtaaagttgctggtcacggttgcttcggtgctcgattaatgttcgatccagagtttgtaggggatgctatgtcagctattgcagccaattgtgatgtccctgtcagtgttaaatgcagaattggtgttgatgattgtgactcttatgaagaattatgtgactttgtagataaagttgtgtcaaattcaccaactaggcatttcatcattcatgctcggaaggcattgcttagtggcatcagtcctgcagagaatcggaaagttcctccattgaaatatgagtactatttcgctttgttgcgggacttcccagaagtaaagtttactctaaatggaggtataacaactattgatcaagttagtgcatccataagacaaggtgcacagggagttatggttggccggtctgcttacaataatccatggaacatgctagggcatgtggatagcgaaatctatggcaagccaacaagatgcatttctcgtcgtcagatcctcgagagctaccagttttatggtgattcaattattggacggtatggccccagtaggccaaacgtgagacaacttgtcaagccgttgttacacttgttccactcagaacctggcaacaacctgtggaaacgcaaatctgactctgcattgcgctattgcaagacagtcaaatcattcttggaggagactcttgacgcaataccggacactgttcttgacaagccagtaaccagggaacaatctgttgagaaaaaataattttgctgatgttgattctctgttgccaccaagatatacaacactgactaactgtacctacggaagtccagaacttgcaaccgcatccgcttgagcaaccggaggtttgagggaagatggacaaggcgggaacatgcaagcctgcaaaattgttgttaatttatacctcatagtcgtagctatactatcagttgtaagttg

SEQ ID NO: 27660 - DNA, 378 bp, Setaria italica
  Peptide Sequence Number=SeqID_93634
ctggcttccctgcaaggccccttggtctggagcatcctgctccatcctatccgccgcggcggtccttgctctcgaccgtgcccggccgccgcgagaaagcgggatcccgtctttcttctcctcttcgataatcacttcctccaccgattttatcgccgacaccggcggcggcaccgtcgtcccgatctcttcgaacccgtccaccgaggggagggcccggagcgcgtccgccatggccgcgttggacatgttggcgcggacggcgttgcgcttgcacagcgcctggagctctcggcgcgagagggcgaggaaatccattgccgccgccgccaccaccgccaccgcctctctctctccccactttttagtgccttctca

SEQ ID NO: 27661 - DNA, 568 bp, Setaria italica
  Peptide Sequence Number=SeqID_93635
gcccgcttgcactttattttatatacgtatacgtatacgtgtaccgcatggagtgtgcacggttattagctacgggctacggcacggatacgacgacgtacgtagaggcatgccgcgccgaccggccggccgctctacttccacttcctgtacttgccgccgccgaacatgccgcccttgtgcttgccgccgtagccgccgtggtgcccgccgccgtggccggtgtggtacgaccccatgtgcccgtattgcgcggagtgcgcggggtaggcggccggcgggtaggcgccgtgcggcggagggtaggcgccggcggccggaggagggtacccgtgggcgccgtggccgtagccgtgctcgtggccgtggccgtggccgtggccgtagccgtgctcgtagccgtggccgtggcccttcccgccgtggacgaggttggacacgaaccccttcacgccgccgtcgtgcccgccgcccatggtcgtcgccggctcaaggtgtcttgctgctcagcctatgctggctcgatgagttacgctcgacgcgagtgaaggatgatgctatggctcga

SEQ ID NO: 27662 - DNA, 842 bp, Setaria italica
  Peptide Sequence Number=SeqID_93636
caatcttaattcaaagcgggggtgtggtctactcctgtcgagtttttttcctaaaagaatgctgttatgagcagagttggttcgctcgacgggtggtgaggcctgaggccttgtctccctggaggcacgtgagaggctataaatggcaggaagacaccgtgtaccccgccactatgaggagcctcgaggatatcgtgatgctccacctcctccccttgcacgaacaagggttgtctctccacgtcgcttggaggaggaattgtctagtcgtcgtgctgagatgcgcagaatccgtgaagaaaatcagcgtctggcagatgaaatcgttggtctcaggcaaaccatacctcatatgaaagaagatctccatgcctcaagtcaggctgtacctaagctccgggcagacaaagaacttgaatcaagggagctaactcagaggaatctgaagctggaagctgagctacgtgccttagaaccccttaggcaagatgctttgcatctgcgatctgaagcaggtaaactacagtctttgaggcaagagctggctgcaaaggttcagggtctattaaaagagcttgagcatcataaatctgaaagccagaagatacctgctatgatagccgagcgtgatgctctgcggcaagaactgattcaggctagggcagcacttgagtatgagaagaatgcaaagccagaactgacagcacaggtgcaagcaatggagaaggatcttgtagctatggctcaggaggctgagaagctgagggctgatattgcaaaaagaagggcacctagtttcagcagtcatggaacttatggcgcacctgtgtcaactcctggga

SEQ ID NO: 27663 - DNA, 760 bp, Setaria italica
  Peptide Sequence Number=SeqID_93637
ttttaagttttacttttaattttacttttaattttaaaatttactttagttaaagttaagtaggaagatacctgctatgatagccgagcgtgatgctctgcggcaagaactgattcaggctagggcagcacttgagtatgagaagaatgcaaagccagaactgacagcacaggtgcaagcaatggagaaggatcttgtagctatggctcaggaggctgagaagctgagggctgatattgcaaaaagaagggcacctagtttcagcagtcatggaacttatggcgcacctgtgtcaactcctgggatgggtttgcaaggcatgtatgatggtggctattcttcgattgggagtcgctatggcactgggccttggggatcgcatgacctccatggttatccacacccgtaattgggcttctgactgtagtctctcctggacagttccctttcttcattagtgcagttaggttctgagtactttgactaagcttcgtgatatggtaagacttgtgcaatcttttctggccagtacacagcactatacaagctcaggttatcttggtaccttccattaggtcagaaaatataatccaggctcataagaaaacatatgcccgtaagcagtagttcactgcaataaagggaaaacaggtaatctgcaccttgtttgttgcaaatcacatagaaggtactgacacagtggcatcagttggtgtctctggagttgcttcttctgcattgctaaagtcaataggatttg

SEQ ID NO: 27664 - DNA, 355 bp, Setaria italica
  Peptide Sequence Number=SeqID_93638
tttttttgtttttttcgggttttttagtttttgaatgctgtccacccacgggttgcagctgccgccgccggtgccgtcggcgggcacgggcgccacgtcgcggagcgcgcgccagacggtgctgttgcacttgaacccggagccgaacccgatctgccacacgcggtggccgcgccggacgcggcccttagcctcggcgtaggcgagctgctgctggtgttgccgaaccggtgcagcgtgcacctgctgggctccatgtcggcgtccccgagccccaagtacttcagtcgatccaggtggaggcactgatacttcctcagcaacctagacgaaataatatatcattctagattat

SEQ ID NO: 27665 - DNA, 382 bp, Setaria italica
  Peptide Sequence Number=SeqID_93639
ctcgccgggggtctcgctggcgcggccccaccgcgggtcgcgcaccacgttgatgttggggctccagtaggtgagctcggcgtggccgaggttgtacatggccctgatctccgtcgacaccgcgccgccgatggcacgccacagcgactcgttgaacgcggcggcgctgttgatgacgagtgggaagctggtggcgccgggcaccacgtcgccgaaccacgtcccgcccgggccgacgtcggacacgccgtgcagcgcctcaccccaccacttgtacggcgggaggccgacgcgggccgcgccctcggccttgtccccgaggttcctcaccttctcctccagcgtgagctgccccaccaggtcgcgcacccggtcgccgtac

SEQ ID NO: 27666 - DNA, 421 bp, Setaria italica
  Peptide Sequence Number=SeqID_93640
gcctgggcgcgcgtacccgttgaggccgcagaggatgggcaagcggccgccgcccttgccgccgccgctcgccgacacccagaggtcctcccaggatatcaccacgccttcgtccgtccggcgcagcgacttctcgcgggcgacggggccgccgctggcgaccccgttcccgttccccgacgcgctggtgatctccagcgacggctgcggcagcgggaacggcggcggcgcgaaggagcgcccgctgccgaagggaaacccgtcggtgctgcgcatggaggacgcgccgacatcggagtccgcggcgtcgtcgtcgtgcgcgtcgccgccccggtccagccgccgcggcgggctcggcgtccacctcggcacggcggggacgcgctgctgctgctgctcggacgccatgtcggaacgctaa

SEQ ID NO: 27667 - DNA, 448 bp, Setaria italica
  Peptide Sequence Number=SeqID_93641
aggccttcgcgatgccgctctcctcgggcgcctacacgggaaccggccagtacttcgtgcgcttccgcgtcggcacccccgcgcagccgttcctgctcgtggccgacaccggcagcgacctgacctgggtcaagtgccgcggccccgcccccgacgccggctacggctacggcgccccgctcccggcgccctcgtcctcctccccgccgccgcacgggcgcgtgttccggccggagaagtcccggacgtgggcgcccatcccgtgctcctccgacacctgcatcgcgtccctgcccttctccctcgccgcctgccccacccccggcagcccctgcgcctacgactaccggtacaaggacgggtcggcggcgcgcggcacggtgggcaccgactcggcgaccatcgagctgtcggggcccggcgcggaggccgccgccaccagcaccag

SEQ ID NO: 27668 - DNA, 776 bp, Setaria italica
  Peptide Sequence Number=SeqID_93642
taatttaccaagggtaattgtggaagattcagatttccctcttcagcttgaaaaaagttgtcaggaggtcctttatgcagattgattgccagtttgctgagacatgctctcaccatagagcactttcctccggcacaactgcacttacagcaatgattttttggaaggtctcttctggtcgctaatgctggtgattgtagagcagttctttcccggtgtggcactgcaatcgaaatgtccatggaccacaggccctgtagcctcactgaaaaattacgcatagaatcgcttggtggctatgtggatgatggctatctgaatggtttgttaggagtcactagagctcttggtgactggcatcttgagggtatgaaagaggttggtgagccaggaggtcccctgattgctgaaccagagctcaagatgattacactgacaaaggacgacgagttcttgataattggcagtgatggaatttgggatgtcttctcaaaccaaaactccgtggactttgcacggaagcgtctccaagagcacaatgatgtgaaactatgctgcaaggaaatcgttgaggaggcaataaggcgaggggccattgacaacttaaccgcagtgttggtttcgttccacctggagccccctcctcagatcaaagtggaccgccccggtagggtggcgcggagcatatcagctgacgggctcaatagcctcaggatactcctgggaaggcaataaccacattcttgtcagtgaataggtgctttgttgcattgccg

SEQ ID NO: 27669 - DNA, 2008 bp, Setaria italica
  Peptide Sequence Number=SeqID_93643
ccgtgacctgttccaacgtggcaagaacggatggacgtagagaacgtcagcacgcgacttccacctccgtttcttgtacaagtaagtgtgcatggcgattggaactggaatccctcatcgcaggtcaacacgagaagctgctcgtgcaagcgaccgttctcaagaaacaagagagagaatgaagaatggcaaacatggtctccttagcacatggcagcagcgaccactctgctccaaactgtaaaatacagatctgatctgaatctctgaaggatacaactgaataaagcacaaagtaatcaacctctgtgcatattttgaaatcccaggactttgaaggtacttcgccggtgaaatttctggtttcctttatgtaacgacgtcggcccaaccattttccttttcccctgtactatactcctgtctcagcaccagggttcacaccttcacatcctgctcttcttgacaggccccagctccttggccttggctctcagctcgttcttcttgatcttccccgtggccgtcttgggcagcggcccgaagatcaccgacttgggcacccagtaccccggcatcctctcccggcagaaccgcatgatgtcgttcgcggtgtcctccgtgccgtcagcggctccgtccttgagcgtcacgaacgcgcacggcgactccccccaccgctcgtcggccctggcgacaaccgaggcctcgagcaccgccgggtgcatgcacaccaccttctccacctccaggctgctgatgttctccccgcctgagatgatcacgtccttcatccggtccctcacctcgatgtacccatcggggtgcttcactcccaggtcgcccgagtggtaccacccgcccgcgaacgcctccgcgttcgcctcggggttcttcaggtaacccttcatcacggcgttgccgcgcatcacgatctcgccgtaggtcttgccgtcggccgggacgggcgccatcgtcttcgggtccaccacgtccagcccttccagcgcgatgtaccggatgccctgccggcagtgcagacgggaccgctcctccagcggcagctcgtcccactcgggcttccacgcgcacaccgtcgaaggcccgtaggtctccgacaggccgtacgtgtgcgtgactcgaaagccgcggatggacagcgcggcgagaagggacggcgtcggggcggctccggccacgttgacgtttacgacgcgggggagcggcaggaacgtctcgcttgccggagcgttgatgaggttgttgagcacgaccggtgcagcacagaagtgcgtcacacctagcttcgcaatgctatggtatatagctttcgtgctcacctggcgaaggcatacgctcgttccacagaaggctgccagcgcccaagtatagcaccagccattgcagtggaacatgggcagagtccacaagtaaacagccccttcaggcattccccacaccatagcaacactgagcgccatgagataggcaccgcggtgatgcagcacgacgccttttgggctggaagtagtccccgaagtgtagcctagggcgatgctctgccattcatcctttggtggcttccagttgaactctgggtcaccagttttcagaaactcttcataccctatagctccctttcctagagcatagtgcagggactttggatcacaggttgggtcaccaataacgatcaggataggaggcctgaaagctgatttcttcttctcggtgattatctttagggattcttcagcgagggtgaagaattcttggtccaccatcacaacttctgctacagaatgctcaagaaggaatgctattgtctcggcatttaacctgatagtccctaaatgaattgcacggcaagttttcttgctttttttcaccctgaagttgagtagatgtagctgaaactaaaaatgcattccgcataatttcataatacacttggggaccaaaatgtggtccaggacagatggttaacgtacctggcgaaggcatacgc

SEQ ID NO: 27670 - DNA, 413 bp, Setaria italica
  Peptide Sequence Number=SeqID_93644
tagaacaaattttttttttcccctaagtatatagagaacaaattctatatgtacgtatggcctcttaagattttgcatcaaaccttcttggatttgcatacgtacgtatgcgttctcttttttttcctaaaagtagagaagtattaatttcaagaataacaggaggagaaataatgatctttgaccactattttcaaacgaccatagtacacgcaatattgcggcaaagggatggttttcttatcaacctaaataaactatataaaggagatcacatcaacatcaactaatcacgctcatccactaacatatattcaaatgtatggtttccacatatagtaccatagttaaggatgtatgattaatagttccctcatcatgctatatatgatagaacctaccaattatatata

SEQ ID NO: 27671 - DNA, 643 bp, Setaria italica
  Peptide Sequence Number=SeqID_93645
cgtctcctcgggcatctgcttgtactcgccggcgtcgtgcggcccgcccctgccccactcctcgtgccccgccgccaccgccgctgcttcgagcgacgcccgcatgtaccttatcatagcactggaactcgccgatgcccgggaaacgccatgttccgttggcctctgggtaggaaggatacctcagctctccacagggccccatgcccacttggatctcctgcaacaacgatacacaggtggtttagtcttaagatcacagcatcatgctcaagtgctattgcaatatccagtggtcaataagaaatgggcaggttaattgatgattaccgcaatgacgttgccgaggtagtcacggaacctgtcgtggaagctgcgcatgtagtcggcgtagacctggatgggtgtccggcccttgagcaccggcagcgtgtcgcagccgagggagatgtactcggggttccggcggccggacctgtccgtgtacacgatgtccgggttgctgctcatctcctccagcacccatggcggcaaggggatgctgcaaacgtcgtcagagcaacaaacgtcaataaaagagtaccagcaacagataaaactgttcaaagttatttagccagagacctagcatcaatcagaggag

SEQ ID NO: 27672 - DNA, 629 bp, Setaria italica
  Peptide Sequence Number=SeqID_93646
ttgttcagatatgggcatatgtgcctcctttctcttgaaatgcgagaatttcgtatgaattctataaaatttgcagtcactctgaaaatatttgcacaagcccgtaaaaagagtctaattagtagtattggcattgcaagttcttttcagctgaattcccgacacggtgtacagtcacgaagctgctccttataatacagtttcgaatgaacaaaggaacagaagacagcctaggcttctgcacattgcctgcctgcttacctacctgctcgattacagcctataaaactctgcaacctgcaagccccctgaatctatacagttccccccttcgccgctgcacgtaccatacacatacacaacagcacggtgtgtgtgtccgcacgcacaggcatgggggcaccacccttggcctacaatgccacggcggtggcggcgccctcggcctccggcgctttcctctccttggcggcgtcgaggaacccgacgtacaggtccgagtgccccgtgtcgcaccgcggcagcgccggcctcgcgccgcgcgccgttgacaccacctgcgagaacgccgcttcgtcgtaccgctccagcgcgttctcgccggcgagctccaccccggcggcgctggc

SEQ ID NO: 27673 - DNA, 1617 bp, Setaria italica
  Peptide Sequence Number=SeqID_93647
ttacagcctataaaactctgcaacctgcaagccccctgaatctatacagttccccccttcgccgctgcacgtaccatacacatacacaacagcacggtgtgtgtgtccgcacgcacaggcatggggggcaccacccttggcctacaatgccacggcggtggcggcgccctcggcctccggcgctttcctctccttggcggcgtcgaggaacccgacgtacaggtccgagtgccccgtgtcgcaccgcggcagcgccggcctcgcgccgccgtcggccatggccccggacgaaggacacgaactcccgccagttgtcgccgtcgaagagcgccttgttcatccgcaggtacgtgaacgccgccagccccgcgccgcgcgccgttgacaccacctgcgagaacgccgcttcgtcgtaccgctccagcgcgttctcgccggcgagctccaccccggcggcgctggcagcggccttgacctgctgcacgagctgctcgggcgagcagctggcgtgctgcggctgctgctcgtccttcatctccatgcacgtgaagttgagcacggcaccgcgcttggccagcatgcgcgcgatgggcgcgtacccgtcgtggtgccgcgtgttgtagtacccggccgtgagctccgccgcgtgcgaccgggtcccgtagtgccagtggattccggcgaccttggccgagagcgtggcgcccgtgccgccgaacacggcatcggctgcggccaagacgcggtcgccgtggctccaggagcatgccggagtaccactccaggaagaactggccgtactcagtgctccacgtgccgtcgcgccggaagaagcccgtctcctcgggcatctgcttgtactcgccggcgtcgtgcggcccgcccctgccccactcctcgtgccccgccgccaccgccgctgcttcgagcgacgcccgcatgtacttatcatagcactggaactcgccgatgcccggggaaacgccatgttccgttggcctctgggtaggaaggatacctcagctctccacagggccccatgcccacttggatctccgcaatgacgttgccgaggtagtcacggaacctgtcgtggaagctgcgcatgtagtcggcgtagacctggatgggtgtccggcccttgagcaccggcagcgtgtcgcagccgagggagatgtactcggggttccggcggccggacctgtccgtgtacacgatgtccgggttgctgctcatctcctccagcacccatggcggcaaggggatgttgcaggtgtcgccgacgttgccgccgcactggtggaaggacatgacggcctggagccgcaggccggcgcgctccaccatgcgcacgagctcggcgtaggcctcccagtcgtagcgcccgggtccctcccgctccacgacgccccaccagacgtccaccatgacgccctccaccccggcgccccgccagcgccatcagactccgccgccaccgcgcgctgccgcgacagctggccgccgggccccaccgtgtccagcggcagcatcacgtacacagggaccccgccgcggggccgcccgtggtcctggcccgctgcgccgccgtgcagcagctcggcggcctcggccggc

SEQ ID NO: 27674 - DNA, 475 bp, Setaria italica
  Peptide Sequence Number=SeqID_93648
gcaaaagtaaaacaaacaatccatcgtcatggagctaagtgcagcaacgcttatcttcctctccctcctgtccctgccaattgttgtgaccttgctcagccgcaaactaacgccgagctccaagaagaggcggcctcctggcccgtggaatctccccttcatcggaagcctccactacttcatcaagtcgcatccgcaggtcgctctccggaacctggccaaaaggtatggccctgtgatgttcctccggatgggccagatcgacaccgtcgtgatatcctcgccggtagccgtgcaggaggtgctccgggaaaaggatatcatctttgcgtctcggccaagcattgttgcctccgagatcttctgctatgggaacctcgatgtcggctttgcgccatacggcgcatattggcggacactgcgcaagctctgcacggtggagctcctcagtgcaaagatggtgcggcagcttgca

SEQ ID NO: 27675 - DNA, 618 bp, Setaria italica
  Peptide Sequence Number=SeqID_93649
agatcgccgcaacttcagagatcagttggcttaatttcttttaaaaatcagacttccatcttatgaaaccggcaaggaaaactgacaggaaatatcaggttacttcttaccctttaaaaagtaacagtgctcagcaatttggatataattttgaccaatggattacccccttctcctttactgacacatgaatttttgtaccagaatctataaccagttcccaccatggctcttatacaatgttgaagtttcactcgttcatattctcgtataagaaatgaagttaagaacaaagcaagctggacacgtcttacccctcttcacttgacaaaaactatttggttctggtttataaagagtaaaatctacatggtccttaaacttgtcccaaagtatcatccatattcctaaaatcttaaaatgcagttgttaagtgtgaggtccaaatctcccataattagcatttgcattcatatgtttctgattatttggaagatcttgaaccatgctgtgtaatcatgtccatggtaatgagcaacatttagacctcgtgtggcataattaataagtttagggaccttgatcatatcctaagacaagtttaaggacaattccatg

SEQ ID NO: 27676 - DNA, 479 bp, Setaria italica
  Peptide Sequence Number=SeqID_93650
atcgtcaacgtcggcgaccaagtccagatactgagcaactcgacgtacaagagcgtggagcaccgggtgatcgtcaacgccaagcaggagcgcatctccctcgcgctcttcttcaaccccaagggcaacatccccatctccccggcgccggagctggtcacggccgccgacgggccgccgctctacccgccgatgaccttcgacgagtacaggctcttcatcaggaagaagggcgccaagggcaaggcgcagatcgaggctctcaagggccaggcaccgcccgaaaactaggtcggctagctagtagctgcgttactactccagttattaaaaataagcaacagcatgtatgtatggcaactattaatccggagttagttggctgtcagctgcctcgagctcccccatgtatattctgattgtaataaagcctgtgcaagaccgatctacgactattctacctttgtaccaaaaaaaaa

SEQ ID NO: 27677 - DNA, 1719 bp, Setaria italica
  Peptide Sequence Number=SeqID_93651
tacttgtcctttgtattcgtctagtagtattgggagatggcaatggatcgaaaaatgacattgtgtcaatcaagtagcccagagtaatctccaactttgaaactgggatccgcaacctcaagtttgacacaagtactggcagggcattgcaaacacatgtatctagagctcttctaatttcagccgagtgcccatctttcaaaactattttctcaggatattccctcccattggcaatcaataaatcttccacagaacacccatcaagcccatacacataggccaaagatgcccgggagatccacccaaaaagcgcagcccacattgttgcaaaaaccggacagtgttagactgaaaccttctggaggcgtgtcatgccaagaatcatcgacctcaaacatgtctgtgtctagaagcacagtcttcttaggccacttcaagacatccctatcaatttcagattcttcatctgcgccactgcttttctcattgctgtattgtttcgggtgaagcgtatcaggcaatatgatgattcctgcctttgaaacagcatcatctacttctgacgtgcctgaagaaatagcttctgccgcctcaatgaatgcagcagcacaagcctccgcagatgcacgccttagtgaaatgtccatgccttcctcagactgttttatactacttgaagggctttcatatagtttgcttgtttctagaacacttccattctcatctgcccatgtcacagactgtgatccgctcttagacccgggggccttcattgaagattttagtgcaggtttcatcttctcatcacttgtctcatcttttccaatgctcactgcttcactaaattctctgtatagctgttcagcataaccttgcattggacctttggctccagactgagatgatgaggcataattgtctgtcaatatagaactagaaaagtagttatactgattcatagtcccttgctccatgtttgtcgaagcatccccaataatgatggtactcgtgaagtccacctcatgcccatcacttccaccaggcctttttctagacttactcttctgtgaccttgatgatgctttacttgctttcgttttcttagcaccccttttctcttccaaaactacatcttccagctgcttctcaatggaatcagatatgcaagatgacagcatattgttatcatcctcttgcttcaacatcttcgatggggttttagttgtcatctttctaggagtctttgtattctcactaagaaccatgttgcccatcttctcagctattacctctgagctcacgtgtgtttcagctgatggagatgaacctgccatgccatcttcaccgggagcagcattcctacaatccacattctcgattccggacagttcaggtccagcaactttgttcttcttagctggcttttgcccttcagtggtgcggtcacgacgcggcacatacccctcaatggcatccgagggaccaacccagtcctgcagcgtgacttccccagccccagcgacctccttctctttgatctccagcttcctcccctcatccttcttcccatccgcatcccggaaccctaacccttgcccctccccgcgccgccgcactcgacgagcgcgaccaccgcgtcgagccgctcgggcggacccgagggccgatcggctgggagcgacgccgccaaggccgcggaggcgacgaggcagcgct

SEQ ID NO: 27678 - DNA, 399 bp, Setaria italica
  Peptide Sequence Number=SeqID_93652
ggcctatttgcacgcatctctccagttcgaataggagctcgggctttgggtgtgccacgtctgagtccagcagttcgttgatcgtcccctgattccaggattcccaggcattagaaaggagcattggcgtggttctgttcctttggccgctgactatctcgagtaggataactccaaagctatacacgtcacacttcagtgttaagtaccgttccaatatgtactccggagctgtgtaccctgctgtttgtactagtgttggatctgtctggtcgacaacaaattgttttgtggtaccaaagtctgctatcttaggcctccaattgtcatccaggagaatatttgatggttttagatcccggtgaattacttccttgcatagtccatgaaggtaagaaa

SEQ ID NO: 27679 - DNA, 397 bp, Setaria italica
  Peptide Sequence Number=SeqID_93653
atttttctgggataatagcaggtggctctgctgggagttgcatatactgcttgattcgctcaactgagatgatgtagttttccaagtacgaatagtaccttgtcaagaaaacctgtgctgcagtcagcgtcaaagcataggagaggcaaagtcccgcaaaacctgaaagaagttcatattgagtatattttatcaacctaaagatccttttagaaggaagatttaattgtaatggttatgtagctacctggtgaaattactcctggaggaaccaaaacaaggaacaatgctgctgtaattattgtcaaggactgcagtgcctccactcttattagcacccactcttgcgcagcaacagtatgaaagaacagtgtcgcatcagtgtcaatgagctgca

SEQ ID NO: 27680 - DNA, 454 bp, Setaria italica
  Peptide Sequence Number=SeqID_93654
ggggtctcgaagctaatcgattcgatttgagaaccctggaaccaatctttcagtatcttgattggatcgatgatatcttttatcatgtcctaacacactgtttggctggtgtttcatattccagaagcttccctgcaaaattggaaaatcatcgtgtgtcgtccatatagaataagctttgcagtgtacttataattatatcatatgggacattgatagtttactatctgctggttgtatgaagaatgaatagaatctttctgcagatgctacatgattgaaatgtcttctataacataccgtaggacagtaccaggaccctgtcactgtctgtcacagttggaaccctgtgagctatggttatcaccgtgcaacttgagaattgctgcctgattactttctgcaggatcgcatctgttgcagagtcgatggatgcttgtcgcctcatctagga

SEQ ID NO: 27681 - DNA, 1182 bp, Setaria italica
  Peptide Sequence Number=SeqID_93655
ttttgagaaacagtttcccactctatactctacagccatcattttaagtttatcaataattcaatactgagtacacaaactttcaaaagaaaatactgagtacacaagagacatgacaacaattttcgtttcatattttcgacacagattctgccggttcacaactttgtacttcccttttcttcttattcaaaacgacatacctgaagaatgccactcatcatgctagaagtagatccttcatttcattttgcaatgaataccataggctatagctatatttaattgtttactgagagtagttcaatcaaccagctggagtttgctcctccattaaccctaactccgaaaattgctcccactgccaaaaactgaattgctgttgatttttttatttccagtaactccaccaataaaataatgaagaggatatgtcctgacagtatcttgattggaatgatgatatcttctatttgtcttgttacagattcgatttgagaaccctggaaccaatctttcagtatcttgattggatcgatgatatcttttatcatgtcctaacacactggtaggttcatgttgaattccgcttggtattagcccaatactcagccacaagtttagcaaaggctgattgcttgtcttccaacagtttggctggtgtttcatattccagaagcttcccgtaggacagtaccaggaccctgtcactgtctgtcacagttggaaccctgtgagctatggttatcaccgtgcaacttgagaattgctgcctgattactttctgcaggatcgcatctgttgcagagtcgatggatgctgtcgcctcatctaggactagaattttgttcctgcggaggagaactcttccaaggcagaagagttgacgctgtccagcgctccagttatcgccatcatcactcactgctgtatcaagaagagcaggggtgctgctaattgctgtcttcagttgacacttctccaaggcctcccatatctcttggtcggaatgcaggccaaggggatccaaattgttgcgcacagttcccctgaaaagtgttggttcttgagggataatactcaatttagttctcagatcctttaggcctatggagcagatatccaacttgtcaatgagtatccttccacctgctggatcaacaagccggaataacgagcttg

SEQ ID NO: 27682 - DNA, 1297 bp, Setaria italica
  Peptide Sequence Number=SeqID_93656
aaatgttcatcataagtagtccatacacatgaagctgttattgttcatacaggcatgtagcaacatagttatggttagcatgatcaaaactgtgaaaatgatatgattctaatgtgtatctgcgtatggcaacaaaaggttaatttaacatagttttattaggaactgtatcgtgcaggaatttcataattttattaggaactgtattaagcaggaatttgtattgtcattcgtaaactcaatataatctttcaggcatgacaatttttacttacctcccatatctcttggtcggaatgcaggccaaggggatccaaattgttgcgcacagttcccctgaaaagtgttggttcttgagggataatactcaatttagttctcagatcctttaggcctatggagcagatatccaacttgtcaatgagtatccttccacctgctggatcaacaagccggaataacgagctgataagtgttgatttcccacttcctgtcctccctacaaccccaatcttgttccccgcagcaaaggtacaagtgattcctttgagaacaagcggtgcatttggacggtatcttatcttcaaatcttgcaggtctatccttccctcctgtggccatgaagcggggggtctattttctgggataatagcaggtggctctgctgggagttgcatatactgcttgattcgctcaactgagatgatgtagttttccaagtacgaatagtaccttgtcaagaaaacctgtgctgcagtcagcgtcaaagcataggagaggcaaagtcccgcaaaacctggtgaaattactcctggaggaaccaaaacaaggaacaatgctgctgtaattattgtcaaggactgcagtgcctccactcttattagcacccactcttgcgcagcaacagtatgaaagaacagtgtcgcatcagtgtcaatgagctgcatgttgctgtggataaacctctctgtagctgcaaatgccctgatggtcaccacaccaagaattgactccgatgcatagttcatgacaggtgcctttgtcgttccattgattcttactagctctctagctgaggatatgtagtacctctgaacatataccattgcgattgtaactgggatcgctacaaccaagacttgccaagttacagtacccatgaccagtaccgttgtgacaacctcgatcccgccagtaacaacaaaggccatggagtaaggtatgtcgaaatccagaatgcttaaatctgaagatgcccttgttaaaattcttcccactggtgtcgagtcaaaaaatg

SEQ ID NO: 27683 - DNA, 462 bp, Setaria italica
  misc_feature (421)..(421): n is a, c, g, or t
  Peptide Sequence Number=SeqID_93657
tcttccttgaaatcatgcatttgaggagggccattaatacagacatcacacatgtcacatctatgaggaccaaattcctctccgaagtacttcactaatattttggctctacatgttgaagtgttcaaagaatagtgaaaacaatcacgtagcattctatatgcagcctttgtctgttcctcactttctttattaggaaggagcgttggtgctctacataaaaattacaatatagagtgcaatctgacagctttccatctctaccagcacggccagcttcttggtaatatgcttctaaactctgtgggaaaccatagtgaataattcttctgacatttgatttgtcaattcccatgccaaatgctatggtagccaccacaacctccaagtcattgcaatggaactgatgatgcactttccnaatgagattaggcatctttgcattatatgctgcagctctga

SEQ ID NO: 27684 - DNA, 365 bp, Setaria italica
  Peptide Sequence Number=SeqID_93658
acgagaacagtgatgctgtactccaggatctccttgagttcctcaaagcaaagaggaaattagttggtgagagcaaagcttcaaggacctgtcaaacacatcagccttcagcgtactttgttcttgtagtcctacctctggctttaattgcttgtcaaatacatcagtctccagcgtgcagcttcaccttctttcttgtagtcctacctccttcccatcggcgacgctgcggcgaagggaggaaagaagccggaacgatattctcttccagacggacggtgcatagcggtggcgccggcgacggccgggccgggagcgttcgtcgccggcgaagactcgccccggacgccgtcgacaggttcagc

SEQ ID NO: 27685 - DNA, 973 bp, Setaria italica
  Peptide Sequence Number=SeqID_93659
agacaccctgtaacgagaacgcggcggtgggagggaaaaacagcggcggagcatggccgcgcaggagacgacgccgagctcgaagggagcggaggcgccggcgaccatccgcctcgtcaacttcatctccgaggaccagctcgatgaggtgaagcggacgcgaggggagcgggtggaggacggcaccgcgcagcgcgacaaacccctgttccagatcctacaggagaataaggagaagaaggatgcggagttcaacgagcgcttcaagcacagacctccaaaagctttggatgaggatgagacagagtttctcgaaaatttggcatcgtcaaggagggaatatgaacagcaagtggccaatgaagaagcggagcaactccgcagtttccatgaggctgtagctgcccgatccaatatagttcatgaacttgaggctcctacagtctctagaccagaggagagcaggcctaagccacctacgaagaggagccagcctgcgctcctgaaaaatgtaataatttccgtgaagccgcaagttaagaaggcaaaggttgatgtggaagctaagcctgcacctgaggagcagcggccttcgaacgggcatgacgcggaccaaaacccaccatcggatgccaacaaggccgctctgggctctctggtggcttatgatgatgacgacgaaagcggcgatgaccaagattgacaatggtttcctagaattcaggtatggataccgcgagcttgttggaagagatgcaacggaggcatggatggagcagcagcacgtgaggtttgctagacgagaggcgaaattaggcttctcttgtggtccatatgcaccggaagccctgctgaaattctcttgtaacatgagccgactaatgaactgcaccctctatttctgtaaaaggaacactgtagcaagtagtagttgcatttacctaatcagacaggtattttctccatggatgga

SEQ ID NO: 27686 - DNA, 241 bp, Setaria italica
  Peptide Sequence Number=SeqID_93660
gcttagttaaccataactgtaagaaaagaaaggcagacctttcagccattgccttgccatgtgatcctcatccttccttcacctgcgtattattattagcagccgcagcagcagcgcgtagcaattaagagcaccaccagccagcaagcagcagcaggctcccgcaccagttgcagctcgccaccttcctctgtgcttcttcttccgcaccaatcaacgacgagaaggaggggatgggggg

SEQ ID NO: 27687 - DNA, 730 bp, Setaria italica
  Peptide Sequence Number=SeqID_93661
tgctgagtaccttcccatattaattcccaagaatgtctctaacatgtctctgtgccgcaataaacgaagcctaatgattcgactgtcccatgttgagccctcgctgctgttatccaaccgagaaaatttgtaatggtcagttatgcgaagtccaaaagaaagtagagcccttaaagctgcttctgtaggcccaactttatttacacattctgataatacaaatacttggtctttaatttttgctaagtacgagtctatctcactagtatcaccatcacagtgcaaccagcgtgctttaagaacttcatccttatctagattatatctggaagcaaaatctaaggcctccttgaatcgattctctcttatcataacagagtacatttctgttactgtaactttggagaatgatatcagactccaaaacattttatccatctccgtttgttgatgctccctagaaccactaggtaggttaggttccaaatcactgtccatccgcttgttagctgaagtatttctttcatatctgctagattgcagaataaaagcatgtccttcagtagcctttgccttctccaatagtggtgtggataaaactgggtcatctttggaaacaacctcgctttcagtgatgccgtacatgctaatactaccatccgctcttaccaacatgagaacattatctgtccaccaactgatgtccttaacatcaattaggcatctacca

SEQ ID NO: 27688 - DNA, 423 bp, Setaria italica
  Peptide Sequence Number=SeqID_93662
ctgccatgacaatccagagaaaccaccaacgaagaacaagagagaggtagcatcagagttgaatggaggtcgagcttagagagagggaggattagtactactcggtaccagctgctgcccatgcatcaccgctgtccagactccaggagctgtcggcatgccggcaagcaccacgaaagagagagcagatagaaaatacagctcgaccactagatcaactgtcccgctctaacaaaaactaacctttcccactgctaatttaattagtagatggccaccatttcctcttgaattttgttagtagacaaacacgtatactacttgggtactcatctgcagacatggccatcagggtgatatattacttaaagtagcgtgagtacttaagcgcatttagaggtacatttaaaaagcaaacgaagt

SEQ ID NO: 27689 - DNA, 353 bp, Setaria italica
  misc_feature (338)..(338): n is a, c, g, or t
  Peptide Sequence Number=SeqID_93663
tagatccctctgcatcggttgatggtgtatgtaggactcgaattcagttacgcacgtgaatctacctgatttggtgcagtgactacactaccaaaaacgatctgaagcctaaaatattattgcggtttgcaacagcagaagactaatatgccctaccacaaggtagtcatcatcatgactgcactgctctgttgttgcaactttctatcaaaatagaagctaaagtagcagtttgagaaactaaacacgggtcccgtgtttagactacgtgatgggcttaagcagttgacggaagtattcagcctggcacacttcgatcaactggcaacaagcaaagntcctaacattcatta

SEQ ID NO: 27690 - DNA, 610 bp, Setaria italica
  Peptide Sequence Number=SeqID_93664
agaaaccgccattctgcttgctgagttccctccttacaaggtccagttcctctcgaagcaaattattctgctgaatggcagagttcctctcttccgtcaactttgaaatcaaagcagaggtctcagaggtaaagccttcttggtccctttgagcctttacagcagtcaaagatggtggctcatctgattccctggttgtctgcatctagagggaattaaattacaggaaaattattttaagggtgaacaaggaaatgaaccaagcaataacatttgcagacctcacctcttgggaattgaaccaagcaataatatttgcagatctcacctcttgataattcaaggtgcttccatcagacaatgaaggtctaggtgatgagccttcttcagatccctcgcgcactggggatggcggtttgggtggtgggacgtagacaaccttcaacttcacctcatccaccacattacctgattgggtggtaaacatatccccagtgatgtcctttggtaatgtgtcttccgccacaatgacactttgcacgagaaacttgtccttgcattgcatgtccggcggtgcctccttttgttgcttgacaaaaaatttaaaaaa

SEQ ID NO: 27691 - DNA, 1278 bp, Setaria italica
  misc_feature (1)..(24): n is a, c, g, or t
  Peptide Sequence Number=SeqID_93665
nnnnnnnnnnnnnnnnnnnnnnnngttagctcttatgtcagcttgtggaactaatgaactttttaactattgattttgcaacagctggctcaaaagatatcaatagttacccagttcattagttccacaagctgacataagagctaacacaagatcaagagacaggcttactgcctgggtgaggtagctaccacgcacgcagttactgatgacactggatcctgaatatgctatggagtagcgctgtagcagtgtagtacatgagaataaatgcattggacaaaatacaatctcacgagggaaacggttctagcaggatgcagattaacactggctcatctatctcttcatgataaaccctagcagaatcccgaggagagcaatggccgccacgaccacaaatgagaaaccgccattctgcttgctgagttccctccttacaaggtccagttcctctcgaagcaaattattctgctgaatggcagagttcctctcttccgtcaactttgaaatcaaagcagaggtctcagaggtaaagccttcttggtccctttgagcctttacagcagtcaaagatggtggctcatctgattccctggttgtctgcatctcttgataattcaaggtgcttccatcagacaatgaaggtctaggtgatgagccttcttcagatccctcgcgcactggggatggcggtttgggtggtgggacgtagacaaccttcaacttcacctcatccaccacattacctgattgtttggtaaacatatccccagtgatgtcctttggtaatgtgtcttccgccacaatgacactttgcacgagaaacttgtccttgcattgcatgtccggcggtgcctccttttgtgcttgcattgtcacaatgacatcgttggtggaccgtggtggcacaatgccgctgtttggtcgaacacagtacttcttggggctcgtcgtcttaaccttaaagccgatgtagtcatcagttctattggttagctgcatagagcacgagatctgcttctttgtctcgaatgggaatcggagctcgaggggctcgatcccaagcaactccttggagtcggaccccatcccgctgccgctcgaatccgggagggagacgcgcgctctcgggcgctgcacgggcttgatccggggtggcagcgacgcgggcgggcgagcggggcgctagggtttggcagaaagcgaggcgggtttgcgctcgcgtcctcggagaagagaggagcggacagcggagcggagtggagccggaagtgg

SEQ ID NO: 27692 - DNA, 329 bp, Setaria italica
  Peptide Sequence Number=SeqID_93666
gccgtcaccggctcaccgctctccttgctccccccttctgtcccccgccgcggtctcccaagaggcccgattgacgcccccggctcccaccgcatcgtcgggatacgcctgccgtgcgcgcgggttgaatccggagctcgaccccgtcgtcttcatcgacagtgccaagccctgcttcgcttgtcatccattctaaggttggatctttcctttctgcgcccacatgttctccatctgagccgagatcccaaattcccgcagcattaggctttcattcaatcgctcggatcctagattccaaacgcctaactcgccgtgggttttggccg

SEQ ID NO: 27693 - DNA, 732 bp, Setaria italica
  Peptide Sequence Number=SeqID_93667
aagaaagaaactacggttgcggtccgggttgcgccgtcaccggctcaccgctctccttgctccccccttctgtcccccgccgcggtctcccaagaggcccgattgacgcccccggctcccaccgcatcgtcgggatacgcctgccgtgcgcgcgggttgaatccggagctcgaccccgtcgtcttcatcgacagtgccaagccctgcttcgcttgtcatccattctaaggtatcccgcgatggggatcagcaggactcaagtgaatctgctaaggttgctcgactctgctccacggcaggagaaccaggctaagctcatccattatgtcaccacatcccgggaactgttagagcagctggcagcagaaactacatcagaagggatatcaagtgtttcaaaagtcaaattgaatgagtattctgacaagattgaagaacttgctgcaaggcttgcttccaaagtgccagatgatgcacttaatgagatacaagaagaatactcttccgaagtggaacatgtaagaagtccaatagccctatcctcaggattgaagaggagattaactgctcaagtagaggctagagaaactgtcagcgaaaaagaaagagatgttggagcacctattagattggatgcagacgcccaagctcagattgaaaaacataagaaaataactaagaacttaagaaaaaggttttaaaaccgaaaataaagaaaaaataaaggttaaa

SEQ ID NO: 27694 - DNA, 1478 bp, Setaria italica
  misc_feature (104)..(104): n is a, c, g, or t
  misc_feature (1420)..(1478): n is a, c, g, or t
  Peptide Sequence Number=SeqID_93668
aaagtacttgttgttactcgattatgcttactcactatacaaagattaagagattttctatcaactctagaatttgtatgtttcaatcaatttcatttaatagntaacatgctttttagctcaccaaactgattctcatttttcttccaaatactgattttttactgatctggcctccagtgtagagagtttttgcatctgctattttgatcatcgtttatgttattgtttttcacatctgttgagaatgcattcctcttaattcagtgtttcaaaagtcaaattgaatgagtattctgacaagattgaagaacttgctgcaaggcttgcttccaaagtggtatgctttttgtttatcctatcagtcttcacttttgtatgaaatacatcttttcgagattttacaattatatgttctggtatttttcaaaagctggctatttgatgggctataaatggatggattcctttggactttagagttgttctggccttcataccacttttgaaaccgtcgtgcatttttactcttttttcgaaatgtagatgctccgccatttagatctgattgcacaaacattagcactttctaaatactatatttttacggttcagccagatgatgcacttaatgagatacaagaagaatactcttccgaagtggaacatgtaagaagtccaatagccctatcctcaggattgaagaggagattaactgctcaagtagaggctagagaaactgtcagcgaaaaagaaagagatgttggagcacctattagattggatgcagacgcccaagctcagattgaaaaacatagaaatctgcaagaaggttttaccgatgaaatggttgaattagctcgccaactgaaggagaccagtcttttaatgaaccaatctgtgcaggagactgagaagatacttgattcaacagagagggttgtggagcatagcttggcaggcaccagtcatgctaatgcacgtgcagtggaagtgtattcattgacctccaagacaacatgtttccagtggcttctgctttttgtgatgacctgcatgtttttcatggtggttctgctcatacggattacatgagaccctgggactcacatacagcacatgatttttgcttcttgaaaatggtgttccagtcttactaagaccatgaaagatgctgggcactttctctaacaaggttccaactgccacacaaatatatattgcacaatggttgctgaccgagtcatgtgaataattcctccttttttggatagctgtattgagttgtgttcactgtatatatgccctatatggattccatgtttttagctaatgaatagaaatgtgactgattactggaagtgattaaactgtaactgcaggaatgccaactgaaatacaaatattgagccaaaagttnnnnnnnnnnnnnnnnnnnnnnnnnnnnnnnnnnnnnnnnnnnnnnnnnnnnnnnnnnn

SEQ ID NO: 27695 - DNA, 331 bp, Setaria italica
  Peptide Sequence Number=SeqID_93669
cccacggtcgcctgatccgtctgcgtcccccgcgcggagcccggcatcccccgcgagacgcggcccgcactcgccgcagcggcgtgtgtctccggcgcagtccccgaagcagcagccgccgccgcagcctttcaggaggccaagcggctttgactccgcgggcgcccgtgcccgcattgcccgccgcgcggcgcagaacgccgcggcgctctctcccgacgacgaggcctcaaccaccttttccgacggcggcagcagcagctccttcagcgcctcctcccgctgggacttggagccggtaggcctccatgaccattgctgaaatcacaac

SEQ ID NO: 27696 - DNA, 332 bp, Setaria italica
  misc_feature (299)..(299): n is a, c, g, or t
  Peptide Sequence Number=SeqID_93670
ccccgttcgagttcccggatccaagattctagattggcgagttgggagttggggtcatggcggcagccgaggccgtggcaatggcggagcaggtggtggcggacctccgggagaagtgtgagacgccgccggagctgctgcgcgaggtggcgtcggcgatggcccacgagatgggcgcggggctggagaaggatggcgggagcagggtcaatatgcttctctcctacgtcgataagttaccaacagggagagaggaaggtttgttctatggattggacctaggaggaacaaatttccgngtcttgagggtgcagttgggtgggattgagaag

SEQ ID NO: 27697 - DNA, 736 bp, Setaria italica
  Peptide Sequence Number=SeqID_93671
cgaagacgcgagagaggcaggcggctacgcgcagcaagcaaaccgcccccaaatctgagaaacccccaatccccaaaccctaggcgagctcggcgcggcggcgatggcggcggtgggcatgcggaaggggaacgcgcgtctcccgccggaggtgaaccgggtgctctacgtgcggaacctgccgttcaacatctcgagcgaggagatgtacgacatcttcggcaagtacggcgcgatccggcagatccggctgggcaacgccaaggacacgcgcggcaccgcctacgtcgtctacgaggacatctacgacgccaagaacgccgtcgaccacctctccggcttcaacgtcgccaaccgctacctcatcgtgctctactaccagcccaccaagatgtccaagaaatccgacgtcaagaagaaggaggaggagattaccaggctccaggagaagtacggaatcgggtccaagacccctggccccggctccagcgactgagcgaccaggtgtattgcctttgtagccgcttgcttgtatggagaagagtaatgagagggaacgaattggtagcgctgtgttatgtttcatccagtgttactaattaccgtgttgttatgctgtgaacatcacaactgaatagatatgtgcttatcatgaacctttaggtgtgcttcagtgcctgttcctacttgtgtgcttttctaattgcctgcatgaatgtttaatcctaccaaaaat

SEQ ID NO: 27698 - DNA, 242 bp, Setaria italica
  Peptide Sequence Number=SeqID_93672
aaacaactagtacaacttactccagatagatgaataaaacatgataatagttctatgtactcctttgtaaggccaaacatgaaagaagaattcagaatgagataaataactttgcaacactgagaatcaaggagagggatagcaataataatgttctgcaaggaataaatctgatcacttctagtgaagtccaaatcaattaatcagtaactattgaagattctatgtgttagccgagccct

SEQ ID NO: 27699 - DNA, 753 bp, Setaria italica
  Peptide Sequence Number=SeqID_93673
taaacccaaactagagcacagtggataatgcacgcatgtttcaaaacaaggctaaccgggcactggaacagggcagaatacacaatctcaccaagagttgcatctagtcctaactcctaccagggtgacagcatctagtttgtcataacagagttacatgcatccaacatcaggcatgtagcatcgttgcgccgcaaatgcaagtgagcactagcaccaaccgatcgtccgaatctgacaacaacccactgtggtctgggaatctaggttgcagtaccattagcaacttcttctctaggactcagcaacatccttggatcatgcccacgcatccatggggctatggggaccagtacatgtgccgatgaaatccaaacagaggttcaggtttgcagagtgttaaaatatgctactcttttcgtttagccacaaacagtttgctcatatcttcagtaacaacgttgctccttccacgaagctgcggaggaattagagcgttccctgcagcacttcttacaacttggggttgtggttgcgtccttggaaatttactgcgtgagtcatgaagcgcggatccatttgattctctcttccttgatgcattctctgtagggggagcaaagagatctgcaacatctggtaggtctaatgatggtgtgggcagggagacattactcgaactaatgggtgctatgttctggctgggtgcaggcggcggcagcggcggagtaggctgaggagaggcacccaacg

SEQ ID NO: 27700 - DNA, 489 bp, Setaria italica
  Peptide Sequence Number=SeqID_93674
gacgcgctcctcgccgcagcaggaggagagcccgtccatgaagccgagcacccgcgccgtcctggccgccgccgtctcgccgtcgccgccgcggaggtaccggtcgaggtcctcgacgaggatgagcgaccgcggggcggtgtccaggagcagcgcgcgagggtcgtcgtcgcagccgccgcgggacaggtcgatgtcgtagacgtcgtagccgaggaacctcgccatcgccgcggcgaaggtggacttgccggtgcccggcgggccgtagaggaggtagctccggcgccaggcgcggccgaggcggtggtagtaggcgcggcccttgaggaagctctcgaggtcggcgcggacacgggccttgagctccgggtccatggccaccgcgtcgagcgtggccgggtgggtgaagggcgccgacgcccaccgcggcgcgccggtggtcccgtccacgccggtgttggcgaagagccgcagctcgcgccggcg

SEQ ID NO: 27701 - DNA, 234 bp, Setaria italica
  Peptide Sequence Number=SeqID_93675
tctccttccttagactgcaccagaaaaagaaggcaaatttgaataaataaatcatactggcatcagagaaagaaaatagctcatgtcacagcattttccatacactattcctgtccagatttccatacaggaacggtgtacccttggcaggatattatctaaaacatatttgataattgttcaacatgccgttctcatttaaaaacaaccaaacctttagtgcaactattagct

SEQ ID NO: 27702 - DNA, 635 bp, Setaria italica
  Peptide Sequence Number=SeqID_93676
taatggagaggagaatttttgttgctacatccttgtaccttatttgtatgtatgcagcttcaagacatataaggtacaaggatgtagcaacaaaatagaatgtctaaaatctaatgagccgcatagatacagttacaacattctccaagacctttgttgtctcctgggctcttctttctttcaggctcgagcaccacaaatagaagtttagttcaactacagccaaaagtgccaaacaacatccgagtctccgcgggactgcaactttgtgtccgctgttccgtctttgtgtcagattccaactttgcgggcactggcctagactgcagcttcagtgctgcactgcacaaacaagattttttgaagcagaagaataaaaaaagaaccagagtcatgtgttttcaagaaggagaaagaaacagagtcatggcatcggctgagttgggttcaaaaagttcagagagctactggtgttaaaccatgggttcagatgcagtttaagcatggtgcaccttcatattggtaggcttgtgtcattgtgtgcacatgtatgcagagaaagaatcaatttactttctattgctgtatcattacatatagtgatatagcaatagaaagtaaattgatttctttct

SEQ ID NO: 27703 - DNA, 164 bp, Setaria italica
  Peptide Sequence Number=SeqID_93677
tgagctaagaatgttcaggagagcaaccctgctttgaatcaacctcctgaacagaaactcaatcccatcttcaagatctcctatgctgcgctcaagcgcctgcaactgccgctcctcacaagcaaccttcattttctggaacttcctggagacgagagaccatt

SEQ ID NO: 27704 - DNA, 772 bp, Setaria italica
  Peptide Sequence Number=SeqID_93678
ttcgggaaggccgcatcatggctagagccccggccccgctgctgctcctcgcgctgctggccgccctcgccgcggccgccggcgcaaatgcggccgggaggaagatggtcggcgtgtacgagctccggaagggcgatttctccgtcaaggtcaccaattggggcgccacgctcacctccgtcgtcctgccggactgtaaagggaatctggctgacgttgtcctcggctatgacaccattgctgattacgtgaatggcagtaattatttttggagcgctcgtcggccgcgtagccaacagggtagctaacgcgcgatttgtgctcgatggaaaagtctatcatctggtccctaacgatggcaagaatgccctccacggtggtaagagggggttcagcaaggttatttggactgtgaaggactatgtcggtggcggtgactccccgtacatcacgttgtactaccacagcttcgacggcgaagaagggttccccggcgacctggacgtgtacgtgacgtaccggctgttgggccgctacgagctgagcctgcacatgaacgcgacggcgctggacaaggcgacgccggtgaaccttgcgaaccacgcgtactggaacctagccgggcagggccgcggcgacatcctcggccacaccgtgcagctgttcgcgtcgcggtacacgcccgtggacggcgccctgatcccgacgggcgcggtggtgcccgtggccggcacgccctacgacctccgcgcgccgacgcccgtgggcgcga

SEQ ID NO: 27705 - DNA, 1089 bp, Setaria italica
  Peptide Sequence Number=SeqID_93679
ggggcaggtatctcaaacaggcaaaactgaatgacgggttgctagagatgtttcgcaatgagtacataggtgatacaccatatatatcatgcacaccttctctttgccaccacaagctctccacaagggatcaatttctggttctttcttcagacggcttatatcagtacctgagcaacgaggaggtagttctacatgttgagaatttcatggagaggtttcctgagggtgatcctgcacagagtttaattgaggaggtactctcccgtgcagcaaagaaagccggtatggacttttacgagctattagatatacctcaaggggatcgcagaaaataccatgatgatgtcaccatcatggttatttctctcgaagggagaatctggaagtcctctggaacatatgtgtgatgttcagctgatgcatcgtcggtgtcagtatttattctgatgcaacgttcagctgaaacctcttcagccggtcaacactctcaggcaattgcatatatgctcatcaagagagaaaagtcagcatggcatacagatatgcagtcctgatacaagcggaattatccagttggagatcattgctgatcctgatatcagctttggcacagcttatgcccatgagttaactccgagacacattaaggttgcagagatctgacagcccaggtggggaggaattccttggcaaagcagagccaatttcgctttgtttgctgccacagctttcgtcggttccgtactcaccgctgacaattttttccacctcactgtgctgtcatagtgtgggtgttccattccatccttggggaaagaagacctgtaggtacatgcagtttttttcccattcgtgtgaagaatgagcctgtattatatggaaaactcgaactggtcaatggtcatggcggagaaattgatgattggcacctcaatttgtcctgaaggtggctctccttcgagtcttagatagttctatgtatgagattgaggtccctaaaagaatgggccagatctgttagtggtcgcctcccggcaaaaactacccagtgccttcttgctcttagcaagttccttgccttctagt

SEQ ID NO: 27706 - DNA, 341 bp, Setaria italica
  Peptide Sequence Number=SeqID_93680
gcgccaggactgtaagagtagtgaggtgaacaagtaggatgggcactgaccggcgagctgcgagattcgtgtcgcgggatgggtagccgtcgaactcaccggagcggagggcggtggcgacggcctccaccgcctcgggagcggtgcggaaagaggggcacgaggagggatccccgacgctgagcgggatcacgggccgcgggccgcgctcgtccaggcagccgtgcaggtcaaggaggtagcgccggacgctccgctccccggcggccgccacggccgggttcggcgacgcgaagcgccatctcctgctgctccggccaccctccatcgctccgcagcag

SEQ ID NO: 27707 - DNA, 389 bp, Setaria italica
  Peptide Sequence Number=SeqID_93681
ttgcagataaaaagtttgcaagttggcagcatcggagagttcctatcagctgctttacagcctcctgaaccactagctgtccaaaatgcagtggaattcctgaagatgattggcgcattagatggaaatgagaaccttactgatcttggacgttacctttccatgcttccagttgatccgaaactgggaaagatgcttataatgggctcagtttttcgctgcatagatcctatacttactgtagtcgctggactgagtgttcgggatcctttcctgttgccacaggacaagaaggatttggcaggaactgcgaaatcaagattctcagcaaaggattatagtgaccatatggcccttgttcgggcttatgaaggatggaaggatgcaga

SEQ ID NO: 27708 - DNA, 286 bp, Setaria italica
  Peptide Sequence Number=SeqID_93682
cgccgccgcgtattggcttagctgcttggggtcaccaatggcgtccaaggcggccctcttccttgccctcaacctcgtgctcttcgtggtaaccaacgcctgcccttactgcggcgggggcaacaatggtcacggtggcagcgggggccatcatggcggcgggggcagcggcggctacgggggtggcagcgggccgggtagcggcagcagcggcggcggctggggaggcaacaatggcggtggtggcagcggcggcacgagcgggtggtacggccactgcccgacg

SEQ ID NO: 27709 - DNA, 368 bp, Setaria italica
  Peptide Sequence Number=SeqID_93683
gtagtagttgatgtcgacgacgacacggccgccgctgatgtcgccgacgaagaagtcggggcggaggcccaggccctcgcacagcagctgcaggatctccatggccaggcctcttgccagcccggtgtagttcccaacaacctccctgagcctctgcggcttgtggggccagcccgaggtgtcgccggagggcagggggtagaggagctcgaggacgtccagccagtacttctcgcgccgagggtctcgaagctggagccggagaagagcctgctgcgaatgctcttgtcttcagagtaaaactcagccttgtcctccgtgggcatctggaagaactcgtggcacaccgcatccatgtcccgcatcac

SEQ ID NO: 27710 - DNA, 264 bp, Setaria italica
  Peptide Sequence Number=SeqID_93684
gtctattgttatttttaatccaagtgatatcataagaaatgaacatattgctgatccttttctaagcatggtataccaggcattaggtatatatatagagagaaaagagaggtgtttacatttgagtctgagttcgctttcacatctacggtgatgttcttgttctttatctgtgactggatctcaccaataatcaggtcagctttcttagtgctagtagctgtgacagcgacgccattggaggtgtaggtggtgagagtgaac

SEQ ID NO: 27711 - DNA, 322 bp, Setaria italica
  Peptide Sequence Number=SeqID_93685
cggcgccctcacgctctgccgctccgtcgtgcaggcagcctgctacccgctcgccgcctacgccgccgcgcgccacaaccgcgcgcacgtcatcgccgtcggggccttcctctgggccgccgccaccttcctcgtcggcgtctccgacaccttcttacaggttgcaatctcacgaggcctgaacggcatcggcctggctctggtggtgccctcgatccagtccctggtcgcagattccaccgacgacggcacgcgcggctcggcgttcggctggctgcagctcgccagcagcctcggcgatcccgaggaccgtggtctgcgc

SEQ ID NO: 27712 - DNA, 298 bp, Setaria italica
  Peptide Sequence Number=SeqID_93686
gcgccacggctggccgtagagtttgtggacgatgaggtcgaaggggccctgctcgacgagcgggcgcgacgcgtcgacggccacgagccggatgccatgccgcgccgcgaggtcaatgaacgacggctggacgaaggtgtcgtgcttgttgggcagcatcgcgtagccgatggtgtaggtgtggtctgcgggggaggaatgctccgccatgatcgagcttgatcctgttgcttcaactgctcgtgtcgtgtcctagtgcaaagtacacactacatagtggatgatatgcctctcgcaa

SEQ ID NO: 27713 - DNA, 234 bp, Setaria italica
  Peptide Sequence Number=SeqID_93687
aaacacttttcacttgcatatctgacacatcagtcctttctgaatatgtgtattctcctgaagagcgatccttggtagagtttgcagagctcaacttattctcaagggaatctgacgtgaaagtagagctactgcttaggctactttctcttgcacaatcaaaagaaagaccagcatttcgtattccatctatgtgttgggcctgagatccatgctgtcctggagataccaagg

SEQ ID NO: 27714 - DNA, 322 bp, Setaria italica
  Peptide Sequence Number=SeqID_93688
atcgaaggcgcgttgcgtcagaccgagcgcgaggtttcggggaagcaagaggaatgaatgctggggccggggaagaggggggatggatttgcggtgggttttgtggagctctgcgggggtgcggtgccggcgcggcggatgccgtcaggcgaggaggaggaggaggaggtagtggaggggtgatgtggggatggcttgtacgcatgacgaaggggatggcgcggggttggcaatggccatcgccggaagcaacccgatgcttgtcactccatcccccgggcgcgcgcgcgtgtggatgtggtgtgcactgctgcgatgtgtg

SEQ ID NO: 27715 - DNA, 768 bp, Setaria italica
  misc_feature (766)..(768): n is a, c, g, or t
  Peptide Sequence Number=SeqID_93689
cgcgtcctcgtcgccgtgaacgccgtctcctcgctggctgccgccgccgcggccgccgtcctcggaggggacgccctcgcgaccgtcttcccgcgggtctccggcggcgacttcccctgggccgaaccgttcaacgccgtgtccatccagctctcggcgctcgccgtctccaacgccagcgaggtggacgcgatcgacgaggccgtccagaggctcgcgtcggtgctggacggcaagggcggcggcgacgaggcggcgctgcgcgccgcggcgcgggaggtggaggagcggacggaggagctgacggcgcggctggaccgtctgtcggacgccgtcaacggcgtgttccgcgcggcgctgggcctccgcaacgccgagctgggcgccttcatggcgggacccgccgggaagacgtgtgtatagctgtcactccacctctgactgcaagcgtgcgtgtagctagctatacacgtggctattgtatactgctacagttgagttctaatagtgttctgctacagggcaggctgggtaagtgtcgtagccgaaggcaggtttgggtgggcgagtctgttagtaaaaaattgtgtgtcaaagaggaggccacatacgaggatactttgcattttgcacccttttgtgtatgtgggaccgatgctttgtggaaaggaaaatgtgttacaaatgttcaatccgtctctgtaattttgcggcatataatagtatgtacttatgtatgaggaatttgagatgctaaaaaaaaaannn

SEQ ID NO: 27716 - DNA, 266 bp, Setaria italica
  Peptide Sequence Number=SeqID_93690
tggttgatcaggtactggttgtagatcctggcgttggccgcgttcgcctgctcgccgccgccggacgttctccatcgccggcgccaggttctgagccgcgccgccggcgacctcgttgccgacgcagatgtagcggaaggacacggacgggtacgcctggatgttgttgcggacccaggacgcggcggcggcggggctggcggcgatgttggagagcacgtcgttgggggcgccgacggtgacgctgatgcccgtgccgcccacgg

SEQ ID NO: 27717 - DNA, 207 bp, Setaria italica
  Peptide Sequence Number=SeqID_93691
cattacacaccgtatatatgtacatgtgttacagctggtgtacgtacactgttgtacctcctaggcacgtgctgcgtacgtacacctgtgtatcttatccatcaccggagctctcgtctatgattaagtacgtatacggggtacgtataagtgtacgtacatgtagattatgtattgtactgggggcttgctttgcgaccgctggga

SEQ ID NO: 27718 - DNA, 408 bp, Setaria italica
  Peptide Sequence Number=SeqID_93692
acggacgaatagttaggaagaagcaacgtcgttgggggcgccgacggtgacgctgatgcccgtgccgcccacggcctggagtgcgccctggtcgggggcgtacagacgcatcgccgagatgccgttcgccttgtacatgtcgatcaccgtgctcgccggcggcaggttgttggcgctcatgccgtagcacacgccgatggcctcagcacctacatacatatatattaaattccccttttcagtgatttggtagagctagagctagctcctgcctctttcgcgagaaaagattgatgtggtgtagcactgcagctgacaatgcaatcctgactagaccaagaccactcagctgcaactgcaaccttatgatttgcacctggtcgccagaactagctaaccctattcatg

SEQ ID NO: 27719 - DNA, 648 bp, Setaria italica
  Peptide Sequence Number=SeqID_93693
agcttgagggatagagagagaatggcaaggcaaggtgtagcctccatgttcgccatggcattgctcctcgggtctttgcatccatcccacaaagtgctgaggccatcggcgtgtgctacggcatgagcgccaacaacctgccgccggcgagcacggtgatcgacatgtacgaggccaaggggtacatgggccccgtgctgtcgttcctggcccggaccgggtcgccgctgatggccaacatctacccgtaccttgcgtgggcctacaacccgagcgccatggacatgagctacgcgctcttcacctccaagggcacggtggtgcaggacggcgtccaccgtcgtgtcgaacaggttctggtacccgtaggcgccgtcctgcaccaccgtgcccttggaggtgaagagcgcgtagctcatgtccatggcgctcgggttgtaggcccacgcaaggtacgggtagatgttggccatcagcggcgacccggtccgggccaggaacgacagcacggggcccatgtaccccttggcctcgccggtgaacctggcgccggcgatggagaacgtccacgccgcgctggccgctgccgggctcggccacatcaaggtgacgacgtcggtgtcgcaggccatcctgggcatgtacccc

SEQ ID NO: 27720 - DNA, 400 bp, Setaria italica
  Peptide Sequence Number=SeqID_93694
ttttacatatatacggtgtgtaatgtacatgtgttacagctggtgtacgtacactgttgtacctcctaggcacgtgctgcgtacgtacacctgtgtatcttatccatcaccaacctctctatatacgtactagctaggaagggagatcaatcgacgatgcaccgtatttatctacggtacgtacatctcccttcgacgaatacatagaccgacatactcactcacggcgtacgcatctgggagcaccatttggcactcccagcggtcgcaaagcaagcccccagtacaatacataatctacatgtacgtacacttatacgtaccccgtatacgtacttaatcatagacgagagctccggtgaatcaagaaagactagaataggggtaagaacgtagacta

SEQ ID NO: 27721 - DNA, 837 bp, Setaria italica
  Peptide Sequence Number=SeqID_93695
aggaggagagagagagagaggacgacatgctagagagagagagggagagacaggggatcggagagggagagagggccagaggcggccggatgtgaggataaagctcttggtccaacgtccgcaccacgaccgttggatagtccacgtatgatcgatgtggatcgccaaagccgttagctagcgcaggcggcctagctagctctctctctcacacatacgtgcgccacaagctaattacctgcctcttcacatattttcagcttatctatctaaccgccatgacacctatgtgtatatatatgtacacatacctacatacatatatattaattccctttcagtgatttggtagagctagagctagctcctgcctctttcgcgagaaaagattgatgtggtgtagcactgcagctgacaatgcaatcctgactagaccaagaccactcagctgcaactgcaaccttatgatttgcacctggtcgccagaactagctaaccctattcatgaatgattatcaatccattttaagtctaatccccaattgagttggttatgggatagccaaatcagaccaacagcattaaactcgatcgatcatcctgcaccaccagccgctagctagctaatcaacaagcttgaagaatggagcagctgacgccgtacacatgagtagccggccggccggccggtgcggcatcatgcgtcgccggccgttgacaaagcgtcaagtgacgcgacgacgacggccggcgaaccgccgccggtggagtggtacgacgcaacggaatgaaaaggatggcggcgagcgaagggtttggtctgcaggttgattgcgc

SEQ ID NO: 27722 - DNA, 1408 bp, Setaria italica
  Peptide Sequence Number=SeqID_93696
tttttgagaaaatgaatttaaattgtaatatataaaatgcgaaacagtacaataattgatcacaagtcgtttgtaccatgcatgatctctcgaggtaagaataatcctcaaggcgtacgcatctgagagtagcattcggtactcccagtggtcgcaaagcaatcccattacaatacacaacctactgggatgcagaattataaatgttgcatatatacgtatacgtatatacttattgatgtacggtgagtagtagatcgagaggatggagtacgacgtggagctcgagagagctaataagctagcttcatcagttgaagctgatggggtagacgcgctgcttgttggggtagaagaggccccagttctgctccacgccgctctccttgaggttctcgttgaacatggagaagaggatggtctcgatggcgcccgggtggcgcggcgttccccggccgacgtggttgatgaggttctggttgtagagggccgcgttctccggcgacgccgcgactccgccggcggacggccacccgctctccgacacgacgagggtcacgccggcgccgccgtggttggccatcgccacgtagaaggagtcgacggtggcatcgaagaggttctggtacccgtaggtgccgtcctgcaggacagtgcccggggcggtgaagagcgcgtagctgaggtccatggcggacgggttggtggcgtaggtgaagtaggggtagatgctggccatgaggggcgcgccggtgcgggccaggaactcgaggacggggcccatgaacccctgggcctcgtcagtgaactcggcggcggacggcggcttgtacccgcccaggatggcctgcgacaccgacgtggtgaccttgatgccgtcgagccccgcggcggcgagcgcggcgcggatgttctccatggccgggaccaggttctgggccgcgccgccttcgacctcgttgccgacgcagacgcagcggaaggtgacatcggggtaggccgcgatgttgttgcggacccatgcggcggcggcggcggggctggcggcgaggctggagagcacgtcgttgggcgcgccgacgacgacgcggatgcccgttccgcccacggcctcgagcgccgcctggtccggcgcgtagatccgcatcagcgggatgccgttggccttgtacatgccgaccacggtgctcgccggcggcaggttgtcgccgctcatgccgtaggacaccccgatggactccacgcttggagcgacgttggcaaagaccccgaggagcaatgctgtagccaacatggaggctgcgccctgccttgccatcttctctcctcgcagacccctgcctgtcgtcaggaggctactgttgaatcaactggcttgtgctcacacgtctctaccaaaactctgcgc

SEQ ID NO: 27723 - DNA, 1558 bp, Setaria italica
  Peptide Sequence Number=SeqID_93697
ttttttttttttgtttttttttttttttttgatatctcaaaccgtatatttaatttacatatatacggtgtgtaatgtacatgtgttacagctggtgtacgtacactgttgtacctcctaggcacgtgctgcgtacgtacagctggtgtatcttatccatcaccaacctctctatatacgtactagctaggaagggagatcaatcgacgtattgttcaccgtatttatctacgggtacgtacatctcccttcgacgaatacatagaccgacatactcactcacggcgtacgcatctgggagcaccatttggcactcccagcggtcgcaaagcaacgcccccagtacaatacataatctacatgtacgtacacttatacgtaccccgtatacgtacttaatcatagacgagagctccggtgatcagaagctgatggggtagacgtgctgcatgttggggtagaagagcccccagttctgctccacgccgctgtccttctggttctcgttgaacatggagaagaggtaggtctcgatgccgccggggtggcctcggcgtgccgcgcccgacgtggttgatcaggtactggttgtagatcctggcgttggccgcgttcgcctgctcgccgccgccggacggccacccgctctccgacaccaccagcccccacgccggagccgccgtgccggcccatggcgaagtagaaggcgtccaccgtcgtgtcgaacaggttctggtacccgtaggcgccgtcctgcaccaccgtgcccttggaggtgaagagcgcgtagctcatgtccatggcgctcgggttgtaggcccacgcaaggtacgggtagatgttggccatcagcggcgacccggtccgggccaggaacgacagcacggggcccatgtaccccttggcctcgccggtgaactcggcggcggagggcgggctgtacacgcccaggatggcctgcgacaccgacgtcgtcaccttgatgtggccgagcccggcagcggccagcgcggcgtggacgttctccatcgccggcgccaggttctgagccgcgccgccggcgacctcgttgccgacgcagatgtagcggaaggacacggacgggtacgcctggatgttgttgcggacccaggacgcggcggcggcggggctggcggcgatgttggagagcacgtcgttgggggcgccgacggtgacgctgatgcccgtgccgcccacggcctggagtgcgccctggtcgggggcgtacagacgcatcgccgagatgccgttcgccttgtacatgtcgatcaccgtgctcgccggcggcaggttgttggcgctcatgccgtagcacacgccgatggcctcagcactttgtgggatggatgcaaagaccccgaggagcaatgccatggcgaacatggaggctacaccttgccttgccattctctctctatccctcaagctcgccagctctccctgtctttcgtggctatgctaacacgtctctccaacaagccaagaaagactgtttctctcttgtgcaagctagctgaagctcctgagactgccaaga

SEQ ID NO: 27724 - DNA, 1443 bp, Setaria italica
  Peptide Sequence Number=SeqID_93698
ttttagttaattaacctaaaacctaaaagttagtaaaaacgtaattagtagtaagtaattgagcaactcttccgggggcctcctccctaagaccacagaccatggccacggagctagatgtgagcaagtctcgccgctttgacatggccatgtcgaggcggacacggcgatcgacgagcctggtcgcctgtttccaagatcagtatgtgccatccctggcacaacaacgccaccaagagctgaaggagtttctccaatgccaagatgcagagctgaaggcactccagcaatgtgaggatgcagagcagctggcactgggtctggatgaagatgaggagtcgaagattccacaagcaccactccagtatgaagatgacgagcaaaagacaccaaagcagtatcaagatgagcaggagaagaaatatcagcaatattcaggtgcagagcagaagaaaccagagcattatcaatgtgaaaaggagaagaaaccagagcagcataaagatgaagaggagaagacgccagagcagtatcaagatgaagacgaaaaagcatcacaataccaagaagaagtgctgatgataccaaaccaaagtgaaaacgatgaggagatgacagcagagcgttaccaactacgccaagaggcagatgagaaggcgtcagagcagtctgaagaagatgaggagcagcagaaggcagagcaggaatggtgcaaggcggagcagaaggagccggagcaattccaaagcgtgaagaagctgcccttgccaccgcgtgctgtggacaacgtgccccggttctcccttcaggagctgatacagcagaagcagcttcaaaccggagagacaaagcctaccaacaagctaggcggccacggcgagagtgcccttcctgaccataaggtttcaggatcaggaggaggagcagcaggcggcacaacgctggccatggtgataaagcgacccgagggagggaagaagtcgatggggatgatacgccggtgcgtgaaggccctgaaccagatgatcaagaccaagcatgggtccaagaagaacttgcatttgtaatttgagcagaattcatgtacgtgtgatccagactcgagagtttcgtagtggactgcacatctctgaagaatgcacgcgcagttgtgcagaaccaagttttgggcatgattcagagtgtgcaagatctggtaagaaactccgcagccataccgggctttttacgctccggtctattaccgtctacctatagcaataaacagtcaaatactcaaatttagctgaagatcactagtctgttactatgtgagaaaatgctctactcagtgatgtttaattgtacactatttgctcgacgatgtaaagggtaaaatgtcaaaggaatcgagattgggctctgaacgtgtgttgttgttgacttcctctgacaaaaaaaaaa

SEQ ID NO: 27725 - DNA, 289 bp, Setaria italica
  Peptide Sequence Number=SeqID_93699
gaggacaaggcggcaggcgccctgtcgtacatccccttcggaggcggcaagcactggtgcatcggccagctcttcgcctacctggagattgagacggtgtgggcgcacctgctgaggaacttcgagctggagctggtctccccgttcccggagagcgaatggaactcgatggtcgtcggcgtcaagggcgagttgctggtgaagtacaagcggcgcaggctcgtggttggaaactaagaccagcctggttctcgtcgccccagctctgtctaggtgtttcagttgttcc

SEQ ID NO: 27726 - DNA, 408 bp, Setaria italica
  Peptide Sequence Number=SeqID_93700
atcgagcatgtttctccagcagtttgccacattatatcttttttttagcttcagtttaccttctttcatccagtccttttctatctatgtacatggacagaatgaaaacccagtagacggcactataccatgtcatgcttgctcatgctcaacggtgctcttcttggatgcactagattgagccccacgcatcctcaaactgataataaacgcaatgagggtgcacaagccggcacacaaaatactgaaacctttaaagttgaagggccctgtttcagaaaggaaccacgcagtcaagggagtgaaaatgaggggacctagtatgctctagaccgaactgaaactagatatacatccttgagcaattccctgctcatttgatgcgactattttttgatacgttggttt

SEQ ID NO: 27727 - DNA, 193 bp, Setaria italica
  Peptide Sequence Number=SeqID_93701
gggttcagactttatctctaccacttattaaagccaagatattttaacctctagttggccctgataagatcatctaacacgtcgtagctgaaccgctgaagcctgtgaggtatgcgctgagtgggcagcaggtgccctattacacatgaacgatgacaaacgcactcacacatacaacgtagggtttatagat

SEQ ID NO: 27728 - DNA, 187 bp, Setaria italica
  Peptide Sequence Number=SeqID_93702
agactagttaggtacaacaaggaaagatgatgacgacagcagagcaaatctggaacttcggtcgcagcggtaacagatctggtcatgctgttggtcacaggaaagatgatgacgacaactaatcttgggttgccgttaattggatttcctggtgttcatactgtgcatgtgctctccacgaagaaag

SEQ ID NO: 27729 - DNA, 666 bp, Setaria italica
  Peptide Sequence Number=SeqID_93703
cacacatgtaactttcacatattccatgtacacatagaccctctgtttcatcagttctctgcctggatgcaaaacaaggttcatgaaatacaagacggatttatttggtggatatgcaggcttctgtccgagcatgccatgaattggagggtatgcatgaacagtaaaagagaatagaaatatgcaccaaggggaaggacggaaaaaaaaaagcaagtttactgcagataagttctcagtgggacgggtatgtgaaggttacatgtgtgttgctcggagttgtgtttgtgtcttcgatcagggaatcatggcgcttcagagtggaacagtatgatcctgggagcgccaacgaaaaagatgaagccaggaggaagactgaagaactgaagaaccgaaggattactgcgattgatgagtggaagaaggaaagaagcagcagagaagggcaggtgatactggtactctttgtaaagtaagatgtaaacttgcaaatatgtctatccattggcagctgtggtatgtcaatctgaactccatagcagcatgctactgaatttccaagaaattacagtctctattctcttttactgttcatgcataccctccaattcatggcatgctcggacagaagcctgcattattcctacctaaattaaattccgttct

SEQ ID NO: 27730 - DNA, 249 bp, Setaria italica
  Peptide Sequence Number=SeqID_93704
tacctccaggcatagcgcagcgccgcacgttagatctcagggccagctaggttattctttcattgcttatttctttggcttctttaatttcacctttttgtctgtcacatcggctgttttaccttgccggggtgctcagatcggtagatctggagttcagcatgaccagatctgttaccgctgcgaccgaagttccagatttgctctgctgttggtcacaggaaagatgatgacgacaactaatcttgg

SEQ ID NO: 27731 - DNA, 2045 bp, Setaria italica
  Peptide Sequence Number=SeqID_93705
agcaatatgggtttttttttcgtatttttatggttctccattccattcgagcaagctcttcgtagtctgtcgatgttcttccatggattatcgatcactgagctttgttccagaaaggcaatcgattcctcattcctgataatggctcccttctgcttcttcgatgcatcccagtacgaagacgctggctaattcggagtagcagcgctcatctccccggcgacaactagccatagtgatggccgatttctcctggctgacggctcttggcttcctcttcttgacgttcaactccggcatggcagtgtaccgctccaacggcgacactggctcaatcatcttcgttgtggtctcctacctcgacctcgtcgccctgttcgcctgcctgcgctactacgagcgcctggaccgccactcccctaaacgagagacggtcaaggcagccgtatgggggcgtcacgactctgctcaccgtcatgtttagctacaaggttgcagaaatcatgaccctcgccgtcaaactcgtcgtttgggccatggcggcggcaacctcctgtgggggcttctacgctttcttcatccacgaggagaagccagcgctgccggcggcgggtgtccccgccgccgcgcacaaagagggcgccgccaactaacttaacctgctgccacaaggctcatacctccaggcatagcgcagcgccgcacgttagatctcagggccagctaggttattctttcattgcttatttcttggcttctttaattcacctttttgctgtcacatcggctgttttaccttggccggggtgctcagatcggtagatctggagttcagcatgaccagatctgttaccgctgcgaccgaagttccagatttgctctgctgttggtcacaggaaagatgatgacgacaactaatcttgggttgccgttaattggatttcctggtgttcatactgtgcatgtgctctccacgagaaagaggaatttgcgaccttatccggtaagtttactggaccgtcctcctgctcttgagttatttgtgtccggagaagtgggtggcacgggaagatggtgcagagaactgatgaaacagagggtctatgtgtacatggaatatgtgaaagttacatgtgtgttgctcggagttgtgtttgtgtcttcgatcagggaatcatggcgcttcagagtggaacagtatgatgctgggagcgccaacgaaaaagatgaagccaggaggaagactgaagaactgaagaaccgaaggattactgcgattgatgagtggaagaaggaaagaagcagcagagaagggcaggtgatactggtactctttgtaaagtaagatgtaaacttgcaaatatgtctatccattggcagctgtggtatgtcaatctgaactccatagcagcatgctactgaatttccaagaaattacagtctctatcttttttagacatatatgctcaaatctctggtcgaggccgcagctcaagcatgagtcctatcaaggtcctcggatccaagaacttgcttattaatctagaagatttcaacctccggttctaatgccctattcataaagatcatccgggttctctgcctggatgcaaaacaaggttcatgaaatacaagacggatttatttggtggatatgcaggcttctgtccgagcatgccatgaattggagggtatgcatgaacagtaaaagagaatagaaatatgcaccaaggggaaggacggaaaaaaaaaagacaagtttactgcagataagttctcagtgggacgggtatgtgaaggataatgcgattgaaaaatagcatcatggccgctccattgccaacgacgtggtggtagtgggaggtttcgtggaacatggaagcaccttaagtctatagtgcagggcacgacagaagggagcaataaaagaagagccacatgcacgccagcgagtattcgaggcgggcacgacaagaatgatgctatcgacgttgccagaagggaaataaaagaagagccacttgcacgccagcgggcacggacaa

SEQ ID NO: 27732 - DNA, 700 bp, Setaria italica
  misc_feature (1)..(32): n is a, c, g, or t
  Peptide Sequence Number=SeqID_93706
nnnnnnnnnnnnnnnnnnnnnnnnnnnnnnnngttaagctcaaatccactagcacttcttattcatttttacatgcgctgttacacatacgaacacacatcatcgcctcacgttcttaaaactactgcaaggtgcttgctctctcaagcagatagggcggccgaaaaaaggcccaaaagcgaaagagaaaaacgggccaggtgaagccatcaccgtcactcccggacgcgcagcgaagcggcggtctccgcaccactcctcgacgcaggtcgcgtactggatatacaaagacgtcgactgatatggacaaaactcctgagactgctaaaattccaggtcgatgaacacacgatccatcaggtcggcttcggcatggattcaggtcggctgcaccacctctcgggcgccacctccgctctggatccacgggtgccctgctcggcggagaaccttctggaggcgtcgcggcacatcatccggcgcatcaggtccttggccgccggcgagacccccgcgaagagcgcgggcgggaatctgaggctgcccctcagcacggccgcgaacacctccgcgggcgtctcgccgccgaacgggagcgcgccgccggagagcagcacgtacgccaccaccccggcgctccacacgtccaccttctcgccgtactcgccgccggccaccacctcgggcgccacgtagtcgg

SEQ ID NO: 27733 - DNA, 261 bp, Setaria italica
  Peptide Sequence Number=SeqID_93707
gatcatatgtgattaacacagtaaagcaagcccaacaccacagaagtgcatatcagttataccgatacaattaatgttttgttaggcttgctttactgtgttgatcatatgtgattagatcttgagcttatcctacacaaagactaggctaaacatatattcaaagttctgttcaccttgaatggtacggttttctcaatcctttctaggtgttatgtatatgtatatatctatctctgttgatgatagactagcctttta

SEQ ID NO: 27734 - DNA, 317 bp, Setaria italica
  Peptide Sequence Number=SeqID_93708
gcgacggccacgatccagacggccgtgccgatgacgggcggcatcagcggcgccaccctcgacgcgaacatcgcggtgagcagcgtcgcgagcgcccacaccgcggccttgatgatattcctgtccctggccgcgccgccgcgggtgcgctcgaactcgcggaggcagaggaataggaggacgagggcggcgtcggcggcgagcacgaaggcggcggagcccgcgccgccccacgagttgtagagggcgaccaccgagttgaaggccagggcgccgaagcctagcttggtcagagcggaatagcgccggccgtcgtc

SEQ ID NO: 27735 - DNA, 657 bp, Setaria italica
  Peptide Sequence Number=SeqID_93709
ccgtaatttttcaagtcgaataaaggtttgtgatatcagagctgagcgtgttgagtacttgagttcagtatataagattatacgttgagaaatatgattatatatccagtgttgtggaccaaggtatatactgtcaggttcatgtttcgattttttttatgtccttttctgtctcattccaagtttgaatggtcatcagatattagcataatttctaacttggtacatgctgtagcgtttgtggtccactgaggactttctcttgggtaatcgttgaactgccctgtgtggtctgactctgctagattcgtggtgaagctttgcgatccggctacaatgatgcccttctggggaggaaaacaccctgaaaaggatgtgccgatttcccggggttaggagacggacagggatggatggcataaaggaaaggatgacaaggagatgatgcatgggcagcagggaattgaagctgataggattgcttgtgtgcggtaatgaagcaagcacccagttatccatcatttcctcgtgaacctaaaaggaagaatcaccggttataatcgagtctgactcgacgaagatagcagcggctggagggagatgttgaaatagccctttggaacctgtgacggcattcgtttatttgtcgcatgtcgg

SEQ ID NO: 27736 - DNA, 326 bp, Setaria italica
  Peptide Sequence Number=SeqID_93710
tttggattcctagagctgaaagcttcgatggatagaattatagaaacatcaaatgagcatttttagtaaggaaaatgtgtggagatggtaatggaatttggcatttccttatctatcagtgagcattattcactacttagcttataattagcaaacaatttggttttataaaaccacccctttaagaacaacaaactttgaattccaatgtaaaaacagtatttaatttaaattgatgttcagtttgcactaatgatttgaatttcatgttgagaattgcactcgttaagaaacagacacgggtgtggacccgtggtattttttta

SEQ ID NO: 27737 - DNA, 229 bp, Setaria italica
  Peptide Sequence Number=SeqID_93711
ccccgggtccggcgacgagctgatggacacgctgaagctggcgctgcactgcgtggacccggcgccgtcggtaaggcccgaggcccgggaggtgctgcggcagctcgagcagatcaggcctggatcggatggcggcgccgggccgagcgaggaaggtgccggcgcgcatgtgccagtggcttctgcaggagacgatgagtagcagcagcagcagcacgagcgcgcggca

SEQ ID NO: 27738 - DNA, 845 bp, Setaria italica
  misc_feature (13)..(13): n is a, c, g, or t
  Peptide Sequence Number=SeqID_93712
cttctgaggttgngtttttgctggataagactcagtatggtacttcatccattctttcacctgaaatggctgaatggcaagggcctgctctctactgctttaatgattcagtttttagcccacaggacctttatgccatctcacgaataggtcaagatagtaaacttgagaaaccttttgcaattggaaggtttggtcttggcttcaattgtgtgtatcacttcacagacattcctggatttgtttccggggagaatattgtcatgtttgatccacatgcctgttacttgccaggaatatcgccatcccatccaggtttaaggataaagtttgtaggaagaagaatcttagatcagtttcctgatcagttcgccccattcttacactttggttgcaatttgcaacagccatttccaggtacactcttccggttccctcttaggaatgaggctgctgcttcaaggagtcaaataaagcaagagcaatatgcaccgcaagatgtggaaatgcttttctcttcattctctgaagttgtatctgaggctttactttttctccgcaatgttaaaaaggtaactctatatgtcaaggagaacaacagtcaggagatgcggcttgttcattgtgcctcgaagcataatagttctcagatggataaagaacctcatgcacttaatacaatgcttgcatatatacacggaaaccaaccatcaggaatggataggaatcaatttttcagtaagttgaacaggactaaagacagtgatttgccctggagttgtcagaaagttgctattcttgagcaaaatccgttctgtgcactgggtgcattcatggattttagc

SEQ ID NO: 27739 - DNA, 776 bp, Setaria italica
  Peptide Sequence Number=SeqID_93713
cagaaacaggtgcatcaaggtgcgaatcaaccggtttaccatcgacatgaggattggctgatgtggcaagagttatttcagaatgagtagcacggttatctttaaaaccactaggaagtgtagcttcattgatggggacagctataggtgtgcttggttgagaatcatatccagacttctcatgcgatggtaagttaatatttggtaattcattagaagtattctgaagtgaaccatcatctctttccttcattattcctgatttttcacttgggaccatgccagaacctacatcatcaatagtaacggatgtgctgtaacaagattttttcatagccgatctttgtctagtgctgactccagtatcctcactaccagatgttttctttctgcggcgacgtgaagcaggttgcttctcaacaggcttatctgccaccacatgtgatgtttccaccaaacctcctgaaaccacaggcatggtaggtgcagattccacttgaagcaatctaacattttcattaagagtatttggtgccagtgtggtagcattgtctgacatcacagtttcagcacatatatcttttgccacaggtgttgtaatggttgcacctttatctccttcatgaacaggagaaatacgcttaccgctatctggcaataatgtatccagtttaactgtgaccaaatccttctggattcctgccactgccacagcacttccttgtgatgggggagtattcacttgagtatatgaagaaacacaactagtgtctgac

SEQ ID NO: 27740 - DNA, 212 bp, Setaria italica
  Peptide Sequence Number=SeqID_93714
actctgaaattgatgattttccaaacacattggcaggagagtagtttaaacacccatattcaccttgcccaaaacaagcagaataaagggttttccatagcgtgggaaattgctggagacaaggacccaggttctctaatgtgcactgagatggcaaaccacgacttctgttcacacttcctgtacatatggatttctgtattggtgctgaa

SEQ ID NO: 27741 - DNA, 271 bp, Setaria italica
  Peptide Sequence Number=SeqID_93715
cgatcgatggcggggatggcgtgcgtgcgcctgacgggcacgccggccgcctccctggcgcggtagtcctcctgtaccgcccgcagcatctcctcctccggcggcagtgccttcttgccggacagcaccagcgcgatccatctcgcctgcgcctcgaagaaccacggggcgaagaccctcgtgggtatgccgacgaacgacagcgacggcgcgagcgccggcgggaaggtgtgctcgtacagcgggccgacgcggttgtcgcggacggcga

SEQ ID NO: 27742 - DNA, 653 bp, Setaria italica
  Peptide Sequence Number=SeqID_93716
tggcgccgccgccgccggtaacggaggaggaggacgacgaagtggaggagcggccgtggccgccgcggatgaagatgaagctggctccctacgcgatgtactgcgtcttctccggcgcggggccccgggggcatatgctcggctgcgcctacgccgggctccactgcgcgctccagttcgccaggttcctctccctctcgccggtcgccgaggtcgccgccctatggggccccgtcctccgcgtcctccagtgcctgtgctacaccgccaccgcgctcatcatgtgggtcttcatccgacaccacatgaacgtcgacggggtctacgtcgtcgagttcgatccaccgccgcagctggcggcgccggcaacgacgaccgtggtggagcagctcccgcctcctccgccggagatggacatgtgctaggttcggtttggccccgtgaggtatgtgtttcctaacccgattgcaggtgttgctttccttgctcaaggtacgtgcactgccatccccttgcccttttctttgattcagcatttgttaccgcacaaacgtcttggatcgtcatacatacattgcttaattgtgcagctgctagtgttagcttttcatgtacacttagtttttctgtaacagagatctgaaatattgtcg

SEQ ID NO: 27743 - DNA, 226 bp, Setaria italica
  Peptide Sequence Number=SeqID_93717
tgaggtgcttggtgtggaatcggaggtgaggtttggggccgagagctacaatgaggtagttgatgcgcttgggcagaatgggaggttggaggatgcactcaagctgtttgacagaatgctcggtgagcatgaccctccactgcgaattgcagttgacctgagaagcttcagggtgatggttgatgcctattgtgctgctgggagatttgaagatgcaattgcagtg

SEQ ID NO: 27744 - DNA, 524 bp, Setaria italica
  Peptide Sequence Number=SeqID_93718
ccgccagccacttgtcgtgcaaggccagcgccgttgcaagatccacgccgccgttgacctgctcttgctgaatccccgtcagctcggagcagaaagcggtgaggaccgggtggtgccgcggcttcacataggtgcggaacgaggagagcaggccgccggtggcggcgtcgacgaggaccgcaggaaattcgatgatttcctgcgggtagatgcgcgaatccttctcacaggtagcctcgaagtcgacgacgacgaagtagtcgaactcccgcatgcggaagtcctgctgctgcgccgcaggatctgccggcccggacggtgcggcggaggagaagctgagcatgcctcgagttgcagtggaggcgtgaggaaagctctggcgctgctgctgcgaagccatggcgccacgcgccgccggatcggccggccggaacgcggaggaggagggggagggcagagcatcttgttcgccggatctgctgtggttgctgggagcaaggctctcctttgcggtggttgctggg

SEQ ID NO: 27745 - DNA, 2299 bp, Setaria italica
  Peptide Sequence Number=SeqID_93719
taacccccatcccacccacaaacagacaaacaaaaaaaatgatcctaaggttaactcacaacgatcaagggctcagaattcggttcttttttagttcttcttatctgctatgttccaagtggtataagaacaacgcttttagcaattgttgcattttccataccatgtgaatttattaacttattgacaatgggtgcattttacgctccatcctatctgactttcaaatcatctaaatttcaggcaagtggtggaaacaggagatcaatttttcaatgatcgataaagagaaaaatcaaacttttagaagttagctctaatgatttattatgtaagaaaaactgttagtttcatccacgagttacaaactagttcagaagattcaggagattatcataaaggattagtaagatagcttaaatctggtactgaagaaaagtgtggtggcaactgtacaagtcacatactcctatctcacaagaagctattttagagagtaaaatgaaacagaaagggtcaagtttcattatatggttattcagtaaaatgaaacagaaagggtcaagtttcatcaccatgtcaatttattaacttattaacaatggctgcattttacgcttcatcctgactttcaaatcatctcacttacaggaaattggtagaattgggagatcaatttttcaatgatcagtaaagaggaaaatcaaactttttagaaattatgtatgaaaactgttcgtttcatccaggagttgcacactagcccaagcttcattgcaagcacctatcctcaacaggatttgccctccaagaccccagagacactgctaccgaaccgtaaaaaattctaactggttcacacagattcacagagcataaactcctgagcaagtgcggtacctacctgagcactaactaagcatgcactccatgtgtgtggataagtgagtagtaactatctaaccttagtcatcgatgatacggagtccagatggccggcaatcaggctgcccagtggaagaaacgacatgtcggcatccagttcccacaagtgaaaaagaatcgcccttgcattggtcccggcatggtcaccacgcctcctctgataggaacgctgcagtagcagtagaagcagtcagtagtagcagcgccatcatcacaccagcttaagttgcgattcgccggtgagagctgtgcctgaggttggagttccggctccggctccggctctggctctggcagaggcggtggcaccagagagccggttatggagatacggactccccgccgcatcagctcgacaaggagacgcgctgtgttgcgggcgtcgtcgagcccgcagtggaggcggccatcccactgcagacccgcctcccggacagcttcttgcaggttgcgccgcccagcgccaaacgcggtctcgaaggggatccggaggttaacccactggttgaaatacgatggcttggagatgttcttgaaattgcattcgaacttcagcatcgtccggcagtcccaatcaccccaggtgacgatggcgagacggttcttggcgacgcccgccgccgccagccacttgtcgtgcaaggccagcgccgttgcaagatccacgccgccgtcgacctgctcttgctgaatccccgtcagctcggagcagaaagcggtgaggaccgggtggtgccgcggcttcacataggtgcggaacgaggagagcaggccgccggtggcggcgtcgacgaggaccgcaggaaattcgatgatttcctgcgggtagatgcgcgaatccttctcacaggtagcctcgaagtcgacgacgacgaaatagtcgaactcccgcatgcggaagtcctgctgctgcgccgccatggcgccgcgcgccgccggatctgccggcccggacggtgcggcggaggagaagctgagcatgcctcgagttgcagtggaggcgtgaggaaagctctggcgctgctgctgcgaagccatggcgccacgcgccgccggatcggccggccggaacgcggaggaggaggggaggcagagcatcttgttcgccggatctgctgtggttgctgggagcaaggctctcctttgcggtggttgctgggaagaattgaacgcgatgcgggcgatctaggttgccgagagaattgcttcgcggatgatttgagattggatccgaggatttggatttgtattgcatagatgcggtggcggcggtggaaggcggcggaggcgtacggacggcgccaccatttcctcatgcctggctggctccgagagtccgagtccgactctcagg

SEQ ID NO: 27746 - DNA, 1535 bp, Setaria italica
  Peptide Sequence Number=SeqID_93720
caaattttttgttaactctttatttaaagttattacacagaagaactccattactttgaagaacaggtaagaacttgattatattgagtaacaagtcaattacatttggttagaactcaattacattgaagccaagataaaaactagattacattgaagaccagatacgaactagattacattgaagatgatgtagtcatatcctagacacctcaccacacacacacaggagttttcagatctaactcaggataccgcaaaaccacatgcaggtgctcagtcaatctaggtgaaccagaagtattttacacggtaggtattcagcagactgcctccaccgttccagcccccaccccacccacacagagacaaacaaaaaaataatgatcctaaggttaactcacaacgatcaagggctcagaattcggttcttttctagttcctctttatctgctacgttccaattggtaaacaaacaactcttttagcaattgttacattttccataccatgtgaatttataaacttattgacaatggctgcatttataatcctatctgacatgaaagatgtggatggagaataacaagtgcaacctgaagctatttcagagagaaaaatgaacagaaaggatcatgtttcatatacatggttattcaaatatatggacctgtatgctaaaaacttgaaatggatagccaactagcttaacatgtcttacccttgttattactcccccgaacaactaatatttgagagcaacaaatttttgttaactctttatttacaataagctagttttatgtttaggaaaaggtaatgccaagcttcattgcaggcacctattcctcatcaggattcaccatccaagaccccagagaggcagaccctgctaccaaccatctaaaattctaactggttcacacagattcacagagcacaaactcctgagcaagtgcggcacctacctgagcactaactaagcatgcactccatgtgtgtgtataagtgagtagtaactatctaaccttaacatcgatgatgcggagtccagatggccggcaatcaggctgcccagtggaagaaacgacatgtcggcatccagttcccacaagcgaagaagaatcgcccttgcattggtcccggcatggtcaccacgccgcctctgataggaacgctgaggttggagttccggctccggctccggctctggctctggctctggcagaggcggtggcaccagagagccggttatggagatacggactccccgccgcatcagctcgacaaggagacgcgctgtgttgcgggcgtcgtcgagcccgcagtggaggcggccatcccactgcagacccgcctcccggacagcttcttgcaggttgcgccgcccagcgccaaacgcggtctcgaaggggatcccggacccacttagacaatagacaactaccaatagtagtagtagtaagaaagacgaagttagtaaattaatactaaaccttaagtacaatacgaatagaataacggaagtaccaaga

SEQ ID NO: 27747 - DNA, 501 bp, Setaria italica
  Peptide Sequence Number=SeqID_93721
aatttggccataagatccaaactaaaattgtcttcttttttttaagttcacagtaagactgcagagggttctagatgctgatgaaattacaaagatcactgtatagacccacagtatgtttaagtgcatggtaatgtgaaagcagaagaaagtacttttaaagcactatgttatatctcgatcagtcaaggtgagaattgagactaagcatctaagtgtgcataatcatgtgggcctgtggagtataacaatggatcaaggaccttgagagcatcaataaattgaagctcacgcttgtcctctctatcttcccaggtcaagtgcaatttgaagttcacaaagcaagttaagtgccttgcctatttccctttttttataattccaacttgagacaacatcgtcagtacctggactgtaagttacattataggcatcacaaagttgaacagttcaaatacagcttattcctaggtggataaacaagactataagaaacacatg

SEQ ID NO: 27748 - DNA, 766 bp, Setaria italica
  Peptide Sequence Number=SeqID_93722
ggacctcgaccttgacctcgacggcgcgctgcgcaagaagaagagcggtcgccgttcgtgaggatcgtgagcaagcagatggtgggcatcttcctgacggtgtgggtgaggaggggcctcaggaagtgcgtccagaacctcaaggtctccaccgtcggcgtcggggccatgggctacatcggcaacaagggagccgtgtcggtgagcatgtccatctaccagaccatgttctgctttgtgtgctgccacctcgccgccggggagaagcccggcgacgtccacaaacggaacgccgacgtgcaggagatccaccggcggacgcgcttccctgcccccggtgaccagcagctgctcagggacatccacgaccatgagtgagtactgagaagagtaagtgagcaccaaaccatcaggattcagtagtctgacatttttcttggtgatttctgcagtcggatcttctggctgggcgatctgaactaccgcctcgacgtgtcgtacgagagagcgcacgagctgatctcgacgaagagttggtctaaattagccgagacggatcaggtgagtgaagaaatcagagtccatttcgtcattctgaatctgattctgattctgattctatctgaattctgacgatgctgatgacgattctggccattgctattctctgcagcttaagcgcgagctgaagaaggggcgggcgttcgacgggtggacggagggcgtcctggagttcgcgccgacgtacaagtacgaggtcggctcc

SEQ ID NO: 27749 - DNA, 528 bp, Setaria italica
  Peptide Sequence Number=SeqID_93723
cgacgaagagttggtctaaattagccgagacggatcagcttaagcgcgagctgaagaaggggcgggcgttcgacgggtggacggagggcgtcctggagttcgcgccgacgtacaagtacgaggtcggctccgggaggtacaccggcgacgagcacaggggcgggcggcggacgccggcgtggtgcgaccgggtgctgtcgtacgggaatgggctgcggctgctggggtaccggcggtcggagctggcgctgtcggaccaccggccggtgacggcgacgtacgcggcggaggtggaggtgttctgcagccggaagctgcagaaggcgctgacgctcacggacgccgaggtggagggcggccaggtcgtgccggacctggatttttgaccgagggtttggcgctttaaattgcacgcgccgtggagactgaagagtgaagagcgtgccaccggtgtcacttggtcgctgcaagttcagaactgaacgaaggctgatcgttcaggataaccgggagagcttgcgtcttgcg

SEQ ID NO: 27750 - DNA, 375 bp, Setaria italica
  misc_feature (1)..(8): n is a, c, g, or t
  Peptide Sequence Number=SeqID_93724
nnnnnnnnctctggaaatatttgactagtttgcaacattggtagcgcaagcagtgcaacacagagaggaagtttcctggtgttggaacttttacaaggaaaagatctcaaactcttccgggcttatttctgccgattctggagcgcactcctactgattgtagatctgcctgctgccactcaaaagcaccatggacatatttacaagaagttttggcttctgagcatggactgctgcccttctaaatcttcagcaggccttccaactcgcgaagaacatcagcacggtaattatacctattacttgttcatcctgatttacaattggtactctgtggatcttcttcttgagcatcagaaccgcagcatccatcac

SEQ ID NO: 27751 - DNA, 371 bp, Setaria italica
  Peptide Sequence Number=SeqID_93725
tgacttggcatgttcattaactcacatttttctcacttctcttccatcgttggcatatttctactgattttttattttaagcatatctatttatattgctctggaaatatttgactagtttgcaacatttggtagcgcaagcagtgcaacacagagagtaagtttcctggtgtggtacttttacaaggaaaagatctcaaactcttccgggcttatttctgccgattctggagcgcactcctactgattgtagatctgcctgctgccactcaaaagcaccatggacatatttacaagaagttttggcttctgagcatggactgctgcccttctaaatcttcagcaggccttccaactcgcgaagaacatca

SEQ ID NO: 27752 - DNA, 504 bp, Setaria italica
  misc_feature (11)..(11): n is a, c, g, or t
  Peptide Sequence Number=SeqID_93726
tctgctctgcngtggccactagcacaggtgttgacatggtctcactcaagagagccacgcgctgtattcaccgctcagagttcagctagagctgaaggagatcaagacagataacaatgacagctttaagagttccagatcaagtacctgatctccttcttggacagcctcctgtgactcaaggtaggcacggagatcatcgtagctgagaaggaaggagttctcaggccactcgcctgagatgatcgcctcagggttctcgtcaagctcaagccggacgctggcgtcaacgaaagtcgacgctctgcactgaaaggttggtgatcgctttgcagcacttctcctagttcctgtgttgatctttgcccctctggcaatggagcaactctggagggtgttgatgcatgccatggatggaaggaaactattggcgatcactctttggtgggtggctcacaggggtttaggttactttacttaactttaggtttttactttagttta

SEQ ID NO: 27753 - DNA, 504 bp, Setaria italica
  Peptide Sequence Number=SeqID_93727
acgttctactccaatggttgttagtgctgctactgttgcttccggagaagatcaaagggaactctcctgatttatgcagtttcaaattggactggcatacagaatgacgcaagcagtgcaacacagagagtaagtttcctggtgtggtacttttacaaggaaaagatctcaaactcttccgggcttatttctgccgattctggagcgcactcctactgattgtagatctgcttgctgccactcaaaagcaccatggacatatttacaagaagttttggcttccgagcatggactgctgcccttctaaatcttcagcaggccttccaactcgcgaagaacatcagcacgggtaattatacctgttgatagtgtgtcgaacccattaagcttgcaaagttaccaatgttaaggataatacaaatcaagtatgcatacatgcagtcctttgtctcttaactgttcgccattctgaaactcacctattacttgttcatcctgattaac

SEQ ID NO: 27754 - DNA, 574 bp, Setaria italica
  Peptide Sequence Number=SeqID_93728
cagtgcaacacagagagttaagtttcctggtgtggtacttttacaaggaaaagatctcaaactcttccgggcttatttctgccgattctggagcgcactcctactgattgtagatctgcctgctgccactcaaaagcaccatggacatatttacaagaagtttttggcttctgagcatggactgctgcccttctaaatcttcagcaggccttccaactcgcgaagaacatcagcacgggtaattatacctattacttgttcatcctgatttacaattggtactctgtggatcttcttcttgagcatcagaaccgcagcatccatcactgttttatctgatgctagtgtgatggctggagaggtcattacttcttcaatctttgtttgtggcccatgggaagctttggcccggtcattcttgacgactaccccaacacatctgaggctgctgtctacgactggaagccctgacacggcctcaaagtggcattcgacctcctctagtgtctgctctagactagtaggaccaactaagacaacaaggtagttagaacaataggtactacaactacaa

SEQ ID NO: 27755 - DNA, 551 bp, Setaria italica
  Peptide Sequence Number=SeqID_93729
agcaaggattcccacgaggacaagagccaatgtgtggattatttaatatctatggattttcataaataggtcaagaaaggagaagttgctacccggagaatttaaagatttagaggaaaagaacatacgttgaagtccatgtaagtagcatgcatgtcaagccattgctgatccatcagcttgaaggttatacagtagataatgtcaaaagcttgatcattttctgaacaaaaagtcaaaacattgaattaatatttgggagcgcaataacaaaatctttcagttagctcacaagtgttgacacttgtactgcataggcgttaaatcgaaggagaggcgcgcatcgctgtccctcctctgcgcacagacgcaggaaagccccctcccgatccacgccgtcgaccccgtcacgacctccgaggaggcgacgtgaggcacccgaagaggagtggtggaaggcggcggcgcggtcggagccggagagccggcggacggcgacgaaggagcccgcgctcccgtccatcttgccgcggaacggcaaacggaacaaa

SEQ ID NO: 27756 - DNA, 423 bp, Setaria italica
  Peptide Sequence Number=SeqID_93730
tctctactattttttagtgtttactacctctcagaagtacaagtgtaaaactaaaagattgtattgctatattatagtcttattagataattgagttgaacttagcaaatatggaccattaactgttcattctggacacataaacacacagaacttgtttaaatcatgcatactattgtactctgttatttaatcatagctatcatcacaagaaaacaacctaagtccaaacatagataacacctcaatagtacaaggaatagttgagaattgagatgaaagaaattagcggcagacaactcttgtagattaccatccccattccaaaatagagttctgaaataaaggttatacctgaaagaaactttaggaaaaccgctccaaacaatgacctcggtttaactgcttgaagatcaagcatct

SEQ ID NO: 27757 - DNA, 1526 bp, Setaria italica
  Peptide Sequence Number=SeqID_93731
tttcaaagaactagcctctatctttatgcaaatgggagacaactcagatcagctttcccaaaatcctcctgtttacaacgaaaactctaggaacactccctttctcgtggtatgatgggcaacaacccgactgtaataacacaccctacaaatattttgccatggcagctgatcagacacttcagttaccctacgtggcgttctatcatcaagaaaaaccctaccttgtaaatttcagagatcaggttaccagagtacctaaacacaaggatacagatgcatctacattccgagattctcgctagctgtgggtgccatttgcaaatccattagcaactcgagccttgcaacatgtaccatgttaagatttcagtttcttctgctaccgggccagaagcctgtatgatggcaagtcctcaatccgctgaatatcttcgatcaaaagctccctttctagctgacgcctcgtagatttcatgaccgtgttgaagtccatgtaagtagcatgcatgtcaagccattgctgatccatcagcttgaaggttatacagtagataatgtcaaaagcttgatcattttctgaaagaaactttaggaaaaccgctccaaacaatgacctcggtttaactgcttgaagatcaagcatctggatgagcatgaaggttatatttacaccagctacagcaaatggatactcccagattgcacgatcaccattctgcttgcgaagaagttcctgaaaagattttggataattcctagcaaagaacaacagattctccaaggagatgaagcctccacctctaaaatctgtagatgggtctttcccttgccaacccatctctttccattgttctgatattagaccccgaagctcggttccaggaaaagaagcacaccaaagagcatgaagtgcttcctgatgctctctgtttgaactatcatactgaacttctattctgttctgtaacctctgtaggcattcttcctgcataggcgttaaatcgaaggagaggcgcgcatcgctgtccctcctctgcgcacagacgcaggaaagccccctcccgatccacgccgtcgaccccgtcacgacctccgccgaagaggagtggtggaaggcggcggcgcggtcggagccggagagccggcggacggcgacgaaggagcccgcgctcccgtccatcttgccgcggaacggcaaccctaccctggcttcgcttccccccttaaccctctctcccccacgcgctccctgcctgcctctacgcgcggcgatccgcgcggggatccatggccgtgcagccgcagtcacaaccgcgggcggggcggcgaggtcacaccgggcgagcgggcgggcggcgagcggatcccgagatggctggagaggaacagcagagcggggtagggcagggggtggccggattggctcggcttcgcagcggcctagccttgccttgcctcttccgtccgttgttggttagttggttggttcttggttggctggctccgctacgcttcgtctttct

SEQ ID NO: 27758 - DNA, 408 bp, Setaria italica
  Peptide Sequence Number=SeqID_93732
gatactaacattcatttttttttatcctttcagtgcatcaatgtggattgcactgtaagacatttttacactaaattatcaagatatgaaaggaaccaggttattctttcgtcggcctgtaaccctatacattagtatatgaaaacctttttgctaactaatcatttcatttcacgtatatttcgtagctgggaaatcttccctacaattacgtgtggtccacttacaacacccctaaaccctcctttcctaggcgaccaaagatcaacgcaccagttagctgaagaatctgctgtttatcccagccctgtacagctgcatggactcagtgccaaaggtagagagcttaacctcagtatatgcagggacgaagaaaacatcaccatcctttgccttttccccagcaga

SEQ ID NO: 27759 - DNA, 1105 bp, Setaria italica
  Peptide Sequence Number=SeqID_93733
tagccagaatggtacagaagtgctgaactacgccccatctcctcttgtcctcttcttcatcaacagggctataccattctggtcgacgcttggagttactgtaacggtagttaaggaagagctcttcatcatggatggaccttgtactcactaatactagcgtctttagaactagagaatgcccagcctgattatcggaacttccagacttgaaatagaaggagccaaacctcttcatcttaatgggctcttcaccaccaaacgtaacgttaggtatgtgtactctcatctccttctctgtcaaaggaaaatcatatgggcatatcatgacattgggacttgaaccttttggtggatgatttgcaaaatgaccaaaagcaaggggatttcgtcgttcaagcacttcaccgaaactttccctcacacttttctctagaggcttgctaagcattctccacacccgatcagagttgttctctgagcctttaggtggtacagcattgtagtccaccaaatctgaaccatcccataattctcttgtttcaccacccaaacaccatggttttgcatcaattattgttccatcgtatcttgtgatcagatagttgttgcatgcatcaattcttgggtatccaggtatatatcgataataagcaggtgaatatataacaccaggatagatggccaggacagcaccaacatttgcttctccagataagaacagaccttggcctgcatctttgtgaggaattccagatggtctgatgtcaagggtgtacccaaaatgatccctgaatttatttgacagttctgctcgagttaaaggccgtgtagcagggatagctgcactttgcttgtttgcagatgccgctccgccaacagcaaaactcaatccactacgccgagaatggctctctgcttctgaaggattattcgatggatcatttgttacatgaggacgaagaatgctatccattgtttggcatatatcactaagttgataatgaacattatcctgcacttgtttctgctggtcagtaacagatgctttgctagccaagtcaataatctcctccgcatccttctcttcagcattctcccccca

SEQ ID NO: 27760 - DNA, 238 bp, Setaria italica
  Peptide Sequence Number=SeqID_93734
agcttctcccaatgtagtttagtgctgattattatattgcaaactgctgatgctggctactttgcatagtgaattttcctattgtggtcatgtggttcggcgtaattgttgcatcccatgctctaccaaaacctatgattcatatgttgggagaactgtattgaggggtgggaaggaaggcaaaatcatatgtatagttatctgtgacatattggcaagaactgctgatggataaacg

SEQ ID NO: 27761 - DNA, 1579 bp, Setaria italica
  Peptide Sequence Number=SeqID_93735
cttcaaacgtttttcctactttagccgtgtggcactggaattactttaccaatctgggaagaaagttgacataattcattgtcatgactggcagactgcatttgttgcccctctttattgggatgtatatgcaaatctgggcttcaactcagctagaatttgttttacctgtcacaatttcgaatatcaaggaactgctccagctcaggatttagcatactgtggccttgatgttgagcacctggatagaccagacagaatgcgggataattcacatggcagaataaatgttgttaagggtgcaattgtgtattccaacattgtcacaactgtgtcaccaacatatgctcaagaggtgcgctcagagggcgggcgtgggctccaagatacactcaaaatacattccaagaaatttgttgggatacttaatggcatcgacactgatacatggaatccttctacagataggtttctcaaggtccaatatagtgctaatgatctatatggaaaatcagcaaacaaagcatctctcaggaagcagctcaagatgtcttctgcaaatgcttcccaaccgctagttggttgcattacaaggctagttcctcaaaagggtgtacatctcatcaggcatgcaatatataaaacagctgagttaggcggacagtttgttcttctaggttccagtccagtaccaaacattcagagggagtttgagggtatcgcagaccaattccagaacaataacaacatcaggctgcttttgaagtacgatgatgctctatcccatatgatttttgcagcatcagacatgtttattgttccttctatgtttgagccatgtggcctcactcagatgatagctatgcgatatggttctgtgccagttgttcggaaaactggtggtctgaatgacagtgtcttcgatttcgatgatgaaacaatacccatggaattgcgaaatggcttcacctttttaaaggcagatgagcagggttttgatagtgcattggaaagagctttcaactactaccatagaaaacctgaagtctggaaacagctggtacagaaagacatgaagatagatttcagctgggatacttcagcttcgcaatacgaagacatctaccagagagcagctgctcgagcgagggcagcagcataaacaacagaggcagtttctgatgcctccatgaagtctcccggatgctgtgcttaaaccgttaaatgtatggtacctgcggtactatcagctctgaattaagcatcggctgaagaagcacgctgtgcatcgctagtcgggcgtacaaacggcaatgtggccttatgcagctcacaatggagcaaaaagatggaagaaaaatagaagatacacaactgttttgcccgaataacacaacggtttcgctactgtaggatgcagaagcacgggcccttggccctttgccttagtgccacttcatacgtgattggttagctctgtcaagctgtatgaattgagtggttcatgtaatgcttttggcataaattaatgtaaattatactcttatctgtgaaacgaaaaaaaaaaaaaaaaaaaaaa

SEQ ID NO: 27762 - DNA, 1530 bp, Setaria italica
  Peptide Sequence Number=SeqID_93736
gaatacagattaggcctacacaacataacagaaacagcaaatgctgaactaatggaatggaagcatagctgctgatggggagtgctctgctgaatgctggacagtgagtagggactactgactaatgctagggggagggctcgagaaggtgtttggttcaggacctcagacagagaggctcacagtcaggctcaggccctgcacatgcagggcgtgagcgggttctcccagagatcgtagctggggaaggtgggctcggggaggcctgtgcgcgtgcggtgcatgacggccacgtcctccgcgaaggaggcccagcccatgtcggggtcgccgagcgacttggacatgagccccttgtccggcttcaccgacttgaggcggtgccccgcgtagcggcgcgccccgatgatgagcttggcgaagttgccgccgtgcgtcatcacgaacacgtccgaccgcaggcacaccaggaagtccagcgccgccaggctcgtcacgtgccgccggaacggcgccagctcctccgcgctcgcaagctcctccttcgtcaccaagttagggaacatgttcctgaggggagccatccggttcttgccgccatacacttgccctgacgcgacgtatatctgtgttccactcgtgtaccccagcgctcgcaggatcacggcaatctcaccgggctcaagaggacaacgcccttcttttctcttctgaagcgccagtggccatagatgggatccattcttgtagcgccttggccattctttctgcctgtaagcagccatcatcgccttctcctcccgtgtgccagcaaaatcacagaacgaaaggcccaccatccctttctcaaatctcagatgaagagccatgtatggatttatactgccagtgcggttcctcatccttgctgcaagcttatcagccatttcttcaatatgaggtaggaactttagagcgtggtagttgactctgcatcttagccggttaatctccatcggaacattatcgtaccccaacctgtcgacaaatggcttaatggacattatcttttttctttgatccttggaagtacattatcaatataaaactgggcagatgcatattttggaatgttcttcacagttcgctttatgctggtgaaaagctcatctttttctgtgaaccagtctgggatgtctcggacaatgcgtacatcatctttcaaatagtttataaaatgatcaacatcaaagatatcttcaaatttcgtttggtctttccatatctgatcctgcttcagaactggcaaaataagcgttgcactcattatcctagcaatagcaacagcattacatatagctatgcgttgctggtttagtcctccttcggcatgataaaaatatacccagaggtttctttctcagatgggacatctgagggctcatcgctgcgtcgctctgcgcagggcttccaagatgcagtggcagcacgtggattctcccacagcgaagggggttccttcgtctcagggcaatgaagcgtgatccccta

SEQ ID NO: 27763 - DNA, 404 bp, Setaria italica
  Peptide Sequence Number=SeqID_93737
aaaaggacaaagaggagagaaatggcaccacaaggtattacaatagccaaaacgtgaacctcggttctagtcttcctttcagaatgttcatttgcacagagtgggaagtctagcaagtgtgtggttgtgcatagacttgggtttccctgaagaaaaagcctgcatgtggcattagcaaaaactccacctgtagggattggaccatcaaggttgttgaaagataaattaaggtactccaagctgttaaatagctcaaaaaattctgggatatcaccggacaagtcgttttgagaaaaatccacctcttcaatgcctctcaaggtcgcaagagaaatcggaatttgtccctcaaggaagttccctcccaggcgaagcgactgcaagagttcgcatgagccgagagt

SEQ ID NO: 27764 - DNA, 415 bp, Setaria italica
  Peptide Sequence Number=SeqID_93738
cggcggcggcggcaaaggagaagagcgaagagcgccgcagccgccgaagcaccgagagcgagaacaactcaactcgccagccatggcgctgctgatggagcccggcaccgagcccctgaccgagagcgagcaggccgacctggcgggcatcgccgccatcaaggagtcggcggcgcgcgagttcaaggagcagggcaaccagttcgtccggatgggccggaagcactacgccgaggcggtctcctgctacaccaaggccatcgcccagatggagcccctcacctccctcgacgccgcggccgccgccgacgcttccgtcctcttcgcgaaccgcgcccacgtcaacctcctcctcggcaaccaccgccgggccctcgacgacgccgagcaggccatcgccctctccccctccagt

SEQ ID NO: 27765 - DNA, 695 bp, Setaria italica
  Peptide Sequence Number=SeqID_93739
cataggcattgcagaaggcaagtagaggagcaaaaatgtaggctaccaggatgtggtaccacttcagctgtggaaatatctgcggcacagtaccgatagatatggcagcaataacaacatagcctccaagtgcaacataccaaggaatttggtctttggtgaagagttcattgcgccgctcttcgtcgtatgagacaggggcggtgtcggtaactatggcatcatcagagataggaagtgtactagcattacttttcttgagttgagatcttaatgaaactgctgtgagaatggatatctttagtacgttgtatataccatctccaagaatcaaggcaatggccatgaagacccggtaaccttgcattccatgaagattggtgtcagcgagatcagcagagaaccaaattccctttttcttggctatgaggggccacattattccccaggagagaatggcacccaggagaatagatacattgacaatatgtgagcaaatcattcccactccaacatacgtaggagagaagtcaaagtaaaacctgttgtcaaaagcttgcatgcctaatgatggaaatttttggaatccacattcttctatgttagcagtatagaaccactgaaagaaaccccaaacaaagctaaggacaaagaatgtgcccaatttcttcacttgcttccttgcaagcttggca

SEQ ID NO: 27766 - DNA, 916 bp, Setaria italica
  Peptide Sequence Number=SeqID_93740
ggaaagcatccaccttgtcgttcatcgtagtcgacaggaacttcatgcagatcggaggcttcaccttggcaagagccagcagcgactgaggcaggacccatatcccatcgccacagatcatgccggacgcgaccgcaggcgcgaacgcgtccgccttggctctgtccagcctctgccacacgaacagtatcaccgtcccgacgaacatgtccactgcgaagtacgccccgatgtagaaagggatggccattgccatcgggatcgggatgaaccgcgacaccttcttgggcaccaggtccctgatcaggttgatgacgatcgccgcggcgaagaacacgtagcagagtgtgaggcagttcttcgggagcgaggagaagccgtccacgcccaggatcgccatgctacggaacacggcggcgtttggcgcggggtactcgctgcggtcgacgccaatgttgccgaaggccttgtagaatagccagaacacgcagggtgcgatgacgcagcccatcgccgtgcctatgacttggctgatgaacattgacctcggtgaggccagtgtcaggtatccggttttgaagtcccccatcaggtcagcagctgtgcccacaatgttcatcatcacgccacaggcagccagcccagcaaggacgccaccatgcgaggcgcctacccatgcaccgaatgcaaagatcgcaagctttccgtaggtggtaactagagaccagtcagtgagaccagatccataggcattgcagaaggcaagtagaggagcaaaaatgtaggctaccaggatgtggtaccacttcagctgtggaaatatctgcggcacagtaccgatagatatggcagcaataacaacatacgaaataaagaaccttaaccaagttgtctaactattacttaaggttaattt

SEQ ID NO: 27767 - DNA, 353 bp, Setaria italica
  Peptide Sequence Number=SeqID_93741
attcgatggtggatatcagttgataaatcagggtccagagcaggttgtgttatttctaagccttcagaaaccattatatccagataccttcttgggttaaagttatccactccaaggtcttcatcccataaaaagatgaaatcatatatagccatgacatcaggatgaagaaaacgcttagcaaaccaccattttgtttggttgtgagcgagaatatgtatggccttatcgctccactcaagatgatgccatccatctacatttccatcgtaatggaagagcattactgcatagttttccttgagaaaattacagcactgtgtatggtatagtcccttgttagtttcatctcc

SEQ ID NO: 27768 - DNA, 1025 bp, Setaria italica
  misc_feature (937)..(937): n is a, c, g, or t
  Peptide Sequence Number=SeqID_93742
tttttatgtaagatttctggttaaataactgcacaagcgtcaagcatgtatctttcttatatgatatatcactatacaatacaactctagtcgacggccaaaaattacagcactgtgtatggtatagtcccttgttagtttcatctcctcctccataagctgctccttgtattgacgataacattttccagtacttcctttgtctcacggggataaaatcgtggtggtggtgtgtaagtcattcatcatcctataactactgctatatatgactgcggccactgaccagcttcactcatctgtggtgtcatcacattctgctccctaagcaatcgacttttgaattcaagattcaaaaggatccctccatccttcatcttcccttacagccctgttccaccgttctttgaacttctccagctcagctgatgattgtcttcttatatgggtcctcaaatccagtgatcttcgaggtgtcttgctgctaagtgatggtcctcctaaagatggtatcccttgatggacaacatactcactatcaattacaccaactttctcagttcgatcaccctgagcacaatagccaagcttcatgtcaagaccccatccatgaatcagatcattctggattagatgccacacacatttccaggcagcgcgagaaaaaactggtgccatgccctcaacccaccctgtacaaggaggtcctttactttcatcagaacaattcatactaggtcgattgtcgtatattctcctgtgcacttttgacagcttattgcggattgtgattcgatggtggatatcagttgataaatcagggtccagagcaggttgtgttatttctaaggcttcagctagtattcctaccaattattcctgcagataacataaaatctgaggaagcatctttcaacagaaaaataaattttaggancttatgtatacaaaggaggcggagatcattttgcagaaattcctaaacccatttccattggataaatcacaccaaacagtaacacaaa

SEQ ID NO: 27769 - DNA, 373 bp, Setaria italica
  Peptide Sequence Number=SeqID_93743
agagttgtcactacggaagcagaatggctcgtgaataaacagctgattggagctcccagtgaaacagagaagcccaccaaggtgctgtgcagcacggaggagcgcttgtccgactactgcgagctcgatggcgacgtccgcatccgcggcagagcctggtcggtggacgtcgtcccctcgacctggtcggagcgccgggagtggaagatccggccgtactcgcgccggagcgcgacccacgtcgacatggtcaacgtgacgcagctgcagggcccgtccgccgccgccccggcatgcacggtgacctacgacgtgccggccatcatcttcgcgctcggcgggtactccggcaacgtcttccacgaccacgccg

SEQ ID NO: 27770 - DNA, 307 bp, Setaria italica
  Peptide Sequence Number=SeqID_93744
gatggacagtaatgaagtttatccagagcttccagaagtattttctgtccaactattatcatcatcttcttcaccatttcttcacgagttattttactttccttaaactcttcatagtgatggaagagcagttcccttgctatggatgatatattgtcttgaactaatccaaacaggactttgaatgatatccatggggtagttggtgcttcacctatttcgcacggagcaggttgaagagtagaaatatccactgcaacttcctttggagatgggcgaaaccataagcctttcaagtgaagtaaaa

SEQ ID NO: 27771 - DNA, 348 bp, Setaria italica
  Peptide Sequence Number=SeqID_93745
cccgccggtccaccccatacaaccacccttcctttcgcctgcccacccagcgcacccaacccaaggaagtcggaagcccatccatctgacctcgactccccttccctccacctccagtcgccggattcatcgactcgagtcgaaatccgatcccgccgccgcgccccaatcgccgtctagggcgttccgtcagccaggccacccgacaccgccgccacccctcgtctcctccccgaccccgagccgttttgacaggcttggacgccagcgatccctctctgccccgttgcccgccgtcgctgccggcctcgattggagttggaaatcggataggaagatggatcgcca

SEQ ID NO: 27772 - DNA, 526 bp, Setaria italica
  Peptide Sequence Number=SeqID_93746
gaccgccatggccgaggcgctccagggcctgacctcggtcgacgggatcgacgagatcggcacgacgctctgcctcccgacgccggggaggtcggcgatgaagtcggcggcgatgatggcggggatggctggggaggagcagcacggtagcccgctcccccgaggccgccgcgtgtcggtgaaatcgcccgaggccatccggatggaggtcgaggagggcgaggacgagatgaagcgggatctggtgaaggagatcgtaaggacccccggagtggcgctgcgcagcaccagccgccgcgcacgtgccacgcccgcgccgctcccgactccggtgccggcgtccagcgctcgcgcgactacgaggaggaccgcggcgcgtaaggaggaggaggtggcgccgaccccagccaccctgcggaggagccagaggacggcgggtaggaaggctgcggcgccggtggaggttaaacaacccgccgacgatgtttccgcggaaaagaggccaacgaggtccgagatatctaag

SEQ ID NO: 27773 - DNA, 321 bp, Setaria italica
  misc_feature (47)..(47): n is a, c, g, or t
  Peptide Sequence Number=SeqID_93747
tttcttctttgaggaattatggatattgatgcgaaagaaaaaaaaanacttccttttcgctaaaatctttcggtgagccggcttagttctgttcttatagccgccagcggacggccgaccggacccgcgacggcacgagcgccaagggtcgagggggttgctccggcaggcggcccggcagcaggcctgggcggcaggccgtcgtcggcacccggcagctctggccactgggcacaggccgcaccgccgcatgacggcaggggagtcacaggaatcatggtttgaattcgtttcaaatctgctagatatatgtagtgaaga

SEQ ID NO: 27774 - DNA, 1239 bp, Setaria italica
  misc_feature (1153)..(1239): n is a, c, g, or t
  Peptide Sequence Number=SeqID_93748
ggatccggcggcgcaggcccacggccctctcgatgcgcgagccgttgcttggggtccgcccgggcggagcgccgcggctttgaacctggttctcgtgtcgcccatcctgcggcacccccatcccccacccgcggcgcagagccagagccagcccagccgccctcgcccacgcgctcgtctgcaggtttcacacaagcgcctgcgcctgcgccagttcagtcgagcagagcggccgcgcggatggagggggtggagaaggctctcaccaagcttggcagcttcaccatctcccgcaaggccaagaaggagctctcctccatcggcggcgatatctcccgtttctccagcaccgtggaggagaaggcaaaatgggtcttcgagaagctcaaaggacacaagaagtcactccctgatctcctgcgtgagcacaacctccctccaggtctcttccctcggaacatcatctgctatgagtacgatgaatcgaactcaaagctggtggtgcacctgtccaagccttgcgaggtgagcttcaaggattcctccataatacgttatgctcctcgcgtcaaggcgactctgtcccggggcaagctttctgggatcgaaggcatgaagaccaaagtggtggtgtgggtgaaggtggccagcgtgagccttgagagctacaagtccgataaggtgtgcttcattgctggcgtgaagaagctgaggcagaaggatgcttacgaggtcccccgcgaagccgtctccgttgaggagttctgagctcgattggcctgccttatccgtcgtatcattcattcgtaccattttttgggtccctgatgtgtgattcttaaggacagattggtcattgatgtgctgtggttcggtagatttgtatattggaaacttggagaatttgttctggctggccgctagcaaaaagacaacccgtgcatgttatctgaggagtcgcccacgtgtatgatgtctcggtaacgtgaacatttgcatgtgttctggttctgcattgctttgcttctagggtgtatgtgttcctgttctgttttgtatggtaccgcatttggttggttggctgaattgtagaatttgtttcaacaagcattcaagacatgggatattttactaccaaaaaaaaaaaaaaacnnnnnnnnnnnnnnnnnnnnnnnnnnnnnnnnnnnnnnnnnnnnnnnnnnnnnnnnnnnnnnnnnnnnnnnnnnnnnnnnnnnnnnn

SEQ ID NO: 27775 - DNA, 259 bp, Setaria italica
  Peptide Sequence Number=SeqID_93749
gcgggtaggccatcatcgaggatgtccacctcgcttgtcgtctggatcaccacgcggggctcgcgaacagctcttgaggcggtgctcatatcgatggtgtaagactccagcttccttcgtttggattccagttcgtcgccctcagcatcggcaccaccctgggacatactgccatgagtcaccctgtcgcccccgtccacctcatcggacacggcagaggtcacatccaaaccaccggcgtcatggatctgcattgatg

SEQ ID NO: 27776 - DNA, 311 bp, Setaria italica
  Peptide Sequence Number=SeqID_93750
ggtcgttgtgaggtgatttgttcgaggcggatgaagaggaagtgaggtttggaagagatggtgggacctggaggacgcggcgaagggggcggacggggcccttggcggcgtgggcgccgagccatggggtgtggcgccagacgaggcggccgttggagccggcgtggaccttgctgccgccgacggcgagctcgacgtaccacatgtcgggggccatctgccagagcacgaagccgccctgctcgacggctgcggcgccgcggccggtcgggccgcggttcttgacgacgcgcgtcgccgtctcgaactcg

SEQ ID NO: 27777 - DNA, 246 bp, Setaria italica
  Peptide Sequence Number=SeqID_93751
tgccgacctcagctgatctagggtttagcggagtgacctcgcggagggcgccctcgcgccgaagcgaggcgtggatcaatccagatatgcatttggggggcagcaagctcgaggcggcaactgcataacttgcaagaatttgttggttgagggtcataccgatgatgctcttgcacgttatgcagttgctgcctcaagcttcctgcctccctttgccagaactagtaagataaaaagctttctaaa

SEQ ID NO: 27778 - DNA, 127 bp, Setaria italica
  Peptide Sequence Number=SeqID_93752
ctgggaatgaactgaattggattcaatttaataacagcatgaagatgagttggcgatgaactgacagtcaattgctgggcttccccatttgtctggcaatcaggtgtgaggctttgctccatccttg

SEQ ID NO: 27779 - DNA, 310 bp, Setaria italica
  Peptide Sequence Number=SeqID_93753
gagatagagagagtagagagaggtggaggagagagagagaggaacgagctacgaagcgggcgcgggcgcgggcggggcgacggctagcatgggcaacagcctgcggtgctgcctggcgtgcgtgcttccctgcggcgcgctggacctggtgcgaatcgtgcacctcagcggccgcgtcgacgagtacggccgcgcggtgtcggcgggggaggtgctggcggcgcaccccaaccacgtgctcagcaggccgtgctcgtcgccgcagggggtggtgcggaggatcctcatcgtgtcgccggactcagagctc

SEQ ID NO: 27780 - DNA, 453 bp, Setaria italica
  Peptide Sequence Number=SeqID_93754
ggcgctccgggcccgcgcgggcgcggtgtccaccttccgcgcgctggtggcgcacgtgtggcggtgcgcgtgcgcggcgcgcgcgttggaccctgaaaccgagtcccgcctctacacgatggtggacatgcgcgcccgcctgtcgccgccgctgccggacgctttcttcggcaacgcggtggcgcgcacctcgacgtcggcgcgcgtcggcgacctgctcggcaaccctctggggttcggcgcgcgccgtctccgcgcggcgacggggcacggggacgagtacgcgcggtcgctggtggattacctggagacggcggacctggcggcgctgccgcgcggcgggctgcccggcacggacctgcgggtgatcagctggcttgggatgccgtcgtacgacgccgacttcgggtggggcgagccggcactgctggcgccggcgctcatgtactacac

SEQ ID NO: 27781 - DNA, 569 bp, Setaria italica
  Peptide Sequence Number=SeqID_93755
aggggaagatcttgttccaatcgtccttggcgatggcacgccggacgtagtcggacttgttcttggtgaaggtgctcaggctggtgccgcggctgagcagcgactccaccggcgcgttggggttccaggagttgaagaagaccactgactgcagccaggtcatctcgaggcagtcgccgcccgtcatgcccagctccgggaagaggttgctcagcatcggcacgacgtcgctgcacttgccgaggtacagggactggaacgtcacctgctgtcccatgatgatcacccgcatgttgatgtcgaaggggagcgtcggcccaacctcctgccatctggtcaggacgtcgatggcgccctggtccaccgtcctcacgatgttgaacgccgtgacggtggacgggaccttgacgaggctcactttccacgacacgacgatgccgaagttcccgccgccgccgccgcggatggcccagaagaggtcctcccccatggccgcccggtcgacgaggtcgccatcggcgttcaccagcttggcgtcgaggatgttgtcgatggagaggccgtaactt

SEQ ID NO: 27782 - DNA, 324 bp, Setaria italica
  Peptide Sequence Number=SeqID_93756
cgaagaagcgctgcatgggcccaccatcgcagtggggttaggcggctgaccgagtcaagcgggtggcttggcacagctggatggaagagttggaaatttactcttgccctgccccttttccgattttttcaccctttttcttttcaattctttttcttctactttaatcctctcgaggtaaagtggtggggatggatagaatttggtggtggtgtctgtcatttagtatctccttttgctagtttctcttcgttttttgggggagccttagttatggttaatttttgcggcagtgctctagaaggtgaggatggtggatgaaca

SEQ ID NO: 27783 - DNA, 335 bp, Setaria italica
  Peptide Sequence Number=SeqID_93757
aggcgctccgcgtcggcaacaaccagatgggcgggcaggtcgcgccggagatcggcggcctgcgccagctccagttcctgtcgctgaccatcaactccttcaccaacatcagcggcatgttctggaacctccggggatgcgacaacctcaccgcgctgctcgtgtcgtacaacttctacggcgaggccctgccggacgccggctgggtcggcgaccatgtcaggaacctccggctgctggtgatgaagaactgcgagctgacggggcagataccgacgtggctgtcgaagctgcaggacctcaacatcctgaacctcgccgagaaccgcctcacc

SEQ ID NO: 27784 - DNA, 456 bp, Setaria italica
  Peptide Sequence Number=SeqID_93758
tctgcgggggcaccgcgcggtcggtgctggagatcggggcggcgccgccgggctggaaggcggtggtggagacgcggccgacgtgccagagctggcagaagaagacggcgcccctggcgtggacggcgtccacgatgggccgccacgcggccacctgctccgccgtccagacccccggggtgtcggcgtagccctgcgccgtgtcggagacgcccgtggcctcggtgatcatgaggccgccgctggtggcgcgctgcgagtagtagacggcggcgtgcggctgcggcacgttgccgtaggagcgctgcctcgtcagcggcgcaagcaccacccggtgcgacagctcgaactggcccatcttgtacggcgtcagcagaggaacggcctccatctctctcaactccggtcgatcgctccttgctcttgttctaaagatctgacaatggcagcttgcag

SEQ ID NO: 27785 - DNA, 242 bp, Setaria italica
  Peptide Sequence Number=SeqID_93759
gctagctctcctcctacaaaggacccccagcagcccaacaaggcacagcgtctgatcgatcggacgcgtgctcagctctctgcgcactctgtttcgctgctcccctcttcgttagctcgtttgcggcaggtcttctgaacctcagagaaccgaccgactgaggccgagcaaatggctggtggcagtggcagtgagctcctctccaggatcgccaccggcgacggccacggcgagaacttccg

SEQ ID NO: 27786 - DNA, 1747 bp, Setaria italica
  Peptide Sequence Number=SeqID_93760
caaagtgatgcgaagaagctgccccactttgatcggagcggacagcgccgaccaaaactttgccgacagtaacaaaaaccaccgtacgcaaacgacagaatgaggttcagattcagacttgtccttcaccgttgcaaaattttccgagaatttacaggcacgactcgaccacatccagagcaaagcacccattgctttcccccctcgctttctcatctcctccacatttttgttttgttttaccccctacgaatgtacagctaacaacaccggaaaccgaacggtcttcgtcatcccccaccgcacaaaggaaaaaacagtctgtgacagaacacgcacaggcagaacagcaccttggtgacccaagttacccacctccggtcggagaatccaggctaccctgagcagcgcgctgcttctcccgccagttctcgccccacatcttcgcctcggccaccatcctctctctttcacccttgtgcgcagtccctgtggcatgccgctccctgggagagtcgtccaggtccttgcttggcgacctatggccagagctgcctgtgtcgtcgttcctggaaagcgcccttccgctgtcgctgaccctgctcctctggtcgccgccgcccttcttggaggtgctggctgtgttaggatcataaatctggtttgcaaggtaggataaagcagtcacaacgtcggcaatgagtgggcgggacgcagcctcagactggatgcacattgatgccaccgcaagcgcctggtaaagtccgcgcgtagggaatcgcccctccagccctgggtcagccatctttgggagcttccgtctgtcattgaaaagaggtcgtgcccatgacacaaggttttgctctgcggctggtctggtgctgtcaatggccttccggccagtaatcaactcaagcaagacaactccaaagctataaacatctgacttaactgtaagttgtcctgtcatagcatactctggtgcacaataaccatatgttcccataacacgtgttgagacgtgagacttatcaccaacaggacccaacttagcaagaccaaagtcggacagctttgcatggaaaccctctcccaatagaatatttgatgacttaaagtccctgtatataactggtgggtctgccttgtcatggaggtactcaagccctttagcagcacctgcagcaattttcatcctagtgttccagtccaaggcctccttgccaggagggagatcatgcagatggtcttccaatgatccaagtggcatgtactcatacacgagaaggcgttgatctccatcggcacaataaccaaccaaattgacaaggttttgatgatgaagcaaactgagcatgagaacttccactagaaattctttgtttccttgattaccatccctattgagctgtttgatagcaacaacctggcccgtgccatcgaggcggcccttgtagacgcgcccaaagcctccctccccaatgaagcattcatccctgaagttcttcgtcgcggccgcaagctggcggaaggtgaaggtctgcgcagagatgacattgccgttggcgtccttgagaaccgcgagctccttcttcgagccattgcccttggccttcgacttgttggaccctggtggggacctctcggcgcgcggtggaggcgagcggaggggggacggggagggggaggaacggagagggggcggggggcggtggcgtcggctggcttcctttcgcttcgtcctttt

SEQ ID NO: 27787 - DNA, 1672 bp, Setaria italica
  misc_feature (1670)..(1672): n is a, c, g, or t
  Peptide Sequence Number=SeqID_93761
cgaggttgggaggcccaaggtgcagctgacaagggagcagcgggaacagaggaggttcaagaacgtggtgcggaagaaggatttcatctgcctcgagagagttaatggccgcctcgtcaacatccttgcgggccttgagcttcattctggcgtgttcagctcagctgagcagcggcgcattgtcgagtgcgtgtatgacctccaggagagaggcaggcgtggggagctcggagatcgcacatacactgaaccccaaaaatggatgcgtggtaaaggccgggtaacaatccaatttggatgctgttacaattatgctacggacaagaatggaaatccaccaggcattatacgaaccattgtttctgatccaatgcctgatctctttaagactatgattaagagactggtgcgatggcaagttctgccaacaaattgtgtaccggacagctgcattgtaaatatatatgaacctgccgattgcatcccaccacatattgatagccatgattttgttcggtcctattttgtaccgtttctttcctcagcgaatgcaacatctttttggatccaacctgagagtttctgcccctggagaattcactggttcggttgcgatccctctccctgtcgggtctgtgcttgtcctgaatggcaatggcgctgatgtagcaaagcattgtgttcctgcagtcccgaccaaaaggatatccattaccttcagaaaaatggacccagcaaagcgtccattcaagtttaaagatgatccagaactgcttaaccttacacctctagggacagttgtgcaagaagctggcagatcatcagatgaaggcaagggcaagctacctgacgtccagataacaaacctgagcaaagtatccagaggcaagaggtctaaaggaagaacatctgctgggaaaattggaagtggcattcttggagagcaacctcctgggcatgagcaagcccctgcagtagaagttctgtcactgcaaagtcttcatggccagcgtcccgtctctgcctcaagttctgagagagaaagttactctggtggtagatcaagggaacctagatatcaaactaatgttcttggcatgcagcctcgggtggataatatcagagagtggccacgccggttggcacaagataggcggcatggcaatggcgtgagttcgagtgaagatggtgcggaatctggggaaaggagaccacgggtggagcatcggcagatctcgttgataaacagaacaataaacgatgacatagattcgctctcaatctcaagccgtgaatcaggggaccagcctcgtgcgagcgtccggaccttgtataacaagccaaggaggaccagagtaagcctggatgattgagccatgctctttcatgcccgcgaacggaatctttttgtggaaagaagccctggacatctgaaagggtatctaatctgtatatttcattgggtgctatgaaagcaccaaagagatagcgtagagcctctcgtggtagacgtgtattgaatggactagggacgagggtttgttgcacgataatcaggctcctcttctgtagatagagaatcttttcgggatgttgtaattttgactggtgcattgtgattgatgactgcccaataatttgatcgaatcctagcttgttaaaaaaaaaannn

SEQ ID NO: 27788 - DNA, 845 bp, Setaria italica
  Peptide Sequence Number=SeqID_93762
aagacagatcaaagcttcctatttcatccttcaaggatgccatcacttcaactttggaaaatcaccaggtggttcttatttctggagaaacaggctgcggtaaaaccacccaggttccacaatacatcttggatcatatgtggggcaaaggagaatcatgtaagatcatatgcactcaaccacgtcggatttcagctatctcagttgccgagcgaatctctgctgaaagaggagaagctgttggtgatacagttggatataagatacgtttggagtcaaaaggagggaagaattcatcagtcatgttctgcacaaatggcgttcttttgagagtactgataggaagaggaactaacacctcaaagacacgaaatccgaagcggtcattagatgatgcaattttgggaatatcacacatcatcgtggatgaaatccatgaaagggataggttttctgatttcatgctgactattctaagagatttgttgccagtgtatcctcatcttcgtttggtactcatgagtgcaacaatcgatgctgagcggttttcacaatacttcaacggatgttcagtcattcaagtccctgggtttacctatcctgtcaaaacttactatttggaggatgtgctttctattctgcaatctgtgggtgataatcatcttaatactacaaccagtgacaaaaagcagagcagcgttttaactgacgatttcaaaagctcaatggatgattcaattaacctggctttactcaatgatgaatttgatcctctccttgagcttatttctgcagagcagaacccagaaatctacaactatcagcattcagagactggtgtaaca

SEQ ID NO: 27789 - DNA, 342 bp, Setaria italica
  Peptide Sequence Number=SeqID_93763
ccccttgtccagctccgcgatgtactcgtccctcatcgggcacgtgtcaccgacggcgcacctcatcaggatgtcgttcatcaggaccttgatcctctcgctgaggttcacggcggccggcgacgccgcggcgacggaccggaccaggctcgctgccgcctcctcccggatggggcggaaggagagcacgcgcttggggcccagcagctccgtggcgcagagccgccggacctccttccagtgccggctgccggagggcgcgaaggtgatgttctggccgccgtaggtgaggatgtccgcggtcacgtacaggggccggtcggagacgacggcgtcgtgggt

SEQ ID NO: 27790 - DNA, 297 bp, Setaria italica
  Peptide Sequence Number=SeqID_93764
ttccttctcctctcgtcttcttcttccttgagctttgctaccatagatacgatacggcactatagttaagttgttgcatggacaagggccacctgctcgccttcctcggcctgccgttgcacttgcacgggaggatgtcggcggacgacccaggcggcagcaggaggtccgtcgaggtcgacttcttctccgacgacaacaagcagacctgcgtcgtcgagcgcgatgagccgcgagccgccagcagcggcctcgccatcaacaaggaggacctcaccatcaacctccttcccgcgg

SEQ ID NO: 27791 - DNA, 427 bp, Setaria italica
  Peptide Sequence Number=SeqID_93765
aaggaagaagaacctaacaatggacaaaaaaagaatgactactatcacataaagaggcaaattgagtcagagctgattcaatccggtggcatcgcatcgtcaaagcctgttcttgacctctcaaaacctgaacatctacttaaactaaaggatcgtttaaagaagtactgccagtagttgataaaccaattacagaagttagagaagctggaatatgcatgcgtgaaaattcattctatgtagacacagtacgaagctttcgtgatagaaggtatgaatacaaaggtcttaacaaaacatggaaaggaaaattggcagaagctaaagccagtggaaactctattaaaattcaggaagcgcaggacttggttgttctatatgattctttgcaacttgctcacaagtgcatattgaattctttttatgg

SEQ ID NO: 27792 - DNA, 730 bp, Setaria italica
  Peptide Sequence Number=SeqID_93766
ggggtttgctgcaaggattagtccaactattccgcgaatttcagcgtcctttacgtgttcctgctcagaaaataataacgggagggatgcgcatgatttttcttgtttcgtcaggtggtgttcttgttgtgagttcaggaccgaaataaatacaggatgattcttggtttcttaagcttcaccttatttgcttcaccttcagttctgagtgatcgattctactgagcatttatttactagtatatcatgtcttttttcttcgttgtttctgaactagatgtactctgagtaacaacctgttgcatagctgtatgctttgctaaacaaggaacagaatgttagttgtttaagcctcctaagattccaaaggaagaaataatctttagattacaatactgtgcctcttgagagcttcaattttggatttaattggttatctgtcattcaaatttaactgttaaatcaatctaggaatgcgtcaaaaatgaacccctattggtagggaacggacaatgtggacttccctgtaatgtctgtacaagtagaatagcttgctattttgcctattttttactcttgtgagaaccaatatgtgcccatctttagacacgtttgctcttatcaaattcatgttatcaatctgcagttactgatcggcacctatctgtgcgtttcctgttcttgtgagttattgcattgctcttcctttactcatcgattgccaaattgt

SEQ ID NO: 27793 - DNA, 425 bp, Setaria italica
  Peptide Sequence Number=SeqID_93767
catcagatccatcgtcgtccctgtttcatcgatccatatactccattaatacttgggcagcagggaaaggcagcatgaagatgttcgtggtgctcgctgtccttgctctcgcagccgccgcctcctctgcgcagcaggtcagctgggactggctgcagtcgggcatgtacggcgccgccgggtgtaccactgcgccgagctcctgcgtcagccgcagtgcagcccggcggcggcgccgtactacctccggcgggagcagacgatgtggcagccgagcgccgtctgccagccgctccggcagcggtgctgccagcagctgagcctgatggacccgatgtcccggtgccaggccatgtgcggcgtggcgcagtccgtcgcgcagcagctgcaaggcggtgccgggaccgttacggttcttaccggtt

SEQ ID NO: 27794 - DNA, 316 bp, Setaria italica
  Peptide Sequence Number=SeqID_93768
tggtccatcacttcaataccgcataccaattgcttttcctaaagggctagatttaagcagcaacaaaactgaccggtgcgattcccccggagattggtcagttgaaggccctcgtttcactcgatatcagcttcaacaacttgacaggaccgatccccccatccatctgcaatctcacaaacctgcaggtgctagatttatccaacaacaatctcacaggtgaaatcccagctgtattggagaacctgtacttccttgccgtattcaacgtttctaataataacctcgaagggcctatcccaactggcgggcaatt

SEQ ID NO: 27795 - DNA, 330 bp, Setaria italica
  Peptide Sequence Number=SeqID_93769
tctcgctctccctctctcctcctccccgccgccgccctctctctcctgtgtctcgtgatgcggccaccgctgatttctctctccttctcggttcttgcttgcaggggttccagggagggcgggcagctgggcatgggcgggaatgaggagaaggcccatacggcccacatcccagccgcgatccaaattctcggtggctaccctgtgctctcggcgagctcggacggccgcggcagcagcgacccgtcggcgccggcgacctactgcctccgccccgcggcctcatctccctcaactaccgcccctctgcctgagcccaatctcgcatcg

SEQ ID NO: 27796 - DNA, 599 bp, Setaria italica
  Peptide Sequence Number=SeqID_93770
tggaggtactcgagggcgcgggccacctgcagcgcgaccgacacccgccgcgcccacagcatcggcacggcgcccttgccgccgccgccgccgtggagctggtcgtgcaggttcccgttcggcgcgaactccagcaccagcacgccttcgtctcgctggtcgcagaaggcgaggaggcggacgatgtgcgggtggcgcacgcggaggagggcgtcgagctcctgccggaacgcgcggtggaggcgctcgctgctgcggtggaccttgacggcggcgagggagccggcgaggcgcgccaggtagacggtgctgaagccgccctcaccgacgactgccgacgtgaagcctcccgtcatggcctccacctgcgcccacgacagttgcctcgcggaggcgggggcagccatcatcttgccatcgccggctgggtcctttgtgccgggccgatcagcagtgtccccgaagcctcctcggccaccggcggccacggcggcggcgctgcccccgcacccgcagcagaggaggccgcgcctttgcagcagcatatcgtctccgcctctcgtaatcgtacctgtttgtggagcgttgcgggtttggac

SEQ ID NO: 27797 - DNA, 1528 bp, Setaria italica
  Peptide Sequence Number=SeqID_93771
ttttttttttttttgttttttctaacagaatgcttcaagcaagcgagcataaggtacagattagacccaccatctgatcaagtcagacagacgcgtatgctagtactgcgaaacgtgggactagcgctaagatcgtaatttacaggacagagacacagccgggctattttacatcagtggctagcatcgggcagcctagggtttgacttgaggcataacaagcggtttgcgttgcgaggtcagtgagcgagggcggctagtttctttctgcagttgagtcttaggttgagaggtacgaagacatggctcttctgaaatccagattcataggggagcctgtgaaggggttgccgtcagggacccatagccgacctctgttaggaagcatgacatgcgggttcatgcggtccttgtcagcacttgtttgatccgacggagcttcttccttctttttcttgacgaattcgaagaactctgcaacttgccgagcatattgtcgtttagcttctatgtctttgttgaaatcaatgtcaggttcacaatccaagacaagagcagggaccttttggatacttgagtgcatgtgatttccttccaagtaaaatacacgatcccgtatttctggaggcaaggagccctccatatgcatgggcagttgactgactgataatacaccaggacctgatccttttgaaggaagcaaccagctctcatgcttctcatgcaaaccttgcaggtagtcaagtgtaacaccaccttcctctgatcttctgcgatgcatcattcttttgtggcaagtatctggactagctcttagatagataaatccatctggaatgagacctgggagtgatgacacaactggatcaaaccaggaatcatagatactgatctccatctcattcatccaattagcttcatgaacagcacggacaaacaccatccgatcactgaatacacttctttccatcagtctgagaggttttattccagcttgagattccctttcttgcatgaccctcgtcacaaacacatagttttggaaagtgtatgcatacctatgtggctcagcatagaaggcatccaatatattgaagtgatcaggtccaacatcctgccacttatcaataggctcaggaactatctctacaagatcacgcagttcaatagtctcattagctattctttgaaggaaagtggtctttccaacgctaatattcccttccacacaaaaggtcaacctcttcttttgagtgggtttagatgaatctgtatccttcagctcctcatcgacactctctttaataaatgatgttatactctcagcatggttcttatgtacaatgccaacagaactctgtaagaactcaaccatctgctcactagacttgccaaagaacttatccctgtagagctgcttgagctgcgcgacgccctcgaagccattatccacgagcttcctgaggttgcgcggcccgaccccgggaatcgccagaagctcgacgctcgtccccaccgcttggattcg

SEQ ID NO: 27798 - DNA, 1201 bp, Setaria italica
  Peptide Sequence Number=SeqID_93772
ttttttttggttactaacccagatgacacgtaaacacaaaccttgggcactaatgcatcacaaaaatggatagtcctatacctagcatgttggtaattcgtaactgtgtcagtttctcagtcgaacatgaggcgaacatcagcaggaaaacatacagcatcctgtatctgcctgcactcacaccttgtggcgcttctgttcgtaactccaacctcccaggatcaaggcgtgactagagaattcatagtaagcaaccgtagaaggcttttcgcagcgccgcttcgtccaaatttctaccaataaacactagtttgttgattctcttctcatcaggttcccagggctttgccgggcatccttccagcatagagtgcacaccctgaaatacgaagcgtccagtggactcatttacggatataacaccctttaatctgtacagatcttcccctttctcatcaaccagcctctccagccaatcatttacctcatcaagatcaagtaccccctccgaaacaatgctcacactagtgacagctgaatcatgaacatgatcatgatggtgtccatgtgcatctccatggtgacagtggcctgtctccttgctttgttgcaattgaacttcagcctcaatcctgtcaaggtcatagcctccaattcctagcacaaaatccatatcaacatcgccaaattttgcctttttcatctgtgccattccatttatgagcttaattttcttagttaatgcctccagttctgcatcattaaccaaatcaatcttattcaatataatccggtctgcataagcaacttgttctactgcctcgtttacaacccatctggcttttacttcattcaaatgcttcatggcatgcttgcaatcaaccatagtaaccacaccatcaagtttcacatatttagaaactagttcatctgaacagaatgtctcaataacaggaccaggttttgcaagacctgttgtttcaataacaatatgatcaaacttgtcccccttctgcttcaccaacttcagaagcatctttacaagatcccctcggacagtgcagcacaagcagccattattcaccattacaatgtcctcagcaacagaagagtggctagcaacaagcgagctatcaatatccaccttcgtccaaactctatttttcgtattgttacttagttcgttatttccttttctttt

SEQ ID NO: 27799 - DNA, 558 bp, Setaria italica
  Peptide Sequence Number=SeqID_93773
gctcggcgtcaccttcggcggcggccgccacaggctctacgtcggcgcccgccgcgccgccgagtgggacgaggacgaggaccacgtcgtcgtggccctcgacggcgagcccgtcgacctcgagcccgccgagaacgcgcgctgggtctccaaggccgtgcgcgggctgtcggtcacacgcaccggcgctgccgccaacgccgtcaccgtcgagctcgccggcgtcttcatcatctccgccaacgccgtgcccatcaccgacgaggactcccgcgtccacagctacggcaagacggagagggacaccctcgtgcacctcgacgtcgggtacaagttccacggactcaccggcggcgtcgacggcgtgctcggccagacttaccgcccggactacgtcaacaagctcgacatcgccgccaagatgcccgtcatgggcggcgaggacaagtaccgctcgtcgggactcttcgccaccgactgcgctgtctcacggttccagcgcgccgccggcgacggcttcacctccttcgcctcgtaaatggcggcacagaggcgcat

SEQ ID NO: 27800 - DNA, 797 bp, Setaria italica
  misc_feature (1)..(26): n is a, c, g, or t
  Peptide Sequence Number=SeqID_93774
nnnnnnnnnnnnnnnnnnnnnnnnnnagtctgaatgtgctgtgctgtgctggtttagttttgtcaatacaatagcacaaaacaatcatacacagattacaattatatatcgaccatttcaactgaagcacacaacaacactagacagaataacttgttgggaaatactgtgacgaaaacgaacatacgttcaacatgacttgggtactgcatgcacgcatgcaaattattcaagatctccacgacgatactgatgatgaaggtggcctagcttgtttacgacggtacggcacggatgccgaactcggccttctcctttctgacctccgcctcattgatgaaggtgaccttgctcacgacgtccgcccgcagggtgtcgccgaagagcgcgtatggggtgatctgcaggcctgggttggagctgctgtacgcgttgatcgcgacggcggtcgtgttgccgatgttgatctggaagtgcagcaggcccagcgggaacacgaagaggtcgcccttgttcagcgtcttggtgtaggccgtgttggtctcggcgctgatgaagccgacggagatggttccctcgacgacgaagatgagctcggagccttccgggtgggtgtggaggggcacgactccgccgacgccgatgtcgacgcgcgtggcgctgatgccgagcccgttcaggcccgggacctgcttgacgttggccggggccaagccagtgttgaagggggagaagaccgggccggatctggagaggtcgtcggtgtagaagtcgttggcgttgaagagagccttggg

SEQ ID NO: 27801 - DNA, 195 bp, Setaria italica
  Peptide Sequence Number=SeqID_93775
gccattgccggtgcacctgacactaataaggaagccgccgggcgtgttcttggcgttcgctgcagcgctgtgcctggcgagggctcggaggggcgcagggaggaagacgcggcccaaggtcgctgccattgctcgatctcttcaattcggcagaccgattgcggatgcaagaggcgtctcttcagttttcaaatg

SEQ ID NO: 27802 - DNA, 566 bp, Setaria italica
  Peptide Sequence Number=SeqID_93776
atgaaccggaaaacaatagttaaatcaggtaacattggggaactcctgtatggttcctggtttctatgaaaaagtgttgcttttaagctagtttctggtaactagtacttcctttgtttggtagatagatacatctttacttcggtggtagattggcttcttattctcaaaaaatgcacaacagaatgtttcacttgtttgtcaaaaagtaatattagcagcccaacaaactaaaaccatttttgttcaaataccttttgaatagcattccatcaaagccaatttcttaataaacaatccaagtggattcttgcgctccgagcatgagaagaaagatatagtcaaacataagcctcctaatgtacaatttggaaatagtacttcaaatttgtccggtgtgaaatgctctcagtgctattttatgatgtaccaaattatttataattcatggtaccaacatgatagaccttcagttagatgttttccacctcagaagcatggaaaattggttcttaccaggatagagcaaatggcatcatagaaagttcctaatgatttggttataa

SEQ ID NO: 27803 - DNA, 225 bp, Setaria italica
  Peptide Sequence Number=SeqID_93777
ctagatccaagtgcttctcaggatggggagctgagcatgagcattgaggtcctgaagactgaatttgaggctgccctatcaatcctaaggaagaagcgggttctgtgacgccatcatcgtgtcgtccccgaacatgacccactacgagatactcatggacatcatcagccaccgcgagccgcaccacatccttgtcgagaagcccctgtgcaccaccgtgcagga

SEQ ID NO: 27804 - DNA, 616 bp, Setaria italica
  Peptide Sequence Number=SeqID_93778
ctcgtggcatgcttgatctctgcatgtttgctgaaggaagtagaaacgagcaagaaatttctgtggttggtgacattgggaagggtgaagcctttgttccagagagcattgtcaggtttggaaagagaactgaaggcagagatggagttgtaacaataatggccgaagatgaacggatcaagtatgctctatttttctgtcccatatcaacattttagtcccctaagtacttacaatttaaggaacacttgtacatttaaatggcagtttctaaattaatatcatttgttactctgtgaccacatgatcatggcaaactgaattgaaaaatgacaaaattgattgaagtttggtttaagaattgaagttaagatgcagaatgcatagtttagcagttgggaggttttggtttttgtatcctagcaaactttgtttttataggtatcaaggtcttcatcatggatccagctacttggagcacctcaacttcttgtctgctataagggctcaaggtgcctctggaccttccgtcaacttaagtgatggtctactatctgttgccatcggtgttgctggccaattatcaattgagcaaggccggtttgtactagtgcga

SEQ ID NO: 27805 - DNA, 711 bp, Setaria italica
  Peptide Sequence Number=SeqID_93779
aacgagctcggcctccccgctccacaggtacaagcctctaagctctctccagtgtgcatgatgaccttgctagggtttgtggcatatcttcctgtccttcattaattcgatcgattgcatcgcaaattcgcaattacacttgcaacactaggtttatttatagatattgtatccaaagctgatagatatcgttaagagtggtacactacggcaagtcagaatggtggccatacgtgaacaccgttttcctttccttgttaaggtattggaaagtgtcattacttgtaatatgttacacattcactcattgtttctaactgctacaactcttgcaggtaaacaactagaacaggttcaactgcaacagtgggggaacactggtagagaagtgctgccatctctttgatttgatgagattgtttgcagctgcaaatccagttcgtgtggtggcttctggagccattgatgtaaaccacaaggatgaaatgtatgatggaaaggtcaggatgtctcactgtttgatccaaatatttaagtgtgtcagttcacagaaggcttggtgaatcattgatgaacgtgtcagtaaacaataggcttggtgataaaatacatccacatgcattttcttgtattaaaattgaaaataatgtttaggatgaagatcaaaatttgatgttctgatatagtagatacatggtcggatgaattagg

SEQ ID NO: 27806 - DNA, 470 bp, Setaria italica
  Peptide Sequence Number=SeqID_93780
ttttgttttaatgccatcctgtcaagtattccaaaggctgaattttgatggtgaatcattgataagtgtgtcagttcacagaaggcttggtgaatcattgatgaatgtgtcagtaaacaataggcttggtgataaaaggcatgcacatgcattttcttgtatgaaaattgaaaatatgtttaggatgaagatcaaaacttgatgttctgatatagtagatacatggtcgaatgaattaggaaatggaagcacttggtcagcattgttatggaggtccattcaaatctgcagatctattatctctagaagagggctaagagatgtagtccttttatgatattcttcatcagttagctttcatgttttgtagggagacggagagctagattttcatttaaatagtgagctctgagggagcctttgcaatcctactgcacttctttgagacttgaatggcagctcacctggcg

SEQ ID NO: 27807 - DNA, 1338 bp, Setaria italica
  Peptide Sequence Number=SeqID_93781
caatcactggccaccgctccaaacccgtccggattcaacgaaccaagaaccggcggccggcgtccggcgtcgacgagggagatggcggcggcggcggtgaggtacgggatagtcggggtcgggatgatggggcgggagcacctccacaacctcgcccacctcgccgccgaggtcgagggggagcagtccgtcaaggtgcgggtcaccggcctcgccgacccccaccaggagtccctccgcctcggcctccagctcgccaacgagctcggcctccccgctccacagaccttttcaggtcaccgcgatctgctggacagcgggttctgtgacgccatcatcgtgtcgtccccgaacatgacccactacgagatactcatggacatcatcagccaccgcgagccgcaccacatccttgtcgagaagcccctgtgcaccaccgtgcaggactgcaagaaggtaattgaagcggccaaaaatagaccagacataattgtgcaagttggattggagtacaggtatatgccacccgtggcaaagctgatagatatcgttaagagtggtacactagggcaagtcagaatggtggccatacgtgaacaccgttttcctttccttgttaaggtaaacaactggaacaggttcaactgcaacagtgggggaacgctggtagagaagtgctgccatttctttgatttgatgagattgtttgcagctgcaaatccagttcgtgtgatggcttctggagccattgatgtaaaccacaaggatgaaatgtatgatggaaaggtcccagatataattgataatgcatatgtgatagtagaatttgataatggctctcgtggcatgcttgatctctgcatgtttgctgaaggaagtagaaacgagcaagaaatttctgtggttggtgacattgggaagggtgaagcttttgttccagagagcattgtcaggtttggaaagagaactgaaggcagagatggagttgtaacaataatggccgaagatgaacggatcaagtatcaaggtcttcatcatggatccagctacttggagcacctcaacttcttgtctgctataagggctcaaggtgcctctggaccttccgtcaacttaagtgatggtctactatctgttgccatcggtgttgctggccaattatcaattgagcaaggccggtttgtgaccatggaagaggtcttaggttcttagcctgatgataattcaggtgaaacatagttggacatgccaatttattgtaaaaactttttccgtcaattcaagaatgctctgaaaattcccgtgcttaagcaatgttagtaattacaggcatttgaa

SEQ ID NO: 27808 - DNA, 277 bp, Setaria italica
  Peptide Sequence Number=SeqID_93782
aatttgttggcattgaacctttcttctaatattttgtctggacccataccagatgggttatttggtaaactgaaccagctgagctggtggctggacttgtcacacaaccaactcacagattccattccagatgatgtcggcagctttatcaatcttaaatccctgaacatctccaacaacaacatctctggccaaatcccatccactctcggctcatgcgaactcttgcagtcgcttcgcctgggagggaacttccttgagggacaaatccgatttc

SEQ ID NO: 27809 - DNA, 453 bp, Setaria italica
  Peptide Sequence Number=SeqID_93783
atctgcaaagcttaggaagtggttttgaatacgtcaagataaaaaatcaaaccatcggttcaggcaggttaacatgttaagaacaagaaaatcctgagaatacatattaacttgacttgctagctggcaatatgaacaatgaaaatattattgacttgatttcggatagtgatgatgattttgaccagcagccagcttctgcaagcacaagatttggtcaaaaatggtgaagagcgtccaatcaattttgaggatgaggattggcagaggagtgctcctgccccatcttcttcaaggaatatccataataataatggtcaatacaggactcttccaccatcctttacaaatggtagaccaatggagagtgctcgtcatacgtttggttcaggggacatgactcgttcccatccaagttcttatatgcctatgcgacaagcaaggggcctttct

SEQ ID NO: 27810 - DNA, 242 bp, Setaria italica
  Peptide Sequence Number=SeqID_93784
ctgtgctgctggcctgtgacctcgtcttcctcctcgaagcgccgccgccgctgccggcggccggagatggcgcgccgcggcgcacagctcctcgcggcccgtcggatatcctcgtcgccgtgcctcgctcgtaggatcaatcaaacagaaagtgagattgttcggatgtttcatcctccagtacgtcagagtgaggaggcaatagcaaccattgggccaaggtacacgcactccgtacgtgt

SEQ ID NO: 27811 - DNA, 434 bp, Setaria italica
  misc_feature (398)..(434): n is a, c, g, or t
  Peptide Sequence Number=SeqID_93785
agacagcaaggcaagtcgctaatgttccagtctctgccaaccctgtaccttacgaccaaatgaagagccaatgtgaagccctggttatggaaaagcaacagaagatgtctgttctattgagcttcaagcattcaaggactgactcccatggttcaaccgggtcatctctgcgatccgagcatgagttgcaatcaacttggaaggggcgcatgcgccgcagcgattcagcatccagtgaatctgactgttcgttcaggctgcctcctgcaagtccatacgacaagttcctgaaagcggctggacggtagcttgacccttcacttttcaagtctgtatacagtatacaccacaactgaatgtaaataatgcagtctgccagtatacttgtttaaaaaagnnnnnnnnnnnnnnnnnnnnnnnnnnnnnnnnnnnnn

SEQ ID NO: 27812 - DNA, 444 bp, Setaria italica
  Peptide Sequence Number=SeqID_93786
acaggcaagtcgctaatgttccttcaccatttcctgctctgttcccttctccacactttacataagtaactgatgtttcaagaacttatagcctgttaggatttcaccaaagaggaatgttctcttattttgctttaccatatcatgtcatattttaaatgtatggcttgatttactctcttaaccttttcactgcaataaagatgatttgcagccatctcgtagaaggtgtttgcatacaatggcatcagcaatgctcatcttttcagcgaaaatagctgatcttcaccagataattcctcttgtcaaagcagcagcaccagagaaaatggttgatcctcatctttgcgtgatggatgactgccaactcattaatacctctgcagagtctgcgaacagtgagatggtttatggttctgaggaagatgtaaagttaattgtcta

SEQ ID NO: 27813 - DNA, 655 bp, Setaria italica
  misc_feature (608)..(655): n is a, c, g, or t
  Peptide Sequence Number=SeqID_93787
tacgctaatgttccagaattagccacctcagtaccttacgaccaaatgaagagccaatgtgaagccctggttatggaaaagcaacagaagatgtctgttctattgagcttcaagcattcaaggactgactcccatggttcaaccggggtaaatggacttgaaacaaacgagtcatctctgcgatccgagcatgagttgcaatcaactaggaaggggcgcatgcgccgcagcgattcagcatccagtgaatctgactgttcgttcaggctgcctcctgcaagtccatacgacaagttcctgaaagcggctggacggtagcttgacccttcacttttcaagtctgtatacaagagaatttacaagttttccgagtcattccttggcaccctttcttactccccgttcttggagtttattctttcaagtgtacatttacaatcctcgacaaggtgtacaaatttctgttactgttggagactcataataaatagaaatgtataggtaatctctcgtgtgcgtggatctggatcgcacagtatttgttcatttgttggtcgtgaaaggaataatcttttacccaaaaaaaaagccgtgtcgctgttgaaagnnnnnnnnnnnnnnnnnnnnnnnnnnnnnnnnnnnnnnnnnnnnnnnn

SEQ ID NO: 27814 - DNA, 1379 bp, Setaria italica
  misc_feature (1359)..(1379): n is a, c, g, or t
  Peptide Sequence Number=SeqID_93788
gtcgacgggaatggagcccggggagtacggcggcgggccggccaccatcaagccgcgcaagtactggtgggggaaggaggaccgcgaccccgtgggcaacaccgacgacttcatctggaacaaggacttcctcccccacatggagcgcgtcatcgccaacggcggcgctgccgcggaacccacaatcacccgccgttccccggtggacgaggaggagtcaggatttctgagcatcaaccgtgccatgagccttgacagtgtggaggttgacctgagcaaggagcttcaagcgccgaccaggccaatccttcaaacgcaggttgaggctgccaggagaggccgggccattggtgctgaggctgtgaatggtgccacctctgcaagatggaggctagtcccgactcgccgggagcaggctaagtgggacagagcagccaaggcagctactggtggcagcgatgttatactaagggagtccaagtcaagagtgcagcaaggggaccctaaggaattggcagctagggccagagaggactacctaaagttgaaacaaagattgcagctgctcactttaggcattggtggtgttggtgtagtctctgcttatgtttcatactctcctgaaattgctgttagctttggtgcagggttgattggatcattggtgtacctccgcatgcttggaaccagcgtagattccctagctggtgggactggagaaactgtcaagagtgctgctgcacaaccaagattgcttattccagtggtacttgtgatgatgtataacagatggaatgggatattagttccagactatggcttcatgcacctggagttgataccaatgcttgttggattttttacctacaagattgctacattcgctcaagcaattcaagattcgatacctgcagttgaaaaacgtgaagtttgaacagtcctggtgaatagaaaataaaggtcttaccctacgcactgagggaagattggccattggtcaatcagatagtaaggttggtttggaagaatctgatctgacgtcgacaccaagtagatgagatgctcattgaggatgccatctgaaaacttttagcggttaaccacatattttacacaaatattctactattaaggtggtaccacattcattccatgttgttaacacgtagatcatcaatgtacaaatttacaacatggaaactttatcacaatgacagcagatagcaggacgaacaaattaaatggtatacagtatacaccacaactgaatgtaaataatgcagtctgccagtatacttgtttaaaaaaaaaaaagccaaacaaatgtcaaaaaccattgaaagaaaaaaaaaaaaaaannnnnnnnnnnnnnnnnnnnn

SEQ ID NO: 27815 - DNA, 1839 bp, Setaria italica
  Peptide Sequence Number=SeqID_93789
ctcattgactttctcaatggccaggttgacagcacgcatatgtttaatttggaaggcctcataccaaaactttgcgaaattggtcaagagctaagggaagatgataaaggcctccgtcttcgatctgctgcacttcaggctcttgcttctatggtccaatacatgggtgatcactcccacatttcaatggaacttgatgaagttgtctcagtgatcataagctgttatgaggttaatcaaaccctctcaataaaagaggttgtcagacttcaagatgatgatgatttggtcatcaatgggaacttggctgtggtaccagtgtctggacaaaacagtgccaaagtggcatctgatacaatgtctgtgtctgaaaatccagcacattgggctagggtttgcttacgtaatatggctaatattgcaaaggaggcaacaacagtgcggcgtgttcttgatcctctcttccgcctttttgacaaccatgactattggtctcctgaaaatgggatcgctctatctgttctgcaagaaatgcagaaactgatggacaaatcagggcaacatggccatttgttgttatctttcactataaagcacatagatcataaggttattgccaagaaacctgccaagcaaatcaacattgtaaaagttgcctcaaatcttgcaaggcatgcaaagttgaaggcatcggtgacaatagcaactgcaatcagcgacttaataaagcacttgcgcaaatgtatgcattttgctattgaagcatctaatgctcatgctgatgatgacaagtggaacagtgcactccatgtggccttggaggattgcctcgtgcagttgacagaaaaggttggggatgttagtcctattcttgacatggttggggtaatgcttgagaatctctctcatactgctaccatcgcaagatcaacaatttcatctgtttatcgcacatcacaaatagcagcttctgtctacaagtcatcataccatcagaaggcatttcctgaagctttatttcaccagcttctcttagcaatgttgcatccagacaataagacaaggatcggttcacatcgtgttctatccaccattgtcgcaccttcactgctgtgtccatggtcagccatgagctttcctatcccagcgaagggtgatgatttgcagaacttacgcctgttggctctctcagctttctcttctgaagccataatcaatgaaatgaggaccaaaaacaagatccaagaatccttgcagaaaaatgacaaatcagaagctatagttggtcctgagaatggatacgcactgacagaaccaaatacaaggcagtatctagggagcccatgtctgaatgaacatcatcttacagcatttaacgatgaaaacctaaagttcatgaagttgaacaaccaccagattgatcttcttctttcatctatttggagtcaagcatctctggaggataactcacctgcgaattttgaggcaatgggacatacctacaacattgctttattttgttccaaatcaaaaagctccagtcatgtggcactagtccgctgtttccagttggcattctctatcaggaaaaagtctcttagccaagaaaatgatttgcagccatctcgtagaaggtgtttgcatacaatggcatcagcaatgctcatcttttcagcgaaaatagctgatcttcaccagataattcctcttgtcaaagcagcagcaccagagaaaatggttgatcctcatctttgcgtgatggatgactgccaactcattaatacctctgcagagtctgcgaacagtgagatggtttatggttctgaggaagatgaaagt

SEQ ID NO: 27816 - DNA, 1098 bp, Setaria italica
  Peptide Sequence Number=SeqID_93790
tagtacctaaacttaactaatttaaattaaccttacttagtactaagtaagttacttagtgggacatacctacaacattgctttattttgttccaaatcaaaaagctccagtcatgtggcactagtccgctgtttccagttggcattctctatcaggaaaaagtctcttagccaagaaaatgatttgcagccatctcgtagaaggtgtttgcatacaatggcatcagcaatgctcatcttttcagcgaaaatagctgatcttcaccagataattcctcttgtcaaagcagcagcaccagagaaaatggttgatcctcatctttgcgtgatggatgactgccaactcattaatacctctgcagagtctgcgaacagtgagatggtttatggttctgaggaagatgaaagtaatgcacatgcctttctttcagccataaacaaggatgatgtggagttaatagaaatcgtgatgtcccattttaagaagaagtttgaaaatttaccagagaagtttaatgggatagaagaacaacttcttcaagagttttccctggatgattcatttcctcttggtgctccgctattcatggagacaccacactcttgttcgatgtatgctgaaaaggatgaccactgttttgatgaggatggtgttccttctgagctagatgatgccgatgacatcattttcgaacacagtggatctcaatctgacaggaaaacatctggttctatggcttcatcagatgttctaactgtcaaccaactaatagaatctgttcatgagacagcaaggcaagtcgctaatgttccagtctctgccaaccctgtaccttacgaccaaatgaagagccaatgtgaagccctggttatggaaaagcaacagaagatgtctgttctattgagcttcaagcattcaaggactgactcccatggttcaaccggggtaaatggacttgaaacaaacgaggcatctatatctgccgagtctagataccacatgtatcattcagatttctgactcgtgttttttcctcgaggaaagttctgttcagatcttaacatcactcttatcgcttgtcatgtattgcagttaaa

SEQ ID NO: 27817 - DNA, 472 bp, Setaria italica
  misc_feature (462)..(462): n is a, c, g, or t
  Peptide Sequence Number=SeqID_93791
caggtggcgctccggcaggtcctgctcgagggcgccagtgtagaggaaggcgaggaggaggggagaggctcgtcgtgggagagctcggggagggaggatggagtcgccggcgggggccttgcactgctcgtcgccggacaggacgtggcgcaacacctcggacctcgcggccaggatggctttgtgggctggaattggggccccagtgccgggtctcacgacgatgtcggtgtgcagctcctccttccacgccagcgccaagccttgctcgaggaaggcagctctctggctggtctcctccctgcttctcatctccttcttcacctgctcccatgcatgtctcatccccatggttgagctgttaggcttagttgacacgggagacttggcagaaccatggccatcatctgcttcttgctcatccttgttcagcaggaagccgatgatggccttggcaccttnatagcaggga

SEQ ID NO: 27818 - DNA, 1799 bp, Setaria italica
  Peptide Sequence Number=SeqID_93792
gggcatgggcagtgcggtggaaacactctgcggccaggcctacggcgcccagaagtacgagatgctgggcatctacctgcaacgctccgccgtgctcctgtgcggcacgggaatccccctacgccgtcatctacgccttctccgagccgatcctggtgctcctgggacagtcaccggagatcgcccgcgccgcgtccatcttcgtctacggcctgatcccgcagatcttcgcctacgccatcaacttccccatccagaagttcatgcaggcgcagagcatcgtgctcccgagcgcctacatctccaccggcacgctcctgctgcacgtgctgctgagctgggtcgtcgtctacaaggccggcctggggctgctgggagcctccctggcgctcagcatgagctggtgggtcatcgtcgccgcgcagttcgcgtacatcgtgatgagccccaagtgccggcacacctggactgggttcagcttccaggcgttctcgggcctgtgggacttcctcaagctctcggccgcgtctgcattgatgctctgcctcgagacctggtacttccaggtcttggtgctcattgctgggttgctcccgaaccctgagctcgccttggatgcgctctccgtatgcatgactatttcagggtgggtgtttatgatttcagtaggattcaacgccgctgcgagtgtcagagtgagcaatgagcttggtgccggcaacccaaaatctgcatatttttcagtgtgggtcgtgactgcggtctctacactaatcaccatcatccttagcattgtgatcctctgcctgcgcaactacgtcagctacttgttcacggagggtgaggtggtctcaaacgccgtggcagacctctgcccgctgcttgccatcacgatcatcctcaatggaatccagcctgttctgtcaggtgtcgctgttgggtgtggatggcaacaattcgtagcctacgtgaacatcggctgttactacgtagttggtgttccccttggcgcccttctcgggtttgtcttcaagcttggtgtaaagggtatttggggtggtatgattggaggaactgtcatgcagacggccattttgttgtgggtcaccttgagaactgattggagcaaagaggtagaagaagcacagaagaggttgaacaaatgggaggataagaagacggagccccttcttgcgggggtcagcaatggcaattaactgaaacttcactatccatcatcaatcatgcacgatggaccctgcaaatctttccccggagtgtttagatttttttttacagtatcagtgatatcaagcgctgagaaatggcatacattgagaagcagtgtactcacatgtgactaatttagtgaggcagaaaggaaccgaggtatcttgtatggttgagtcagagaattcgaggcctacactggagtcgacaatttaaaatttcaaaatcgtatatgatcggatggaccctgaagcaaactaggtagttggaagagtgctatagctagacggaagctttgtagtttggggtgttctaactcctgaacatttttccgatgcgagtcagcatttttcgattgggtatggtgcaccggataggctaagaaacaatatcttggtgcatttgtcgagttaggtgatggcagtatcggaacggtgcagtaggtaaaagaaatggtgagatgtgtgtgtgtgcatatggatgaacattacaagtgtccgctcaaaaaatgtagagaagcaagatggtgtacataacataaataaaatagttgtatgtataataagttt

SEQ ID NO: 27819 - DNA, 936 bp, Setaria italica
  Peptide Sequence Number=SeqID_93793
cataaaagtacaaatattacgtttctaacagctgcttctctgaatcacgagggaactatagaacagcggacgctaaggcctgcgtcattgctcctcatgtacgtctgtctcgtcgtatatctcctcctgcagaagctcctcaatgacatcctccatggttatgataccaacagcctcttcatcttcactcaacgtgggcaggggctcttcatgtatctgcagaacatctgattggtctttggaccatttcttaggcttgctccctctatttgacgtgttctgagtgttagggtagctcttccatcttcgcagtggtggtggaaggttcttcacgaccttttcgttattcttgtcgtcaatagcaatggacacctcaaaagttccaccatcattggctggctgttcagctggttcattgggaatgtttttccttatgaccactgccatgtggctgtggcctttctgaaattcatttaggatgtcgtagaggggcatatcttcgaaaacgcgaggaattttgcggacagttacacttttgataggaacctcgtcatcagggttaaccgataataaattcttcaccaatatcaatccaataatatttttcttcttttcataataaactggcaccctgctatgccctttctcgaggacctgttgcattagttccctgtcaagctttgcattaatatcaattgcaaaggtttgacataatggtgtcatagcatctttagctttcttttcagtgagttcaagagctccagcaattatagtagtttcatcatgggttaactctccacctttacctgcctcatttccatgcagagtgacaagcgtctttagctcagctctacggaagagagctgtctgaccatgacccagcacatagtctagtagcttgcttataggataggctaaccggtaaagtctagtatt

SEQ ID NO: 27820 - DNA, 492 bp, Setaria italica
  Peptide Sequence Number=SeqID_93794
atagcaacaaaaaaagtaagtgagctaatgtgtaagttcgcatcctggatgataaggtattataatattgctcaaagctacagttttgtaatgaaataatgaaataatgatcgaggccattagagtacatacatgaactgtttgcatttgttgtattggttgaagagctgggcattgcttttatggctctgcagttgcagagttacatcagatgcaaataacatttgctttagaatgacgtggaaccctgaaattgcaccatgctgttatcaacttccacgttcctttgtaaacttgctggatgtggtacattacttttggtataaacaacattaatgaaaagcaactaatttatcaacagtagatttttgggactgatttgccaagtcctggcatgttgactgatcttcgtgtcatcgtgtgtaacctagtaaataaactcaagacagatttgtcagttggcccttggctcttatagtcaaatactggata

SEQ ID NO: 27821 - DNA, 463 bp, Setaria italica
  Peptide Sequence Number=SeqID_93795
tgctggagtggcacggcccgctgtggctgggcatggactgggacatgttccacgaggcgaaaatagtctcccgggcggcgtcgccccgggtgcccatcacgttcgtggacatcaccaccatgtcggagcggcgcaaggacgggcacacctccgtgcacaccatccggcaggggaaggtgctggggccggaggagcaggccgaccccggcacctacgccgactgcatccactggtgcctccccggcgtgcccgacatctggaacctcgtgctctacacacggatactctccaggccagcaatccagttcgggtaaaactgataggagagtgaagacaaaccttcagatcaccaattcgattcatacttcataggctggttgggctgcaagcaatggctgggttatacgcgtccatttctattcgtaagaattttttctcctttttcttcggattctctctggcc

SEQ ID NO: 27822 - DNA, 658 bp, Setaria italica
  Peptide Sequence Number=SeqID_93796
tgaaattggcaggaaggggtccttcgaccagggctccaccgagtacgtggaggtggaccgccccgtggcgtacaaggaggtgctcaagacgtgggcgaaatgggtggaccggaacatcgaccccaacaagaccaccgtcttcttcatgggcatgtcaccaaaccacatcacgtaagccacaagtcttttcccagcctgacacactgctactcagctaacttcatttttgcagtaatccattatgaatttgaatttatctgcattttgaattgttccgtaatgccattatgcaagcatggttccttgagcacttgttaacgtcgagggagatcgatcgatcgacacctgctgcaccaaaccgcgcgcgcacagtgacacggctctgtcgattaggcgctgagcaatcaccaatccgcgctgccttcacgagggcagaaccagcgaaagtgacagtgaattagaacctacacctcgcgagaagtgacgcctgcttttgcgaaattaggtgctgagaaaagaccagcgaaccttcagaggtgtaccacaagctggccaccttcactgcagcagcatgccacctgcctgcacatttagcctaggaacattcaggccatacgccgtcagaaacatggctgacgtaggtgcatcatcattgggt

SEQ ID NO: 27823 - DNA, 3520 bp, Setaria italica
  Peptide Sequence Number=SeqID_93797
tttaaaaaagtaaaaagtaaaacgttaaacttaaaccgaacaaaacaaagacggactagaatgttcgtggggactcgctgaaccggaaccagtgggagtcgatggtgtgcctggtgcagtcggtgatcccaaaggggcagaagacgctgaccaagttcgtcaacggcggctccagcaacgtgttctacgcgcacgcctacaacgccacggtcgagttctactgggcgcccttcctggtggagtccaactccgacaaccccaaggtgcacagcgtccccgaccgggtcatccagtggcacgccatcgccaagcacgcacgaaactgggtcggcgtcgactacctcgtcttcaacacctacatctggtggctcaacaccttcgagatgaaagtcccgaaaaaggaagtggtgctctgaggaatcataacaagggagcagcaggagggtggagcaagtacgctctggtggaccggccggtggcgtaccgggaggtgctcaagacgtgggcaaagtgggtggaccgccacatcgaccccaaccgaaccactgtcttcttcatgggcatgtcgcccaaccacatcacgccttgggcttggggcaacggcggcggcatcaagtgcgccatggagacgcagccgatcgtgaaccggacggagcccctcaacatcggcacggactggcggctgcacggcgtggcgcgcggggtgctggcgcggcacctccgccgcgtccccgtccacctcgtcgacatcaccgccctctccgagctccgcaaggacgcccacacctccgtgcacacgctgcgccaggggaagctgctcaccccggagcagcaggcagaccccaagacctacgcagactgcatccactggtgcctcccgggactgccagacacatggaaccacttcatctacgcccgcatcgtctccgctcctcctcttccccccacatcccactagctaaagcttctagtttcccttcaccattcactctactctgcctagctgctagttcttctttctgtaaagtagcaagtaattaacaattcttttgttagagaaagaaacaaccaccgcagcacgtaaaacgtaacaggtacatacacaaaccgacgcaccaatataattacgtacatcgaatccaacaaggtcacattccaataatgtaacttctaactttcttattcaatgtgctaccaccttcagtgtcacaccggaccaagtatctaggaggccttggggctatcatcgcatgatcctattcagccactctgcgggtaagcaacggaaagtaggatcagctcgacacctttttctcctcccttgcaaccccgggcaggctgcacagacttgcttcttctagcaaggtttccaaccatggaactatgcgccagtctggacaggatgccaaggcatcagagtaaatcttcaccggtcaatttcttccggtagtttgacatttcttaaatgtattagctccatttcttctttccaaatcgtgtgtcgaaattcaaccctgatgtgaggaacatttgtctggtgaatgtcattgccctcaggaccccttctgtagtagtttctcccgatccagtgagacttcagcctgtgagagaaaccggactggtacacagaattcctagcaatttcacacaagtcacatgaactcaatttccaaagcgaagcagcgatactgtattcttcaaccaaaggttccttcgtcaggtgaatttgtaaagggtcatcagttgagagagatacgttaagtcctcttaagaaaaatgtagggaaaggattccggtgatagtcaataaacaacgagttgttacttaaaggagacattgcgagaccaatctgagcaagatagtacaggtactgaagaacaggggatttcctaagattaaccccatgagcaatgttatgagaagtaagaaatgctgcagcaagatggtcaatatcgccagcctcgccacagtgtggacggagtttgattgttgtcatgcccttggactcacgaagcttgttcagtgtgtacagattggcataacaatagtacacataatatgcataggctgggttgaaaacattagtccattgctcaggtgttggcatatgttttgttgggcgtctttctggtttgctttcatcatccaccaaatccaacccaacaacctgttctaagaaaacgtgcagctgaggatgcgaagcagggtcaatagttacttcgtaaagagggagaaaaatattgtcaagaaggttttggaacgaattgattgtgcccatctctctgtatatgttgtatatccgaggaatctgaattaaccaaacaacattctcactgtataattcattgttcactatccaacttgccatctggtcccattcacttttcttcctcccatagatagatatccgatactcagccatctgatatttacttgcttcaaggtcagaaaacacttcttttgtgagctcagcaaggaagcgaccttgaataagattatcctgttttaagaagatctccctcaggcgagattggccacacggattgtattttagattgaacttgtcaaaacgatgaaatgtgctcttatcagcatggacatctaagagatcaacattgaggtcatacccagtcaagtccaaactctcaaaaacctccttaagagtcaaataggtaccatctctaaagattacaacctcgtcaggttccttcctcaactttgacttgataaatctcaacaaatgcttctggttcatgcatgccgagtgatgaacgtgagtatcaaccttccgaacattgtagaagtcccggtgtggtgcagctttctgagcaagcagttctctatccgcattgaccatcagatgaagattaaatttttgctctagaagatttaaacggtggtggcacacagttcgaatatccccagcagccaacacacggaggatgtagtgcatatcagtaaagaaagtagttgcatcagcaacaggatagagtctttctttagaatctttattggggtatacatgaacgacaccatcaaccatctcaaaatggtgttcagttttagcctgatgttcataattgaaaggatttgggttaggttttggagtactaggatcagttataatctccttctcccaaggagcaacttcttctctgaatatgtacctctcacgcagctcaagacatttctgaagaactttatatgcttcaatttcatcggaagaaggagtctcaacagctgtgatgttgatcttactaaaggtttcatgttcaggctcctttcggagtatatcagctgctattgggttaagctggggcacatgcagactaccagttgcactatgggatctaatcatctgtgttgatggtactgcttttaactccccattctggcttgttttatctggaaggagctctgatgcaacagcaccatttgaggccaagtaagcagcatcattcttggcatctggaacaagatcctcctcctcatctgaatcttcaattctctcaaacgcact

SEQ ID NO: 27824 - DNA, 1678 bp, Setaria italica
  Peptide Sequence Number=SeqID_93798
cgctcacaacgcgcgtgcccgcgccgacggtggtgccgggggtgggcctcgggcggcgccggccggagggtcgtcgtgccgcgacgggacatctcctcctcggagaagcccgccgccgtgctgcatcacagcgaccaggagaagccgaagcagcagcacgcggtgacgacgacgacggagccgaagccgcagcgcgcggtgactacggagcccgcgccggcggtcgaggcgccgcagaagaaggtcgccaccaagagcaagaagaagaagcccgcgggcaagaagaaggcgaggcggcagcgcgcggcgaagaagacggtggtgccgccggcgctgggcgtgccggagacgtgcgacctgtccaagggccggtgggtgttcgacaacacgagctacccgctgtaccgagaggaggagtgcgagttcctgacgtcgcaggtgacgtgcatgaagaacggccgccgcgacgacacctaccagaagtggcggtggcaacccaacgactgctccatgcccaggttcgacgcgaagctgttcatggagaggctccggggcaagcggttcatgttcgtgggggactcgctgaaccggaaccagtgggagtcgatggtgtgcctggtgcagtcggcggtctcgccggggaagaagtacgtcagctgggagggccagcgcgtcgtcttccacgcctgggagttcaacgcgacggtggagttctactgggcgccgttcctggtggagtcgaactcggacgaccccaagatccacagcatccagcaccggatcatcaaggcggacacgatcgcggcgcacgcggagaactggcgcggcgtcgactacctcgtcttcaacacctacatctggtggatgaacacgctcaacatgaaagtcacgagaccgggcgcgcagagctgggaggagcacgacgaggtggtgcggatggaggcgtaccgcaaggtgctcacgacgtgggccaactgggtgaacgagaacgtcgacccggcgcgcacgtccgtcttcttcatgagcatgtccccgctccacatcagcccgcaggtgtggggcaacccggacgggatccgttgcgccaaggagacgatgccgctgctggagtggcacggcccgctgtggctgggcatggactgggacatgttccacgaggcgaaaaacgtctcccgggcggcgtcgccccgggtgcccatcacgttcgtggacatcaccaccatgtcggagcggcgcaaggacgggcacacctccgtgcacaccatccggcacctacgccgactgcatccactggtgcctccccggcgtgcccgacatctggaacctcgtgctctacacacggatactctccaggccagcaatccagttcgggtaaaactgataggagagtgaagacaaaccttcagatcaccaattcgattcatacttcataggctggttgggctgcaagcaatggctggttatacgcaatcatcggttctgaaaagaatttttctccttttcttcggattctctctggcctttttcccctgtcgaaagatggctttatttgtttagggatgttaggttaagtgaaaagagactgtgaagaatgggctgtgagattaatcaccccagatcgatcgagctgtaaatttccaggggacaaaaaaaaaagatgaagtgaaagagatgaaca

SEQ ID NO: 27825 - DNA, 1906 bp, Setaria italica
  misc_feature (1799)..(1906): n is a, c, g, or t
  Peptide Sequence Number=SeqID_93799
ttaaggtcgaaggccaatgccaacgcggtggacgtggtgcaggagaaggagcgggacgtgacgctcccgaccgtgacgggcggcggcggcgccgacgaggcccggcggcgagcggacgaggaggccgccgagaaggcgtcgtcggcgaaggccgcggcggccacggcggcgctgcggaccgtggtgagcgtgccggagacgtgcgacctgtaccgcggcaactgggtgtacgacgaggtgaacgcgcccgtgtacaaggagggcgagtgcgagttcctgacggagcaggtcacctgcatgcgcaacggtcgccgcgacgactcgtaccagaagtggcgctggcagcccacggactgcgacctcccgcggttcgacgcgcggctgctgctagagcgtctccgcaacaagcggctgatgttcgtgggggactcgctgaaccggaaccagtgggagtcgatggtgtgcctggtgcagtcggtgatcccaaaggggcagaagacgctgaccaagttcgtcaacggcggctccagcaacgtgttctacgcgcacgcctacaacgccacggtcgagttctactgggcgcccttcctggtggagtccaactccgacaaccccaaggtgcacagcgtccccgaccgggtcatccagtggcacgccatcgccaagcacgcacgaaactgggtcggcgtcgactacctcgtcttcaacacctacatctggtggctcaacaccctcgacatgaaagtcctgaaggggtccttcgaccagggctccaccgagtacgtggaggtggaccgccccgtggcgtacaaggaggtgctcaagacgtgggcgaaatgggtggaccggaacatcgaccccaacaagaccaccgtcttcttcatgggcatgtcaccaaaccacatcacgccggaggcgtggggcaaccagggcgggatcaagtgcgcgatggagacgctgccgatcacgaaccggagcacgtcgctggacgtgggcacggactggcgcctctacgcgggggcgcaggaggtgctccccacgctgcgccgggtgcccgtccacttcgtcgacatcaccgcgctgtccgagctccgcaaggacgcgcacacctccgtgcacacgctccggcaggggaagctgctcaccccggagcagcaggccgaccccaagacctacgccgactgcatccactggtgcctcccgggcctgcccgacacctggaaccagttcctctacgcgcgcatcgcctccagcccatggcccgcccagcagtagcatgccatgcatcctctgatcgctttactactccgacggggcagcgtccgaagaacgaggctccggtgttgttgctgcaaccatgccgtacagtacaggaacctgatcgtcagccaaggacaaagttgtcttgacacaagggatcctcgctcgccttttcttttcttttttctaccaattttctttcttttggttgcgtaaagctgttccgtgttgttaaccatccttgattcttttgttggaacacaagtggagggtctctagctagggtaaaaggaaaaaagtggcgagctgtgttgagtagtagctcgctagctcatttgatttcttctcctggtgatcagcatggctcggagaaaagcaaaaggtcgtgcaagagatgttgtaaagggggaagcaaaagaggggttacattacatgtaaagaagaaatttttgtgtattacactatgctggtgcacccaatgttaagagaggtataaaggactacctagaggtgcatctgttcttcaatcatgaacagtnnnnnnnnnnnnnnnnnnnnnnnnnnnnnnnnnnnnnnnnnnnnnnnnnnnnnnnnnnnnnnnnnnnnnnnnnnnnnnnnnnnnnnnnnnnnnnnnnnnnnnnnnnnn

SEQ ID NO: 27826 - DNA, 570 bp, Setaria italica
  Peptide Sequence Number=SeqID_93800
gtgtagtggaggatccacttccagctgcaaaggcagctgcagataaggtgttggctacaaggataaataggacagtgaatttaaatgctgaaggtggtcaaccagcagcttgtggcactgcaggcccaagtgtgcttaatgaaaggaacaatggtccgaataaaggcgcacctcccagccttatggattggaacccaacggcacggacttttcagtgggaggagtcgcctgatcctgagggttcagaaccagcattacgtaggccgcacttgcctagcccaaggagaataccagtttctcctttgccagcggcagaaaacaaaatagcgtagaagggcaaggaagtggtgcttgttagaagaagaaacactaagaaagggtgttgaactgtatggtagcggtaattggaaggatattttgagtaacaatcccgatgttttatcggcagaacaccagtggacttgaaggataagtggaggaacatgatgaggtaatggagaaaccagatggacaaggtaatggaacctgtgtccattccagatcctcacgttctggtggtttgctgctgtg

SEQ ID NO: 27827 - DNA, 455 bp, Setaria italica
  Peptide Sequence Number=SeqID_93801
aatttttgtaggagtggaatgcacctaagccaatgcatccttctcttttaaatgaggctttgcggtgggcaattccaggtgagcagaagagagagctctggtcacccttgtcttatcaggggtggaaaccatgcttaaagtcatcaatttctcatgcattacctctggagccaagtggatacatacaggtatttcttgacggtggacttaaccagcaaagaatggggatatgtgatgcagttgcagttgcaaagattcttaatgctactcttgttatcccacatcttgaagtaaaccctgtttggaaggactcgagctcattcgaagaaatttttgatgtcgatcactttatcaactccctaaaagatgatgtttccatcatcaaagtacttccaaaagaattttcttggagtcacaagagagtactatggcacaggcatccgtgctacgagaat

SEQ ID NO: 27828 - DNA, 616 bp, Setaria italica
  misc_feature (8)..(8): n is a, c, g, or t
  Peptide Sequence Number=SeqID_93802
atagacanctttgcagacttccaagtgattctttaatgacagtagtttgcaatgactttgatactgatagccacttgatatattgcataggattactaagaaggtcgttcatgtttttcccaggtcaactgctactgagtttgctctgttagttttaacatgatgtctattcatttttaaattgatgagttggttactttatgaatataattcttcaccagcaatcttatccatctgctgtcattgccagctatggtattgctgctattgcccccttttctcaccgcctcgcatttgatgatctgcctgcggatcttcaacgtttgcgttgtaaagttaacttccaagccctggtatttcggcctcacattatctcgctcggggaaactcttgtgaagcgcttgaggtctcctgtctttattctagtctattgtctattagttgtattatttttcatctctgcatcacctgggaatatgcacaatgctttgttggctcaccggacatatgagaacttgaagacaataagaccaaacatggcattgctgggccgcatctttgtgaacaaaagcatggagtggttagattttcagcaggctgtacaggcagggcacaa

SEQ ID NO: 27829 - DNA, 1577 bp, Setaria italica
  Peptide Sequence Number=SeqID_93803
atgtaatgaagcatgaactgaataactaagcttgatcaccgcattgtacgattttgctctctatcattgcactcgggttgcaatagaaatatatttgttgtgacttatcctgttaattattatttttattgaagttttacatgtgttttcttttcttcaattttttgtaggagtggaatgcacctaagccaatgcatccttctcttttaaatgaggctttgcggtgggcaattccaggtgagcagaagagagagctctggtcacccttgtcttatcaggggtggaaaccatgcttaaagtcatcaatttctcatgcattacctctggagccaagtggatacatacaggtatttcttgacggtggacttaaccagcaaagaatggggatatgtgatgcagttgcagttgcaaagattcttaatgctactcttgttatcccacatcttgaagtaaaccctgtttggaaggactcgaggtgcctctggagtttgagactactttattttgtgttctcctgttgaactggaagtaatttgtgtattggcatttccttcggctgcagctcattctaagaaatttttgatgtcgatcactttatcaactccctaaaagatgatgtttccatcatcaaagtacttccaaaagaattttcttggagcacaagagagtactatggcacaggcatccgtgctacgagaataaaaactgcacctcttcacgcctcagcaaagtggtatctggagaatgtcagtcctatcctgcaaagctatggtattgctgctattgcccccttttctcaccgcctcgcatttgatgatctgcctgcggatcttcaacgtttgcgttgtaaagttaacttccaagccctggtatttcggcctcacattatctcgctcggggaaactcttgtgaagcgcttgaggtctcctgtccaggggcattccgatgaatctatccatcaagttgtagaagaaagcacaaatcaagccggaaaatatgcagttttgcacctccgttttgataaggatatggctgcacattcatcctgtgactttggaggtggcagagctgaaaaattagctctggctaagtacaggaaagttatctggcaagggagggtattgaattcacagctaactgatgaggagcttcggaacacaggacgctgcccgttgaccccagaagaaattgggctggtactggtagccctcggctttgacagcagaactcgactctatcttgcttctcacaaggtatatggtggggaagccaggatctctagcttacgcaaacttttcccattaatggaggataaaagaagccttgcatccgaagaggaacttgctgatgttgaagggaaggcttctgtgctagcagctcttgactattatatcagcatgcatagtgatattttcatctctgcatcacctgggaatatgcacaatgctttgttggctcaccggacatatgagaacttgaagacaataagaccaaacatggcattgctgggccgcatctttgtgaacaaaagcatggagtggttagattttcagcaggcttgttactaagtctagggt

SEQ ID NO: 27830 - DNA, 764 bp, Setaria italica
  misc_feature (1)..(38): n is a, c, g, or t
  Peptide Sequence Number=SeqID_93804
nnnnnnnnnnnnnnnnnnnnnnnnnnnnnnnnnnnnnngtttcaccaacagttctgccatgcctgaagatttatgagcaatattgttaataagggaaggaacagctctccaggccacatatcaaatgataccattacacatttcagtaaattcaaaacgcagcctcagtaaaacagacctaccaaacctattgtccaattgcctcgatcttcctctgataatcatcctccttggtgagaaggtctaatagccaatcagatcatttatgatgaacgcctattcttgctcttgggattgctggcctggatcgtattatggcttggaattagcatcaggttcagaggaagcaatagatgtggtgttagacttgcggaggtcgtctatgatgccacctagctcacgccgcgcggactcccttccaaacatgaagccataccagcaggagacagctgagaagactcccgcagccgccactgtctgcagcagtgttagcttcttctgcatcatcgctgagatttgggagaggtaggagcagtggcggacccagtgacagaccagtatgccagtgatcatctggttcttcaagcatgatgacaaagggttgaagcgggaatgcgggatggagatggagcagagtatacaccagtcgccgttaggggatttgccgattggggatgcctcctgtgccgctgtgacccgtggccgtccgccgtcacggactggcggcgtcgcccgtcccacgcaggcaacgtcacggagtcggg

SEQ ID NO: 27831 - DNA, 458 bp, Setaria italica
  Peptide Sequence Number=SeqID_93805
aggactggttcttgcatctagcttagacaatccagatccacagaaacaaactgaccacatttagagggcgaaaaattagcataccgtactatggcttggaattagcatcgggttcagaggaagcggttgtggtggacttgcggaggtcgtctatgatgccaccaagctcacgccgcgcggactcccttccaaacatgaagccataccagcacgagacggcagagaagactcccgcggcagccaccgtctgcagcagcgtcagcttcttcgcctgcatcgcccgccgggatttggggagccgccgtttgctgtgcgaggagggccacaagcgtccgcagtgagctctccacgcaccacgctgccaacccgacgcgcacgtgaagctccgccgcgagcgcgaggcgaccggaggcggcgatgctcggaaagtcttcttcgccggcacggcagatttggga

SEQ ID NO: 27832 - DNA, 400 bp, Setaria italica
  Peptide Sequence Number=SeqID_93806
tatatgttattcttccaggctactgtctggtgagcacttcgtggaggtggactgttagggctagataccaacttccactcatttttatctacatcatagcgataaagatcgccataaacaaaagtcttgctaccattgtagaactctcccccatacagaatcagttctgtctctttcaacgggtttatggtaagcgagcaattagaccgaggagatggtgcagggacattctcctccacatgtacctccttcttcttcgcctcttccttctgtatgctcctgaggatggcgtcgatgtcgtcctcctcgccgaccttgcgggcctcgcggcgggcgcgcttctcctcacccttcaccgtcttccgctccgtcttctccttccccttccaggcttcttctg

SEQ ID NO: 27833 - DNA, 350 bp, Setaria italica
  Peptide Sequence Number=SeqID_93807
gcgcgcgaggcgtgccgcgacgcgctgggcaagcccgggcccgcgcaggccgccacggggctggcaacggacgtgccgttctcggccgccagcaagcgcgtcttcgaggccgcggtcgagttctccaggaacatggcctgcaacttcatctcgccggagcacattgcgctcggactcttcaacctgggcgatcccaccaccaacagcgtcctcaagagcttaggagcagatccaagtcagctaaccaagcaggcatttggccgggtccaaggggaacttgccaaagatggcagggagcctgttgggctatcttctttcaagttacgtgaaaaatctgccgcaggagctgg

SEQ ID NO: 27834 - DNA, 416 bp, Setaria italica
  Peptide Sequence Number=SeqID_93808
tactgctactggaatggagtcaatcagaaagcttgaatttccaaactctttgggaacgttgccaggttcatgctgtccccatcaaaatcacccattcgaagagccattgtttcctcagggttagcattggaagccgatgccttgcgtcggcgtgggagacagcaactacagaatcctgggctgtgatccttggaacgaggtgggtcaaagccataaagcgcaattcgacggaagaggcatccagtaccaacgtacactggtccttgcagaccatcaagtgcacgcatgttgacatcaaagaaaactgtattgtggttggcataacgatcagaagggtcgataccttcaaatcgctgagggaactgcacatagcagaggcggtcaccaccacggtccatcatgaagcacatcccctt

SEQ ID NO: 27835 - DNA, 258 bp, Setaria italica
  Peptide Sequence Number=SeqID_93809
aagatcatagcatcacaagcaatcatagcactttagagaagatcgtcgatcgaccatcatggcgtacgaggtggccatgaaggctcttgttctcagccttgtgctcggcgccgtcgccggcatccggccaagcaagctggtgcgccgccaggtgccggcgatctacgtgtttggggactccacgctagacgtcggcaacaacaactacctaccggggaaagaccgtccccagagctgacaagccctactacggcatcg

SEQ ID NO: 27836 - DNA, 267 bp, Setaria italica
  Peptide Sequence Number=SeqID_93810
gtggtgagcgggctccccgtgggcaccttgttccggtacatcccgtatcccgcggcgaagaccgggatggagaggaggatggctatggtggagatgccgaacccccattgccaccccttgttgtcctcgacccagacggcgaaggtgacggcgatgagcgcgccgacggagaggcagaagacgaagtagttgaagaaggtggagcggcccttgcggccccgcggcgcgtgctcgtcgaactgctccgcgccgtgggagggcagcgag

SEQ ID NO: 27837 - DNA, 432 bp, Setaria italica
  Peptide Sequence Number=SeqID_93811
gaagatagcaaagttttggagtgccgactgaaatggcgaatgatacgagagacattgaattaaccaaccaaacaaacgtggggcaaagatattgagacgaggggtgaggattcctgcaggaccaaaattgtcaccggcgaagtcgattcactgatgccttgtaaaggtgcacgagtcccacatgttgacaccgacttggaggcagggaaacaagccatgaccgaagaagctgaaatggcacggagacgcaggtggagcagaagtgtcctcatctccaaggtccgtgatccagtccgtgccggcgacgtcaacagctacactccacactccgtgcctatcggcccttaccatgcgagttgctcgtccccacggattgaaaaggagaagctgtgctgtgtaggattctttcagagcctctccgaggaccaaacc

SEQ ID NO: 27838 - DNA, 505 bp, Setaria italica
  Peptide Sequence Number=SeqID_93812
ttcggtcattctaagttagtagatcatcgagtgaaataaactgagagacatgcgatccaaacccaccaactgttccttcttccactgtgataagaaaactatgatgctgacatagcgttctgatcagatcaatgtcaagtggtttgcaaaatctcgcatttgcaactgtcgcctgaatgccaaagttggataaaagagagcgagcaatcaagcatctctggaccacctcaccatagccaagaaaagctatctcttttccctcaacaagaatctctcctttaccaatctgaaaaagggcacagagaccaggtagaaaactgcacttttttttgaaaactaaactacacttcttttaaaaaaatgttaatgataaaaggaacagttacgtacttttcagaaataagcaaatcctttttttttgccatactactctgttcttaggacaagcaaattgttcagtttttgaggctaatattttaatgtttaagaattacatactacctct

SEQ ID NO: 27839 - DNA, 969 bp, Setaria italica
  Peptide Sequence Number=SeqID_93813
tgaatgccaaagttggataaaagagagcgagcaatcaagcatctctggaccacctcaccatagccaagaaaagctatctcttttccctcaacaagaatctctcctttaccaatctgaagtggatttccatatgttaaagtgccactagtcccaacaatggcacccctaggataccggatgcaaataggtctgtcctcaaccattgcagctgttgccaccatgtcaacaagttcatcctcgttagatggtgacatgacaatcatgtttggcaagcaggacatgaatgtaatatcaaacggtcctgaattagttgggccctcagaccccaccagaccagcatttgtgatagcaaatcgaactggtatcttttgcatgtccacatcttctactatctgccatacatgtgagatctatgaaatgtagtgtaataacagtaaagcagccttgcagatttactgaactaagaggaacttatgcccacactaacttagcagcagtatgtgctggcaccggctcatttgctcgctgaagaaatgtggatggaattatgcagaaaggctttaaacctccacaggccaaaccagcggaaaaggtaacagcatgttgctcagcgatgcccaagtcaaaatctgtcttgggtaaaaatctgtctgggaagctggactggaataagcggagtgatcgatccattcccatgccaccatgaactaccacaatgcacttgtcattctctgcttctgcggttaatgcttctacaaagcagtcattgtatgtcctagaaagtccagtttctaaaaatttaagaagatcatggcttgagtttgaaggcccttcctcatttggagttatttcactgctaatatttccaccagtgtcgttttcagtcccagtaattacatgtacaagtactggaccagttgaatctagagttgcaacttcctttaatacacagatgagatcatcaatgtt

SEQ ID NO: 27840 - DNA, 689 bp, Setaria italica
  Peptide Sequence Number=SeqID_93814
aaaatttgtcgactgacattgagtccaagttaaatgctaattatgacttatatacatatgttttttaagaaatctctgaaaattctttagcatgagtactgccatttccttgtcttgccatgtttcttcctcccatacaggaggaaccccagtgcagtggtaacagggcaagagagctaaaaatgaaaaaacactaagcatgcttcctagctcagcaaaagaaaagtaaaacagaatgcatattttgatagtgacctgtatcacagaccttcctcatttggagttatttcactgctaatatttccaccagtgtcgttttcagtcccagtaattacatgtacaagtactggaccagttgaatctagagttgcaacttcctttaatacacagatgagatcatcaatgttatgcccatcaataggaccgatataatataatccaagttcttcaaaaagagttgctccatgaggacctatcataccacgagcatactcgtcaactttggcagcaaattcatgcatccctttgccaaaccatttggcaagtccctttgcagcctccctaaacctcctaaatcctttgctggattgaatcttgctgagagcactagaaaaggcattgactgacatctttggccggtcatcagctttaggaagcaaggagtgacaactatcatttagaataactac

SEQ ID NO: 27841 - DNA, 175 bp, Setaria italica
  Peptide Sequence Number=SeqID_93815
gacccgcggctgcgagctggtctgctccgcgcagccgctgtcgtcctgcaccggcgccttcttctcctctcccgagccggagccaccgcacgagcccggcgccgttggcacggctcctagctccacgacggctcggctggccgccggcatggcgaggaaggtcggcatctcctcg

SEQ ID NO: 27842 - DNA, 631 bp, Setaria italica
  Peptide Sequence Number=SeqID_93816
gtaccattatatggtttaaataaccttatatttgcaaagttgatgaagttcaagggccattactttgagatgcgactagtaagctttctgttgaggagggccactggtctgcagaaactgctattggtacctcctgtgggtgtggggaattacatggaagcacttgaagaaccattggatacatcccgttttctagagacgatactggatttcgaaaaagcttcaccagatgctcagatagttctgagtgactctgatcctaccgcaattcagcaagtgcattctgatgcgtcttagtttgccatcagttgatgagatcacaagtaagaacttgtctagtgggatataaatcctaaatcatatggtgatgctggcgactattttgtgtgtattccctcgaaaatagtacttaaagtatgatttgtcaatctaatttgatcattttggccgtttatgaattgtggaacgtgaaagccaaatatttggttggagactgtccataggccattaaggaccatggagttgtatcccctatgcattttgttctagaagaaagttggttatctgtgtgttttcagttctgagtgtatgttcttattatccttgtttatcataattcaatgcagcagct

SEQ ID NO: 27843 - DNA, 602 bp, Setaria italica
  Peptide Sequence Number=SeqID_93817
gctcccatcaagcagccatgatatctcccgtggacatttccttggaggtgtcagaggaagatgagctggatgaagagctatatgaggacgatgatccagatggagaggaagatgaaccagttgaagagctatctgagggatatgaggctgaggaagaattattattagaacaactttcagaagaatatatgcttaaggaaaggctgtactatgaagatgtctatgaggaagatcttcctgaagaaaatgtgccagaggatgagcaatttgaggaggatgttccagagggtgagcactctgaggaagatgtgccagagggtgagcaatctgaggatgatgtaccattatatggtttaaataaccttatatttgcaaagttgatgaagttcaagggccattactttgagatgcgactagtaagctttctgttgaggagggccactggtctgcagaaactgctattggtacctcctgtgggtgtggggaattacatggaagcacttgaagaaccattggatacatacccgttttctagggacgacgaataactaggaatttacgaaaaaagacttacaaccaagtacaactacaagaaactaata

SEQ ID NO: 27844 - DNA, 216 bp, Setaria italica
  Peptide Sequence Number=SeqID_93818
cttaatttttgtcggaactgaatgcaattgaggatgatgaagagtgagatagatgcttaaaatgtttgaggtgaattactaaggttccagctttttgtgagctcatgtaatgattgtattcagtatttgtaacacatgtttatgcgagaacattctgttttcctttaggaagattgtggattgcaatgaactgcaaattttggctattgttttata

SEQ ID NO: 27845 - DNA, 255 bp, Setaria italica
  Peptide Sequence Number=SeqID_93819
ctgacgaagaagaaacccacaactcatggcctcaaatcccaccctctcctcggccatctcccggcgttcctgaggaaccgccaccgcttcctcgactggtccaccgagctcatcgtcgccagcccggagcagaggatgggcttctggatccccgggatgcggacgggcatcgtcaccggcaaccccgccgacgtcgaacacgtcctgcgcgccaacttcgccaactaccccaagggcgcgcacgccatctccatg

SEQ ID NO: 27846 - DNA, 535 bp, Setaria italica
  Peptide Sequence Number=SeqID_93820
tgatgcccacaaccacaaaggaagaggaggtgagggcccttaattccatttctgaaattgtagccattgaagatctcaccaacaagttggatgcaatgccctcacggccctctaaagcaaaggagtatgaggaactctccatggagcacacactgctccaagttgtcgcctcttctcgacagtcgatcaccaaggattgtgtgcttcccatcatcaaggaggcagttgtggcggcaacgcctttggccatgaccactacaagctgcgaggacatgatgacggagcaaatgaccaagcaagtggacacctattttgaggatgttgtcgtggtggaagacgcttccgaggatgaggaaattgtctcgggtatgggtattacaatcgagagccccatatttctcatcaccatcgaagatgaccctactcattctacggctgaggtcaaggtagaagaagctcaactgatagaggatccaccattatagtttcatctcctgacaccacatctataaatggtgagtatcttggatgtcct

SEQ ID NO: 27847 - DNA, 348 bp, Setaria italica
  Peptide Sequence Number=SeqID_93821
ggcgaaatctgaggccgctacggggaaggccaagaaaccggccaattcgaccgcggacgccggcgtcaagccggccaaatccgggaagaaggcacaggtggtcgccgacgcgaaggcgaacgcgaccgtcgtgagcgaggaggagacgacggtgggggcggaggtggaggaggacgtggtgttcgcggaggaggcggaggggacgggcgacctcatctccgagttccggggcctcccagcgcggctgcaggagacgctcatgccggacctggcgcggctgtcgcaccactccaaggcgtacctgtccgcggcgaacgccgggatcgccgacggcgtgcgcccgatccg

SEQ ID NO: 27848 - DNA, 298 bp, Setaria italica
  Peptide Sequence Number=SeqID_93822
cgaaccagttcgccctcgcgttacccttgtgcgccaggtacacgatcgccgcggccgccgacgccgccgacgtcaccagcgccagcatagccgcgtcgaagaagaccaagaccagcctgctgtactttgccctgcttctgatggtgtgcacgatggacagaggaatcgacaggaccaagtacgcggcaacgatcgaattcgccaccacgaagaacgttagtgtcgggagatcgtcgtactgcgccttgaaccggaggaactgcgtgaagaagggcagcgtctggttggtggtgcccat

SEQ ID NO: 27849 - DNA, 460 bp, Setaria italica
  Peptide Sequence Number=SeqID_93823
ttcagggacctcaccaaggtttgttagacattaatatttcttctcttgaaaataaacatatcctttgagctgtacaatattcttgtttgctcactgattgggatcgcacaagaaaaggctaaacacagacatcttcagtttatttattaaaaaattctctctctctctctctctctctctgcatgaaggaagctgcaggaattggcgatgatcacggaagaggaggggatggattgtacagatgcagccatggacggagtgagatttggtaatcagagtcagacgagtatagctccatgtgcagagctcaaggacaaggggatttgtttgttccccttgtccgtgctactacactaccatggacgaacaaactgagagctctaaatgtatgaacagcatatgaagtgttgacctttacactcttattgtctattgttgttgggtattagtattgtccggt

SEQ ID NO: 27850 - DNA, 603 bp, Setaria italica
  Peptide Sequence Number=SeqID_93824
attcattcatacatattagcagaacctaataccctccatcagtttttctttcttttgcctcacctgtgaactcaactcaccaaccatggaggatttagttagtagcccatctttctgtaggagcgtccttagctgtagcgaagggcaggctcaatcaggagagagctcttggaccgattacttcgtggatttcatgctatccgaggaggagaggaagagacaggatgctaattcctattccgctaccgaaggcggagtcgaaggcgaaggcgaagacgatggcgatggaagcagccgcgaggaggaagaggaggattctatgatctccgatgccgcctctcgcgcccctgcggacgcgctgttgcctatcagatacagggggttgaagaagctcaagaaggctttcaaggccctggatcatgatgattcactggaagatactgcaagttccccagtgaatagcccaaaggtcagtgctgtgtcacagctggaattgagccctaaaaggaggtgcaacatcagggacctcaccaaggaagctgcaggaattggcgatgatcacggaagagaggggatggattgtacagatgcagccatggacgg

SEQ ID NO: 27851 - DNA, 407 bp, Setaria italica
  misc_feature (388)..(388): n is a, c, g, or t
  Peptide Sequence Number=SeqID_93825
agccctaactaaaaggaggtgcaacatcagggacctcaccaagctgcaggaattggcgatgatcacggaagagaggggatggattgtacagatgcagccatggacggagtgagatttggtaatcagagtcagacgagtatagctccatgtgcagagctcaaggacaaggggatttgtttgttccccttgtccgtgctactacactaccatggacgaacaaactgagagctctaaatgtatgaacagcatatgaagtgttgaccctttacactctatgcatgtgtgggatagatgccggaaaaaatacatttatatgcagtgtggtgatactgtggatatgcttttcttaatgaaaaaatatgtgaatattaaactaaaaaaaaaaaanaaaaaaactagaagaacta

SEQ ID NO: 27852 - DNA, 334 bp, Setaria italica
  Peptide Sequence Number=SeqID_93826
aggaatctgtggcaaggcaagcacatgtaccctgtttcttaagtaagaaagcaagaatgtgtcatttgttaagtcacgatcttccaaaataactgtgctcacatcataccctcttagcaacaaagtttcatatgcagacaaagtggatgaaataccacccagacgaccatctccaactagaatagcaggtaacctaaaaggccggtagaggtcgcactgcagcgtgcccgacgcgctggggctggccacgccgccagccgtctccagcaccttccacacctccccaccctccccgacgccttcctccatcagccactggtccacgcaccccctg

SEQ ID NO: 27853 - DNA, 248 bp, Setaria italica
  Peptide Sequence Number=SeqID_93827
ttccttcactatttctgttagtatcttgggaattgtacattgttggcccttcataaggagttaaggactgattatgttgtcagaaatgcactgtatatcattgtcttcttcattacatggttagctgggactaatatgctaggaaactgtccaagatgctgcaagtagtaatcttttggtactaggaaaatataaaatgttgcaaatgctcatagatgtagggcatgtattatagtactcaccatttt

SEQ ID NO: 27854 - DNA, 434 bp, Setaria italica
  Peptide Sequence Number=SeqID_93828
ggagatgtacagaaagattgggaaagcagatttcaaatgtccaccttggtttccatctgatgtacgaaagctagtgtcaagaattcttgatccaaaccctaggactagaatgccaattacgaaaatagtggaatgcttttggttcaaaaagggccttgacagcaagctaatccgaaagaatatcgagatgaaggggaaagtttcagctctaactcatgttgatgtggttttcgcatccacaggtagcagtagtggcaataataaaatggttgatgagaagcaggatgcggcaaaagtcaccaaccttaatgcttttgatatcatttccctctcagaaggcttcaatctttctgccttatttgaggagactgagaaaagaaagaggcaaggttcacatctagtcaatcagcttcaactattatatcgaaactaga

SEQ ID NO: 27855 - DNA, 236 bp, Setaria italica
  Peptide Sequence Number=SeqID_93829
tggtgataacgatgaggactatgatgatgaggaggatggagacgaattggacgaggaggacatggaagcaggtgttgcttctgaggatgaggagagtgatgacgacatcgacgaagatacagggaaacaaattgctcactgatattggatctcgcaactgttcttcaatatgatatacaatcaacttccgtgtcaggtagaaaacctattagaagatggaacatgtttttgtttaa

SEQ ID NO: 27856 - DNA, 706 bp, Setaria italica
  Peptide Sequence Number=SeqID_93830
atatagttcaactaactcgtcgtcaacggaaacaggattgtggtctaacttggagggatttgataacctcttctgataatcttcaagatcactggaagagtaatgaagttcaacagtttgattgcttcttagactaagcccactgaagtcaagttttcctgacaagtgtacttcaatagcagttttcaagaaaagaaagaggctgtgtggatcagaccgaagctctgctaatatttgctggatattatcacagaaatgatcaatgactaagacaaatgcacattccctgctcagcttgaccaactcaggaaaacgagatattacagtggtacgaaatgacaaagcttcatcatcagccaattcaaataaccttttatcaatgaagataaaagcatggaaaggttcatctctatccttcatgtaactatctaaagcagataaattctgattcctggttgtaaatatcaaaccacaggcctgatgaaaatgagcatctgaacagaggttcaagacaaaatcagaattccagtcattttggggaagtgcattgaagagttgaagcacttccttttctttctgagtccttgctcttgtatcatcataagacgaagtgagataagtgagaatgtgcataacaactcttttagatgcaatagcccttttgtgggaaacaaaaaaggacacgaactcgattaaatagccaaat

SEQ ID NO: 27857 - DNA, 656 bp, Setaria italica
  Peptide Sequence Number=SeqID_93831
ttgtttccggttcgtttgtaaggcgagccagcgggacgggcggatcttggggcggcgagcacggcgagcgcgacgaacggggagagcgagaaggcggtgaggaccagcgccgagaggcccacgaggtggagcccgcggtagttgaggtaggtgagcgcggccgtgagcgcgaggatcgccagcgagcgtagcaccggcgggaggacgaggccgccgccggacctgaggtagtcgaggaagagcaccgggtagagcgcgttgtcgagcgtgccggacgcccacttggagaacccgacgaggaaggcggcggcggggccgaaggcggcggagacccaggcgacgtagccggcgttggtggggaacgcggaggcgagctcggcggtgacgagcgcctccgggagcgaccagagggcggggaggacgaggaagccgaggaccgggagcagcgcgccgccgcccgcgcggaccgagtcctcgatgccgaagggccccccggagacgtcgtagaagatgagcgcgatgagggggagcaccgtcagccgcggccgcgccgggggatccgcgggggagccggtcatcgcgtcaacggccgacgccggccggcgccacgcgcgcgcgcggaggagttgacaaatcaggggtgaggtgggcgggtg

SEQ ID NO: 27858 - DNA, 303 bp, Setaria italica
  Peptide Sequence Number=SeqID_93832
ttgtgtagagcgccgccgcggaggtgaagttctggccctggacgatggtctccgacgggtagtcgaagctctgccacaccacatccgctgagctgccgctagcgctttggatttggaggttggacgtgttgaggaggaggacgcggtcgccggccgaggcagaggcggcggcggtggaccagagcaccttgttgaccgcgtggtcggtgaggacgaggccgccatcgaaggagagggaggcggccgcggaccagggcgcggggcggtccgggatggcgcgccagagcgggaacgccgacggga

SEQ ID NO: 27859 - DNA, 272 bp, Setaria italica
  Peptide Sequence Number=SeqID_93833
ctggggtttgacgcggtgaggagaagaagggaggtggagggattgaaagaaacaataagatcagcagaagcagccaaaagtgacgcacttagagaatatgaaagcattaaggaaaacaacaagattgaaataaaaagatttgacaaggaaagacgccgcgatttcattgagatgctgaaaggttttgttgtaaatcaggtatcatattcagacaattttgctaacatgtggacgaaggtagcagaggaaacagaagtatatgcaaacagggg

SEQ ID NO: 27860 - DNA, 410 bp, Setaria italica
  Peptide Sequence Number=SeqID_93834
ttcggtccggtcggcccccaagccgtgtgctaggcgaagcttctggaagcttcagggtttatcccggcatttcatttccgcgcccggatcgcttcggactgccggagtttctagctgtggttcggttggggcgtcgctctccggctcttcttccatatatattgtcggtgacctcctctgcttctggtccaggggcagtttccttgctgcgagtgcgaggggcagaagggggacggcggctttggagccaactttccgcgttgcggtggcggtggctggtcggcgccatgagcttcgtgttccgggggagcagggcggacatcgaggccggtggtttcccggggttcgctcccgaccgccgcgccatgcgaattcatgcagggggcaggccagtgcatagcaattccttg

SEQ ID NO: 27861 - DNA, 559 bp, Setaria italica
  Peptide Sequence Number=SeqID_93835
actacgttactaccgaccaagacaaagacgaaatcaaccgccgcggcgggaggcacctcgccttcgatccggggcagtttccttgctgcgagtgcgaggggcagaagggggacggcggctttggagccaactttccgcgttgcggtggcggtggctggtcggcgccatgagcttcgtgttccgggggagcagggcggacatcgaggccggtggtttcccggggttcgctcccgaccgccgcgccatgcgaattcatgcagggggcaggccagtgcatagcaattccttggcttttcttgtcacagtacttcttttgttcatggtactgaactcgcaccagatgtctcccaattttttgggaagttaatcatgttgcatgcatggtgtctgcgagccttttataattgggctctaatgtgttgaaatgtgcaagtatgtaacagtttgattaccatatatttgtcggattgcgcgatattgtctttttctgtagctttggctttgtcttgggatcttcaatggccacgagccttagaatgtacgccacatgccagcagct

SEQ ID NO: 27862 - DNA, 484 bp, Setaria italica
  Peptide Sequence Number=SeqID_93836
tacttaacattgtcagttgtttgcttggagcaagtcgctgtgggtgatctgttgagaagcctaccatgtttgcatcaggtgaccatgttcattatccaaccattggttttccttggatggcacctgcagatgacttgattttgtttcccgttatgaaatgatcctggtaacacctgttagctctagcatggtatggtaacttggcatgttgtttgccaacatcctaaaatcatgttgtgaaaccaaaacaatattttggtgtaccaacagggttgactggtgcatttaatgcattttgtggatggatatagtgacatagtgataatgaaaggttttttaacagttactactgttgttatgcatgtgtcattaaattccagggcaaaacccctggtccatatgcattgcaacaggacccaagccagcgttaagcacataatctgtgtcagttttgtatgtcccctgttttaaatttttacatcat

SEQ ID NO: 27863 - DNA, 1362 bp, Setaria italica
  Peptide Sequence Number=SeqID_93837
tttcttttccttaagttttaaccccaaattaacgaacactagactagactctcgttctccgccagcaagcgaatcaccgccgcggcgggaggcacctcgccttcgatccggggcagtttccttgctgcgagtgcgaggggcagaagggggacggcggctttggagccaactttccgcgttgcggtggcggtggctggtcggcgccatgagcttcgtgttccgggggagcagggcggacatcgaggccggtggtttcccggggttcgctcccgaccgccgcgccatgcgaattcatgcagggggcaggccagtgcatagcaattccttggcttttcttgtcacagtacttcttttgttcatggtactgaactcgcaccagatgtctcccaattttttgctttggcttgtcttgggagtcttcctaatggccacgagccttagaatgtacgccacatgccagcagctccaagcgcaggcgcaagctcatgctgccgctgccaatggttttcttggacacactgagctgcgtgtgcatgtaccaccaacaatagcccttgcgacaagaggccggttgcagagccttagacttcaactggcacttcttgatcgcgaatttgatgatttagactatgatgctctgagagctttggatgctgacaatagcccgcatgctccttctatgagtgaagaagaaataaattctcttcctgtcttcaaatacaaagttcaggcacaaaaggggaatgcctctgcccgaaaaagtgatgggccatctcagctatcaacttcctccactgggtctggcaatgagaaaaagcaggatggtttcaaagcagcagatggaaccagcaaaacatcagaggatgaactaacatgcagtgtttgcttggagcaagtcgctgtgggtgatctgttgagaagcctaccatgtttgcatcagttccacgtaaactgcatcgacccatggctgcgccaacagggtacatgcccaatctgcaagcaccaggtcagtgatgggtggcatggcacaggaaatggcgaagaggatgcttcttacatggtgtaagtagctgcctgtgagcaggacttagctaatgctagtagctactaacaaaacccgtgaaagctgtttcgggaggtggaggtgaaagctgttagaccgatccccttcagattggtggagggatgactgattttcctgccaatctggggatgtggtctaatccctgcttatcctaacaaaccgagtgtggaaccagctgttcgatgtgctgagttcttgtacaactaatgttcacttctctgtgatgtttatgcatcaaaaggttgatggctcaaaaaaaatttgtgcctgaactttgt

SEQ ID NO: 27864 - DNA, 1324 bp, Setaria italica
  Peptide Sequence Number=SeqID_93838
gtcctgtctgtattgtgccactataaactcgtccaaatgcatcaaagacgctgcaatcagatttaggatataattttgttacattaaccataaggtgtccattgggatcacattttttcatagcatcaacaatagacgaatcctgtgggccagtgtatatgtggtctatcttccttgcagcagcatccttcacagaggggatatgtttcactaacatatcggtaaaaccagttgcggtgccaaaaattgagcggcaagctaacctcagcaaaggcctaacattcagcttgtaagctgcattgctcagcgtgacgcccaattcagcaagctttgattcaacattccccttttgctcaccgacaaccagactataaattttgtacagaggctctaggataaactcaacaaatgatctattagctccttcctttggcggcttctttttgaaggttcttgagtcagggtgaaaatacacgtctccccataggcgagatgcaaatttctcatggtcaaattgaatcccatgaatctttaaataaagatgggcaaaagattgtaaggtaaaagaccagccagcagcaccacttgcaaaacatacgtttccagcggcaggatccaccaactgagtgccacctactgtagtagaacacgacgagataagatcattaattgcctccagagtatgtcgcaatttgaaatatgcatcattggggggcagctttagctctgttatcaatctgtcaaccttgttaatcacaacaacaatgggaagcctttcttggattgcatgacgaattgccctctcagtattaaccattactccctcagcagcatcaacaacaagcacagccccatcagcaagccgcagtgccgcagtcatctcatcggagaagttgacatgccccggagtgtccatgatattgcacaggtatgacttgccatttcccccctcgagcacgagagacatgggcacagccttgatggagacctgccgctcctgctcgtccaccctggtatcggtgaacctcacgtggcgctccccctcggagtcgaaggtgtccacttcgtgcgtctgctccacgagcatgtccatgaacaccgtcttcccgtgctggaggtgtccgacgagggcgacgttgcgcaccagcgcggggttccccgcgagccccaggaggaagtcggtggacgcgtaggtggacgtggccgcggcgcgggtcccgacctcgaacttcacgacgcggggcggcgcgacgatgggctgctccagcggctgctcgtcctcgtccatgacgagcgcctccacgcccggcccgtacacctcctc

SEQ ID NO: 27865 - DNA, 331 bp, Setaria italica
  Peptide Sequence Number=SeqID_93839
ctgttaaattccaaaggttggtcacttggatcaactgacagccgttcatgtccaacaggaggcaattccgtcaagggagcctgtgggaatccaccttgaacagtggaggcagttgaaaatgactgtccttgagagcttggatattgaagcatattattcccattacctggagcagaagaataattataagatacctcctgctcataggtggacggaaatgaaccaaaggtctgtgctggagacaccataggacctctatctaacaaatggtttgtttccctctgttgacctgtcattggaaatggcatatgatcgttacttgattgaagga

SEQ ID NO: 27866 - DNA, 2183 bp, Setaria italica
  Peptide Sequence Number=SeqID_93840
ataaatctgacattggaatcttatccttgccatcaccgccattgtcgtcatcatcatcatcatctgaatcataactagcaagaccgagaagagcgcctttaggggaacttaacccagtactacctttatgatcactagagctaatgtttgctggcttagcagggagcacaactttagccgaggtcctggttcttgatactcccagaccaggttcctttgagccagaaacatcagtgggcccattggcttcagctgaggaatcatcttcgttcagaacttttgttgcgatctcatcaaaaagatcatcagtaaccttcaaaaggacttcagttaaaacacgcttaatttcctggttgattgctgccatccgagttgcttcaatttcatcctcatcatcttcattgtcttcagtggatttagccgaatcattacttctgctgtcactttggtcaggttttcctagtggttcttctgcattgtcagattccgtggaatttaagtttgtcgggtgctgcgctgaagcacttaatggtgctgattttttctttaaaagttcttctcgaagccagttaggtactggacgtttcttagatttttctgcaacactgaaaggagtgtttggatctgtagggaacacttctgttacactaccaacaccaaatgctgcaggtggggcatagtttgaactagaggctgctccaaaaagtggtgcagcatgaggatccatctgtgctgcttgtggtggcaatggagctcgaggcagaaaccctactgtagcagatggcgtccatgaatgagtagacgttgcaactgtatcgtaattagttcccagtgttggagcagctggtatagtagaattgacatttgtatggactgccacatcaggagctttcctgctgttaaattccaaaggttggtcacttggatcaactgacagccgttcatgtccaacaggaggcaattccgtcaagggagcctgtgggaatccaccttgaacagtggaggcagttgaaaatgactgtccttgagagcttggatattgaagcatattattcccattacctgctattacatggcaaagtcaaaaagaaacaatcttctctgtaatatattatagtttcataatgaacattggactattatgtaagacaaacaaatgaattcagctctgtgtaacagaaaaggatgaatggacattgttgaagtggtcactatatgaagtgcatatttctgcttctcgtacgactaatcagatacattgcaccagtgaccatgttcttattttcagctataagattgatacataaaatcgtcatgaaatataaccagtatctattgaatcattgatatgcaacatataatgactaacatgacttttcccttctccgtttgatagaggcaaacggaatagatatatccaagtcactgcttcaaataggccacagtgaagtctacacaacaggtactgctagctaaatatcacagaaataggtgctgtgcaccatactctattctaaaataaatgatgctttaaactttatagtcttagcacgactgaatctggcaacatacccaagagtgagcagcctgttatgattcaggctgcacaaacaaattaaattgccaagcaaggcatacctggagcagaagaataattataagatacctcctgctcataggtggacggaaatgaaccaaaggtctgtgctggagacaccataggacctctatctaacaaatggtttgtttccctctgttgacctgtcattggaaatggcatatgatcgttacttgattgaggaactggtgggtgcaaaggttctgtaacttctgctggcagaccagctggttgctgatactgatcatggtaaccattatgatgactttcagttctacttgtggatatggcatgctgttgaatctggtggtttcccataacagacttagcagcaacccatgctttagcctttgtagcccaatcttcctcattgccatgaccttccagtttttgttttttaaggaaatagagaaactatcatcataactaacaatccatttcttggtgaaagagattttttctgcttctgaagtctctaaacatgactatactattgtcaagctatatttaaattcatttcattaagagcagacttaaatgactttacccccccccaaaaaaaact

SEQ ID NO: 27867 - DNA, 656 bp, Setaria italica
  Peptide Sequence Number=SeqID_93841
ctggagagccgagacgcatgccgttcaggagccgccgagttccagaagcgtgggacccactgggcagcacatgcgaatcaggccacaagggactgaagcctgaagggcaatgatcagagagaaatcagcttcattacggttcaattcaccaccgggtcaccaataattcaccaaatgttagcactgctaacaacttacaagaattcagagccagtaatattccacaaatcacagcatatgcaatcagtcatcttcctagctattcggcagtgagcccaagctgcccaacatctttatagtttgcgcttcttgggttttcagtagtgcaagaacattccaatgacttaaccgtcagccgtctttcaccattctagctctctccaggatgtacttcccttccttgtatttctggctttggtcataggctttctcatatctccagccaagaatctgttggcagcagctacagtagatgtcattcactgtgtggagcccagttacaagataccgatcctcattagtcctaggcatatgttcacaacgtggtcgagaaatactagttaggacaagacaagactaacaagtaagaatagtacaattacaactagtagtaggaagacccaagttaacaaagaataaccgaatacctacaatta

SEQ ID NO: 27868 - DNA, 324 bp, Setaria italica
  Peptide Sequence Number=SeqID_93842
aggtagagaaggtaggcgtagaggaggccgagcgcgacgtagggggcggctgctctccacggtgcgtttggtgatgttggcgttgggggcgacgaccatgagggtgtagaaggggaggacggcgacggtgccccatgtgaaggcggcactagcaatctgggacgtcgtcatcaacgcgcgaggccggaacagcggcggcgccctgccagcgccgcggcgggtgccggcacgaggggacaccgcggcgagctcgggcagcagggggcgcgaccacgaggaacacgcggcggcggtcgacgagtggagcctcgcgcgcgggccacg

SEQ ID NO: 27869 - DNA, 1419 bp, Setaria italica
  misc_feature (27)..(27): n is a, c, g, or t
  misc_feature (35)..(35): n is a, c, g, or t
  Peptide Sequence Number=SeqID_93843
ccaccctgggacagttggaaggaggcngtgagggngtttaaagaaatgaagcagcaaggagtgaaacctgatgtagtcagctactcgacagtaattgctgcgttttgcagaatgggccgcttggaagatgctatgagcatattcagtcatatgattgatcagggagtgccgcctaaccaagctgtttaccactgcctgattaagggtttctgtactcatggtagtttggtgaaagtcaaggaattactttctgagatgatcagtaaaggtatgcatcttgacgttgtgttcttcaattcagtaataaatgacctttgcaaagaaggaaaggtcgtgaaagcacaccaggtatttgacttcattagacatattgggttgtgtcctaatatcgctatgttttgttcactgatggagggatattgcttgattggcaagatgaaggaagcgttgagaatatttgagtctatggtgtcagctggacttcaacctaacgttgtagcttatggtacacttattaatggctattgtaaaagaggacggatcgacaatggactgaatatttcagagaaatgttgcttaagggagtcaagccctcaactattacatacaacatagttataggtgggttatttcacgctgggagaacctttgctgcaaaggaaagttccaagaaatgattgaaagtggaatacccgtggacattggaatatataacactgtccttaatggacttttgagaaataactgctttgatgaagcagacactctgttcaagaaattatgttcaacgaatgtgaagattgatatcgtaattgtcactactatgatttctggaatgtttaaagctaggagaatcgaagtagctaagtatttgtttgattctatatcagccaacaagctggtgccttctattgtgacttacagcttaatgattacaaatttcataaacgaggggttgctggaagaggcagatgatatcttttctgcaatggaaaaggctggctgtgcccctaactctagactgctaaatcatgccacaaggttgttacttgagaaaggtgaaataatcagggctgctaattatcttgctaagattgacaagaataatttctcacttgaagcttcaaccactgagatgcttatctctctcttctcaagaaaggaggcatggcaggagcacataaaattgctccctgcaaagtatcagtttattgtgggcgccagctacagttgatacattatatatgtgcttaagtacccagagtatgctcttgagttttatttttcacaaggtatattatctgcaagcatgccaggtagcattggacactatgccaatatgtgtggtagaagactattgtggtttgaaattaatatgcatctcttaaattatgtaacttttgctacagttcatacaag

SEQ ID NO: 27870 - DNA, 827 bp, Setaria italica
  Peptide Sequence Number=SeqID_93844
atttgcagcattctgtacccagcagctcgtccagaaacaaaaccagtcacacatggagttgcctcacctaatgacattgcacctgtcatgaatgccatccagacacttacaacctgccctccttcgtatcctttatcaataatcaattttgccccaaaccatgctgttagaccatagctgcagaacaggataaacataacaaaaccaaagcccaggccagtagccgtgccttcttggacatcagatatatatgcattccttatatatttattgtatagtgcaatggcccgattctcaccattgaatgaagtaacctttcaaaaattaggccaagaagaagttggttaagaatctaaacaattagatataaaggaaatgtttaagcaagggtctactgttctgatggctcctattgtctgttcaaaaacatttcctgcttcattgtacttagcttgaccctggcttgatagtttcgatatagtccatgacattgctgctccagcaattactataggagggatacttgacagcattacagctgccaaaaggccatcctttagagaaagcaaccacaaaccctccaagaaatgtggcagtaagttgaaaaacttcccgaccttttcacctattgcatcctggataagtattgcatcaccagacatcctctcaaccaattgtccagtggttatctctttgtccaaaaacgcaatgtcttgcctcaatacagcttcaagatagagacctcgtatgcgagctgcttgtctttctccagtgatcatccagcatgcaacctggaggaagcaagcaaaccatgacccaatggccaa

SEQ ID NO: 27871 - DNA, 981 bp, Setaria italica
  Peptide Sequence Number=SeqID_93845
agttggatagctggaagtatgcaccattggggttcctcagtagttccgtgtgcgtgccttgttcaactactattccatgatgtacgactgatatagtatcagcatcttttttagtactcagccgatgggcaactatgatcgtggtcttgccttgcatgattctattaagggcctcctgaaccactcgttcagactccatatccagtgcacttgtcgcttcatcaagtagcaagatttggggatttttgagtatcgccctcgtgatcgcaattctttgtttttgcccaccagagagttgtgctccatgctcgccaaccattgtgtctaggccattgggtaacttgtcgatgaaatttgctgcattagcaagctttgtcgcagccatgatctcctcatctgttgcatcttctttcccataggtaatgttctcccagatactaatggcaaacaacagtggctcttgactgacaagaccgatttttccccttagccattcaagtctcaggctctttatgttaacaccatctaccaacacttcaccagcctgaggatcatagaatctctcgacaagactaataactgttgactttccgctgccaccctctcccactatagccattgtttttccgcacaagacgtgcaacgagaagccatcaaataccaattggtcaggtctagatgggtaggaaaagtatacattcctgagctctatatcacccttgatgattgctagcacaatcccatctgttcccttggggtcaatttctggcttcctttggattatttgcagcattctgtacccagcagctcgtccagaaacaaaaccagtcacacatggagttgcctcacctaatgaccttagaacagtcatgatcaactcaatgaagattgatgacttacattgcacctgtcatgaatgccatccagacacttacaacctgccctccttcgtatcctttatcaataatcaattttgccccc

SEQ ID NO: 27872 - DNA, 691 bp, Setaria italica
  Peptide Sequence Number=SeqID_93846
caacaaccaaataagaatctccatcgacagtggatcgagctccgaccccgccgaatcgaggtcgatctgccggcacaggattgagctccgacccgccgaatcaaggtccgccggcgctggatcgagccatcgaggattgaggtcgacgcgagcggcagcaaagacgagcggctacgggctacaccgccaaagctctgccgcaacgaactccttcatgaggttggtgaccgccgagtgcccatgtgatcctccgcgacgcctgccacgaccgcgcgcctcggtcatggcacaccttcgtgactatagcttcatggctttatcaatgagcctgcagcttatttggagtttcatccttgcttgtattgatattcattctttgaagactaactgggatcttcacaacactcggcatgtatggaagtacctcatcggtgattgggtattggggattgcctcgatggcagcagcttcttcctcagctggcgtggccatccttctcgtgagagattcccaattctgcagggtgcacgattaccagtatctttcatgcagtcgatatgaagtttcagtcatcctagctttcatggcatggtcattcatagctgcatctgctggttccacgttttggctgctcgtctcccttgtcgtgtgacttatatgtattttacgtttagttagttggttagtttta

SEQ ID NO: 27873 - DNA, 445 bp, Setaria italica
  Peptide Sequence Number=SeqID_93847
ggcacacaccaatagatctccatcgacagtggatcgagctccgacccgccgaatcgaggtcgatctgccggcacaggattgagctccgacccgccgaatcaaggtccgccggcgctggatcgagccatcgaggattgaggtcgacgcgagcggcagcaaagacgagcggctacgggctacaccgccaaagctctgccgcaacgaactccttcatgaggttggtgaccgccgagtgcccatgtgatcctccgcgacgcctgccacgaccgcgcgcctcggtcatggcacaccttcgtgactataggtaactgcaattacctacttgctctgtccaaatggtagtttattttggttttccaggaataatgtacatgtggatgcatagcaaaatctacgaacctataaaattaaaatgacctacctttaaaatggatttaggaagtgt

SEQ ID NO: 27874 - DNA, 414 bp, Setaria italica
  Peptide Sequence Number=SeqID_93848
gaatttagaaagcaaagaactaaggcaacgagtcaagcatactgagctcaataggtgaactagacaaaccactctgcagtgaattttagatatacgtgccacccagattggatagcaaacataagcctttatttttccccaaattatgacatgtgcaaattcaactcatatattttgtttaacaaaaaattcttatgaaacatcttacgatcactttggttatcgccaactgaaggcattaattttgtgcaagataacgttttgtgatatctccttttgatcatcttggttgcatccatgacttaaagcaaaactggttttggccaaactttctactctggtttgatttacatttaggatttgggtatgttcctgtttttctaattttttatttataaataatgtttatcttta

SEQ ID NO: 27875 - DNA, 498 bp, Setaria italica
  Peptide Sequence Number=SeqID_93849
aacgacgggtagttgaggtcgagggacgcgccggcgcagtccacggcgtaggacgacgacgtctgcgcgacggtcctgatctgctccgcggtgaagttcatggcgcacatgagcttcacgtagtcctccggcgcggcgtcgtagaccagccccgggtccacggcgcggctcgggtcgatgtggccggagcccatcgccagcggcgacgccgggtggttgcggttgcccatgtcctttatggacgccccggtgttgtccagcgcgctggccgtcgtcatcatcgccgaccgcaccatggccgggctccactccgggtgcacggccctgatcagcgcggcgagccccgacgcgtgcgggcacgccatggacgtcccggagatgatgttgaaccggctgtacagctgctgcgacccaacggtggcgacgctgatgttctccgcccaagatgccagtataagcgagcccggcgccatcacgtcgggcttgagcaccgtcggg

SEQ ID NO: 27876 - DNA, 464 bp, Setaria italica
  Peptide Sequence Number=SeqID_93850
cgggcgcggcgagggcggcgtcggggccgaggtcggtggcccagaggcgggcgacgtcgtcgacgacgaggaggtcggagtcgaggtagaggacgcgggagacggagcgcgggaggaggtcggcgaggtagatgcgggcgtagttgaggggctggtcgagcgcgcggcggacggaggaggagatcttgccccggacgagtcgggcgtcgaagcggtgcacggtggcggggagcgtggggaaggcggccgccagcgcgcggcggagcgaagcgaggcgccgcgccggggacgccgaggaggcgacgaagtggaaggcgatggactccgggcaggcggcgtggcggagcacggagaggacgccggcgagggagccacgcaggtaggtggcgtccagcgtcatcgcgatgtggatcgtcggcgcgcccgcgcaggccgcgccgttgcggaacgccggcgccacctac

SEQ ID NO: 27877 - DNA, 221 bp, Setaria italica
  misc_feature (13)..(13): n is a, c, g, or t
  Peptide Sequence Number=SeqID_93851
tggtgggagagangtttccactgtcggcggagacggggctgggcgccggagcctcggtcgcggcggacacggagagggcggcggccgccaggacggtgagcacggcgagggtcttcgatccgactccggccattgcttcggcttcgacgggcggtggtggtggcggcggcggtgagaaggttctggaaggcgatctgttgctgtggagcacgagatctctg

SEQ ID NO: 27878 - DNA, 428 bp, Setaria italica
  Peptide Sequence Number=SeqID_93852
ccccagatggccctcctttcagagcatttcctgagatttgcgaacaatgcgccttacctttttcttgaactcatccctcttttctctccaatccttctgcaagagaaaattcagatgtaaacaagagcagagtccatctgaaaggagcaaaccctacattttacagtgattcaactaatgccaaatgttggttacacttgagttcactacccaaatgacaaaggcagaagtgatgtgtgccaatccttagctcaatgagaaaacgatctcaagaatactcactcagcgaatatgcagataattacacaaggagtgtatgtaatgaaagattatattaaaatgatgtatccatcaataaaaaaaattagaaatgttgcaattgcaaatcaggtaagaggatgctttaaagctgcactggaatcatcacg

SEQ ID NO: 27879 - DNA, 997 bp, Setaria italica
  misc_feature (1)..(31): n is a, c, g, or t
  Peptide Sequence Number=SeqID_93853
nnnnnnnnnnnnnnnnnnnnnnnnnnnnnnntccctgtgtcgtcgtagttctaaaatttttaaactaatatgcattaggcaagtcacttcttttttattgatgttcatcacgaaaatcatgatcaggtggcatcatgttcaaaacattttcaacatccactccatgccacataatacaatcgaatttttaggataagcaacattcccgagtttctctggcgaagagaccaacaccaccatactaatgacactgaatgggaaatatacaggggagaagccgaaatgcgggcatcaggtgggcatcgggtgattgatagtgaacagcaccgattgcagcactcgttaaactccccagatggccctccttcagagcatttcctgagatttgcgaacaatgcgccttacctttttcttgaactcatccctcttttctctccaatccttagccgcttcaatgttcgctggagactcatcgtttggactagagagcatcgaaatgatgctcagaactatactttcaaccgtgtgcactggtgtccaccgttcgcttgcaagttcatagccattgggatcttcaccaggtggatgaagaattgaaatgcacacacgtccatcaggataaacattaggatgccacatctcagaagtaaatcttactgatggtggactgttgggataattctgggggaaggtcattattgcattgaagtagcctccatcatatagggtgtcaggcggtccgatgatggtgacctgccactcgaagacgttgctatcgtccaccagccccggcggagaacccatccacgggattcttcgcaagatccttgagctgcttctggagcaggaggctcgcctggctcgcggttcccgccatgggaaggaagcagcgctcctcgatcggatcggggctagggttttggcgatggggagtggttcgccgcccccgggaggagctgctttatttctgggggcgagagcagctttggaatcggga

SEQ ID NO: 27880 - DNA, 254 bp, Setaria italica
  Peptide Sequence Number=SeqID_93854
gtccaagcccatccatatggctaggatacctcctagccttatacttgatcttaggctcgggtttgacattaccttcataaccttgtgccactagcatgttcaatcttttgatctaaacatcccttgcttggattgactcttctagcttagcaatgttagcaacacaaacatttatatcaattttctaacatcctgagcaaccttcacttgtggaggcactggagtcaagatttgccttagaattggttttggtg

SEQ ID NO: 27881 - DNA, 456 bp, Setaria italica
  Peptide Sequence Number=SeqID_93855
ctcgcgcgacagcactcagcagctccaccaggcaccagcccagcaccgaggtgccaggcaagaacgccaattgggcagctcgtcgccgtaccaaccaaacctttccttccagccgccgcctcctccgtcgaacgcgccaaacgaagcacacgcgtggccaggccagccggcggcggcgtcgcctcgtcgtcccccgggcagacgacgcgacgatggggcagaagcgcgcggtgctggtgggcatcaactacccgggcacgggacggggagctcaagggctgcctcaacgacgtgtctcgcatgcgacggtgcctcgtcgaacgcttcgggttcgacgaggccggcatccgcgtgctcgccgacgccgacccgtccacgccgccgcccacgggggccaacatccggctggagctcgagcggctcgtggcgggcgcgcgcgccggggacacgctcttc

SEQ ID NO: 27882 - DNA, 290 bp, Setaria italica
  Peptide Sequence Number=SeqID_93856
atcccctcgcacacgtccacgcccatctccacgcgcgccacggccgggtcctcgccgggggtctcctgcccccggccccaccgcgggtcacggaagatgttcacgttcggggaccagaaggtgagccccgcctgcccgccgttgtacatggcgcgcgcctcgtcggagaccgcccgcccgatgagctcccagagcgaggcgttgagcgcggcggcggtgccgatgacctgcgggaacgcggtggcgcccgggaacgcgccgccgaacttgacgcccgggcccgtgtccga

SEQ ID NO: 27883 - DNA, 202 bp, Setaria italica
  Peptide Sequence Number=SeqID_93857
cgtgagcgatctcggcaaagcgtgggggcgtgggcgaacttggaagctgggcttggggggaatgcgggtggggggagttgaatatatagcggctggcatttactagtactcggcagcggaagcggcacccggcgcttgctgctgccccagttgccccggccggcgagggcgctgacactgggagtgggagagagcatgtgag

SEQ ID NO: 27884 - DNA, 414 bp, Setaria italica
  Peptide Sequence Number=SeqID_93858
ttttattaaagaccatgtaatatatttaaagaaacagcagttttactaaaaggtcctcgaggaagaccgaaatacaaaccagcctcaaacgcccggatggacacgaacacacacgcgtcgccgaggctgacccaagagggccacgcgtccaggctgcaggtcgtcgtcgccaccgtcgaggagcacactggcgagggccaccagagatgccagcgtcacaaaggacccatgaaggcgcttgggactggtgcgtgaggttttggttgggtgaaaaggacgatgttgaagagcattgccggcgaccgaaaggtgaagatgaatactagaagacatcctcttcagagccgatgatgacgagcagctcaaccaggaaaagaaaacatgcaagaggcaagcacaagaggagctcagcgc

SEQ ID NO: 27885 - DNA, 635 bp, Setaria italica
  Peptide Sequence Number=SeqID_93859
cttttattatcttatagtctccttttttaactcctttctccttttcttgtacttgttgcttagtgaaatttgccattggaaacatatcattgaatttatttgtaatactcctccaaccttctgctgtccagccattttgtcccttcaacattgggaggttggcaagctctttcagaatatccactagtcctttctcatgcatgtagctccatgcagccctttccgttgacatggctaggcaaacaatgtccagtggagacgaacaaggagtcgatcttggagctggcagatatatgctagccgaggaggaagatgaggtgccggcgatgtggtggatgcggaggcggcggccgggtggagcccggaggcgctgttgcagattgagacctccgggggcggcacagcagtcacggggagcggaggcacttcggagaggaggttcttggacggggaggcggggtggcggcacctcgacgcggagcgggtcggagcggcggcgctagcttggacagggcggcggagtggcggcggcgcggcgcggcgcggtgctcgcgagacgcacggggaagccgcgcccgatgtgcccaggtgggggagcgctgccccggggaaaacgcgtgggtcgggtgggcgag

SEQ ID NO: 27886 - DNA, 1738 bp, Setaria italica
  Peptide Sequence Number=SeqID_93860
aggagtatctcggagcaaagcaatcataacacaacacctagctctggatataatggcatggcttctagacttgatggcatagaaagcactgaagttcaatcagccccatccaatcataattcagaggatcaggatgttgttggtgggaagaaacgcaagcaaagtcagatggcagcaaaacttggggacttcattgactttagaaagaatcagaatgcaacatcaatcaccaagttgccatgagtgcaacatcacaattcatatagcaagtacaatccatctctagggcttcagatgatacatatatcacattacatttacatccagctgacgcaatggcctaaatggttaggtgctctttacatgttttaagcatctactcagctataaaaccatgcatttaactcaactgttggcacatgatataattactgtataagagatttagctagtaaaataagccgaggaccttctctccaacattctttctcctcttcatgcttctcaacactcattgattcgagcaatttttttcatcaaccaaatcagccggacacttgggtttttggtgctcacgaatatttttctgttcatttcactttggaaaagctcgttagcatcggctttctgttcatctgatagctcttccatggtgtccacaatgtcaatacatttctccactgagtagtcttcctcacgtctcttcttctcctttatcttttctagagttttttcattctgattctttctaaagtcaatgaagtccccaagttttgctgccatctgactttgcttgcgtttcttcccaccaacaacatcctgatcctctgaattatgattggatggggctgattgaacttcagtgctttctatgccatcaagtctagaagccatgccattatatccagagctaggtgttgtgttatgattgctttgctccgagatactcctttgaggtgttggttcaacttgcagctcagttctttgtggtggaggctcaattgatgtaaaatttaaatcccctgtggccacacttcctgaattaccttcatacaataattccaagctgttatataaaggaaatgccttcttgcggaacttgccaactctgtgattatccttaatcaacttctcccaaccttttggatctgcaataatcatacccaaagtgtcgttccagccaacaccacttttcctggcttcttttattatcttatagctcctttttaactccttctccttttcttgtacttgttgcttagtgaaatttgccattggaaacatatcattgaatttatttgtaatactcctccaaccttctgctgtccagccattttgtcccttcaacattgggaggttggcaagctctttcagaatatccactagtcctttctcatgcatgtagctccatgcagccctttccgttgacatggattgttatccggcatctgactagctttcctgatccatgttgttcagtaattacaacgatgaatcaagaggccgactctgaaaatcatttgtcccatcctgcaggaggtttattggcaaattcttgcttggacgtgacatcctctcctctgaattaagtagtgctcgtgttgaattaagccagtagagtacaagcaatggctttagtattagctaggcaaacaatgtccagtggagacgaacaaggagttcgtattctttggtagtcttggtcttagttaatttaatttaattttagtttacttta

SEQ ID NO: 27887 - DNA, 545 bp, Setaria italica
  Peptide Sequence Number=SeqID_93861
gatggttactgcagtagcacaataatttgggtactagataactattctggctgttaaacagatgttaatacctttggttaatcaaaaacctctttggaagtattcttaatgctgttagctctcacatttaaatttattaggcaggataaaataattaagctatctgaatcccttttgttggaatgaaagatttccaaagaaaacaagggctatacaattaaggtcattctgtacttcttaattgcaaagaaaaatactgagtaaaatattttgaaatagaaacatggacatgcgttgttctcgcaattattatttcggcacaatacttttcagattgctgcttatatatttttgcctgaaagactgccagttaaactctactaacagagattgttgtgtagtgaagtatgtgatgcaggcatgcatccaatgggtgacatgctttactttgtggctaaacttttgagcaattgtcgctgtatactatttatttttcagataacacttccaatgtttaattatttacttaccctcacatatggtgt

SEQ ID NO: 27888 - DNA, 250 bp, Setaria italica
  Peptide Sequence Number=SeqID_93862
tctacaattctccacttcttctatcctcatcttctcatccctcctcctccaggctggagccgctccccatcctccctctgacctccatggttccacctccctccgtcctccctcatcccttcggcgactcctccaggagcggtgacgcgcgagctcagttcaccgagctggtaggcagcagcggcggcggcaccctgggggcagcgatcgggcaggcggtggaggccagcgcggccgcatgcactccctt

SEQ ID NO: 27889 - DNA, 829 bp, Setaria italica
  Peptide Sequence Number=SeqID_93863
ctccaaactcacttctcctaccatcagaattcaaatagctcccgcaccatctacgtctcatcgcctaccatgtatagattctcaaaatcgccacaacatcagcaaactgcctgaacacgtagcagaacatgctacgggtggccttagccatttggtggtgctatactacgggaatggctttgtctgtatatcagttgacgggggaagagggggcaaaatttcttaacccagtgactattggggagaagccgagaagatactctgacctaggtatcgcaatgtacagaacaggcaaagggccgatcgacaactctggagaagactggcacgatgagacccgcagtcctgtcaaacggcaatagcacaggcaaagcccctcccccctaccgattggcaacccgagactgaccagccttgcctctcattgtaaacttccacagtatcgatggtttctccagcatcgttgatgccaccaatgtagaacaaattatcatccattgtaatcgcacacccatatcctctcgcgatgctgaatgggctgcccatcctccatgaattggcacgtgagtcaaaaatctctacggtagagatcctattgcttccatcataccctcccacagcgtatagtgcttcccccaagacagctactgagtgggaacctcttcttacactcatacttggaagcagagcccagaaaccttcccttggatcatacctttctgctgattgtaagtacatattgccatcataaccaccagttacatagagagagccgttaaatacagctgcagcaggagcaaatcgattttgccgcatagacagactgtct

SEQ ID NO: 27890 - DNA, 282 bp, Setaria italica
  Peptide Sequence Number=SeqID_93864
cttcgccagcgcccgcgccacgccaggctccagcgccgccgtcgtccacttcatcggtccccgcgtctccggcatcctgctgccgagcacgccggccgcttcgaagtgcgatacttgtgctgcatcttcgtcgttgtcgtccgctgtgctggagcggcgtggactggagatccgtccggacccgcgactgattccatttgctgatggactctcttgagatcaaggaagaagattatcagatggatcccattgaaatcaaggatgatgaagagcatccgatag

SEQ ID NO: 27891 - DNA, 232 bp, Setaria italica
  Peptide Sequence Number=SeqID_93865
ctgatcctatttgaggatgtggatactgtctttgatgaggatcgtgggtttatttcgaccatacttaagatggcagagacgacaaaatggccaatcatactgactagcaacaggaaggatccatctttgcctaatctcttggatcagtttgctttggatttcaaatacccattgacctcagagctactttcacatgttgccatgatctgtaaatctgagggagtagatgtca

SEQ ID NO: 27892 - DNA, 545 bp, Setaria italica
  Peptide Sequence Number=SeqID_93866
aagtgtgttgaaagacacagtaatatttggtggtatcactgctatatatttggagaagcagtcaagtgcatccgatattgccttaaatattatccgtacagcagtaaagagggctgatgttctcccttctttggaacttgaatggcgacaaggagcagtcgccccaagtgtaattctctctatcttggatccgcatatgccacttcctccagacatagacctctgcagaagttcagtgcatgagattaataatgcatctttggctgttttggataatcctgcaccacagacgtgcaaccctgaaaatattgatggtcgcgatgcctctgaaacaactattcgggctgaaagttttgaacagtacaattttttgtttgctcctgaagaattaaatcaatctgagttgacaggtctttgtaccttgaaagaaaaaggctgtgatgtaataactcaaacaagtttggaccaggacaaccctgaaggcagaagaactaatgagaaactatcatctgaacctttcctgctagataacatcgctgcagctg

SEQ ID NO: 27893 - DNA, 402 bp, Setaria italica
  Peptide Sequence Number=SeqID_93867
gatcaaggaacattgccttcgtgtcgtcctccagcgcatatgtaagcgacttcccgtcaataatcaaggcataggtttcaccagcagatgcatttgcaagtttctttccctcatttatttgccgcaccacactatcctttgatgccttggttatggcagccttatcgctgcctttctccaacgcaatgatatctgctgtctccagagtaatggttatttgcttcattccttgtcttaatagactgcaggcatatccaatgttgatagcggtctccatcttgtcgcctgtcagcacccatatcttgatgccagcttgagcaagtttgtcaacgcattcaggcacccccttttgtagtttatcctcaacagcagtagcaccaagaaggataagatccctctcca

SEQ ID NO: 27894 - DNA, 375 bp, Setaria italica
  Peptide Sequence Number=SeqID_93868
aggaatatatctgtactgtaactttcaatttattatggacattattttttagtaatctcaagcaaaccctattcgtatcagcatccataagaccacaagtatgcaaacatcgtttgaaagcatgtttatgcttcctcagataattgctgctcacttatcccatgagcatccatgtgcacctatcgagatgacaagttatcggtgcgctcatatcaacattgatcgacttggggattacaaggtcagagttccttgcatcggggaaaaaatgtcgactgagttcagacataacggtggtagcgaaggccaattcttgcagagtttctatgcgtagtgaggtcctgctgtggtttcaagtccgtccattgttcagcc

SEQ ID NO: 27895 - DNA, 404 bp, Setaria italica
  Peptide Sequence Number=SeqID_93869
accccttttattgaattttgtggatatgtataaccctgctaggtatgctcagcaaaataaatgaataaaaaattaagctacccttgcctaacaaaatctgcctccactagtatttcactattttaagttgctagctcctgctcttgtgatacaggatcactccatgtctgattttttttttcttgcttattattgattttcctttgtcaggttgctgagcgtgctttgttcttgtggaacaatgatcacattgtaagcttgatagcccaaaatcgtggtgttatatttccaatcatatttgaagcgcttgagaggaatatacagagccactggaatcaagctgttcatggtctcactacaaacgtacgcaagatgtttttggacatggaactagttgtagtctt

SEQ ID NO: 27896 - DNA, 1326 bp, Setaria italica
  misc_feature (1326)..(1326): n is a, c, g, or t
  Peptide Sequence Number=SeqID_93870
accgtgctccaccgcatctatggcaagttcatggtacaccgcccattcatccgcaaggccatcaacaatgtgttctaccggttcatctttgagacgcaacgccacaatggcataggggagctccttgagatcctgggaagcatcattaatggctttgccttgccaatgaaggaggagcacaagctgttccttgcccgtgctctcattcccctgcacaagccgaagtctgttgcgatctaccatcagcagctctcctattgtattgttcagtttgttgagaaggactacaaattagcagatactgtgattcgggggctgctcaaatactggccagtcacaaattgccagaaggaggtgttgtttctgggagagcttgaagaagtgcttgaggcgacacagcctgcagagttccagcgctgcatggtaccactgtttaagcagattggccggtgccttaacagttctcatttccaggttgctgagcgtgctttgttcttgtggaacaatgatcacattgtaagcttgatagcccaaaatcgtggtgttatatttccaatcatatttgaagcgcttgagaggaatatacagagccactggaatcaagctgttcatggtctcactacaaacgtacgcaagatgtttttggacatggacagtgagctatttgaagaatgccaacagcagtacatggagaaacaagcaaaagccaaagagatgcaggagcaacgagaatctgcatggagacaattggaagctgttgttgctgccaaggctgctgggagatgatatggttttggtcaactagataattgctgctcacttatcccatgagcatccatgtgcacctatcgagatgacaagttatcggtgcgctcatatcaacattgatcgacttggggattacaaggtcagagttccttgcatcggggaaaaaatgtcgactgagttcagacataacggtggtagcgaaggccaattcttgcagagtttctatgcgtagtgaggtcctgctgtggtttcaagtccgtccattgttcagcccctccttttctgttgcattaatttatgaataatgggacccttgtattaatctttcattgtttgccctagttccctacccacaattgggaaaattccaagtagaaaaaatgactgggctagatgtaagcttttttcttttctttgtcttttgtctttttacctgttgtctcttttgagttaattcagttcatgttgtatggaagtaacatcacgaaatggagataaaagcactttaacttagtgtggtggcatgatagcaatataatggctgatctgtaaaaaggn

SEQ ID NO: 27897 - DNA, 386 bp, Setaria italica
  Peptide Sequence Number=SeqID_93871
acggcgtccgcgaggaacgccgcaaacggggcggcgaggccgtcgagcgccttcttgatgagctcgttcttctccggcggcacgtcggccgtggactcggcgccctcgggcaggccctccacgatcggcgccggcagcgccacgaggcggattcggggcgccaggtgcgccggcacgggcgggagccgggcgacgttcctcggcgtggagaggaacgtgacggcgtggcccctcgccgccaggcgcttgccgagctccaggtacgggatcaagtgtccgaacgccagccatgggaacagcaccacgttgagcttgtcaccgccggctgcttcttccatcgtcatgatcctatcaaccagcagtactgttgcgagaagatctttggg

SEQ ID NO: 27898 - DNA, 319 bp, Setaria italica
  Peptide Sequence Number=SeqID_93872
tacagtgagaacgtcaatcagggttttcagagatggctctccttagctggtgcccaatatgaagctgccattgctgctgctggtggtggtggtgatgacgccggtggtgatgctgcgcaagtgcagcagaagccattgccgctccatctcaagtctgaactctaaactctggactgtttgcatttccactgcttgaacgacgaaatgtttacccgtgtatggacaattaattattcatctgttaaatctaataattgtgtaatgtactgccaccttaatactatcattatttgtactttaccttatcaaaaaaaaaaaa

SEQ ID NO: 27899 - DNA, 382 bp, Setaria italica
  Peptide Sequence Number=SeqID_93873
cggccacgcacagcacggccttcatgtgacccctgagcgtcgcagtggcacacatggcaccaccgcctgcacactcccagaccacgacggaacggtcgcacgcgccggagtagagcacccgcccgccgacacccagcgccagcgcgttcaccgccgccttgtggcgctccatggtgccgaccagcgcgagcttcccctgccgccccgggcggcgcctccacgccttgaccgtcctgtcggccgagcccgtgtacacgctcccgtcggccgacacggccacggcgttgatggcgtcgtcgtgtgccgctgcgatggactcggcgcagcggaggcccggcagccgccacgccttgaggctccggtcccacgacacggagtacat

SEQ ID NO: 27900 - DNA, 368 bp, Setaria italica
  Peptide Sequence Number=SeqID_93874
gccgccgtaggtgaggatgtccgcggtcacgtacaggggccggtcggagacgacggcgtcgtgggtcttcaagacctccctcgccgcctccggggacgagaccaccaccgtggggacgtgccccaggcggaggaacacgacggcgccgtacctccgcgccagcccccgcatcgcgtggtgcggcagcgcgccgagcaggcagtgcatgttcccgatgaccggcagcggccatggcccaggaggcaggttcaagccggcgccgcgccgggagaagacggccttcgtcaactttaggagcacgatgacgccaccgacgaggcagagcagggtgtagaacgcagccggtgctgtttctgccatgacaagga

SEQ ID NO: 27901 - DNA, 621 bp, Setaria italica
  Peptide Sequence Number=SeqID_93875
ccaccgacggcgggaggcggccgctgacctgagcgcacacgaggagcatggcgctgacgcatagggtgattttggagagcttaaggatggcgagcatcatctcgttcacattcagggaggccgtggctgacgtggagtacaaagggttccttatccccaagggttggaaggtgatgccgctcttcaggaacatccatcacagcccggactacttccaggatccacacaagttcgacccttctagattccaggtggcgccgcggccgaacacattcctgccatttgggaacggcttgcacgcgtgcccggggaacgagctggccaagctcgagatgctggtcctcatccaccacctggtcaccggctacaggtgggagattgttggatccagtgatgagatcgagtacagtccattccctgtgcccaagcatgggttgcctgtcagattatggagagaaaacaggacagtggaacgaaagggttgtgagagtggtaatgttgaggacataatagtttgacactgaattaggcattaatttaacctagctagttagagagtttttctttctttctttgcctgcccttctcctgatcaaattaagttggaggagaagggcaggc

SEQ ID NO: 27902 - DNA, 548 bp, Setaria italica
  Peptide Sequence Number=SeqID_93876
tagtaagtaaccaatttagactagaatcaatcccatttctggttgttggtgaatgttgcatacgcaggtggcgccgcggccgaacacattcctgccatttgggaacggcttgcacgcgtgcccggggaacgagctggccaagctcgagatgctggtcctcatccaccacctggtcaccggctacaggtgcgtgcccctcctcgcagatccgccatatattctctcaatctctcttgtccttgtggaccagaacgttgagcgcctccccatggcttggtgccacctctgctccgcacaaaagtccacaccgtgcatgctccaaatctccaatatgagtgcatcgatcataccataaactgtgggtccgtcaaatgttgtcacgagctcactgtcttgttgcacaactgacaactactcctggtctgctcctatatgagcagcatgagcgctgatcacagctatataacgacagatcgtggatcttacacttggatactgattgtcgtgtgcgcatgtttgatttgcaggtggagattgttggatcagtg

SEQ ID NO: 27903 - DNA, 264 bp, Setaria italica
  Peptide Sequence Number=SeqID_93877
ctgtggtgcaacggacatattttgctgtggtgttattatttaacaagttgtatcctggagtatctccttgatttaaactgtgcatatgatgcaattcccacttgattcagtttgtcgaacattataccgatgctgtctttactgtctgcaataatgtggccattgtttgtttgtggctagtttctcctcccttagggatttggaatttcagaatacttattgtgcatttgcaggggatagctcctttttcttgtctgccaagtg

SEQ ID NO: 27904 - DNA, 357 bp, Setaria italica
  Peptide Sequence Number=SeqID_93878
gccatgggttccgtcagagagcgagatctctcgccggagccggataaacgccggccgtccggcctggggaccgtcactgtcgtcttcttgatcgcattgccgctgctgctcgtattcttcctcttcagcgaccgagctgtcgtctccatcgccgccgattaccggccggtttggcagcgcatgaaactgctaggctccggcaatgcgtcgtcgtttccgaacgcggagggcagcgctcacgaccggctccttggcgggctcctctcgccggactttgacacggcgacgtgcctaagcaggtacgaggcgtccaggcgctggaagccgtcgccgttcccggtcaccccctaccttgtc

SEQ ID NO: 27905 - DNA, 420 bp, Setaria italica
  misc_feature (32)..(32): n is a, c, g, or t
  Peptide Sequence Number=SeqID_93879
ctgctagcacacgtgtttcaatgtactggccnccgtttcacgtgtccattgtttcccgaatggcaggctccggcaatgcgtcgtcgtttccgaacgcggagggcagcgctcacgaccggctccttggcgggctcctctcgccggactttgacacggcgacgtgcctaagcaggtacgaggcgtccaggcgctggaagccgtcgccgttcccggtcaccccctaccttgtccagaagctgaggcagtacgaagcgaaccaccggcggtgcggcccgggcaccgcgaactaccgcgaggccatcgtgcagctcatgtccggccgcaacgccgacctcgccgagtgcaagtacgttgtgtgggttcccctcgcgggcctcggcaaccggatgctcagcatcgtctccaccttcctctacgcgc

SEQ ID NO: 27906 - DNA, 613 bp, Setaria italica
  Peptide Sequence Number=SeqID_93880
aacaatccgcaccaaggttttgtttcaaaatttccattctttttgggcagcttggagaagatgggagctcttaattgggccaaagtagttcatgagcaccaaggatggcgcctcattagctgtatatggctccacgctgggctagtccacctggtagtcaacatgctaagcttggattcatcggaatccgacttgagcaacaatttgggtttggtgagcttcttgtttgaaattgttggttcgcattgtcattaccacagtatcaaccttttcggttcgagttcaatacttgtccatctattgttttgcaatattagtctttgttcggacgatgtactttatgttttaacattgaaacactgttagctgattctgtcttggaacttatggaaagctgaagtaaatctgaagtaagtagacatggagtatttcttttctgccatggctttgtggtggaaccacttaataggtttctgaatgcactatttatttttaggatttcaacatgagaatgttgctttcatttaagaagtaatccaaattatggactttttttaatttggtattcatttaaggagtagtcaggttttacatgttattagggatcattttc

SEQ ID NO: 27907 - DNA, 1391 bp, Setaria italica
  misc_feature (1385)..(1391): n is a, c, g, or t
  Peptide Sequence Number=SeqID_93881
caccgccgcggggtcgagaaagccatcaccagccatggcaagcggcggcgaggcgaaggccgccggcgcggggtactaccagtaccctggctcgtacggcggcggcggcggccgggggtacggcgccggggacgacgagcggcggtggtggccgtggctcgtgcccaccgtgctcgtcgcctgcatcgcggtcttcgccgccgagatgttcgtcaacgactgcccgcgccacgggagcgccctcggcggcagggccgggtgcgtcgcgaccgggttcctccgacggttcgccttccagccgctccgggagaacccgctactcgggccatcctccgccaccttggagaagatgggagctcttaattgggccaaagtagttcatgagcaccaaggatggcgcctcattagctgtatatggctccacgctgggctagtccacctggtagtcaacatgctaagcttggtattcatcggaatccgacttgagcaacaatttgggtttgttcgcattggggtcatctacttgatatctggttttggcggcagtgtgctctctgcactcttcctacggagtaattacatctctgttggtgcctctggggctttgtttggcctccttggatctatgctttcggagcttattatgaactggacaatctattccaacaaggcagcggcaatcgtaactctacttttcataattgcaattaatttggccattgggatattaccccatgctgataattttgcccacattggtggatttgcttctggatttcttcttggatttgtgctgctcgcaagacctcaatttggttggatggaacgcaatgagctacctcagactaatcaagctccaaagtacaaattgtaccagtacgtcttgtgggttgctgcactcatattgctggtagttggatttgtgattatcctggcaatgctcttcaagggaaagaatgggaacgacagctgccactggtgccagtacctgaactgcgtaccaacgtccagatggaagtgcaacacttagatggttcagttttccatcacctcacgatgcaaaacatacgcctcttgtgggaaccatttttgtgccatcgtgtttgtggatagcaagaccagcgtgcacgtcttgtgcctgagttctctatggttacgtgaagtacaaatgttcctgaattgtaacctgagcttgtaactgtggatttcgccgcaattcttacattgatttcgccagcattagctgctgactgctgaacagtgtaaaaccattctcacaatctgattgtcagacattggttgtgtctctaaactttgataattgttgaaggacaacacacaatctaaattattttgagttgttgttgtagtccttaaaaaaaaannnnnnn

SEQ ID NO: 27908 - DNA, 991 bp, Setaria italica
  misc_feature (128)..(128): n is a, c, g, or t
  Peptide Sequence Number=SeqID_93882
cctttaaaaataagaattttttattgccattatttagctccttggtgattttagatttgatattattatcatactatatgttaaatataaaaaaaaaattaacagagggggaagacgttcctgctggngtttcaatatgtggagacgtggagtgtggtcctgaacccaggtgggctaggcaagttctctgctccccaaccactagacccatgagagtcatatgttaaataatcagcaacctactttgtagtaatatattaatagtgtcttgtgttaagaaagaaacacaacccaacaaaaatccattggaacagtaaaggagctctatttttcatctaaaataattggaagttgtcaagatcctaggataataagaaattccaacccttcgaacagcttgcctcccatacagcttgctgaaccacatcatcactaacgataacaagttcctgtgacgggcgcaagaatggtgataaaaatatatttgtactggcatataattctataaagtaccttcaaagatgaattagctctagtatttcacgcgaccaagtcatattctatcattggtcgttttattgtttgtaagtggtactaatttcatctactagtatcagggtgtgagtgtgaatgtttagtatgcatactcttctgcttggaagagcatagtaagacttcttttttccttcttaatacaaagatatgcagctctcctgcatgttctagcaaaaaaattgtcctatattttaaaatcaaaagtaacaacaaaaaaatgtgtttgttaagtgaaacgtaaagagttcaagaattcagaacagcataaacagaaaatctgatggcaacacaaccactgccgcagagtggacaatgctatggacaaggagaaaattgcacaaggtgggttagcagctacaaattagcatttctgtaagcaaaaatatgggaaacgctgaaaataggtgtaccttctttacggaacctgatgctacag

SEQ ID NO: 27909 - DNA, 996 bp, Setaria italica
  Peptide Sequence Number=SeqID_93883
tttttttcttcgttaaaagtaactttcatacagctttaataggtttataaattgtttgggcatacaaatacaaaataaaactgtcgttgaactctctatattgaactcttgggggcaatctcctcctaacttggagcaagaagaaacatagctacagacaactctcgcagccatcaacttacaaaacttttgacaacatgagtgcatgcccccctttttacacaagcatgacaaggtaaaggcctcaacaccttttgctgtttcgcttacctagatacaatagtgacagttgacctaagacaaaattgctcaattctaaagcaataccgcatatatctcaagctgaggatcagtaatcacaaaggcaagtaaatgtgatatcagttgtgcctgatcaaaaatctatctcaacgcggcaaaattgccaaaagctctgccttgtgttgcatacagtagtataccaaaattgctagaatgataactagtatcataggccatacatttgaaccattactcttaggggacccaactgacgtcactcttgcagttgagtcaaaggaagttgacagcaaggttcttgaatcctgggagaagcccagcgtagtaacaatgccaagatgtgcctttttaactgttatgagtgttcgcatatcttttgaccctagtacgatgacggttccttcaattgttccaattgccagaagagcaccatcaggtgacacagcgaaagctgaaatagcctcacgagttattttctttgatccaactcttgtccatgaggtagtatcccaagatattattttccaatagtcaccttgcattgcagctataaataagacgttactattgtcagtcttattggagaatctgcagaatccaaatatttctcctgcttctcttgggagattagctacaacttcggatgacagcaaatcccacactttacatggaccactgctcctattcacagcaagaaacttctcatcggtactgaaa

SEQ ID NO: 27910 - DNA, 840 bp, Setaria italica
  Peptide Sequence Number=SeqID_93884
ttaaataaagaaagtaagttaacgaacaataatactttagaaccctaagtaacgaatgacggttccttcaattgttccaattgccagaagagcaccatcaggtgacacagcgaaagctgaaatagcctcacgagttattttctttgatccaactcttgtccatgaggtagtatcccaagatattattttccaatagtcaccttgcattgcagctataaataagacgttactattgtcagtcttattggagaatctgcagaatccaaatatttctcctgcttctcttgggagattagctacaacttcggatgacagcaaatcccacactttacatggaccactgctcctattcacagcaagaaacttctcatcggtactgaaactaagatccttaattgaggttttagtatcagcttctgtgagaacagactccaaggcaggccatttgaagacccttaaatgtccgtcctcaccaccagtggcaagtattgaaccttctccactgaatgatacggccaactgcaaaccaacatctgttagctccgctaatgcttcctggtcagcctccaaagctaggttacgtggttcgtctccttcctgtgattcccatcgatacaacctgcatccgttggggaaggcgcagagcacgccgtcgccgcgcgggtggacggccatcctatacggcacctcctcctcggtgttgacctcaacaaccgcttcaggggagagggccgcctcttcccccgccgcagcggcggggtccagcgcggccacgacgagcttgttgggcacgccgctccggccctccccggtccgtccgccggtcccaccatcgggggc

SEQ ID NO: 27911 - DNA, 365 bp, Setaria italica
  Peptide Sequence Number=SeqID_93885
cacaacacactagcattattatcgcaatacgtacagtagcaacacacgcacaaaattcaaagatggcgcccgccaacgccaagccctggaagcagcaggccctgattctgatggcggcgctgctcctgggcgctgcttctggggttccagacccagccgtcgttctcccgctggacgcttgttccgcgggtcttgagcagttgcgttccttagacccatcatgtttcggaaccgtacgcttcggtggcacctctgaggaagatgttcgaaagtgctgtggcaggctaggaggtgtcatttcggtttcccgcggaaaatgcgcttgcggtcttgtgaaggaatttgcgcagaggaacatcgacgtc

SEQ ID NO: 27912 - DNA, 296 bp, Setaria italica
  Peptide Sequence Number=SeqID_93886
cggcgggaaggggcgaggaggacgaggggtgacagaacttggcgtacatgaggaggaggaaggtgagggagaagatcatggtgaagatgccgacgacgatggccacgctggggcggaacgagaccttgatgccggcacccggcgtgttattgttatcgggagcagcctcggcggtggtcggctgcgctgcggcggagcacgccgctgcggacaggacgaccgcgaggagagggaggaagagctggcgcggcagcgccatggcatgggcgccggacaaggtagccaccgggcgattt

SEQ ID NO: 27913 - DNA, 1282 bp, Setaria italica
  Peptide Sequence Number=SeqID_93887
agtctacaccagtaatattacaatacttatagttgttcatatataatctgccatcagacacatggatgaagcatatatcttgctaattgcatattacacatacaaaagatagctagatgcttccaaatttaccatacttaaaagttgttcatatataagattcagataagagacatctgaatactacatacagatatttggataattcagagacaagacatatctgaattctgcctagtttgatgttgagaagacttgattcagatccactttagtgcccttgggtgctgattgacatcatcataaaaagggcaaatacttcacactcctgaccacatcaaagatcttctccataccaattgtaacgtagtgtgcatgaagtgactttgccatctcatcatcaggacaaagaatggaaccaaacttgcgccctgggtctaatgcaatcctgaacaacgcaacctctacagaaccaaccaacttctccaaagcatgaactgtggtcatgaacatgttgttttcatcggtagcagaccaagctagaaccaggcagccttgaggaccaccgtcttttatacctagataggtcatgttgtcacgagtgatcggaacatctttcctagcaaaagcgttttcaccaagacgatgttgttgcaatgcaaatagaaaaagaattaggatctagattacgacaagtatctagcaaattgaaaataaaagcagtcaagccatatgaagctatccctaatgaacagaatagaaatttcagatataagctgaaaatatgatgcaaatagcaatattagtttgatagaaaaacccaaattaaacagcttaccagatttttaaatggtcagtcaaataacaaataatttttgaaaagtggaaaccccctcagatgaaaacccagccaacagaaataagataaaacccacaaatttcaattataggcataataatggaattaatagtaacgccatcactgtcacttagtgatctaaaaactgtaaatgcttaagcgcaccaatttagtatctaatttaggaacaacaggtcatttacaaatttaattatcctacactgagtaatacctctaatgcaaactcaaaattaagaaaacatttgtgcaatacacctagaaaagggatagaaagcttaattaggacaagtatgaatgaaatgatatgtatccacatcctagtacaaacaatgcttcaaacaaaacagtaaagaaaaaccagcttaaataacagagcaacaaacaagaatctaacctaaaaga

SEQ ID NO: 27914 - DNA, 2177 bp, Setaria italica
  Peptide Sequence Number=SeqID_93888
ctcatcggttccagtcttccagaaatgcgggcagggtgaaagtgcagaaccaaccaactatagaacaagaaaaacagactgaaaccatacacatcttgcagcacgacggggcacagaacgaagtgaacgtgacgaccagaacaactttacaagcggcaggttttgtcatagcgggctgaagggctccggcagcggttcgaaccggtggtcgaacagcgggctctgatcgggcttgtcgtcgaagccgtgcagccagctggtgttccgcacgtcctcccgcagcagcatcgcctcgtagcgcgagctgccgtagatgtccagctcgctcagggtctccttggtcccgacgctcgccctgtccggcgagtcggttgagctgccaccgttgcgcgagggagccccgttcgagtccccggagaggtgcccgttcacgctgcttccgttgtcggtgtagtgccggtcgccgtttgagatgccaagacctgggtctgacgcccgagctggccgggccttggcagcagctgagcggatgctctggggaaacagggatgcaccacgaatgccacccaaattctgccgaatgtccatgtgcttgatagccatgtcaagtgacctctttgatatcgatctcccaaatccattatcagtgccagtgacaggccgtgagggtctgttaggttgactgtcaataacagacctttcagcttgccgattttggtgtccatttgtgagactaggtgtctttgatgatgcatcggaaaatttacttcgagtcacagcaggcacagagaccttcttcacatgtgctgatgtagctgaaggttcagtatttggggttgaccttatgcctaaagccattcctggccttgatctgccagcagatagtggtctttcaggcaattttgtccttaaatttggtggagtttcatttgggaaatcagggatatcaagtggccgcactggtgctcggggtcgtggattcggagaacttggacgagatgacggagctgatgaaggtgctgagttccgcccattactgattgcagaccgggagacagatgtaaaactactgatactagagctccgtccaacagaaggagagcgaccaatagctggtgctgatgaacgaattgcaggttgacgtgtaggtgtagatgatcgcgagctggaacggctcatcgaaggaacagaacttgaggacaatgaggtggcacggcttataccaggaacattgcctgaggaagaccctggtcggctcattgtaccagaagatgcgctcgggcgacttattgcatgagttggaccagaagatgaactgggaattatacgggaccgagaatttggagttgatggccttgaattatgtgcggatgtggtcttggcagcagctgactcagttgaagagtttggggctgttggacgagttcttgtcggagtagatggacgagttttggctggtgtagatggacgagttttaacaggagtagaggatcttgcaggcactggacgcgaagctggaactgattgttttggtgcagcagcagtggtgtttcgcctactaggggttgtaggtcttgaagtgactgatgaaatgcttgtattgagaactgaagtcctgttgttgccattcatgagagtagactggatagaaggtctgctgacagaattactccttgctggtctagtgggaattgttgaatgcccattctctgtttgagacactgaaagcctagatgctctagtagtcgaggatgatctagtggtagtgcgcttcggtaatatatttggggatggtgttttctcagcaacctccagtgcaggaacacgtggggtcccaggcggagttagaagccagtcatagtcgttcttcccgatctccgaacccaacaggtcctccatcgcagagcacagctaccttgctgtcccaaactctggcggtgggcagcgccgggtccggatccggatccggcaggaggttccagaagcttcgatctatccaatgcctcccttcccgcaaccaatgacgcttccttccttcctcaaatgccgcggccgggggcgaggtgccgctccgccctccctccgccgcctagagatgcgctgcgtctgcgtgcgctagagatgccgaggcgaggggagcaggggcgcggagggggacggcgctgctggtggtggtg

SEQ ID NO: 27915 - DNA, 576 bp, Setaria italica
  Peptide Sequence Number=SeqID_93889
atgtcacatcctttttccttctcatgcgcatggacagagcctccgggtatgctgatgtgaaccgtcacatgtgagccgttcatccatctgcatgtataagcatgctcctggattcaagctggttggagcttcatcaacaacttcagcaggctgatctggtccaaggctgcgaaagcagccgcttttgcatctcatatatttctgcaaaatctcacatttgttcaagacagagagcctgcttggaacacatgactgtcctcttactttgcaaaccaagctgcaagattcccctggccttccgactacgacgttaatgcccaacaactttgatacagaactagattcagttgatcccgaagaattttgctgcatggcaaaacaatgatggaagtcactggcgtaggcattttcatgaaccacacttgcagagttatggcggcatcttcccatgcagaaatcaaaaacatttgtgtatgttccagcagtaactggcttagctaccttcagcttcagcacatcttctttcttggtcttagaaggattcaaacagcacgaaacacattattcataagagtt

SEQ ID NO: 27916 - DNA, 1376 bp, Setaria italica
  Peptide Sequence Number=SeqID_93890
gccctccaccgacctcaccggcggctaccgcgtcctctcctacgtcgacccctccgaggccaaccacggcccgctcaagacgctcctcttctacctcctctcgcaccgccgccagcacgtgatccccaagttccgcgaggtgtacggcgacctgttcagcctcatggagaacgagctctcccgggtcggcaaggccgacttcggccactacaacgacgccgccgccttctccttcctctgccaggcgctgctggggcgcgaccccaccgagtccgcgctccagggcgacgggcccaagctgatcaccaagtgggtgatgttccagatcagcccgctgctcaacctcggcctgcccaagctcgtcgaggactccctcctccactcgttccgcctcccgccggcgctggtcaagaaggactacgaccggctcgccgacttcttccgcgacgccgccaggggcgtcgtcgacgagggcgagcgcctcggcatcccgcgggaggaggcggtgcacaacatcctgttcgccatgtgcttcaattccttcggcggcatgaagatcctgttcccgtcgctcgtcaagtggctgggccgcgccggcgcgcgcacccatgggcggctggcgacggaggtgcgcgacgccgtgcgcgcccacggcggcgaggtgaccatgaaggcgctgtcggagatgccgctggtgaagtcggcggtgtacgaggcgctgcggatcgagccacccgtggcgatgcagtacgggcgcgccaagcgggacatggtggtggagagccacgactacgggttcgaggtgcgcgagggggagatgctcttcggctaccagcccatggccaccaaggacccgcgcgtcttcgcgaggcccgaggagtacgtgcccgacaggttcctcggagacgacggcgcgcgcctgctccgccacgtcgtctggtccaacgggcccgagaccgcgtcgcccacgctgcaggacaagcagtgcgccggcaaggacttcgtcgtcctcatcgcgcgcctcctcgtcgccgagatcttcctccggtacgactccttcgacgtccaggtcggcgcctccgcgctggggtcgtcggtgaccgtcacctcgctcaagaaagccaccttctgattctgagctctgcctctgatcgaccgcccgtcgaagtctcaccgcagcaggcggcgtgcagattttttactgtagaatatactgcgctgccccctcctctctctctctctcaatatttctccaagtgttgtgctactgacctactgtgtcagtgtcactgtatgatcggcaggcatggatatggaagtgtaaccaaatttcttttcttggtaaaacaagagaatacttttaccccaaaaaaaaa

SEQ ID NO: 27917 - DNA, 1096 bp, Setaria italica
  misc_feature (1068)..(1096): n is a, c, g, or t
  Peptide Sequence Number=SeqID_93891
aatttgctatcctgccaaagattacttgagcatccataaatgttttcaacacgtgctgatctgcaccggactgtctacacccaccgcaaagtaaaggctgttgaactcatgcttgtggatgcgctcattgaggctaatgattacttgggaatatcattgcatgcaaatgatgcagaagatttttggaagttggatgacacaatcattaaaagcattgaaactgctcccaatgatgaactgaagaaagcaaaagaaatcattcaacgtattcgccgaagagagctctacaagttttgcaatgagtattctgttccaaaggacaagctggagcatttcaaaaacgtaactgcacaggacatagtttgttcacagaagtcttctgaagtgctgctgaaggaagaggatattgctgtcagtaatgttaagattgatcttactcgtggaaaagacaaccctcttgaaagcataaagttctttaaggattttggatgtgatgagaagttcaccatcacagatgaccgggtcagccacttgctacctgcctacaatgaggatagaatcgtgagggtctatgctaagaagccggagctggtggaagcagtgtcaaaagcctttgagaacctccaagtgaagatgtatggcgagaagactcaagtgcacgatacacccaagaagaagaggcttagatccaactagccagttgggttttgtcaaatatcagtctttacatagtatacgacacaggaaaatagctctgacaaacgagaagaaagcaacctctatagctacaacatcccagtattcacagattttaggtggtagtctgcactgggaaggtgtggatattttgtacagcaggtgacatacagacagaaccttgtctgaagtgtaaaagctctcctaaactatgctccataggcataggatggatagctagcttcctagctcgataccgaatgctacgtggttagcgtactcgtacttaatacgcatcatcaactattcaactctacggaacttttttatagaaaaaacaaaaacaaaaaacaaaaaaacaaaaaaacaagnnnnnnnnnnnnnnnnnnnnnnnnnnnnn

SEQ ID NO: 27918 - DNA, 541 bp, Setaria italica
  Peptide Sequence Number=SeqID_93892
atgctgagcaattggtgaagaagcagatgcgtgtcacttggctattcagggaagcagctctgaagcatggaggtgtgcattgtgaaggaaatgctagtaatgctttggtcaggaggctgatgactctgagtgggaaacagctagtgaaagcgatgctgagaatgatgccaggagagaagcagatgatgaaactgaatggaagaatcatgacctaccactaccaggatgatttctgtgagaaaagctgaggaacaggcatggattgtttacatggtatagctttgcaacaagaaatgtcagtcttttggctgaacctgtatttggaaggtgtcgcactgagcagctacagatgcagctgctgggccttgtgcactatcgagcatcaatgctttcaaaaggaacgatctggtgtcatttttattgtcctcatcagaaggcagctcaattgaattcatttccctcatcgctgggtcagttaagttgcacctgtgaccgttcagtttgctcttctcatgtgtcagtcctgtgtttgtgtttgatg

SEQ ID NO: 27919 - DNA, 445 bp, Setaria italica
  Peptide Sequence Number=SeqID_93893
agatgctagcgatgcgtttggtcaagaggctgatgactctgagtgggaaacagctagtgaaagcgatgctgagaatgatgtcaggggagaaggggacgatgaaactgaatggaagaatgatggtcaccaggaagatttctgtgagaaaagctgagaaacatgtctggactgtttatgtgccaattaatatctttgcgacaagatgtgctggtctttgggaatgaaggaaactgtgcattgtttttcattttcttttttgatttctcaagtttggcaaagaggccataattctggcactcttctcttcccactggacatatctggaatctgaagggaacgatcttcagggtgtacttggtttctcggtataccgtgtcgaaccgttgtgtgatgaaacaagtagatttgtagcttgggtcatgaactcatgatgctgtcatgttag

SEQ ID NO: 27920 - DNA, 266 bp, Setaria italica
  Peptide Sequence Number=SeqID_93894
aatccttcccaacgacactctccaacaccgaggatttacccgaactctgaccgccgacgacggcgatggtcggtagcgagtcccatagggtggggagcgcgctctcctctccgtggtcgccgagggcggtgcacgcgcgctgcagcttgttgacgagcgagatgaggttctccatggccgccgcgccggcaaaccctaggcggccggggccctgggcgcggtcgtcgtcgattgaggagacgccaatgactcgcgaggatgcgggg

SEQ ID NO: 27921 - DNA, 1254 bp, Setaria italica
  Peptide Sequence Number=SeqID_93895
ccagacaagtgatgttgctcattgaatgcttgccagaaaaggttcggcaacatcacttgtctggcaagcattcaatgagcaggctcactaaatattcgttacggaaccagcagtgcaactacagttgtaaaacttaatacatatagttcatacaacatacttaccacaaaagtataatttagagaatgaaccatggacatctacaaggaagcagaaaagaagtctactgaatggtacagcccatgtcacatatcacagttactgaacaggcctgttccttctgtgggtttcatttttgtttataatccgaatggataacagaactcacatctgattccgcacttctttttgaggaggggagcaaatgtttcgaccattcctccaagcttttgcggtgaagagtgttcatgctaatagaaggacgcttcttacgaatcatttgttcagcagctttccaatcttcagccaatccaagtgcaacaagaagggcacacatcacacagacacttctgccatgaccataggcacagtggacataaacaggtttgttctgtgaacgctttcttatagcccatcgcaccgcagactcaatctgtgatggctgaggagcccttgtatcccaggtagcaatacacagatatgcattattagatagagtcgagctttttggaagctcgcacgtgcaatctatgactgcagggtcacctggtggcaggcgttcaactgaagaaggccatcctccaacaaacactccatctgcaatctcagtgtacaggggctcatttttcacaaatcttcgtagcagcacaaacaggtggatgaaaagaagaaatggagaaaaaatgatccatgaccacaaaggaaagcttccatcagatgccttgccaaggagtaaaggaagatcaattgctgggtgggaagctatcgagactagcattgcaatcatggacacatatatgaggggaaatgagataagggtcgctcctagtccttggaaaaaatatgccacagaaagcaggacagcagccttcagtccaatcaacctggatattccccaacccatctctttccctcgaggccgcaaatctcaagagtgaagcgcttcactccttagtgccccttgtcggccaatcggcctcgttcgcctcgcggcgtcctactgcacgccgcctcgccgattcgccgtagagcgctgccctgctcgcgcgacctagggtttcggagctcgcgaatcgcgtcactgtgtgggtcctc

SEQ ID NO: 27922 - DNA, 256 bp, Setaria italica
  Peptide Sequence Number=SeqID_93896
acccccaaatatttttatcctaccatccagcgttccgacggcgaggaggcgctggactggatcgaaggcgagcagcgaggctgtgtagggcaccccgtagtgaagcgcgatctgcgcgtccatttggggcacgtccccagcagctccctggtgatggtgctggagtgccttgtggaagaggcgcttggcgaacatcgccgggcgggcggcgacggcgaggtcgtcgcgtcggactgactgatttgttgccgtccct

SEQ ID NO: 27923 - DNA, 390 bp, Setaria italica
  Peptide Sequence Number=SeqID_93897
ccacgaggccccgccccctctcccgccacctacgggaggaagctagacgacgaagacgacccgagatcgcggcgggacgctggggaatggggccgcggaagggaggatcacgacaggcaaccccggaggtccacctgggacaggaggagccaaagctttgacgccaggcgtaagtacaacgacgccggcgatgtggaccggggtgcccgccggactcgcgactaccaagagcccaagaggcccccaatgtcgaggtcctattcacataacgatcgccggccttccgctgatagcagactggatcgaaggaggaggagcaggagccggagcaggagcaggagtcgaaagcaggaccaggagccaccacgctggcggtaggagggatgattc

SEQ ID NO: 27924 - DNA, 526 bp, Setaria italica
  Peptide Sequence Number=SeqID_93898
ggcggcgcggcggggagcccgtacggttcgccgaacgggtcgcgcgcgcgcggcctgttccggcggcagctgtcgcgcgtgatgacgcggcagcggagcgggccgtcgtcgttcaaggaccccgcggaggagttcacgttcgcgcagctggaggcggcgaccaaggggttcgcggcggaggccaagatcggggagggcagcttcgggaccgtgtaccgcggcaagctccccgacgggcgcgaggtggccatcaagcgcggcgagtcggggacccgggcctggcggttccaggagaaggagagcgcgttccggtcggagctggcgttcctgtcgcggctccaccacaagcacctcgtcggcctcgttggctactgcgaggagaacgaggagcgcctgctggtgtacgagtacatgaagaacggcgcgctgtacgacaacctccaccccaagcccgggtcggcggcgcagcagtcgccggtggcgtcgtcgtggaagctgcggatcaagatcctcctggacgcgtccc

SEQ ID NO: 27925 - DNA, 476 bp, Setaria italica
  Peptide Sequence Number=SeqID_93899
atcgccgcgctcgccgttcgcggccgaggcggggggcgagggagggggcgggcggccgctgcggctggtgtactgcgacgagcgcggccggttccggatggacccggaggccttggccgcgctgcagctcgtcaagggacccgtcggggtcgtctccgtctgcggccgcgctcgacaggggaagagcttcatccttaaccagcttctaggaaggagcagcggatttcttgtagcaagtacccatcggccctgcaccaagggcctttggatgtggagtgccccaataaagagaactgcccttgatggaactgaatacagtcttttgctacttgacagtgagggcattgatgcgtatgatcagacgggcacctacagcattcagattttttccttggcggtcctactatcgagcatgttcatatataatcagatgggtggtatagatgaggcagcccttgatcgcctttcacttgtta

SEQ ID NO: 27926 - DNA, 276 bp, Setaria italica
  Peptide Sequence Number=SeqID_93900
tacatgtggatgctgtgagctcaaggatcatgctgcgggcgctatgcgagaggaagatggtgcatgaagcagaagacgtgattgaagggattctgaattcgggcggttctgtccatgagcagtccctgcctgttgtcatgaagatgtatgttgatctaggattgcttgatgaggcaaacacattctttgagaggcactgcagaggtaaaggggtttcatccaagaattttgctgccataatcgatgcttttgcagtgaagggtctgtaggaagaag

SEQ ID NO: 27927 - DNA, 364 bp, Setaria italica
  Peptide Sequence Number=SeqID_93901
tttttttttggtcttattattttcgcattaaaaaccaattttaagcttaagcatatacatgtaacaagcaagaattttgtcaatattgtttgacctttacatggcaatacaaacttcaaaaacagtggtaattcgcaagaccagctgactttatgctcaaaattcttgatttcagcagctaaaagcattgcaccatgcctgccacatcaaaactagacaaccaagaggccaagaggcgtgtacccagttaaacttccctgtaacaaaatttaagtcacttgaaatatcactacgcatttagtccagaactgctacaaatttaaccactacttatgcagcaactgcctgcgcttgggacgcagca

SEQ ID NO: 27928 - DNA, 1370 bp, Setaria italica
  Peptide Sequence Number=SeqID_93902
taggttgcttgctggcatacatctcgtggtgcgctagtcagcattggtgaactttattcaattttgactcgctgttatacaatcggtaaaacctgtatggctgtatccttagggcgtgatcatccagtgctatttgagggtgggcagtttgcttcagaattggacgagtagccgaaatcatggttttcatggagatcgtgctaatttatttggcaaagcatgcacaaaccgtaaatgcaggttttttttacttattatatgacatctggctgaatggctgtactatgatcgggatttggatcatggacatgtatcaggtaatgtgattccagttcaaaacaagctagctggtgctccaggtgggccatcaggtccacaggtggtacaaaatgccgatatgcttgttaagcaagccactagctcttcatcacgagagcaatcagatgatgatgacatggaaggagaagctgagactactggaaatgcaaaccctgttcaacaaagactgcagagaaggtgagcttttctgctcgtttgtgaaatgtatgtgcatcattagtttactttgtggcagacattatatgcttgtatgctgcagcaattataatttgtatatcacctttattacatgctcttgcattattcggtgaaccaattctcaagtagagtagtctttcttatttttatgttggcaataattttggcctacctgtcaaattgtgttggcttagtgccacagccatacatgtttaaaggtatggtgaactatgcgatggagttgacatccatgtctctgtcaatgatgtcagaagattcatttttaacttatagatatgctggattgcatcttgtgacttactagtttggtgtttattctgttgaggtctttttctctctgaggatatcatgcattgattcttgacttattttcaggaagcaatccaaccgagaatcagccaggcgacttactagtttggtgtttattctgttgaggtcttttttctctgaggatatcatgcattgattcttgactattttcaggaagcaatccaaccgagaatcagccaggcgttcgagaagcagaaaggcagctcacttgaatgaacttgaggcacaggtagcacagttaagagttgaaaactcatcgctgttaaggcgccttgcggatgttaatcagaagttcaatgaggctgctgttgacaatagggtgctaaaggcagacgttgaaaccttaagagcaaaggtgaagatggcagaggactcagtgaagcgggtgacaggcatgaacgcgttatccctccgtgtctgatatgtcatctctcagcatgccattcaacggctccccatctgactccacctccgacgctgct

SEQ ID NO: 27929 - DNA, 979 bp, Setaria italica
  misc_feature (894)..(979): n is a, c, g, or t
  Peptide Sequence Number=SeqID_93903
agcatatcggcattttgtaccacctgtggacctgatggcccacctggagcaccagctagctcttcatcacgagagcaatcagatgatgatgacatggaaggagaagctgagactactggaaatgcaaaccctgttcaacaaagactgcagagaaggaagcaatccaaccgagaatcagccaggcgttcgagaagcagaaaggcagctcacttgaatgaacttgaggcacaggtagcacagttaagagttgaaaactcatcgctgttaaggcgccttgcggatgttaatcagaagttcaatgaggctgctgttgacaatagggtgctaaaggcagacgttgaaaccttaagagcaaaggtgaagatggcagaggactcagtgaagcgggtgacaggcatgaacgcgttattccctcccgtgtctgatatgtcatctctcagcatgccattcaacggctccccatctgactccacctccgacgctgctgtccccgtccaagatgacccgagcagttattttgccagcccaagtgaaatgggggggaacggtggttatatgccagagatagcttcgtcggctcaagaggacgacgatttggttaatgcggccctggctgctggcaagatgggcagaacagcctcgctgcagcgggtggagagcctggagcacctccagaagaggatgtgcggagggccagcttcatccgggtcaacctcctagacgtatgatctgttggaaggccctgaggggaagaatgataaattgacaattctacatacattttagtggacattgctaatcttgcgatgcggatttgttcgttgtggacatatatggtcaaccggtcattgacttatcgtgcgttctttagaagtaaaaaaaaaaaaaaaaacnnnnnnnnnnnnnnnnnnnnnnnnnnnnnnnnnnnnnnnnnnnnnnnnnnnnnnnnnnnnnnnnnnnnnnnnnnnnnnnnnnnnnn

SEQ ID NO: 27930 - DNA, 1030 bp, Setaria italica
  Peptide Sequence Number=SeqID_93904
atcctccgaaccctcgagagtctgcccggatttccctccgacgcgccgcgatccggcttgatccgcatggagcgcgtcttctccgtggaggagatccccaacccctactggaccccgacgcagcctcaagcggcggcagccggcgctgtcgctgcgccaggtggcggtggcggaggaggaggagcggggggagcgggggacgaggtgggcgcgatgaaccggtgctcgtccgagtggtacttccagaagttcctggaggaggccgtgctcgatagcccggggcccgtcccgggcgtggggaggggcggcggtggagttggagttggagttgaggcggcggagagcaagcctctgggggtcggggcggcctcgaacgcggttgttgacccggtggagtataacgcgatgctgaagcagaagctggagaaggacctcgctgctgtcgccatgtggagggcatctggtgcgacgcctccagaacgtcctgcggctggctcatccttgccaaacgttgatgtttctcatgcaggccctgttaatcccattggaggtaatgtgattccagttcaaaacaagctagctggtgctccaggtgggccatcaggtccacaggtggtacaaaatgccgatatgcttgttaagcaagccactagctcttcatcacgagagcaatcagatgatgatgacatggaaggagaagctgagactactggaaatgcaaaccctgttcaacaaagactgcagagaaggaagcaatccaaccgagaatcagccaggcgttcgagaagcagaaaggcagctcacttgaatgaacttgaggcacccgtagcacagttaagagttgaaaactcatcgctgttaaggcgccttgcggatgttaatcagaagttcaatgaggctgctgttgacaatagggtgctaaaggcagacgttgaaaccttaagagcaaaggtgaagatggcagaaggaactacaagtagaaagacgggtagaacaaggacaatagaaacgacgttaattaccctaccca

SEQ ID NO: 27931 - DNA, 354 bp, Setaria italica
  Peptide Sequence Number=SeqID_93905
aactagacaagaccccaatgaagtaataactctggtattttctctgcttcacacacaaacttgaatccatagcgcattgagatgcatcttttctatgttctgattagatggtatagggtcaactgtcgtgcactactcaatgcatattcagtgggtcctcaacagtagaatttggtacatgctagatgttgctttggttccatataatttagctggataaggtataaaaaggttgtgctagcctattatctgttaaagacacaataaatccctggtacaatcccgatacttcccctgtatcttagcctggtaacagcgtatttctcttcatgtgtgggagagggaaggaaacgg

SEQ ID NO: 27932 - DNA, 1786 bp, Setaria italica
  Peptide Sequence Number=SeqID_93906
gcaataaatgtagacaggctatcaactctttagtgctgcttcaatacaatggcaattacaaggatttgcagtgaccaaaaccacttggttaaaggtgccattccacctgcagcaacaaacccactcgttgttcatgaaggtttgtcagattctagctatatttacagtcatacagtgcttgacacttgcaggtcaacagaagggttgatttatggatccgaacagctattaacaacgcacacttacttacggaaagctgatgacgctactgtctacacatccggataatgtctactttcctacatgctgtactccagtgatcaggtcaacctggcaaggaatgaatcagccgagataccctccggcacagccgtagtatcaccgtgcgaccaggttgcaggttccttatagaagtcatggtctcgtctatgcttgcctgtgctagtgttgtctgcccttcgcaaaccttgatcggcagctcagatggctcagaagggtagacagagcggttcaagtctgtcatgtcgatggtgaaagcaaacttcttgccgctcttgaagctcatgaagcatgcacggaggccaagttgacatgtctgggactccaacacaaaagcagctgaagtaagatttagtaactccattttagctaacttgatttcttctaaaacatcaataagattgcccagaagcaaacttgtttccatcgtcatctgctgcaaggattgtaaatcatgaactctttggttctcctcagctttgaaaagaaaattgaatgccatagaggcatccaaatttgggaatatctgtcctattttggttccattcagtgaattattcacaaatatgctcgacatatcactcatgtttaagatgatcctttggaacaataaattgtgatagttgaggatgagatcacgcttattgtcccttttaactatgccagtcagctcgcagagccctgcttgctggtggatgaagtgacactgatttctcatcttcaactgctcctcagcacgcctcataacactttcacaactaacgtcaccttcaatattgcgaaaacattcaagggaattccttaagttctccaccttctgttgaatattgttgagttcaagccgcttctcagtcaaaatagcaagctcttcctgtccatcactggcattgatagaagttgctgcaggaagacaagcatccttcatttgtgcagcacccaatatcttagatttcagaatgcagcactcttgaattccatcttgatatagctgagccttatttcggagtttagctagcttcatattatttatttgtagctttgcctttgcatagaaaagcttctcatggagagatcttgcctcctctaatctcttttgcttagcactacagcaatctttgatcctcacagcagtagaaagccttttatattttctagccatatgaacctcatccagcttatcgcttagcgcatcaagctgttgtaaattaagcttacttattgatgccaacaaaacttgctctgttgcatcagagatggtacgtagtatcttgttccaatcaacattaactaactgccctttatcatgagcatcattctgttttccttcaattctaggagaagattgagatacacaagaaagctcttttcttgattttctagggcttcttgctgcctcagctatttcctcaggacactcttgcacggcatgaccattttctttaacagttttctttcttccagcaccatctaaatcgaggaggggattgcattcatgactaggttggct

SEQ ID NO: 27933 - DNA, 930 bp, Setaria italica
  Peptide Sequence Number=SeqID_93907
cacttgtttattactagtacatcgtttagttacgcacgcgtataccgccgccaccagagttcagacttcagagcagagagcgccgcgcccgcgtctcctcacagcgagagggcgacgaggatggcctggcggcagcgtgcgcgcgccgtctcgacgcgctccttgacggtctcctccttgacggcggccttcaccatctcgacgtccatctccacgaggcggagcacgcggaagagctccgtgaccacgcgctcctccacgccgccctcggccaccagcacctcggcctcctcccgggcgcgctccgtcaccacgcccgccaccgtgcccagcagctgcccggacccgtaccgcccgcgcgccatcaggccgtccagcttctccaggaagtcggcgatggcccacccgcggggcttctccaggggcagctgcttggtgcgcttccacccgatctcgtagttgggcggctcctcctgcgttagcgccgtccgcggccggcggtccggggagatggccgacggcacccgccgtgccaccgcgaaggaggtggtcgccgtcgccgacggcggggtctcgtcgtcggggatgctgttggggttggcgctcgcctcgtccggagtggcggcgccgttggggtctgcctgcggcagctgctgttcgcggttgctgctggcctcttcttggatggatttcggcgtggaggttgccggtttgggcgccgcggtgcagcgtacggtggcggtggtgatggtggcgggagcagcgaggaggtgaggtctgcgggcggagaggaaggggttgggaggcaggaggggccggaggaaggaggccgccatagcggatgatgcgatgagtgctcggacgactgaagcggatggctgtgagtatttttacgcggcagataggtttggagataagcctagaaatggc

SEQ ID NO: 27934 - DNA, 968 bp, Setaria italica
  Peptide Sequence Number=SeqID_93908
aattagaacaaaattacgtttgaaacaaacttttaggcctttttcgacttgacaatgcactggtttcctcagggtgtgtaccattcctcttggatgtgaaattctgtggtgacaccccaactccgtccttctgctcattggaatcaaacggtgcacgggtggaagtagacatatctggagtatgtggctccatttcttggccagaagcagagggtgattcatctgacattgacggcatctgatttggaaatgcttcggacattgttctgtgagcctgacgaagtgccccagtggcctgatcatacctttctgccagcgcacgatatgctcgatagaactcctccaccaatttcattagctctgggcgtttcttgtagtacatctccgctctccttgcaaaagaatcggcatcttcattgataagtttgatcattgatttaacctttgtgtccatgtcactgagattttcctggagccatttggagttcttggggctgatatggctgacccacaaccatgagtactgccttgagtcatgacgcgccagagctgccattggtgctagatagcaacacagactactccaaccagtaaataacgtctcacttcctcagcacttagacaagtgcagaaatacaatattgtatccttgaaatctgaaaatttctgaacttgctcgcttttcagaatgtgggatcagcagaattagcttgtgcagtcatgctacagcaagctcccgtccaagttgttagtgcttttaccagtggcaagtctttggattagttgaactggcaggaagatatatggataattcgtactgcagtaaccaggtggagcctctcaggcggagcggcggaagtgagcggcggcggcgagatgccaagatccaccgagctgcccactttctccctccatctttctcaacccatccccgtgcgtggggtgctgcgccctctccctattgcgtc

SEQ ID NO: 27935 - DNA, 795 bp, Setaria italica
  Peptide Sequence Number=SeqID_93909
gggaaagtagtccttgtctagcctgcatgcgcttttcgtgctcctcttggaagctgaagcggaaactttccagttccttaagctttcgatctagttcttgttgttgcatcttcatcttctgatccaaaccctcaacctcagactgtatagcaatattgagtgtttcagcattaattagcttctggacatctgcagccatttcatcagttaacttcttgaggtcagcctgtgctttagagagctcagactccaatgtagatatttgctcagaggatttattatattgcagaagagatgtgtctttatcggaattcaattgcaatactgtctccttaaggatttggatctcattttcagccttgtctgcccgctcagattctgacaacatctgttgtttcagattctggctctcagctaagagtcttgaaacttcttgttgcaaattttccatgtctttgctgatgtcctctttctgtttaacttctgggctttgaaaggttaggcctttccgcacctttccatcaaaaccagcccgaggagcattttcaccactcgatgacaaatcgttgaacaactttaggccttttcgacttgacaatgcactggtttcctcagggtgtgtaccattcctcttggatgtgaaattctgtggtgacaccccaactccgtccttctgctcattggaatcaaacggtgcacgggtggaagtagacatatctggagtatgttattgttggtcttggccagatgccgtcaatgtcagatgaatcaccctctgcttctggccaagaaaat

SEQ ID NO: 27936 - DNA, 285 bp, Setaria italica
  Peptide Sequence Number=SeqID_93910
atttatatcgtctggttatcatgcatcattatagagtaatttacaaggccgatcaagatgatcaagccactgttggagtatggattaagttactgcgaacggccagtacgtggttcgttcagtggagagccatgaacacgcaaggatttctgacgtaacagaactaattggtagcaggtgtttgactttgatcacaccagcagcgcagcatttgagagcaacagcttaaccgtgccacatcgcgaacgaagacgaaggaagcaaagacagcccataggatgttag

SEQ ID NO: 27937 - DNA, 388 bp, Setaria italica
  Peptide Sequence Number=SeqID_93911
aggtgagcgcgaagctgagcccctgcccggcgagcgcggcgaggcactgccagttggcgccccagttcctggacatggggatccaatccgtgctggtgcccttcaccgccatgctctggatggacccgctcccggccacgttggtcaccagcaccaactcgaagtagttgaagccggcgatggtgaaccgcacgccgccgtccctccagcacttgatccgttggtagaggacggggatgatgccggcgctgtagatgccgatgttctcccatgcgggctgggacatgtcgaagtgggggcggggcgggccgcaccagccgccgccggggagggaccagttgggcgggcagaagttggtggcggagacagcgacccacttgccggggcg

SEQ ID NO: 27938 - DNA, 417 bp, Setaria italica
  Peptide Sequence Number=SeqID_93912
tccagggcctcaccggcgtcatcccggagtcgctcgcccagctctccggcctctcccagctcaccatctcctacaccggcgtctccggccccgtgccggcgttcctctcccagctcaccgagctcacgctcctcgacctctccttcaacgccctcaccggctccatcccggcgtcgctcgccgacctccccgcgctcgccagcatcgacctcagccgcaaccgactcgagggccccgtcccggcgctgctcctcagcaagtgcgccggcgaggccgagctctggctctcgcacaacaacctctccggcgccatcccgccggcttcgcggccgtcaacttcacgcacctcgacctctcgcgcaactccctctccggcgacgccctcccccgtcctcgggccgggggaagccgctgcag

SEQ ID NO: 27939 - DNA, 385 bp, Setaria italica
  Peptide Sequence Number=SeqID_93913
gccagaggcgtgagagagcgatatagggtgaggcagttacctgtagcacaaaggtagcttaagaggagggtgatcacatggaacttgccgggacatggaggaaggtgaagccttacatggctatggtctttctccagttcggcttcgccgggatgttcctcatctccgtcgcgtccctgcgtcagggaatgagccactatgtcctcgtcgtctatcggaacgcggttgcagccgttgtaatggctccgttcgcgctctggtttgagaggaaaacaaggcccaaaatgaccctctcaatcttcttcaagatccttgctttgggattactcgagcccgtgcttgaccaaaacttcatctacatgggagtgaataacacatcagcaag

SEQ ID NO: 27940 - DNA, 261 bp, Setaria italica
  Peptide Sequence Number=SeqID_93914
cacctttcgcaggcgttcaacagctacatcgcgatctcgccgatgacgtataagatcaaacacgaggcaagtctgaatcgggagtgggacagagatggcaaccgttacgaaactttcctgctacattgttaccagatttcaaaatactatcttgcgttgtcaatgtgtttaaaggtatggacacggcatcgttccgaatcacacatcacacacactcacatatatgcacgcacacttaaccctaccaacgtatgtacgcaa

SEQ ID NO: 27941 - DNA, 1792 bp, Setaria italica
  Peptide Sequence Number=SeqID_93915
cctcgcggcgcgcatccgcaccacacgccacactgactccggcgaggggacggtccaaaaccctaagctgaaccctcccccagcgccgcctgcccgtccggccgatccgcgcggccatggaggtggacccctcgccgtcgccgcccccgtcgcggccgccgccgctgccgggctacttcgacccggagtcctccggccgccgggaggagtaccgccgctacaggaagaggttatcttcttcaaatgtctcgccgctgctgggaagctcactctccaaatcctctgaagcaaggctgttatacgacggggacagcatcccgaggcggcctaatgctgggtgtcgtcttgaagacatcaagcaggaggctgaggattattccaactttgaaggcttggatggatcgagaatgttcagttcagccaaaagaagggcaccattcgatggtggttctgcctcggacgcagcttacagttcggggaggcaggcggtgaggcagacgctgaaaccagtcaagatggaggacgatatgtatgcggcacatgaaggagaaacatcgttttcaatgtttgcatctctccttgattctgcgatccaaggtttgatgccctttccagatgtaattctacagtttgagaggacatgtcgaaatgcttccgagtcgatcagatcttctgctactggaaagcttcgggtggtggaagataagcttatgcagcaaaaggcacaacttttacttgatgaagctgcttcctggtcacttctttggtacctctatggcaaaggaaatgaggagctttcaggagagctttttgtgtcaccaactacatcccatcaggaggcgtgccgctttgttgcagcagatcttacagcacaactgtgtctgcggattgtactttggcttgaaggtcttgcttctgaagctcttgatttggagaaaaaggtgagagggtctcatgttggttcatatctaccaagttctggtgtttggcaccgtacacagaggtacctcaaaagaaacaataatgattctactatagtgaagcatgtggattttgatgctccaactcgtgaaggagcacaacttctccctgatgataagaagcaagatgaattgcttctagaagatatctggactcttttaagagcgggaagattggaagaggcatctgagttgtgccgttctgctggccaggcatggagagctgccactctttgtccttttggtggcatagatatgtttccttccctggacgcattgctcaagaatggaaagtccagaacactacaagccattgaattggaaggtggtattgggcggcagtggcgtctttggaaatgggcatcatattgtgcttctgagaaaattgctgaacaagatggtggccgttatgagatggctgtatacgctttacagtgcagcaacttaaagcgtatcttgccaatctgtactgactgggagtcagcttgttgggcaatggctagatcctggctagatgttcaagtggatcttgaattatctcagtaccaaaccagtagaccagatgagaaacagctcgatgacgatatgaatggagcccaaagttcagttggtccagaaagttggccgtaccatgttcttgatcaacaacctcgtgatataactgcacttctgcagaaactccactcgagtgaccttgttcatgaaactgtgtctcgagcatgccgggagcagcatcgacaaatcgagatgaatctcatgagtggaaatatatctcatcttcttgaccttctatggtcatggttgtcccccgc

SEQ ID NO: 27942 - DNA, 300 bp, Setaria italica
  Peptide Sequence Number=SeqID_93916
gccacgtttcgagacacacagccaaaaaagaactgtgcatcagataccaaatggcattgattgcaaaatgtaaagaaacaaatagtatgtaatttaagaaaatgtaacttaggttgtgcaatctcagccgaaagatggtgatttttttcataataatcacagtgattcatgtaatgggaatagttgcatcacagattgcacataaaaatgaaacttttcaactcaagtattaaaaaaataataatggaagtaatatggacaaacaaggatatcagatggtagtgcatgatgtgatcatca

SEQ ID NO: 27943 - DNA, 230 bp, Setaria italica
  Peptide Sequence Number=SeqID_93917
agcacgtccgccctcacgctgacgtcggtgtcgtggaacacgccggcggcgccacgctccctcttgcacagccggccgccgataacgtacacggattcgcccagcgcgacgacggcgaaccccttcagtatgtggccgtcagggatgcccgggagcgcgcccacgcggcgccatgtgttggcaccgggctcgtaacactccaggctgttggagctgccgtgcgcaaagca

SEQ ID NO: 27944 - DNA, 280 bp, Setaria italica
  Peptide Sequence Number=SeqID_93918
cggcaggacgtgacgtccgccatcaagacgctcgggagaggcaagaacctggtcgtggcggggcggtcggcgccgacgacgacgccgctggtggagaagagcgactgcccggagctgggccccgtggggagctacctggcgacgccggagttctcgacgacggcgtcggtgctggtcgtgcagcggtacaacccgcggagcgacccgacgtgcagacggccggcgggggaggaggacacggaggacgccgtcgcgcagttcccgtcttcgtcgtctcggg

SEQ ID NO: 27945 - DNA, 440 bp, Setaria italica
  Peptide Sequence Number=SeqID_93919
ttagcttgtcacggcttgtcagggaaggaactttttgatgatccggccagcacaaggatgtcaaggaggaaacggccgtacggacggagaactatccaaagagctccatcaggtgttggatcaaatggtgcttgacctggatgacatgactgagatcagtatccgttacgcaaaaggaaaccgtgaagctactactccagcagtacggtttaccgcaactctaatggttggccacttcgttgtgaaactaaagcttgccaggcagagaagtaaagggatgattgtacagtcaatgggccatttaaaggaaatatcgcacttggacgcaagcttcaaggctgaacctgaggagatcgaagcagtagccagtgaatcaatctctctcactagttcgtcgaacctgctgcctgatgaaccaagcctattacagggtggtacaa

SEQ ID NO: 27946 - DNA, 359 bp, Setaria italica
  misc_feature (306)..(306): n is a, c, g, or t
  Peptide Sequence Number=SeqID_93920
ttcctggtgcgcgtcctccagtagttcttgatctcgttgtcggtgcggccggggaggctcctggcgatgcgcgaccacctgctgccgtactgcgcgtggagctcgaggatgaggcgctcctcgtcggcggtgatgcggccgcggcggaggcccgggtggaggtagttgacccaccggagacggcagctcttgccggtgcgcctcagacctgaaacctttgctaagaaatcccaccggcgttcaccaaacaagcgcacgaaccataccagctgggcgtcttcctcctccgtccacggccccttcctnatccccgcctgcttactgccaccaccaccactactactacgctcaccgtcctt

SEQ ID NO: 27947 - DNA, 689 bp, Setaria italica
  Peptide Sequence Number=SeqID_93921
gtcctctgcgccgccgccgccgccgctctctcgcagcgctgaaccggtgaccgccgacgacgacgcggccgtgccgcagccgctgctcggagagccggagcaggacgcggtggtggtggtcacggtcgacgacgaggacaccgatgccgccgacgccgccgtcttcgctgccttctgcttcctggtgcgcgtcctccagtagttcttgatctcgttgtcggtgcggccggggaggctcctggcgatgcgcgaccacctgctgccgtactgcgcgtggagctcgaggatgaggcgctcctcgtcggcggtgatgcggccgcggcggaggcccgggtggaggtagttgacccaccggagacggcagctcttgccggtgcgcctcagaccagctgggcgtcttcctcctccgtccacggccccttcctcatccccgcctgcttactgccaccaccaccactactactacgctcaccgtccttcttctgcttgttcctgcaacacatggacatggttgctgccgccatcgatcggtgatccatcacctcctcttctttacttcttcctcctgctgctgcagccccggccaggcgtgtggtttcctcctcctcgtcgtcggctcctcccttcgaattgtccccgtgatcgacgacttgggcttaataggggaataggggcgccgggacagagac

SEQ ID NO: 27948 - DNA, 1185 bp, Setaria italica
  Peptide Sequence Number=SeqID_93922
ataatctagctctaccagcatatgaaagatgaatggatggatcgatatcatatgcatcgacggatcaggaggcgtcgagcatcgtctccctgtagtattcctcgtcgtcgattctccagagcgaataatccgagctgtactcccacaccggcgacgacggcatcggcggcggctcagcggccgcaccataataacaatggccagcggctccccagccgtcgagcacgtagctcgccgccgcatcggctgccgcgatctcgttccacagctggtccatggtgcagcagtactcctgcggctgctggtgctggctcgccgcagtggccgtcgacgcctcctcgagctcggcgtcgtcgccgccgctgccgcgtgccgctgccttcccgcagcgctgaatcgtcggatgatgccgctgccgacgaggacggcgtggtcggagagccagggcagcaggacgccgtcgtcacagaggaggacagaggcgacgccgccgtcgccgtcttgtcgccgccgtgccgcctctcctcgagcgccttcttcctggtgcgcgtcctccagaagttcttgatctcgttgtccgtgcggccggggagggctcctggcgatgcgcgaccacctggtgccccactgcgcgtggagctggacgatgaggcgctcctcgtcggcggtgatgcggccgcggcggaggcccgggtggaggtagttgacccaccggaggcggcagctcttgccggtgcgcctcagacctgcagcacggtgacggagaagagccgaaggagaagaagaagcaaacggttaacacctcacgccattgcccgtggaccttggtcgatcggccctcacgcatgctcgcgaggcatgcatggggacggatcgatgcacccgccaccgcgcaaacctgacacctttgctaagaaatcccatcggcgttcgccgaacaggcggacgaaccgtaccagctgcgcgtcctcctcctccgtccacgggcccttcctcatcgtcgccggcgccgccgccgccgccgcgccgccggccctgatgatgatctgctcgccgtccttgttcctgctacacatggacatggtggtcgctctcccgccggcgtcgaggcgacagaaaaataaagtaagatcgagcctggatgcttgatcgatcgatcgagaggaggaagaagaactaggcagc

SEQ ID NO: 27949 - DNA, 2024 bp, Setaria italica
  Peptide Sequence Number=SeqID_93923
gtaaatagatatatattatataatatgtgtgtgtcaccaccagagtccaggaacaacacagatcacgacgctcttctaccaaaacccagctttttaccgttgcacacgagtcaatcaggagactggtactccctcgattcctctctattctctccttttcttacagccagtacaacggaggacgcttccaaaaccactaggacggaagcgatcatcataaatctatcttcctcgactagttgttgccactgtagcccatgccgtagctgctgcggtaccgcagcccgttctgctcgtacggcggcgggtccccgtggttcacggccttgatctccacggcacggcggccggtgtcggcctcctgcacggctccgaagacgatctcgttcgtcgcctcgcagctcggctcgtagaaggtctgcggcccggccgagtactgctggtggcgttgcaggtactgctggtggtgcacttgctgctgcggcggcggctgttgcggctgcggaggctgttgctgaggtgcttctccggcggtccagccgtgcagctggggccggccgtgccggatgtggtggatcttctcgggctccttggacatgaaggcatagttcttgcgaggggtcggtgttcttgtgtccagcggcggaggggtctcgtcgcgcgggatggcatagctttcttgtaccggccaggaggctggtctgcccaggcccagctgatggtgatggatgttcacgtgcttctttctggagaatgctgcgcggacgatctccgtgattgatgattttgctccgcccacaagtttgccgattgacgtgaagagcccttcttcctcttcttgcttcacaggttcatcctcgctagggattagcggggggcggagggaaggcttcagtggcttctggtatggaggtggaatgcttgataatttagcttttaccggactcacaacttcctgctcatctccatttgaatacatccccaaagcacggcgctggagcaatgcgagcatgtagccgaagaaagcagcagcaagtagtagtgcaactcctagaggaaaaccagcttcatactggtacacgcagtcatcaaagttgagttgaatctcccgaattgcttggtttcctctgtcaatcaccagaagggagcaactactgccaatgtagcgaatttcaaaatcagtagaaaattttgcctcgtcacttggtccatcaacatgccctcctctgcctgatttccctccagcaacagttgtaacccctgtatcactgatctttctaatggccatgttcatggcatcagccacatagatgttacccctgtcatccactgtaaatcccttaggatggttcatcctcgcctctcgcagcttcccatcaacatgaccaggaaatccttctggggaaccagcaacaagcttcggcctgctatatcgggaaagcggcagcgccatcctgtagatgttgctgttcatggaatccatgacgagcagctcgccgccctgggtgacctccacggagtagggctcgatccccagcttgctgccgtcgaagaccgtctccacggtgtacccgccctcgtacttcaccatcgacttgcttccggtcgctgtcttggtggtggatttgagggaccagagccgcttcaccaccgccgacgccgcattggagacgaacccgctcaccaccctcgcggggtacgaggaagcagaggccggagcgcacgcgacgaggaggagcgcggccaccagcagcgccgccaccggggcgctccctcccttggccgccattgggccgcagcgggacaaccaacaagtggggtggggggaagctcgccgccgcggaagatttagaggaagcgggaggcggccatctgaggggaggaggggaggcaagggagcagggagcgcccagatcgaggacggggagtgggagaaaccaccaggaatccgagcttttccttgcgctccgggagtggagaagggaaggcagggagggattggaacaaggtaggggggagtggag

SEQ ID NO: 27950 - DNA, 918 bp, Setaria italica
  Peptide Sequence Number=SeqID_93924
cacgtgcgccgagattattccccaaaggccccaaacagatggcttgcaagtgtgtactttgcaatcaaccctagtaggttttcaacttcctcatctgatggcttttcacctgaagaactaaggtatgtctgaacaaatcttcgctgctcctcagtgtcaggatatttcgtaaaatccaacacgtgtggtgttgcagtatggtaatccgcagccatctcacaaaagtgattagcaaatagtcaaaatgcaacagggttaaagctggcatattcatagtcaatcaaggtgacttgtctggtctcttcatatatcataatattcccatactgcagatcattatggcaaaatcccactgtctgatcgaccctggacagtgccttctccagcacggcaatctcatcacctaccttattcagctgaaattgcttggactcttcctcagaacacctgccacgagcctcctcaagccacctcctgagcctctgccacaatgagacattcttgggtccaggcatgtcgagatcgttaaactccctcagcttcttggcaatcagggcagatatctccgggtcgcgcagatccgccgcagatagcgtcctggcgttgatgaactcctcgacgcggccgttggcgaaccggccgaggaggcggggcccctggccgtggcgcgacatgcactcgaaggtgcggacctcgtcggcgcggtcgaagaagacctcgacgccctggccgtaaatgcgcacgagcaccttgcgcgggtcgccctcgccgccgggccaggtgatccggaagacctcgttggtcatggcgcccttgagctgggacacggtgagcgcgcccgggtccacgtcgccgccccagagctcgccggcgaggcggtgcaggatgcggcgcgcgtcctccgggatgcgctcgatg

SEQ ID NO: 27951 - DNA, 493 bp, Setaria italica
  misc_feature (435)..(493): n is a, c, g, or t
  Peptide Sequence Number=SeqID_93925
tttgctaagcgaggaggagcgcgccaaggagagcgtctacatccagaagatggagagggagcggcaggagaagctcaagaagaagctcgagcaggagaaggccaacgccgacaagaccaagcccgccgacgccgacaagaagcccgagggatctaactagaattggcacggtgctgcccgaaggcaatccagtttcacctgtctccgatggacaagctttgtgtttacatgtctagcgatggaagaataaattctgtaaaacgttaatggctcgaccgcactggatatgtgttgtgtttttcggttgctcgggcgtgttaaagacggcatcatccgtagtttgagactctgttgctgttgaaacttatgtcgttgttgtgttgctctcttgtggtaaatcagtcttgttgcgttgtcttctgtttacttattttnnnnnnnnnnnnnnnnnnnnnnnnnnnnnnnnnnnnnnnnnnnnnnnnnnnnnnnnnnn

SEQ ID NO: 27952 - DNA, 506 bp, Setaria italica
  Peptide Sequence Number=SeqID_93926
gcagcaaacagccaaacaccccacgagatgattgtgcataactttgacagaggcttcactatgtttgttgtgttagggtgaaaacaaatccaaattgtagtttggcattgcgtagaattgtcgcaaatgtatacgatgttcgatttatcaagatcaacatttaaagaccgtttgcggcttactgtacttattttcgttagcatcagtttgtgctgtgtgcatattatgtgcttgtattatatatctgcagaagcccgagggatctaactagaattggcacggtgctgcccgaaggcaatccagtttcacctgtctccgatggacaagctttgtgtttacatgtctagcgatggaagaataaattctgtaaaacgttaatggctcgaccgcactggatatgtgttgtgtttttcggttgctcgggcgtgttaaagacggcatcatccgtagtttgagactctgttgctgttgaaacttatgtcgttgttgtgttgctctcttgtggt

SEQ ID NO: 27953 - DNA, 462 bp, Setaria italica
  Peptide Sequence Number=SeqID_93927
gtggggatcaggaggggagcggggaggggtttaaaaggcattgggttggggggcgcagcggcctcgccacggcaggggaggcagggcgggggtgcggccgcgcgacgcgaggtgggggggaggagagcttttgggcggcggattacggcatcggcggatggcaacaaacgaggcctttggcggtagcagcagcctcgcccgcgcctggttcgaggaggaggaggagagagagagaggctcgcttggggattccggctaatgcagatgcccctccctaatgctcgtctcctctgtctgatctccctcaccaactctcgttcgtgttccggcgcggcgtccctctcgggtcacctctccgcgccccgccgtggggacggcggcggcgtgggagtgggaggagtggtggtggtggtggtggtggcagtaggtggcgtgcggagccgagggggaggaggatttggg

SEQ ID NO: 27954 - DNA, 293 bp, Setaria italica
  Peptide Sequence Number=SeqID_93928
catactctcctatgggtaacgttgtttgaaactgtgctggtacagactggaaaacccgtccaattataacactcacaatagtcatcagggaaagagcagccattgacccaagcaaaaccaatgccttttgatattgcattgcgagtagtgcagcaatgaaaaatgtcttatctccaatctcagatacaaaaatcagtgcaaaagctgccgtgaaacctgatcttgccagcatagatacaactgcagatggttgtcctttaaataatacaaaaaaaccagctgccagggcgcag

SEQ ID NO: 27955 - DNA, 426 bp, Setaria italica
  Peptide Sequence Number=SeqID_93929
tgaaggaaataattgtttcacaattatgttctaagcacaatgagataaacataccacacaaaataaaattggagaaagaatgacaaatcctacatcacaaattacaatacatatagtaccataaaaagcatgagtgcttctttccaaaacataatggattgtttactaaagaagtcactgtactaacttgtttgaaactgtgctggtacagactggaaaacccgtccaattataacactcacaatagtcatcagggaaagagcagccattgacccaagcaaaacctgctcataaaattcacagaaagatacaaatgctttgctaaaaaaagacaagtcaatatgatctataggagaatatttgaatacacattactccagaaccatgctaaacaaaattccactgaacaactgaaattatgaaacc

SEQ ID NO: 27956 - DNA, 1364 bp, Setaria italica
  misc_feature (1)..(91): n is a, c, g, or t
  Peptide Sequence Number=SeqID_93930
nnnnnnnnnnnnnnnnnnnnnnnnnnnnnnnnnnnnnnnnnnnnnnnnnnnnnnnnnnnnnnnnnnnnnnnnnnnnnnnnnnnnnnnnnnnacctcaaatataataatttcccattaaccaaatgtaattaaattatcaaatggtaagatgtgtcaactgtctatatatgatggttccgtttccagtgtgatagaaatgtatgcacgtaaaaataatcttatggaaaggataatgcctatctacatacatgtgccagcaagcctacttggttttccccctcatcttcaaaatacaacaccaaattggaaccgcaaaatcttttccctagccagactcttcggataggttagaataccccgaagagcgttgctgcagcaaagagcaaaaataatactcctcctagcaagccaaccagcttctcggataggtatttggctaggaatgctcccccaagaatagcaaagacagttgcaatcaagtgtcctgctatggctccactagcaacgcccaaaggagactgtgcagcacccaaagcaattgtagctagcatagagcgatctccccactctgcaaagaaaacaagactgaaggacttccaaacgacctcaagaggactgatcagcttcttagaaaccttttccttgacaagctcctcagcctcggccagttccccactctcagagtttccctcaaggttcccactggaactatcaggaagcgccaatgcatcttttattgacttaaaaccaaagaaagccagcagagcaactgcagcatactctcctatgggtaacgttgtttgaaactgtgctggtacagactggaaaacccgtccaattataacactcacaatagtcatcagggaaagagcagccattgacccaagcaaaacctgctcataaaatccacgggatactgctttgctgcaagtcaatatgatctataggatgaatacacattacaatgccttttgatattgcattgcgagtagtgcagcaatgaaaaatgtcttatctccaatctcagatacaaaaatcagtgcaaaagctgccgtgaaacctgatcttgccagcatagatacaactgcagatggttgtcctttaaataatacaaaaaaccagctgccaggcgcagagaagtagcacggcaccaatagattgcaggtaactagatcctgaaagtggttttgttggtttgttggaatctttggtagcagaattatccatatgttctccatggttagttgctccatctccttcataggccccagcaccaacatttacattggacatttgcaccctaacgtcatgtctcattggtttcatccatgacaacaacctatattttacaaacctggccgtgg

SEQ ID NO: 27957 - DNA, 1059 bp, Setaria italica
  Peptide Sequence Number=SeqID_93931
ggcaataataactgccattatgattatgccgtgagaaaatcatgtccagactcgacctgccccgcgcttcactttgcttggacaacaccccaatcaaacggaaacaggaacagcacgtccggtaccccatagtctgaactcggaaagttacaaggaccaggtgaaatctggcagctgccaatcaagctcctacctttttctacacgatgcagtacaacctgtaggttgcttagcgaccaaaccaaggcaaattcagaaacagaatagtctaaactcctctcgcatgtacatcaccactcacaagatatgtacagctgctatacacatgtacagtcaatgtgcggctatacagaatcgagatttgctggtttccagctgcacagctagtcgtcagagcttaagaaatcaagctgcatactggatattggaacgaagaaatggcatccagcggagtcagtggctcaaaatatattgcactggtcatacgaggatctgtactctgtagttctgaatctgactgtagaatagcgttatacccttcatttgtactctgtagttctgaatctctgactgtagaatagcgttatacccttcatctgtacaggtaataacaccctggtcgtctgtatattcttcatctgtacaggaagtgagatctcagcccactttttgaaacatgagaagaccgtagaacttgttgtcatgaacatgaagggcttgctgaccctggttctttgctgcttgctttagctccctgggagtgggagggaattgtccacgatgagaagcttctcaggatccaggggcccattttcagtgtcaacgattcggctatgccatcgtaggcggtcagcatccttcttgactttgtgaacgacatcagctctgtcccgaacaatagcggcgccccctggccggagaatgcgatccatctcaaccaggatgtcaataatcgcacatctgagaatagtttggtgtcaggagggagaactgagctagaatcactttaactgcattgtcatgtgtctttgtgaaagcatcctatgcctttctagttcg

SEQ ID NO: 27958 - DNA, 1009 bp, Setaria italica
  Peptide Sequence Number=SeqID_93932
tactttgtttgttctattgtaactattgtaagggtctttgtcttgtacccttggtttcttttgctgcttgctttagctccctgggagtgggagggaattgtccacgatgagaagcttctcaggatccaggggcccattttcagtgtcaacgattcggctatgccatcgtaggcggtcagcatccttcttgactttgtgaacgacatcagctctgtcccgaacaatagcggcgcccccctggccggagaatgcgatccatctcaaccaggatgtcaataatcgcacatttgtgaatatgtgaactgaagatcccattagcatgtattagatcatatgtccgcggataagtagagaaggcctcgcaccagtccgtgtatgttccaatcagtccacgctcatagatgacaccaagagtattgtctgttacattagtaggaacgacattcatgacccaaacaggatacttggacatagcagcagcaaagccaccaaaaccagcactcatatccatgacatttctgttagttccattagatagatattttagatatgttacatagaaattaacccttttctcccaaatcaaactgtcctgcttatatgtctgaatggacaaccacttcatttccccactggttatcctcggtggcactgcatcaagtcttttaggccacttttctatgacaccaccagcacaaaaattaacaagttcagctcttggaagacatgatatacacattgaaatattcgcataccaggcactatctgggtcttctctacagagtggtggcgatcctaagaattttgcttcttggtcacagtggagatgacaagtaggctttctccaaacagaaatcgtgccgttctcagacagcttcgtccaattaagcttatttgccatatcatccatggttaattgcttgtcctcatcttcagtcgcttgattcgaaatattgtatgcagatttccagctgcgggtggcctagagagacccaatagccaccgggtt

SEQ ID NO: 27959 - DNA, 375 bp, Setaria italica
  Peptide Sequence Number=SeqID_93933
cccgggaccaggtcgtcggggacggtgacgatgagctcgatccccgtgcccgcgaacgccgacagcacctgcgggttcacgtcgtagatgcggaccttgccgatgcgcagcgatgtgagaagctgcaccacgtgcggcggagacggcaggttgttccccacctgcccgtagttgatgcccagcgccgacgcccgccgcggtacgccgacctctgagaagagaaagatgcagaggagggcgcagatcacaagccttggcgatctcgacaacaatgtgaatgccattgttgtgagatgaaggaagctaggtgtgatcgagtgagcagaggagggaagggggagggaggacggtaggaggatgcctggtatttataga

SEQ ID NO: 27960 - DNA, 538 bp, Setaria italica
  Peptide Sequence Number=SeqID_93934
gaaccaattctcttgtggtgcatgaaaactaataaagtaaattccagtataagatgggagagaccagtcttggtgcttggccaagaaggatgagtatacagaggaaccaaaaaaattcctatccgttggaggaactcaggaacaaaacaaaattttcatatgatagaagctgatgaccctcaaaatgacgaggtttgaccatggtacaagaacagccaagttagttggaactctggcacgccccatccatgcgctatgcgattcaagtttggatggtcagcttccataagcatttaggtgaaaaagatgtattattggatgttccaaagaagggtgaagctgaagattagatgcgccttagtatccccagtaatcgttgcggatctcgtcgtcaaacttctgtttgagttcagggtgcttcgcaaagtactcgtcagctgtcatcgtgctgatctttttctcatctccttcatttcagcaatctctttctctatcctctctgatttcctttagtgatcgtccttttccgctttccttc

SEQ ID NO: 27961 - DNA, 358 bp, Setaria italica
  Peptide Sequence Number=SeqID_93935
gagttcgaaggcccgcatcgcggcgtggaggaggcgggaggagtaggccgggtcggcgcggcggaaggcgacggcggacgcggccagcgcggcggcggtctcggcggcgacgtcggagccgggggtgtccttggtgacggcgtagacgctgcgcggggtgtccatgtcctcgggacgctcccagcagcggtggtcctggttgggatcgccgacctggacgtagagggtgtccggggtggaggtggcggccttgaggaggtagtcggcgccccagcgcacggcggcgcgggcgtgcgggagctcggcgcccatgaacttgccgaagtcggccacgctccacgccagcattgttgtcgtg

SEQ ID NO: 27962 - DNA, 130 bp, Setaria italica
  Peptide Sequence Number=SeqID_93936
gcgccaaggacccttgcaagttgtttgaagatatggcattctatcagggaaagctctatgcccttgctaatgacgagaacctccttatcgtcagcatcagccaagacccaaccaccggtgatccacagat

SEQ ID NO: 27963 - DNA, 443 bp, Setaria italica
  Peptide Sequence Number=SeqID_93937
caattgactaagccagcaggagagtaaaccccttgagcataatgcttactctcctgctggcttagtcaatggtctggccacatctaattcaatgtttacacctgaaaattcacaacctggtggtaccatcaatgacattgtgccagacctcactggagatttatttacaaatttcaataatcttctgttcgctcaaggttgccagcaaggtaatccagtacatcattattactatccaatgcctcctctaccacccccgcaatatcagaacatgcgcccttcaaatggtcttggcagaaaaaaatcatatggatacgctggcatgaatggagcaatccctagtcctccttatcaacctggctatgttgtgtggaggccagtttatcaaacagatgatcataattaacccaaaaccatggaacaggcacctacttcctgatccg

SEQ ID NO: 27964 - DNA, 520 bp, Setaria italica
  misc_feature (452)..(452): n is a, c, g, or t
  Peptide Sequence Number=SeqID_93938
cctacaccatacagttatgactaatttaaaacctacttttacttataaaaagaacctacttttgatatgctctaaccacacttgttttcaaggtagaaagcatgctagttcagcttgaaatgtactccttttccctcatgtaccacattcaccctgtagacttagcactcagttttcagagtttacaatggctgaccccaaattgtaaaatttacaggaatgctcagccatacagcctaaaggacagtggtgactttccacctctaccctgagaggcagcacaggctaagaggaaatactgatgaatgtgtgcacccatagcagcaatggcaaacaccatgttgtacatcctgtcatttcatcctcactccagtggcctgtcatgtctgctgcaatgcagcatgtgcttctgtaactgcaatttcacacccgcatttgactaaaaaaaaggntgagaaagaataagaaaaaggaagaatagaaagaaaaaaaggacgactgagattgatgagatgtagat

SEQ ID NO: 27965 - DNA, 534 bp, Setaria italica
  Peptide Sequence Number=SeqID_93939
attatcttcactacctgatctagttacgacccgcctgatactcatgatgatggttttcttccacgggaggagtttctcaaagaatgtgctgaggcttttagtgtccccaataaaaactctgagaaagatgcacaagtattctctcgaaaattttttaatatagttgacccactggaagcagagtaacaatcttggacgcagtgtcagcaaaggtttgtttcttgcctctagatctgaactgtggtagcaccgtagcaggatttctagcttaattgtactgttccatgcataggaaatttttacagaatacgcagtgcatttgattttggtgctcgtaagcttgggaagattcttcaagtgcctgcctgttctactgtcaatgaagtgaatcagtttttcaggaacacgttaaagagaaatcgtaccgggttaagactagatgttttagtgagctcttctgatgatggtctactgtctgatcatgcaaccaatgattccttatcactgggcttgaatgtggaaagtatcaagggc

SEQ ID NO: 27966 - DNA, 2971 bp, Setaria italica
  Peptide Sequence Number=SeqID_93940
ttgtttttctttgagaaggttgatcaaaattttggaaaaaaacaacctcttcaaaagaagcataatgctaatcaaagactggtgttattatgaaagccgcattcttggtgctcaccatggtttaatttctacctatgccttggagacattagtgctatacattttccatatcttccacaagtctctggatggtccattagctgtcctctatcggtttcttgactattatagcaaatttgattgggataataagggaatcagcttgtttggtcctgtttcattatcttcactacctgatctagttaccgatccgcctgatactcatgatgatggttttcttccacgggaggagtttctcaaagaatgtgcagaggcttttagtgtcccccctaaaaactctgagaaagatgcacaagtattctctcgaaaatttttaatatagttgacccactgaagcagagtaacaatcttggacgcagtgtcagcaaaggaaatttttacagaatacgcagtgcatttgattttggtgctcgtaagcttgggaaggttcttcaagtgcctgcctgttctactgtcaatgaagtgaatcagtttttcaggaacacgttaaagagaaatcgtaccgggttaagactagatgttttagtgagctcttctgatgatggtctactgtctgatcatgcaaccaatgattccttatcactgggcttgaatgtggaaagtatcaagggcagttcacctttatacagcaattcctgtggcgatctgtcttctcagtttagtcacatcgacacttcagattccaacaatcatggctcaataaagcaaaaacaatgtaactctgtagctgggcacaaggaggtagtgtccgtttctggtgggttgataggtaccaatgccacagattatgcaactactgattcaggaactgagaggaatggtggtgacttctatgaagcttcacaaataactagtgaaacctgtaccttgccatctgggagacgctgtgccccacatcaattttaccaatcagaaaatggtaaggatgttgatgttagagatggcacagatctgccacaccatgggatgccagcaaatcagtttacagacaaatcttaccactcttttgaaggtgctaagtatcacaatgagttttcaagaagctttccagcaccccttgagcataatgcttactctcctgctggcttagtcaatggtctggccacatctaattcaatgtttacacctgaaaattcacaacctggtggtaccatcaatgacattgtgccagacctcactggagatttatttacaaatttcaataatcttctgttcgctcaaggttgccagcaaggtaatccagtacatcattattactatccaatgcctcctctagaatagtaactgatgtactggattaccttgctggcaaccccgcatgttctgatattgcgggggtggtagaggaggcattggatagtaataatgatgtactggattaccttgctggcaaccttgagcgaacagaagattattgaaatttgtaaataaatctccagtgaggtctggcacaatgtcattgatggtaccacccccgcaatatcagaacatgcgcccttcaaatggtcttggcagaaaaaaatcatatggatacgctggcatgaatggagcaatccctagtcctccttatcaacctggctatgttgtgtggaggccagtttatcaaacagatgatcatattcctatgaggggccatggaacaggcacctactttcctgatccgaatttgcgcaaggacaggccacctgttggacgcggggagagaggaaggaatcatttctcttcaaataattatcaaaagtttcatcaccatgtcagaacagatatgcctatcgatatggtacctcttcaggaatcacggcatgatgtaccactgcagatatatgttcctggtgcaaatgatcatgcaataccatctccaatgaatatgccaatgccatctccatcttcccagtctccaagggatccattgaaggtaccagctcattctccatcttcccaggttcgaagggataattttcatggcaatggtttcatggtcccgcaagacagtaaacttgagtttgggaccttggggacattgcctttggaagttacctccaaggaccatgctaacagatcagattctgcctccagcaatcaagtttctgagtctgtgagccgcatgcctgccacaaaaaacaccgtaacaggtttgaatggaatgaggaatgctcagccatacagcctaaaggacagtggtgactttccacctctaccctgagaggcagcacaggctaagaggaaatactgatgaatgtgtgcacccatagcagcaatggcaaacaccatattgtacatcctgtcatttcatcctcactccagtggcctgtcatgtctgctgcaatgcagcatgtgcttctgtaactgcaatttcacacccgcatttgactaggaaaaaaaggatgagaaagaataagaaaaggaagaatgaaagaaagaagggacgctgagacttgatgagatatagatacttttttggggggaagtccccttgtttcttgtctacagattatggcggtccctcagaggtcgtgagggagaggatatgttgaagatatagagataattagttctgttgttttgagcttaggatcattggagagctggatctctccatgtccatgtgtaatgagatagtgttttagccacagtttgcctttggagggaggtcttgtgttgaaaggccccttgcttgaagtaattttagctgcttgaaaaatggtaggtatacagaatgtctgttaattataacagtcttaatagaagcatctagtctttgaaacccataacaagacctacaaaggaacaagtaggtagaactttaccaaccgactaaccctagaagaaggacaagacaactaaggtacta

SEQ ID NO: 27967 - DNA, 269 bp, Setaria italica
  Peptide Sequence Number=SeqID_93941
caccagccccctcccgtctctctctaccttctctctcttcccgtcctcttcccaagaggatctagggtttgcgcgttcggccttcgtccttcttgggccgagccctaatcctgctgcaccgccaccaccaagccgagcccccggccgggttgttgttggattggatcgtctccgctgcgccctctgcgtcctctccccgcttccttgggttccattggcctgtatccctcaacatgggtgaaccgaacagcaatgacaatgcaatggtg

SEQ ID NO: 27968 - DNA, 226 bp, Setaria italica
  Peptide Sequence Number=SeqID_93942
ctaaagctagccattgcatgttgtagtgggatatctctcaattctgcagtgccaccattgctgctgcaaacaagcggacatatacagagggaggagtggagtagctagacgatgaatagagaagatcacatggagatcatcaaggaggaggaagaggcagctgtggatgaggtgataatggacctgtcgatggcgacgtctcggttcaggaggatctgcgtcttct

SEQ ID NO: 27969 - DNA, 355 bp, Setaria italica
  Peptide Sequence Number=SeqID_93943
ggtttctccggcagtatcactgaaggagagggaagctgcttatcgagctgctcgtgagcgaatcttctctggggatgatgccaagggaaatggtagatcatatgcaaaatgtagacaggttcctgttgttgctcaacggatgatagcacatgcacttggtacaaaaagttcaaaattccacagagacaattgcctcgacagcaggcagaggaaaacagctgccgaacagaccaaatattccgacacgtagtaggaacaactattacccagttgcaccagataatagagaagagaataatgttcgaaatggtaagccaaactcagccagtaggaattcatatcaaactgcatccag

SEQ ID NO: 27970 - DNA, 335 bp, Setaria italica
  Peptide Sequence Number=SeqID_93944
ggaggagcccgaattctcctggacatgagattcaaagtacattagagcacgagcatgagcttgacatctaagagaggcccttgctagagtaactttgggtatagcagccagcaacccagcaacatagctacactgcaccagcatttgatcctgctcataaccagaatatgttccatctttcaatttacctccatgctttccagccgtggcatgactaggctgggataaagcaatttcctgtttgaggtcatcaaccccactgcccaaggttatcaagcaaagtgaagatggcttgaatacagacctcactctcgcccccctgcatttccatgaac

SEQ ID NO: 27971 - DNA, 998 bp, Setaria italica
  Peptide Sequence Number=SeqID_93945
catcaccaccgtccccattgtctattcccgtcacgagcgaagcgagctctacccgtccacacccacactccctccccaatcctcctcctccccactgcgcactgtcgtgtcgcagcagacacaggaacaaccgaacaagcaatggcgggccgcacgtgcagcgcccgccgccgctcaccgagcctcggcaccgccgccgtgctcctcctcctcctccttctcgccgcctggccgccgcgcctgcatgcggcggggcccatcaagacggtggtggtggtggtgatggagaaccgttccttcgaccacatgctgggttggatgaagcgtctgaacccggagatcgacggcgtgacgggcgcggagtggaacccggcgaacacgacggaccctggcgcggggcgcgtctacttcggggagggggcgcagtacgtggaccctgacccgggccactcgttccaggagatccggcagcagatcttcggctccgacgacgcgtcgggcccggcgaggatggacggcttcgtgcagcaggcgcggtcgctgggcgggaacatgaccgacgccgtcatgcacggcttcgcgccagacagcgtcgccgtctaccgggagctcgtcgcccagttcgccgtctgcgacaggtggttcgcgtcggtgccgtcgtccacgcagcccaaccgcctgttcgtccactccggcacatccggcggcgccaccagcaacaacccgcagctactggcgaagggctacccgcagcggaccatcttcgacaacatccacgacgcgggcctgtcgttcggcgtctacttccaggacgtgccggcggtgctcttctaccgcaacctgcgcaagctcaagtacctgctcgacttccacccgttccacccgaccttccgcgaccacgcccgccggggctccctccccaactacgccgtcatcgagcagcactacctcgactccaagctcgaccccgccaacgacgaccacccctcccacgacgt

SEQ ID NO: 27972 - DNA, 280 bp, Setaria italica
  Peptide Sequence Number=SeqID_93946
gggatgcttaattgtataaagatctcgtcagatgtcaacccaggcctgaaatccatttcaattttactcgcagacttccatggaaagaatacccgatcgttcaattcaccatgagaccaccactttacaaaccaataaacacacgaattttaagcacccagaagcacaaacggcacacgtgtgccgccacacatcgatcacgcgcgcacccacacagaccgccaatcactgccaagatgagacatggtcgttgccgcctcagtcacgctatcaaaccctg

SEQ ID NO: 27973 - DNA, 267 bp, Setaria italica
  Peptide Sequence Number=SeqID_93947
ggcgaagatggaggaggccggcgtgacgttcaagcggaaggcggccccgcgggacgtgttcgacgcgagcttccggtacggcgtgctgcacatgccggcgttcgtggtcgacgagggcgccaaggtgctgctcgcgaacctggtggcgttcgagcaggggggcggccgcgcggcgcggcagctggacgggggcaacctggtgacggggctcgtggcgctggtcgggtcgctggtgaactcgcggagggacctggaggtgctccgccg

SEQ ID NO: 27974 - DNA, 309 bp, Setaria italica
  Peptide Sequence Number=SeqID_93948
agtacttgacgtcgggacccacggcgctccaggagtggccggtgaggtcgagcttgtagcggccgccgccgaagtgggtcaggaaggagaggatgacggtggagtagaggttgctctggcaggccttgtggaggctgccctcgctggccgtctggccccagtacaccgtgatccgcccggtcttgcccgtcgccgcggccgggccgagggacgagaggagcacgacggcgcagtagacggcggccaaggccaggtgagacgccatcttacccatcacggcaatctatcgacggtgatgtagtgttgggc

SEQ ID NO: 27975 - DNA, 683 bp, Setaria italica
  Peptide Sequence Number=SeqID_93949
taaaaatgagatggaagtaaagggtataggtaataagaagaataagaaaggaaagattgaggaggggaagaaaaagaagagcatgaagggtgatgaagtctgcgtagatgagagcctggaagacaagaagagcaaggggaagaaattggatggcaagatcaagaagacaaggagagggtaagactgtaagagtatggttacagttgatattattgctggaaatgcctgttctgcattgaggccagttgcagactccaaaaattgatgaactgggttagtcattatctggaagaatcatcttctgtccaggttccatgttgtacgggtaggtttgacttgagaagatggcctatcagttgtaccgcagaatgctatcacgtttgacctcacagaggtttcttctgaagtttcttcaggttttgttagcttagtagctcaagcctctgggttataagagtggcgagactgtttctggctaagctatgtaccccattcaaatcgtaacagttttgtgtccatctgagatacttgtgttgccctggcttctttgaattatctcgtgtgagttgtgacctatcttcttagtacattaggcagcattatttgcataatcgacttatgtactttctcctagcatgtcaccattatccagattttacacaacacaactatgttgttcattc

SEQ ID NO: 27976 - DNA, 1139 bp, Setaria italica
  misc_feature (1)..(32): n is a, c, g, or t
  Peptide Sequence Number=SeqID_93950
nnnnnnnnnnnnnnnnnnnnnnnnnnnnnnnnggttttttctaatcttagtctgactcttgagtaacacaaggtagctgattcaatactggttactgagagtgagatctcatagcaatgcatatctcaagcttgtttgataagcagaggtaaagaatgaaacagtgtcttctattaagttctgtgcagttctgaataatgatgcctttcctttcccaccgtgacctattacagatttacaattgatctaggaaagggctcccctctttagcgagaatgaacaagcctccatcacctcttgagatcctgaagtctttgtccaggtaggttgtcaggagccacgaccggcctctattgttgccaggaatctgtaccttgaggggtggctgtccagaaatggagcctgcaatgctagcaaacgtttgctgcaaagggttcagcacctgctggactggccccaggctgatcttctgcccgaatatatcgacctgttcaggtagatccactgttgatgatatcgctggaggctgaaagctcccctccttaaattggacctctatccttgatggactttgaacctcaaaagaggcagttgcactgaatgaaaatgacgcgaatggagtcgtaagggttgaagcattgactatcgtcatgctttttgagtcaatttcttgggatatctgctttactttcacaaaaggagttgccccagcagctagaataggcaggagttcagaatatgctgtatatatgaggatccagttgccgtcgaggagatccggcgcctcgacgggtgcgggcgtggggttgaccgcctcgagctgggtgactagctcgacgacctcccctctgacctccgtggacgcccggaacccgagctcggagccgtacaccgtgtccaccaggcaccgcttgaggtcctccctcctctccgcctgctcatccacctcctccgccgccggcgccggcgccggcgccgagggatccttcccccactcgttgtcggcggaagggctgggcgggtccgcggcggagggcggctcgggctcgggctcgggctcgggctccgcgggctcgccccactcgtcgacgacgatggggcgcgagttgccctcggcggtgtcgccgccccactcgtcc

SEQ ID NO: 27977 - DNA, 647 bp, Setaria italica
  Peptide Sequence Number=SeqID_93951
tccgccaccgcatatccacccacctccaacacccgtgccgcctccgcctagccctccgcaccacatcgtcatcatcgtggtgttcgtctcactgggcggcctgctcctgctcggatgcctcgccgcattcttctgctggcacaagaaaaaggggaggaagagggagaccaaggctgaggtgctcaactacagcgaccatgtccatgtacacaaggagaccatgtcaggcccccatggcgccgacgttgtcaagctctcaatagacgaggacatcaagttccaagaggcggtgaagaagcaggaagccattggcgaatcctcgagcgctgcggctgcaggaaagacggcacaccacctcccttggacctggcacaagaaacacgagagcaaagaagagaagaaagcagagctcatcaacgtcactaagcacaagcatatcgacgagaagatcatgccagggccgcttggcgaaaagattgaggtcctttctgaagatgaagacataagatttgaagaggcaggccagaaagaagaagagtttgagaaatccaaggcgcacataaccaagtcctaagaagatgatgccactgcctgcccaagactgccgatactgatgaaggtcattcaacttgaggcaattatcatat

SEQ ID NO: 27978 - DNA, 318 bp, Setaria italica
  Peptide Sequence Number=SeqID_93952
ggggttttgcgggggtacttgcgggagtagaccttgatctccgcgtcccagcgcgacttggtcggaacggcgggagcagccggcacctccacggccgggacggggcccggcgtcggtagtggcggaaccaggatttcggagggtggtattcccatttcctaggcggatccggcgaggtcaaggcggcggagagaggacgaggcggcggttgaggtcgtctgcggcagcgccggcgccggggacgtccccggcgccagcgaggcggcagtggatgtcgtcggcggggcgcgccggcgctagcgtggtggcggtggaggc

SEQ ID NO: 27979 - DNA, 449 bp, Setaria italica
  Peptide Sequence Number=SeqID_93953
cttcgaagaagcgccgcgccacgtccagcatcccggagatcaccccgccgtcgacgccgtggttcaccacctggaagaacccgtactcccggcacgccgcgtcgagcgttgccagcgcgccggcgtgccgggaggggtcgcggaggcaggcgaggtcgacgacggggagcctgaccctgccgccgccgctgctgctacgggggcggtcgggtgcgggcaggacgtagctgtcgggcagcctggtaatgccgctgtcggagaggtgccgcacgcctttcatcaggctactgtacgacagctcctcctgatcgacagcttcttctgtcgcttgctgctgaagctgggtgttggccaggtcaacgatcgccattggcgccgcaaccaagctcatagtgtaccttggattgcttgttggaaagctagctagctcggaacgaagagcttggtgc

SEQ ID NO: 27980 - DNA, 561 bp, Setaria italica
  misc_feature (27)..(27): n is a, c, g, or t
  Peptide Sequence Number=SeqID_93954
gattatctttaagttctgggatacctntaaattttgttgatggtatttcctcagcatcttatcagcaactgggaagcaattttgatcttgaaagatcattaacaggaaacaatgccatcagtgaaattgaatgccagagactccaaacagcagcaataaacgattatggatttgctaaacccggggttccttctagttctgcgatgccatttatcttgactgttgatcctcaacaactgaacttgagaaatgagccaaatgtttcttcaacgtcttccaacagtccttcagattctgcatcaccaaaataaaaaatggtaccagtcctcttttcatgccatttgattcctatgtgccagagtggagtggtaataggacagctggcaccactctgaactccacaaaaacaagcaccgagcttccaggtgaaattacagcagaaactgcaagaaaagaagatgaatatactttgaaatctggtttaacttacctgtaatagaaagtaaccaagaattactaagaacaaacaaaagaacaaataacaaaaggaaaccaaaaaga

SEQ ID NO: 27981 - DNA, 2710 bp, Setaria italica
  Peptide Sequence Number=SeqID_93955
tagttacaaccctactcaaagtgtaactttggaaactattcaatcaagattatctttaagttctgggatacctaataaaattttagttgatggtatttcctcagcatcttatcagcaactgggaagcaattttgatcttgaaagatcattaacaggaaacaatgccatcagtgaaattgaatgccagagactccaaacagcagcaataaacgattatggatttgctaaacccggggttccttctagttctgcgatgccatttatcttgactgttgatcctcaacaactgaacttgagaaatgagccaaatgtttcttcaacgtcttccaacagtccttcagattctgcatcaaccggtaataggacagctggcaccactccactctggcaacataggaatcaaatggcatgaaaagaggactggtaccagagtggaagtggtaataggacagcttggcaccacttctgaactccacaaaaacaagcaccgagcttccaggtgaaattacatcagaaactgcaggattggaagatgaatatactttgaaatctggtttaacttcctgtaatgaagtaccagattctgcacaagcatcaaggccaaagaaaacaagaaccacaagtaaaaggaatacagagaattttgactgggataaattacgaaggggggcttgtagcgaaggccacatgaaaaaaagaagtcgtgaaagaagagactctgtagattgggaagcagtaaggtgcgcagatgtgcaaagaatatctcatgccattcgggaaaggggaatgaataatattttagcagagcgaattcagaatttcctgaatcgtttggttagagaccatgggagcattgatcttgagtggttaagagatattcccccagactctgcaaaggattacctgctaagtgtacgcgggctggggcttaaaagtgttgagtgtgttcgtcttctcacactgcatcatcttgccttccctgttgacaccaatgttggtcgcatatgtgtaagactgggatgggtgcccattcaaccccttcctgagtctctacaattacatctcttggagctatatcctgtcctcgaaactatacaaaagtatctttggcctcgcctttgtaaactcgatcaacaaacactgtatgagctacactatcagatgattacctttgggaaggtcttttgtaccaaaaacaagccaaattgcaatgcatgcccaatgaggagtgagtgcaagcattttgcaagtgcctttgcgagtgcaaggcttgcacttcctgctcctcaggagaaaagcatagtgaggtcaagaaatcaatttggttcccagaatagcagcatgtacactatggattcaactcatctgcctcgtcttgaggggagtatccatgcaagggagtttcgtcctaagaactcagagccaataatcgaagagcctgcaagtccaagagaggaagaatccccagaaacaatggaaaatgatattgaagatttttatgaagatggtgaaattccaacaataaagctcaacatggaagcttttgcacagaacttggaaagttgcattaaagaaagcaataaggaactccagtctgatgatattgcaaaagcattggttgctattagcacagaagaagcttcaattcctgtacctaaactgaagaacgtgcacaggcttcgaacagaacactatgtatacgaacttccagattcacatccactactacaacagctagatcttgaccaacgggagcctgatgatcctacccgtacttattggccatatggacaccagatgaaataaatgaaataagcaaggcaccaaaaccatgctgtgacccgcaaatggaaggcagcttatgcaataatgagatgtgccacaattgtactgctgagcaagaaaaccaatctagatatgtcagaggcacaattctggttccttgtcgaacagctatgaggggtagtttcccacttaatggcacttactttcaagtcaatgaggtatttgctgaccacagctctagccacaaccctatacatgtcgaaagggagcagctatggaacttgcaaaggcgcatggtctttttcgggacttcagtacctaccatattcaaaggtctaacaacagaagaaatacaacaatgcttctggagaggatttgtctgtgtgcgaggatttgacatggagactagggcaccaaggccgctgtgcccccatttgcatgttgtagccaggccaaaatcccgcaagacagcagcaactggttaagtaatctaattcagcaaagatatcagttttataaacatcatgtttatggcgatatgatgtcattagctctcgacctgtgcatggaccatattagttcctgccggacgacagccattcttctaggcaataaaccatggagttggagactgttacttgagatgttggaactaatcaagataatgaagaaccaatcctttccgttcgcattgctggtgcgagttatagttatcatcaagcgttaatccgttatgatgtcattgtgttcctttctgagacacagtatcttatcaacattccatttggttaatcaattgtacttgtactagatttttgtgtgctgagatcatgttgcatgctacatacctaaaatattggtttgagttctggcaagccggccagaactttgtttctgtacctgtgttctagttatatgcatcaat

SEQ ID NO: 27982 - DNA, 301 bp, Setaria italica
  Peptide Sequence Number=SeqID_93956
tttgtctccttggtcactctcttaacctctccaatcctagaagaccctgtggagtctcctggcgcggtcggggagccgttgccgccgacgccggcggcggccataacaggcgacgagtccctgagacggagcgagaaaccgcgcggcctagcggggaaagcggggacccgaccgcaacccttccccgaggatttgggaaccggggaggtcggcgtgtaggatagacgggcgggagaggttgagacgaactgcggggtggtcatcgccggcggcggcgccgcgacgggatgcgcggtggagt

SEQ ID NO: 27983 - DNA, 1019 bp, Setaria italica
  Peptide Sequence Number=SeqID_93957
caaacgaggacattgctttggcaattggaacggcactacttcaatcacttggtgaccgaaaggggattaaccgatttgggcattttactgcaccactcgatgaagcagcagttgaggttatactggatctgtctggtcgtcctcacttaagctgcggtttagatattcctactcagagagttggcacatatgatacacagctggttgagcactttttccaatctctggtgaatacatctgggatgactcttcacatccgtcagcttgctgggaaaaactcacaccatattatcgaggcatgtttcaaagcatttgctatgatcttgacaaaacacctttggagctgggtacagtgccatgacggcgcaagtcatattccgttgcttgtcgaagggccctagcaaatgctttgaaacatgcctcgataatatggtgtgagtttttcccagcaagctgacggatgtgaagagtcatcccagatgtattcaccagagattggaaaaagtgctcaaccagctgtgtatcatatgtgccaactctctgagtaggaatatctaaaccgcagcttaagtgaggacgaccagacagatccagtataacctcaactgctgcttcatcgagtggtgcagtaaaatgcccaaatcggttaatcccctttcggtcaccaagtgattgaagtagtgccgttccaattgccaaagcaatgtcctcgtttgagtgatgatcatcaatgtgtgtgtcacctgttgccttaacgtacacatcaaagagtccatgtgatgccagttgatcgagcatgtgatccaagaacggtatccctgtgctacagtcagcaacaccagtgccatcaaggttgatcttcacatgcacatttgtctccttggtcactctcttaacctctccaatcctagaagaccctgtggagtctcctggcgcggtcggggagccgttgccgccgacgccggcggcggccataacagagtaaataaaacctaacaaaactaagaactaagaacaaa

SEQ ID NO: 27984 - DNA, 733 bp, Setaria italica
  Peptide Sequence Number=SeqID_93958
ttttttttttttttttttggtttacgtcacagttcaattttacttcccggccaaacattacatatgcgacaaatggggatgaattcaggatccacactgtaaagtttatacaaggcgcagcattattcacgactggcctggcgttgctttcagaaccacagcttattgtctacactctacacatttccaatcttcagacatgtcgcagctccagagagcagagaaaattgcagtagcaacccgatgcattatatcagtacaccactgttataagcccagtactcggtagtggtacattcgatttttgataatcccattagcaaggattccatgctttgttgtcgaaggcaatgcagactcccaatgtaagtagcactaaccaagctgtatatagctgcctgctccgtttgtttcctctacccactctttcgaacttgcaatgctatgatcttgacaaaacacctttggagctgggtacagtgccatgacggcgcaagtcatattccgttgcttgtcgaagggccctagcaaatgctttgaaacatgcctcgataatatggtgtgagtttttcccagcaagctgacggatgtgaagagtcaagactagtaataataagactagacctagactaccgtttagtttacctactaacccaactactttaacgaaacttaagaacaaaattaagtaacttaaattaagtaaattaactttaagtaaactaaaaaacta

SEQ ID NO: 27985 - DNA, 556 bp, Setaria italica
  Peptide Sequence Number=SeqID_93959
ccttggcggtgtgcgcgaccgaggaggagggcagagcccgacctgcgccacctacgcatgggatgttgacactgtcccccgacggcgtccgtctctgcggggtcggcggcgttcacgagcgcgcccaacgtgtcggcgctcgtctccttcaccgagccctgccccggcaatggcggattcgtctgcaacgacacctactgcaatctcgtcgtgtacggccccggccgcgtggagccgtccaccctccaggagctccgccccggcctgctctactccgtcgccgttgccatctcgcccgaggcccagtacggccggatcatcctcctcatgggcaggggcttctgcacggacgccgccggccaccccttcaccaggacggccaactccaccttcactctgcatttcgatcgaagggatgactccatgaacatcaccgccaccgtccccgaaaagatgctgcagatacagggcgtcacgaggctggtccaagccaccaacgatgagaaggacctgagggtgtacctctccttcgctcagccggtgctcaattcgtcta

SEQ ID NO: 27986 - DNA, 336 bp, Setaria italica
  Peptide Sequence Number=SeqID_93960
ccctgagggaccattggtatgaaaatggaaccccagacatggctacctaggtcactaggtgagtagagtactgtgtttaactgctcgtgctatcttccattgatagatggtactactgctacaagttatggcataatgtacactctgtggatggatcatggacatggacccccttatttttggcttcccggatcaggcaggaaggatgaacaaatgatcactcatgctatctttctggcggcctcgtccgcgaagagaacgtcatctatacatgtcacgatgttgtacgccaggctctccagcaccctcgagtagctctccaggatcgctttgtcc

SEQ ID NO: 27987 - DNA, 996 bp, Setaria italica
  Peptide Sequence Number=SeqID_93961
ggccgtcccagagaaccctaccctgccctctcatctcctcttgttgcccgcctaccgccgccattctgcgcggcgcctctgcccctgctctcaccgccgtctcgcgtgaagccgccgagtgtcagctcaagctagagaagatgtttacggcaaggaggaagatccagaaggacaagggtgtagagccaactgagtttgaggacacagttgcccaggcattctttgacctcgagaatgggaatcaggagcttaagagtgacttgaaggacctttacatcaatggagcagtgcagatggacgtgcctggcaacaggaaggctgttatcatccatgtcccatacatgcttcaaaagtcttacaagaagattcatgtgaggcttattcgggagcttgagaagaagttcagtgggaaggatgttgttctcattgcgactagaagaattgtgaggcccccaaagaagggctcagctgttgtccgtccccgtagccgcactcttaccactgttcatgatggcattttggaagatgttgtgtacccagctgagattgttggaaagcgtgttagataccacttggatggtgcaaaagtcatgaaggtcttcctggatccaaaggagcgaaccaacactgagtacaagctcgacactttcagcacagtctaccggaggctttgtgggaaggaggttgtgtttgactaccctgtggctgagagcgcttgaggttgcttggcctttcggcaggtgcctagtttgccacttgacccagtttcgtctatctgcaacggagattaccatatgttccatgcgtgaaatagtgttcagcatccaggaatatgccaatctcgtttcttcttaaagctgtcttggattgtacaaatgctttgcattgcagttctagttatgtgtactgttttgcgataagcatgatctatctgcagataaaaagaagaattttgacatgtgccggcttgagcatcagttcattaaaaaaaaaaaa

SEQ ID NO: 27988 - DNA, 392 bp, Setaria italica
  Peptide Sequence Number=SeqID_93962
tattcccaaaaggccataatattgctgaagatgatttgattcaccaatggattgctcttggttttatcaagccatcgaaggggaaggattacaccaggcaacttttgggcatgtccttccttcaagtttcaaagttacccaagacttcaggagatcgtatggagcagtacactatgcacgacctggtgcatgatctagcgacattggtcatgggtgatgagttaattgtttctaatgttgcatcgaagaataataaagcacatagccagaaatattgtcgctatgcttcgtttaccaaatatgaccacacaacaaggttatccaatgttttaccctcaaaggtgagggcacttcatttctcagataacggcaagctggatctctcttgtggg

SEQ ID NO: 27989 - DNA, 332 bp, Setaria italica
  Peptide Sequence Number=SeqID_93963
ggggttgaagctggcgccgccgagcgcgccgcagaggaggtcgaaggcgaagaggagcgccgcgaggagggacgcggtcacgaggagcgcgtagtggccgccgccgccctcctcctgcgccacccccagaagcgacgtgacggccgccgtcgtggcgccgagcgcggaggcgcacagcacccacaggaacgtcaccacggcgtccgcggccgccgcgcgcgccgccgccgcccccatcgccatccgcgccggcaccggtcgcccttcttgactcgagaatttggaaactgcaatttgtaaacacgagagcacggtgtcgccgtgccccggcc

SEQ ID NO: 27990 - DNA, 313 bp, Setaria italica
  Peptide Sequence Number=SeqID_93964
cggggagaggcggaggcggtgcggccgcggagctaatggcggccggcggcggcgcgcggccgggcctgtggcggacgccgacgccgtacctcttcctggggttcgcgctcatgatgggcctcatcgttgtcgcgctgctcgtgctcatctgcacgcgccgcaagcactcgccctcgcggcgggaggccgagaaggcggcgtcgctgcacggggtgctcgtcccgctcgaccgggagccgcccagggtcgtcgtcatcatggccggcgacgatttgccatccttcctcgccagcgccaagccgctcgccctcgc

SEQ ID NO: 27991 - DNA, 154 bp, Setaria italica
  Peptide Sequence Number=SeqID_93965
gcatgaaggtgcccgtgaagaggtccgtcttgtcgacgagcgaggtgtcgaagagcaccgggaacgatgcggcgtcgaggagcgccaccacgcgcgggtcgcgcgccacgaaggggcccggcggcatgttgagccgcaccacggtggagccgtg

SEQ ID NO: 27992 - DNA, 290 bp, Setaria italica
  Peptide Sequence Number=SeqID_93966
gcgccgatgacgccgagcatgagctgcacgtcggcccgggacggcggtgcgccgtctcgccggtggcgctggtccatgtgcgaccgcacccacgcggtcaccgtgcggcgccggcgccggccaccgcgggcggacggctcgtggtgggactccgggacgggcacctcgagcacggtgtccaaaccgtcctcccggtctaggttagcgcacaccttcctcatggcgaactgctacaccgatcaatcttgaagcgactgtagtgctcgactggctaataatggaaggaacaa

SEQ ID NO: 27993 - DNA, 245 bp, Setaria italica
  Peptide Sequence Number=SeqID_93967
cggacgcaggtttttgagcacgctttgggtctccaaatacacgaggggtattaacaatgattggcctcagcatgaagcatggctagtacagagccgaccaagtcactgtgacgaccgcagtggcgaagtcaaatttccagcggtcactgacagacccatgcgctgcaaccctgaaggcaaaatcaccgataagatgagacgtcgggtcgtcaccaccaccagcagcaggagctttgaagcgtagg

SEQ ID NO: 27994 - DNA, 1110 bp, Setaria italica
  Peptide Sequence Number=SeqID_93968
atagacacatcgagtgtgaaaaaccaagttagtttcagacaggaatcatgaacttgttacatggatccaggttttttcccaaagtattaagttgagctataaataggaataagtgctgccaactgttagttgcgaaattcttccatgaacccttcatgaaatgctgtaaagcgggagatgaacagtggtatcttctcttcttttggcaggattgtgcatctgaaatgccatgtaccatgtacttgtccaaaaacagaacccggcgcaacaacaatcccagtgttttcaagaagacggagggcatagaatacatctggttctgtgttccgttcctcagcagctgcaattgccctttttggcaggtgcactgaagggaacacaaacattgctccttcagctttgcagcaagtcactccttccaggcagttcaatgcacacgccatggactcagcacatcgagaaaaagttgataatattccatttctttctgcctgataagaggtgtatgactcatcctcaaccattggtgggttcatgactaggctcatgaggatctgaccggagatattggagcatgaacttagggatgcaactttgtacacttgtttctttacttcagaattaaagccagtgacttccatataacctccccttctcccacattcaccataatacccattagaaaccgaatgaaatgacactaaagatatgtctccttcgctgaaccccatggaccgtgctatcttcttgaaagatttaaatttcttatcagctgtgtagatgttttcttgataaacctcatctgctagaagaacaaggtcttccttcctacagaattccacaatttcacgctgattttcctccacaagaacatgtccagtagggtttcctggatttatcaccacaagtcccctcacatttacaccctttgatcgggcaccatccagctgcttcttcaaatctgacatcctcactccccaacctctagattcgtcaaggtaatatggtacaagagtcgcaccctggagaaccatagaacttgtgtacaaataatgtgatggtattaagtaggttgttattgtacttctaattaccttctaacctaattta

SEQ ID NO: 27995 - DNA, 355 bp, Setaria italica
  Peptide Sequence Number=SeqID_93969
caaccacgtggccgtccgccgccaccaccgccggctctggatcgagcacgctgacaccgtgtccggcgttgcggcctccgccgacggccgcctcctattctccgtctcctgggacaagaccctcaaggtgtgggccctcccgtcgctccgctgcctgcagtcgctgcccgcgcacgacgacgccgtgaacgccgtcgccgtggcgctcgacggcaccgtctacacggcatccgccgacaagcgcgtccgcgtgtgggcgccccggcccgcgcccgacgacaagcccccggcgcgcgcgcggcaagaagcacaggcccgcctaccacctggtcgccaccctgtccccggcacacgg

SEQ ID NO: 27996 - DNA, 431 bp, Setaria italica
  Peptide Sequence Number=SeqID_93970
catttagcatgagattggattcttgtcgccgtgacccatggtcgacaatgaccactgcatccttatccccaacattgaaatcctcccttccggacgtttctgacccactggcaggatttggcatggaactcattacaaggtttccactagaccttccagctctccgcagctcggtgaaatcaatggaattcctcgcagctgcacgcctagggataagtatgcttgccggagttgcagtaaagggctgcaaggagactgaagccgggtgcatagcaggggaccgagttcaggtaaaacccagattccgtgggggtggaaaactcgtcgccggccgtctaccaccaccgaccacagttggacaagcacgaattcgttcggaggtagtagtaagtagtagtcttcttcgttagttagttctacggtacggtact

SEQ ID NO: 27997 - DNA, 232 bp, Setaria italica
  Peptide Sequence Number=SeqID_93971
tcaccgtttgatcgaagaacatataccgaatagagttcatacctttgtactcgtgcagataggtgatagcatgagcaacgttgatggcgatgttgagccgctgcgtgagttctaaaccatttccgcaggattctgcggtttttcacatttgcgagctggtgctgtatcccccgaggacaatcagactgtcattgctgcgctcgaagaaaccgaggaacctcgccagattctg

SEQ ID NO: 27998 - DNA, 310 bp, Setaria italica
  Peptide Sequence Number=SeqID_93972
acgagctcggcgaggaggacgccgaaggagtagacgtcgctcttgtcggtcagctggtacgtgctcaggtactccgggtccacgtacccggcggcgcccttcgccggcgtcgcgtcggagcctgagcccgtgccggagcccgaggccgaggccgccattcccagcagcccgaagccggttaccttcgcctccagcgcgtcggtcagcagcaccaccgacgaccggatgcctccatggatgatcgggtgctctgcaactcgaaatcagatcacgtgagtttcagagaaccacgaccggatgcctcatcggg

SEQ ID NO: 27999 - DNA, 273 bp, Setaria italica
  Peptide Sequence Number=SeqID_93973
gcaggaccacgcgctggccgtcgagagcgtggcgccggagctggctgatctacggatcgaactctgccccagccacatgagcgagggctgcttctggaagatatacttcgtcctgctgcatcctaagctcatgaaggaggatgctgatattctgtcgactccacagattttggaagctagaggcaagttgtcacacaatttgcgatatcagacgaagttacagagcagcaatgaagacaccgtacctgtgcctttcagcaatgtagatggtgt

SEQ ID NO: 28000 - DNA, 519 bp, Setaria italica
  misc_feature (519)..(519): n is a, c, g, or t
  Peptide Sequence Number=SeqID_93974
cacctagaatccactccatggatgattatttcatgattgaagttgagaagaaattggaagacaaagaaggctctaaatcttctggtgcatcaaaagggagaaggcagctgaccaagaaagtgattgagtactgttatgagccggaaatggaggagacttacaggtcaagcatgttgaaggcatttaagaagacccttgacgaaggaaattttacatttgtgattgtggatgaccgcaatctgcgggtagctgattttgctcaattttgggcaactgcgaagcactcgggctatgaggtgtacttgctggaggcaccatacaaggatccaacgggctgtgctgcgaggaatgtgcacggatttacattggacgagataaaaaagatggcaacagactgggaagaggctccaccactgtatctgcagctggatatacggtcgttattccatgatgataatctccatggccactctatacaagaggtagatatggacacagaggacattgatgatgctattn

SEQ ID NO: 28001 - DNA, 1051 bp, Setaria italica
  Peptide Sequence Number=SeqID_93975
gcccccggagcctccatttccttctcacagggattaccgtgccgcaccaccacggccggctgcaaattcgtcattgtttcctgtcctttccggttctccagccatggcagttattccacctagcagtcgcaccttgcctcaagctcagtcgatgccaaatgcaaactgctacgacggacacatcaatgatgaggggcaaggtttgatttatcgaccattgtcagagcagcacttgatagatggaaggtcagccaatgcacatcattctttggaagattccaaggtcacaatcatcaatgcatgcgatctgttcaagcaaccacatcgtgcttcacgtcctgaccatattgttatcatcctccgagggcttccaggtagtggaaagagctatctggcaaaggcattgcgtgatcttgaagttgagaatggtgcaaatgcacctagaatccactccatggatgattatttcatgattgaagttgagaagaaattggaagacaaagaaggctctaaatcttctggtgcatcaaaagggagaaggcagctgaccaagaaagtgattgagtactgttatgagccggaaatggaggagacttacaggtcaagcatgttgaaggcatttaagaagacccttgacgaaggaaattttacatttgtgattgcactcgggctatgaggtgtacttgctggaggcaccatacaaggatccaacgggctgtgctgcgaggaatgtgcacggatttacattggacgagataaaaaagatggcaacagactgggaagaggctccaccactgtatctgcagctggatatacggtcgttattccatgatgataatctccatggccactctatacaagaggtagatacatttgtgattggtatgaagttatagtataacaatcatatagcaacttatatctcaatcattacttcataggtggtatttgcttttatcgttgtctttccaatattctggaggccacatataatggcctccaaatttcatagattagcattaagtttatcacattttattttttccttatt

SEQ ID NO: 28002 - DNA, 576 bp, Setaria italica
  Peptide Sequence Number=SeqID_93976
agtcaaggttccagtttttatcactgcaaagtacatccataccagccatctcttcaattgcagtcattcttttttgttatagctccctgctgagccaagcgatgggacccaattgccatggtcacagacaaaactgttggcattgctatgggaattccaccaatgagaagcaccaaaagattgtcaattccaggacgatacgccctgtgctggatagggtacatgacaattatctcaacaaacatccccacagcgattgagcaaatacaaaagttcccaatggctgtcaagaccttctgaaaatggccaacttgattggtggagtcgacaagatgtgcagccttcccaaagaaagtgtggacaccagttgctatcacaacagcctcaatctcaccctgcttgaccgttgaaccagagtagacgccatcaccaggacctttggtgactggcaatgattctccagttaatgcagactgatcaattttcaaaggatctccatcaaggagccgagcatctgcaggaatgatatctccaagtttaatgctgacgatgtccccaggcacaaggatggctgcc

SEQ ID NO: 28003 - DNA, 473 bp, Setaria italica
  Peptide Sequence Number=SeqID_93977
ccaagcgatgggacccaattgccatggtcacagacaaaactgttggcattgctatgggaattccaccaaatgagaagcaccaaagattgtcaattccaggacgatacgccctgtgctgaaagtctgaaaatggccaacttgattggtggagtcgacaagatgtgcagccttcccaaagaaagtgtggacaccagttgctatcacaacagcctcaatctcaccctgcttgaccgttgaaccagagtagacgccatcaccaggacctttggtgactggcaatgattctccagttaatgcagactgatcaattttcaaaggatctccatcaaggagccgagcatctgcaggaatgatatctccaagtttaatgctgacgatgtccccaggcacaaggatggctgcctcttcctcggtccaacggccatcacgaagcaccttggcttttggtgcaagacgggccataagtgctgcag

SEQ ID NO: 28004 - DNA, 235 bp, Setaria italica
  Peptide Sequence Number=SeqID_93978
tcttccccagccttgactggaggatgaaccaaaaggaccaacatgctgcgccagcaagtagggccacagacccagtcacccatgtatgtgcaccatgaccatggcccacacccatagtggagagctccattggttgctggggtttggtgagtgatgggccttggtacagtgcaaggatgattgcccctgtgaaccctactgttgtgccaatcacctttgctatgccggctccagt

SEQ ID NO: 28005 - DNA, 813 bp, Setaria italica
  Peptide Sequence Number=SeqID_93979
caacttttgaagatgtgatgatatcatgcaattgagccttcgcttcatttatgtaagtagtaccatcctgaagtccatctagcatggacgagtccttactgacaagcgaaaccaggattggtgttaaactccccctccaaatcaagaaggccttttgcaaaagccgcagcagacatctgaacacgaccttcatctgaactgtatatcttcagatcatgcctatatgtactgtggaggcgaagcaatcctggtccttcacttggatacatattatttctgaagtatcttcccaattcctctgcctgcttccttcctgcatgagttagaacaccaccatacttaagaaccattagggcttcaactggatactcctcctccccttgactgttatctttaggaatgcggacccagtttgatggctttagctgtaccttcctatagatacctgaaaatgtccaccctcttcaaggacggctctaacttggcgtagcttctccgcgtgctcgacttcaacgtcactatcactttcacgaccagatctagctcgtggaacaaggattcttgttgcatctaacagatcttggagctgcaaggcgcttttaagctttgcctctgtgtgagcctttccaccattgtatttcaacatcagcttcaaaagcttttcttcagttacttttagcttcaccttctgctttggtgtgcgatccccatggcgtataacagctatgacacagcgcaactcttctgatggcctagatattccaacagttcccctttcatgacatctcacagaatcagatggttgggctggct

SEQ ID NO: 28006 - DNA, 498 bp, Setaria italica
  Peptide Sequence Number=SeqID_93980
atctcaaataacttccatgcaatttccttgggattcgtgacaagatctcctcttccaaacaccctcagagtcgcgctcggattgatatacgctgttctgaacttgattatgatgtgcaggacatataacaaatcagcaactgatcggaggaaagtgacaatgacggctaaatggatgtctgtcccaacacaagaaaccgagctaccgtaggtgatcttgggaacatagaagtagagagggtctataaatagtgcggcgaagcaggagacgaggaagacgcggttccatgtcaagatgaagtcgcttgacggatcgaaaatcttcttgtaccactgctcatcgcccgctacaaaagccctgtgcttcttcgaggtccccacaccgagcttgctagcagcgagccccgcctgcttctggtggagcggtattgctggcttcattggcgccggccccgggggatcagacgacccccgaaaaattctggagaataatctggtg

SEQ ID NO: 28007 - DNA, 349 bp, Setaria italica
  misc_feature (343)..(349): n is a, c, g, or t
  Peptide Sequence Number=SeqID_93981
gtgttcgaatccgaaagcgaaggtgacttggggaagacaggtttgtcctgcatggtaagatggtggtccttgcctgtgttattgataggctccctaattgtgattagcaaagaggcccttttacctcattctgatgtctcttccttttcttttcttgccatccacattgtatgcgttttatttatccaccttgattaattcctatgtatgttctttgttaccccttgattgaggatgggtgatcaaaagcaggcatcgcccctctccatgtgtaataaaaggtcgagtgaataaaagtgatctatttattttatttcaaaaaaaaaaaaaaaaaaacaaaaannnnnnn

SEQ ID NO: 28008 - DNA, 615 bp, Setaria italica
  Peptide Sequence Number=SeqID_93982
ctgcagaatttaatggagggactggtgtaatacattcccacaaaaactgcctggagtgggctcctgatgtctacttcaaagatgactctgtgtttaatcttacaacttagtaggctagaagtagaaggatcaaatgtgcttgctgtggaattaaaggtgctgcacttggatgctttgacatgagttgtcgaaaaagcttccacttcacctgtgctaaattgatcccagaatgcagatgggatgatgaaaactttgtgatgttatgccctttgcaccaatcttcaaagttgccaatagaaacttctgagtcgaaaaagaagtctcaaaggagactaacaccaaaagggtcagctcaagtaagaccttgtcaagtttatggtaataaatggacatggccatctggatcaccacagaagtgggttctctgctgttcagccctttctcctgcagaaaagggtattgtatcagaatttgcaaaaatagctggtgtgccaatctcaacaagttggaatcccagtgttactcatgttattgcatcaaccgacctgtctggtgcttgcaagcgcacacttaagtttctgaatggcaatccttaaatggcaaatgggttgtcta

SEQ ID NO: 28009 - DNA, 255 bp, Setaria italica
  Peptide Sequence Number=SeqID_93983
gtcgtgctggcatcagcagtggcactcaggggcagtggagttgtgggcagggaatggtatacttggtgataatgaccttcatgcccttgctttatatgcttgctagagatttctttcagaaaataaatggcaagaattgaacataaatgagctctggtccttccctacttaggagaaacttagatgtaacttttttttgaagcaacaacttagatgaactttgttcagcaatcaggattgttacctaggagtagg

SEQ ID NO: 28010 - DNA, 649 bp, Setaria italica
  Peptide Sequence Number=SeqID_93984
gccgtgcctgcaggccgccggggcgggcggcggcgtcaaggaggagggcggcctcgggaatttctcggccgactcgtccaccgtcacggccctcgacagctgcagcaactccttctccgggctagccgacggcgacttcccgggggaattctgcgagccgtacgatcaattggcggagctggaatggctgtccaattacatgggcgagggcgacgatgccttcgccaccgaggacctccagaagctgaagctcatttccggcgggtactccccggctgtgaacgtgccaccggctcctttggcccctgcggccgcggcttcagccgtctccgcggcgcagcctggtatgttcatcccggaggcgccggtccctgccaaggcccgtagcaagcgctcccgcgctgccccgggcaactggtcgtcacgtctcctcgtgctccctccgcccccggcctcgccaccgtcgccagcgtccatggccatctcgccggcggagtccggcgtctcggcccaggcgttccccgccaagaaaccgtcaaagccgtccaagaagaaggacgcgccgccggcgccacaggcgctgccctcgagcgcgtccgcggtgcagtcggccggctcggcggcgtcggcggaagggcggcggtgcctg

SEQ ID NO: 28011 - DNA, 417 bp, Setaria italica
  Peptide Sequence Number=SeqID_93985
agacgtcgcgcaccaccgcgacggcctccatcatgtcgccgcccactgacggcgcttcgccaccgccgtttctgcggcgtctggcgacgcggccgaaccggacgagcacgtagcaggcatcgagcagcagcatgcgcacgaactccgcgctgacaatctgctcgaacgtgtgggcgtagcagctcctagcctggccctcgaggcgggcgagctcgtcgcgatagacttccagcgtcatgccggcactcgccgcggacaggagggcgccgaggctccggagcttctcgtcgtccctggcgaggtgcgggttgttgatgcggtggtaggggccgatggagacgtgccgggtcgacgttgcggttgcgggtgagctcgccgacctgagcgatgatgatggggcagccgctggcgagctgc

SEQ ID NO: 28012 - DNA, 436 bp, Setaria italica
  Peptide Sequence Number=SeqID_93986
tttttttttcctagtaactgttcacatcttccattagtttccaaaaatcgtcatgattcacatctcagcaatgttcagactacaattcctaccaacacatgacaaacacctatccagcatttgccgctccagcaaagtttcaatctactactttctacttgatttcggaaggtcccttttcattgaacatgcgacatgcgagtattaccaccaaatgccaaattagtgcacatcattggaacttcctgaccagctcaagcttgcgagcctggaagaacttgcaacgcccttttccactcgattcgatctcttcagtcttccttttgaaaccggtaaagcctaggcttgaaagcttgacttgccgcttggcacttccattgttagttgcatcttcatctacttcatcagtctcccttcatgtcattccatgtggcac

SEQ ID NO: 28013 - DNA, 821 bp, Setaria italica
  Peptide Sequence Number=SeqID_93987
ttttagaccgactaccaagcaaaagtttcaatctactactttctacttgatttcggaaggtcccttttcattgaacatgcgacatgcgagtgttcaaatcaagcttcagaagaataatagaaaaaacggtaccaccaattgccaaattagtgcacatcattggaacttcctgaccagctcaagcttgcgagcctggaagaacttgcaacgcccttttccacttgattcgatctcttcagtcttccttttgaaaccggtaaagcctaggcttgaaagcttgacttgccgcttggcacttccattgttagttgcatcttcatcaatttcatcagtctcccatgtaacctcaactgcatccttgaagaagggcgtgcaagttccccaactaaaacgaaccagggttgggaagccaaatactgggtgcttgtgatcttctaaccattgcttagtatcagggtctcctggatatcctgatccggttttcatgtgcatattcagagctgtttcatcaaacacccagtttcgcaaggccctgtccctagtgacctttgcaactatacttgccccactaacaactgggtaaaggctatcagcttttttggcaaccacaaatttgatgcctggaaacttttcggtcagcttgatccgatacttctcaggatctcccactgtatctatatatacttctgccagtagaactcccatgtcaagaacttttctaactaggcccatggcagagttatgtgatatttcatttagatttactttcgactttttaacattttagcagataggtcctttggacatatgacatccacttc

SEQ ID NO: 28014 - DNA, 295 bp, Setaria italica
  misc_feature (1)..(46): n is a, c, g, or t
  Peptide Sequence Number=SeqID_93988
nnnnnnnnnnnnnnnnnnnnnnnnnnnnnnnnnnnnnnnnnnnnnncctaaataattctcttgctggacattttcattttcaggtatttggtgcataataatgcatgcaaatcataacttgaggtaagaggaatccaaataatccaagggcgacatttaagcaaccatccagaaaacagatcatgctactcaaatctgacacgcaatttattttatgctcatatatctcccgtggacctatttgcctccagtaatgcatctcatacattttgctcttcttcttcggacagatttt

SEQ ID NO: 28015 - DNA, 297 bp, Setaria italica
  Peptide Sequence Number=SeqID_93989
ccgggcagggaatcatacttggtgttgttaacgaccactgtggacttgaagactggttcgtgggatgggccctctttgagggtatggtactctggggttggaagaccagctttctgcgcatactcttgcaagcggctcttgaatacatagcaattctcaaccctgatcccggtgggggcggccgcgacgttgggcgcaggggagatgttcgtggcggcatcgtgcggcgccgcgcctccgccgtccatagctcaccccgccgccgcctcgaagtgaaggtgaggagggtgaggagaa

SEQ ID NO: 28016 - DNA, 454 bp, Setaria italica
  Peptide Sequence Number=SeqID_93990
ggcaacatttaagcaaccatccagtaaccagattatgcaattcaaccgctcaaatctgacacagaaagttttcctgaccacaatctacctacctcggttcacatagttcatcagggatacaatcagctaatgatagcaaacataaactaactacgttggttcacatgctcccatctgttctttcccagaattcactctaaactggaaatcccagttttttgcatgtcgatacactataaacattggaaggtccttacaattggagtcaaccacaacaatttattttatgctcatatatctcccatggacttatttgcatccagcaatgtgtctcatatattttggtcttcttgttcagaaagatttgcagttctccaaaaatacatccctagttaggtggctcctccaattcaccactttgaggtgcttcttgctttatggttctgtttcctca

SEQ ID NO: 28017 - DNA, 1738 bp, Setaria italica
  Peptide Sequence Number=SeqID_93991
ctctaaactggaaatcccagttttttgcatgtcgatacactataaacattggaaggtccttacaattggagtcaaccactaacctttaataatccaagggcgacatttaagcaaccatccagaaaacagatcatgctactcaaatctgacacgcaatttattttatgctcatatatctcccgtggacctatttgcctccagtaatgcatctcatacattttgctcttcttcttcggacagatttcctgatctccaaaaatacatccctagttaggttgcactaactcaccactttgaggtgcttcttgctttatggtttctgtttcctcacgctgcatcattgcagtattgcttggcagctcctccttcgcatctgtagcactcccattaaattgcaatgctacataggcgctcgctgactcctgctctgcacttctagcttccatgttaggcttcaccacttcagcgatattgagtggctcctgttctacacttctagcttcctcattaggttggaccgttgcaggatctctgggtgcctccagttctatcatcctagcttcctcatcagattgcaacattacaacttccttgttagattcaaccattgcagtgtctctagataagtcatgttctactcttatagcttcctcggagtgtagaagcattgcaagcccctgctttacacttatagcttcctcatcaggttgctgagttgccgtacctctaagaagctccagttccactcttctagcctccccgtcaagatgcagcattatactgtctctggatggctcctctgttattattgttgcctgcatcgggacatcagaatcatgaacatccccaacctccctagttccatccttttcagcatcaacaatctggtcggtcttcctcatgaatttacgcttattccatttctttctgccaccacttttcttgactttgagcgatttgggggtttcagttggctttttatctgtctctttaacctccctttgtccaggaacaacaatatacttcgtggcaccattcgcacaaccttctgattgaccctggattgcaagaagagctgttcgggcagcttttatctctgcttccttctttgttctagctgcagcaccaatgtattgtatgccaccaatctcaacagtgcatatgaaaggagctacgcctgaagcttgtttagtgcaaatatatgatggaatggcgtaattcatcttctgagcgtactcctgaagaagattcttgcacaggccagtctcttgtactgctgggatgcttttggcttcagttgctggaacagacttgactatctccataagcgcaacttcagcggccgactgttctgcagcctttcggctgaagaatccaggcagggaatcatacttggtgttgttaacgaccactgtggacttgaagattggttcatgggacgggccctctttgagggtatggtactctggggttggaagaccagctttctgcgcatactcttgcaagcggctcttgaatacatagcaattctcaacccctgtgccaaatcaagcatacaacagataaggtattgtactgttggtgaaaaaagcagaaattcggaatgaagtattctggaagcctccagcaggatggattaacaagcaatctagaaagattagacaaagacccctagaatttaaacaaacttaactaaagaacttaaaccttaaaataaacaaaaggttaaagaaacaaa

SEQ ID NO: 28018 - DNA, 684 bp, Setaria italica
  Peptide Sequence Number=SeqID_93992
gaagccatgaaaattgcttccaaggaaaatggcagaacaagacgaaaaggcacacgagggaagaggccgcaacaaataaataatagtactaaaagctgcagctgcaggcagaggcgaatagcttcatgtcttagtgaggttgtctttgcttgcaggcttcaacttctgattggcgcatctcctgtgtgttatggcgtgcctacgatcattaggaagaaagtaacgaccgattctgcgacaggagatgagagatgacctaaggtgtggcagcatcagcatggttttggccacattgataatgttgtgatctatggtgttgacgtaagcagcactttcgacacggcacagcaccagctcaattatactgattaatttagatgctgccgtagctcggagcccatgcttggacgggtggtttttctggacgagctgctgtggacatgcacctatcactgatccagagctatcttaacaagtatatagaaccctcataaaaaaaataagatatagaactattttttatacatgtgttgtaaaatgatgctgaccattaataaatctataatgttaggtcacgggaaaatcagttagagaatgtatgtttattgttgaggccattaattgtataatactatgtaattgatagctttgacaattttcttataacataagatcttttacaaa

SEQ ID NO: 28019 - DNA, 1021 bp, Setaria italica
  Peptide Sequence Number=SeqID_93993
ttcaagtcaaggcgcacacgctgtccctcggagtgctcgacactgccctgaagcaagatggattttcattcaaacgaccttccccatcacaggttaccatgccgactgcaaacattttctcctctgaagcaagagtagcatctgcaggttctccacaaaacccagatgcagaaaacaaggttgccgattttacttaccaatcttccaagtaattaaatctgtcttccattctgtcatacatgaacctgcaacctggttcaggctgtgagcgctgaacttgtaaggaacatctttgacttggttggattcttttaattacttcatcatctgtggtttcagcctcatgtgtgcttggcatgctagccgcattatcagcattaagaacatactgctgagtaaatttatttactcgagttgcgaaaggggtaatgcggtcacaatttgttttggccactctgctggatgatggcctgtcgcttgtcagagttagctcagagttaaatggctctccaggggttttttcctgtttagagcctggcgtctcaagaaatgctgcttcatctgcgtgtgaattgttcaagagcatgtcaacatcgttactggagtaaatgtgaaggtcggcctcttcttctattatcctttctttaacttcattttttgaaggtgcgactgaaaccatcaagatatgacctttcgagctttaagccatccaattgcctgttgaggtagtagacctcccagttggagacgaggtccgcggggcgtcatcttgtagttgatgcagtaggtcagcagcgtggagaggatctgggcggcatcctcgggtccggcgcccccgatggagaagccgctgctctcaagctccgcgcggatctctgcctccatcgccccgccgctgcttactctctgcgcagtcgagggtacttcgtgagcgggggacgcgaccctgcggcgtgggtggagagagagaggaaggcgagggatctggggacagagcgaggtggggtggcgggaaatgagg

SEQ ID NO: 28020 - DNA, 844 bp, Setaria italica
  Peptide Sequence Number=SeqID_93994
ggtgggcacgctgttcgggagatggccatgtacgccgcctacaactcctcggcggcgcgcatgttcgccagcgccgccatgtacgtcaacccgcagctgccgacggtgtacggcttcgtgcagtgtacaccggacctctcgaggggccagtgctgggactgcttccaggacctgcagaacctgaaccggcggtggtacgacggccgcgagggcgggcgcatcctcggcgtccgctgcagcttccggtacgaggcctaccatttcttcgccggcatgccggaggtcaggatcggcctggagggcgacccttctacttcatcaactccgcgaagtaatggaagcaaccacaagaaggtcgtaattgtcgccctcatcgtatcaatcacggcgttctgcgcaatactggctgccggccttttcataatcagaacacataggcaacgagccgagaagaggaagcagcagctgcaggcacagtcccggaacagctccgcgacagaggaggcgctgaagctgtggcgggtcgaggagagcagcacggagttcacgctctacgacttcgccgagctggccgccgcgacgggcgacttctccgacgagaacctgctcggcagaggaggcttcggcccagtctacaaggggaagcttgcggacggcaccgagatcgcggtgaagcgtctggcggcgcattcgggtcaggggctggaggagttcaagaacgagatccagctgatcgccaagctgcagcacaccaaccttgtccgcctcgtcggctgctgcgtccaggacgaggagaagctgctcgtctacgagtacatgcgcaaccgcagcctcgactgcttca

SEQ ID NO: 28021 - DNA, 392 bp, Setaria italica
  Peptide Sequence Number=SeqID_93995
cctttctcacctgcccatttccttagttatataacatgcagcacttcgccatgtttggttattacatgctcgtgcatgtatgctcctgcatgctactattagacagggaggtgatctcttccttgtctctactacaacatgggagaacaccgaaagatcatcctgccaaggttagtaacaagcaagctactgcaccgccaacagctgcatggtcatggatctgcctctgaggtttcgagcgtagtggatgaaaacttgggacagaaacacttgaatggccacaaagatacatttgtatacagggtgtttgctagtacctggaacgttggtggcatcgcaccatctgatgatttggacttggaggattttaggttaggaataacaaagggacc

SEQ ID NO: 28022 - DNA, 653 bp, Setaria italica
  Peptide Sequence Number=SeqID_93996
ccaccatgggctcgaggccaaagtcagacaggtgcggctcgaagtcggcgtcgaataggatgttctgtggcttgacgtcgccgtgcacgacgccggactggtgcaggaacgcgaggccgcgggagaccccgagcgcaattaggtgcctcatcggccagttgaggatgtggccatcttggtgagatgcttcctggagcaatgtggcgaggttgccgttgggcatgtagtcatagaccagcagacgaacatccggcggcggcccggcgtagtagccacggagcacagtgaggttcctgtgcttcaccttgccaagagactctgcctcttttctgaatgagccctcttcaataatcacagcaccatcggcagaggtggacggaagccgcaaaatggccagcacggtgccatcactgtaacaagccttgaacacgagaccatgacggcctcggctgagcacattctcctcgtcaaactgccgtgtcgcctcaaccgtgtcagcataggtgatccttgagttgaacatgatcaacttcggctggctgacaccattctccgtgcttgtgccactcgacccgctgccacgtccagggctgcgtctcctcttcttgacaccatcacggctctcaatgaacctgcgcctccatcgcagcaag

SEQ ID NO: 28023 - DNA, 758 bp, Setaria italica
  Peptide Sequence Number=SeqID_93997
gtactatctgcgggaagtggcaaccaggtgctccttgatgctccgaatcatcttggatttcttatgtttgaagttcctgtactgttggaccggtatacatgccagtgcgcatgtaaatattcactggagtgtttatggtctccagccatgcatagttatctgggttaccaactacctttatgtctccagctgctgagaggctagaaaatggataatcatgaaaatatgtgcaaaagcgaccaacatcttcggaatacggtggagcaaggacatcaagaacagcacatgaagacactgaagtgaagcagtgcatgttcccaccactttggggatacaaaacagacgttggacacggggcagtccgaacatcatcagtatgtaacttggccagtcttgctggctgggtacttgctatgacagtaggttctatccaatcatatgatttcacatgcatggaaccataaaggattttgctcaatacagtcattcctggatgatcatgaagagggatgacagctgaagttggtaagcagaatattccgatagagaaagcgtcgcattcgtagatatgaaggtaggtgattggctgcgcccatcgagccacccttgctgaacccttgaggaagttggactcaaaaaatccatgccctctgtcgtcctcaacactatcatctctgagtccaacatccgcaggagtgatggtgtccatgagcgaggagatgctgcggacggcgtcgggcggggcgggggaggagggc

SEQ ID NO: 28024 - DNA, 466 bp, Setaria italica
  Peptide Sequence Number=SeqID_93998
cgatttctgaagaagcacgttcttcagatgctcggtcagcaggaagcagcaagggatacaactctgaagttgatatctacgtggacgcactgaccacgatggattctgaagcagagacagactcagagcaaagagaccatcgagaccaccatgcctttgctcggatggatccagacaatgcatgctcagatgctcaaaatgctacagcaccgcggtctagcagctttgagaagaaagacttgtcagatgttgcctcaacaaacagagatatgagtaaccagcatgaagaagaagctattgtctccacaccacagatcaaaccagttgttggtgaacatgagaggactagttcgttggaggaactgtttgagcaagaaaaaccagcttcttgggatcatgagaggagtagttccttggaggaattgctcaccgaagatttccatggtccagctagcagctccggtct

SEQ ID NO: 28025 - DNA, 673 bp, Setaria italica
  Peptide Sequence Number=SeqID_93999
gaactccgggatggtggggaagaagcgcatctccgtgttggggatgacctcgccgttgtcccgcacgcgcgggtgctcgtcgaagtgccggctgccggcgcggtagagcacggcgtaggtcgccgggttgcgcagcgacgaggtgacctggtatatgctgacggcctgcggcggctgctcctccgagcgcgccgccgccgccgccgcgagcatggcgttgacgaccatgtcccccgggatgacgtccatgaccatgcggaggtcggcgaggaagcaggagatgctctgcttggcgtagccgatgatgagcgtgtcgatggtgcgggtgccctgcatccaccccggcaggcgggtcggcccgcacgctggtgatgatgctgggccgcacgatcaccaccgccgccgccggcaggtcgccgtcgccgcggtgctgctccaggaccatctcgcccatggccttggtgaacacgtaggtgttggaccagccgaagtggcgggcccgctgcaggcccagctccttcatggccttcctctccgtcgcgttcccgtcgtcgccgctcgccgtcgtcggcaggtccttcttggcgtcgctgacgaggcgcagctcggcgtcgatgtcgaggcgcacgccgtcccgcagcgactcgccgggcttcatggggttctccaggat

SEQ ID NO: 28026 - DNA, 725 bp, Setaria italica
  Peptide Sequence Number=SeqID_94000
cttcggttcggcatcttcaacgaccaccactaccacctgggctacttcctgtacgccatcgcggtgctggccaagaccgacccctgctggggccgcaagtacatgccgcaggcctactccatggtcgccgacttcatcttgttcgtcggcaacaggcccggtggcagcttcacccggctccggatgttcgacctctggaagctccactcgtgggccggcggtctcaccgagttcgccgacgggcgcaaccaggagagcaccagcgaggccgtgaacgcctactactccgcggcactggtcgggctgagctacggcgacgcgcacctggtctccgtcggtgcgacgctgacggcgttcgaggcgctggcggcgcagacgtggtgtcacgtgcgggccggggaggggatctacgaggaggacttcgccgggagcaaccgcgtggtcggggtgctgtgggcgaacaagcgcgacagcgggctgtggttcgcgccgcccgagtggaaggagtgccggctggggatccagctgctgccgctgctgcccgtcagcgaggcgctgttcccggacgcggcgttcgttagggacctggtggcgtggacgctgccggcgctggcgcgggacggcgtgggcgaagggtggaaggggttcgtgtacgcgctggagggggtttacgacagggagggcgcgctggccaagacccgggcgctcacgggccacgacgacgg

SEQ ID NO: 28027 - DNA, 313 bp, Setaria italica
  Peptide Sequence Number=SeqID_94001
gtcgtcgtcggtgaccgagtcgtccgtgacggagcagggcaacaccgggagctcgtctgggttccccaaggaggagagcttcacctcgtccccgccggacgccgaggagttccagttcgacgagagcttctggtcggagacgctgtcgatgccgctggagagcttcgacgtccccatggagcccgtcgacgcgttcggcgccgcggccacttcgtcggcggttggcgccgccgacgacatggactactggctcagagtgttcatggagtccggcgacgtgcaccaagaattgccgcagatttagagcgcgaga

SEQ ID NO: 28028 - DNA, 585 bp, Setaria italica
  misc_feature (502)..(502): n is a, c, g, or t
  Peptide Sequence Number=SeqID_94002
ttttttatcacagtatcagtaattcagtatgcattcgtagcaattgaccaaattacatggatcccaacagtatctccttttataaactgtcaagtaagcaagaatagcgcatctaaccactgaagattcttacaaaagaattagacccccaaagcctttcacagtccagggtcccgagccatatatctacattatacaattccacgtttcaccatttcagtatccctgacgaactataacccctcacaatctgaaccaaatcttttcgtgtagtcgtgtatgcatccagtcacgtaccatgctgcccttcacctgaagtactctttgttggcgtgagcgtgacccgctcccagcaaaaataaatctatcattcttcttctatcactcgacttgttcgccgattagatcgagaccaacaaccaagaatgagaccccttggaacagaaggaatagaaatgtatgccttggaccgaaagcaggctccgagctgcggcagttaagngaaggaaggagagtgctaactccttcctgtatatcctattgtgtttcttcttcctgaagtcctttttgagattcgacgactcc

SEQ ID NO: 28029 - DNA, 821 bp, Setaria italica
  Peptide Sequence Number=SeqID_94003
cgtgatgaacattaggccatcccggatgagaagctgcatgtcgatggaagttcctgtagtcacaaagaacaatccaagcaacaagcctctgaatggccttatgtcagcttcaatttgtgtgcggaaatttgtttctgcaagaatggctccagccagaaatgcacctaatgtatcactaaatcccaactgttgggtgataagtgacgtccctgcaactgttagaagacagagtgcaacaaatgcctctgaactccttgactctgcaacaaactcaaagacacgtctcatgaggtatttcccaccaagggaaagtaacccaagtcctcccagtgcctttaagctttcagctagtaaaattggccaaacactttgctccacgatattctgactctctagcacagggagtatgaccaacagggggacaactgcaatgtcctgcaggaggaggattcccagtgtagctgaaccaaatcgtgttggaagttcacctttctcagcaagaagctgaagaacaaaagcagatgaagatagtgagagtgcagctccaattactattgcttcgtcaatacttctgatgttcaccagatcaggccttgaattaaataggaactgcaagatttttgttcctatggcaccgttaggagggagctcgaacgccgtgaaagcgagggttgacagaagaacctgaggcaagcccatcccgaaggcgaacctcgcaagagccttgagacgagacagggagagctcaagccccatctcaaacagcaggaagagaatccccccactcggacaggagcttgacgtcggtgaggttcctgatg

SEQ ID NO: 28030 - DNA, 1722 bp, Setaria italica
  Peptide Sequence Number=SeqID_94004
ccgggagtggcctaatgttctatcactgttggaggtcttattgcaatcaagacattgataattaccgcaattgggccaagagttggattgactcttcaagaaagtgtaaggataggattgctactttctcaaggaggcgaatttgggtttgtggtgttttctttggcaaacaggcttggtgtcctaccacttgagttaaacaaactgctcataattgttgttgtgctgtcaatggcattaactccgctactcaatgaagttggaagaagagtagcagggatcattgatgaaaatgctgaagaaaaagaaaaacctgccgagatggtgaattatggtgccactgaacctattgtaattcttggttttggagagatgggacaggtccttgcaaattttttatctgcaccactatcatttgggcttgaccaagacgcagaaggatggccatatgttgcatttgatttaaatcctgctgttgtaaagtcagctagaaaatcaggatttcctgtgctatacggagatggttcacgccctggggttctgcaatctgccggcataacatttccaaaagctatcatggttatgtacaccgggaaggaaaaaactattgagtctgtaaacagactgcggcaagctttcactgcggttccgatatatgctagggctcaagacctctcacatttgttagatcttaagaaagcaggggcaacagatgttgtcctagaaaatgctgagactagcttgcagttaggttcgttacttttaagaggattgggcgtcatgtctgatgatgtatccttcttgagtaagcttgtgagaaattcaatggaggtacaagctcaagaagcactaaaagacgttggggacaaggaacttgatatcatgatgcctcttcaggtaagagtatcagacttagtggagagcgatgggaacggttcaagaatgatagcccaggagcagtcactaagcttaagtagccgcccaaatttaaacataataaaaccacctgtggggagtcggatacctgatatgaaggtggaaaaggaccagccaggatatgactttgatgggatagattctgcagatggtgtgagatattgtctattggaagctgatgacgaaactgatgaagcctccggtgcaagcaaggaaatgattgatcaatctgcgtaatggcaaggaacatgtcggaatgaagataggaagctagtcaatttgaactgctaggatcaagttcataggtaactcctaggccgatcagaagcagcacttttatcgtgcagctcctgtggcttccatgcatcagaaccgaagacttaagagtttgtgatttatggatctccattcattaacacagtcgcagatggggatcacttcttaagaccgaagtatctgaatttatgccgtgacaaatggattaccaatcataaacccattacagatgaagaaatttatatccgacaaattgacgctgggaagcatgcaacttgctaatgcagctgagcgcacgcactcggcaaatgtcagatcgggttattgatgtttcataattcataatagcattttccataggacaatttgtgcatgtacatgtatcatacattatgattgacagaaacattcttgtaccatatctgcaccacattacttgtgtataatagaccttacattccagtagcaaaatttatatacatgaaaaagaaaaactaaaaaaaaaaaaaa

SEQ ID NO: 28031 - DNA, 2022 bp, Setaria italica
  Peptide Sequence Number=SeqID_94005
ttctgagaagcctccaggctcggcggcgcttcccggcggggccgccaggccgccgtcctatgggttcgcggagaaagctgtcgtcctacgcggggaggacttcccgtccttgaaagcagctgttgccccgccaacacctccgcagccttcgcagcggcagaaggatgctgatggggcacggctggccacacctgaggcgcggcctgggccccttgggatgcggccgcaggtgacgtcctcacgggcctctgagccaccggcctcttctggtggcttgggagctggtggccgtgcttctgctgagaggccgcagaagcctgatctggggccgcttccgatggtccggctcaggtatgattctgactgggctgatgacgagcgtgacacggggctcagccttccagagcgggacagcagggagaggggatttggcagaactgaggccatgattccaggacgcggcctttacggggcagtgagggagccttcaaaaaggagccatttgggagagatgtggttgcgacaaataaagaggttgtccaggacgggttgtggcgatctcctatgttgagtcaacatgatagagatcgaacagacggccgaccgtacagtggaggcagaggaagcagtggacaattgtatcgggaaagcatagctgctggtggctccaaggatttgtggagtaatagtagggagcctcctatgcgcgccaatggacagaatggggtcgaactgtatggaaccacccgggttggggaaattgctagtgaccgttatggtgacagttcaaataattggcctaggttgaattctttccagaacaacattggttctaaggcgcagccttttggtggtaataaagggcctttaattaatgatccagtggcaaagtttggtagggagaagcggctcacttcttcccctgctaaacctttaatagaagacggcggcttcgattgcatttccgccgttaacttgactgcaataaagaagaaaaaaagaagcagctaaaccagctgattttcatgacccagtaagggagtcatttgaggcagagcttgataggatcttgagggtacaggagcaggagagacaacgggtaatggaagaacaggtgagggccagagaaattgctcggaagcaagaagaggagcgggagaggctgataagagaagaggaggagaggcagcgtctggtggaagaacaggcaaagcaggctgcttggcaagctgagcaagagaggcttgaagctgccaaaagagctgaggagcagagaattgccagggaggaggaaaggaagaggattgccttggaggaggagcggcgtagggaggcagcacgtcaaaagctcctagagttagaggcaagaatagctaggagacaggcagaatcaaacattggaagtgcaagaggtgggcaactcacttcagctgtcagtgatgaattgactcctggaggcttcaaggacagggatttgccacgctctgctaacttcgttgacagaaaggatatcgacagaatgggtgagcacatcaatacctcggctccactagagtcctctagtcacaacaagtacaatgagacagttccaagggtgcacacacttagggatggaccctcttcatttattgatagagaaaatgcatactatggttcaagggctgcatttccagaacaagagaatgtgcatcacagtccacggcgtgacccttttgctgcaaggaggggaaatttccctaagaaagatcttaatgatggatttgggagtgtgccggttaggccatcttcaagaggccgaacaactgactctccctgggcacttgaagacttccgtcatgaaaaggttccacggtgggatgcacctagggagattgaccgttttgaaaaacaatctgactttgacactgagctttttaacagcgacaggtttggagatgcagcttggctgcctagtggttctcatggaagccccaatgctcaacaaggagataggatgtttcagagttcagattttaatgaatt

SEQ ID NO: 28032 - DNA, 791 bp, Setaria italica
  misc_feature (37)..(37): n is a, c, g, or t
  Peptide Sequence Number=SeqID_94006
gcctttggtctagttcttctttagttttttttttttnttttttttttttttttaagtgttaagaaagttacagtctggatacacataatcaattggggaaacttgcagataagtttcacaatatatacttacagttaagtgtcagttccaaatgaaagagatcagaaatcatgggacatcaggagcattaactgactgggtactccagggttacaccttgattctgatcttcagtcatccaagctgaaaaaatgatgatgctgaatgcatataccattcaagaaaccaaagccaattacaatcttatttctcgtcgcaggcgtgcatatttctcctgcatcctcaagagctcccttgaaagctcttgattcccagtcagcattaatccgttcagtacacgattgaacataaaccttctaggcaagtagcctctatcaaccatatccaccaccatcctcgcagccactgccatgtcctctgccctcttacgcacaaacattgcacttattatgatgttatatgtgtcttggttgggcaagcactccatccccttgctcattctctcgaacaaatccaatgccttctctatttccccttcctcgaatgaataccttataaggacattgtgtgcctgaacgttatgctcgcaaccttcactcttcatcctctccaaaagcttcatagctcggtcaatcttcttggcgtggcagaggcctcggatcaagacggtgtaagtaactacatttgggacataaccttttccaaccatatcatcaaagactgccacagca

SEQ ID NO: 28033 - DNA, 486 bp, Setaria italica
  Peptide Sequence Number=SeqID_94007
ctcctttgttctaagagcagctaagccttatttggccactataggagcaactgttcatggtcagtatggaaaaatcctttacaaaggagataggttagttacgtttatatatgaaaaatcgagatctagtgatataacgcaaggtcttccaaaagtagaacaaatcttcgaagcgcgttcaattgattcactatcgccgaatctcgaaaggagaattgaggattggaatgaacgtataccaagaattcttggggttccctggggattcttgattggagctgagctaaccgtagcccaaagtcgtatctctttggttaataagatacaaaaggtttatcgatcccaaggggtacagatccataatagacatatagagattattatacgccaagtaacatcaaaagtaagggtttccgaagatggaatgtctaattgtttttttacctggggaattaataggactattgcgagcggaacgagcagggc

SEQ ID NO: 28034 - DNA, 702 bp, Setaria italica
  misc_feature (697)..(697): n is a, c, g, or t
  Peptide Sequence Number=SeqID_94008
ttccttgcttttgagaatttttttccgtttgaacataaacccaatttttcttttttttttgtattccttagaatctttttttttcttctttctggtggtatcaaactgccacctaatatcttatccgcctcttcaggaaaatgaatatctccggaaaagattttgagttctgtatggcttttttttctcttcactcggaccaatccacctagtcgacttcttgtattttttgtgagttgtgtatcgactccaataatactattgtcaagtacctttagggatgaggatctcggcaagatatgcagttcttgaagaatgaaaaaaaactgatctacttctttttggtattttagactaaattcttttgttcctcgatgctcaataaaactctctttttttaagatggaatcttcctccgggctcccatattcgtcttctgagtcttcctctgagtcttcttctaaagtcccatattccttctctgagccatcttcagagctcccatattcttcttctgagtcgtcctctagagtcctatatttgtcttctaggatttcatatttgccctctccctctcgggtcttatattcgttctctgggctcccgtattcttcctctgagtctttctctagaggcccatattcgtcctctaggatcccatattcatcttctagggtttcatatttgccctctcctntcggt

SEQ ID NO: 28035 - DNA, 606 bp, Setaria italica
  Peptide Sequence Number=SeqID_94009
taatatcttatccgcctcttcaggaaaatgaatatctccggaaaagattttgagttctgtatggctttttaccgggggaattaataggactattgcgagcggaacgagcagggcgggctttagatgaatcgatctattatcgggcaatcttattgggaataacaagggcttccctgaatacccaaagtttcatatctgaagcaagttttcaagaaactgctcgagttttagcaaaagctgccctacgaggtcgtattgattggttgaaaggcctgaaagaaaacgtagttctgggggggattatacctgttggtaccggattccaaaaatttgtgcatcgttccccacaagacaagaacctttatttcgaaattcaaaaaaaaatctattcgcgtcggaaatgagagatattttgtttctccatacagaattagtttcttctgattctgacgtaacaaacaatttctatgaaacatcagaagccccgtttacccctatttatatgatttaagtcatttacccccatttatacgatttaagtatacataaagctattttttttttactttaatttaaactatactttgcccttagaatgctaacagg

SEQ ID NO: 28036 - DNA, 390 bp, Setaria italica
  Peptide Sequence Number=SeqID_94010
tgacggagagtcctcttgttgtgatgtttctcttccagttgtatgcaaagcttgtgcagacaaatatcccgaacttgctgccactcatggtgtcggccatctctatcaagggtccagacaaggtgccaccacaccttaagacaccctttaatgatttaaagggtgcacaggttaagaccttgtcattcctgacatacctgctgaagagcaatgcagattacataaagtcatatgaggaaagcatatgcaagagcattgtgaacttgcttgttacgtgccctccagactctgtttccatcagaaaggagttactagttggtctgaagcaagttctcaacactgagtacaagcgagggctgttccccttgattgacacactccttgatgaaa

SEQ ID NO: 28037 - DNA, 321 bp, Setaria italica
  Peptide Sequence Number=SeqID_94011
tcgaggcgcgccggggcctccgacgggcgcgccggccatggccgcgcggggtcgcgccattcttggcctggcctgtggtcggagcagccgcagccgcagcgccatggccacggccaggaggggtcgcagcagcagcatcaggggcggtgggcgaacctaccgccggaactgctgctggatgtgatacagagggtggaggccagcgaggcgacgtggcctgcgcgtcgccaggtcgtgttgtgtgcgcacgtttgccgttcgtggcgcgaggtcaccaaggaggtggtgaagacgctcgaggagtgcggcaggatcaccttt

SEQ ID NO: 28038 - DNA, 763 bp, Setaria italica
  misc_feature (1)..(55): n is a, c, g, or t
  Peptide Sequence Number=SeqID_94012
nnnnnnnnnnnnnnnnnnnnnnnnnnnnnnnnnnnnnnnnnnnnnnnnnnnnnnncctttagggaactgccattcctcagttctcatggcaaaacaagcgtgtgcttacaattacaagtcattacaccacacttgcactgtgagcaaaagggttccccagttagaatctataccacaaagctgatgaattgctcacgggtagtttaggttggcgcgccaccctaaagaaagcaatacagcaattgcaagagaacgtactgaaagtactaaagtaacatccagccacccggcaattccaactcaagttacagaacaaacagttctaaacaaccaccaagtgctagaaccacgatcccagagcaatgcagaataagtaatcccgtttgcaatattacagcaaatcctggaagatgtgcaccaaaatgttagcacaccaaactgtgctcattggtcagcttcaggcttgcttgcatcaccattgcctgtgtggttttctggcgaggctgtctggggttcctgctgctgctgtcccgcgcttgtacttggttcaggatggaagttgatagggaacttggtgacgcggggcttgtccgccaagatatttctctgcacccggtcaattagcacctttgctggaggctcttctctcaattgctcatcgtcgtaatcattgttcacatagtaacctactctcatgaactcctggcccatgtaagagcatgtcaatagcagcacggtcacaccaattatgtcttcctcacgg

SEQ ID NO: 28039 - DNA, 4930 bp, Setaria italica
  Peptide Sequence Number=SeqID_94013
ggcccaggcggacccgacgggccgccgagcgagcgagtttgaaccgtcggatgagaaacagagggctagatgaatcttcgtggctgacgagtgatgacgctgacgataaacgggcaaagcgattcacctgcctaacgaaaaccaacgagaagttacagagttttgcacaagagtgacagcaaagcaacgacgaccatcagccacggggcacaaaaccgtaactacaaactagctagctacggcagacggggtaacattcaccagaatttacagagtttcgtcgggaagaggcacaggtcgggaaatgcggcttctaagtctaaatgtttgtaaatgtttgcctctccagacgaggtcaggggaagtattcgactgcggctagcaagggaatgctcagtggagaggtctggtttgcatagcaagaatcagtcgttcagatcgggccctgtcgaatcagggtccggagccacttgcagggccacaactggagatgcaggggtcgaatcaggccccttggccagaatcccaccattgtcggttggatcttgctcgggggcctcttctggtgctgccgcagctggagaagccggatgcgtcgggtcaggctgcttctcctggatcccagcgtcaccggttgaatctggctccggagtctcttccagagctgatgctggagaacccagagtctcctgttgaacctctgatggagaggctggagtcacttgctcggtctcagccgcagcagacagtggaacctctgctgggggtactggagtccattgctcggtctcagctgcagcagacggtggagcctcagccggagcgcctggtgccacccctccatcagctggtggtgcttgcctgcgacgcggcctcagatacttcatgcagaatgtgtcggcatcctccttgaagctcttcctcacaaagttctccaggcacttgaagtaggagaagtctgcacgggatccatctgtcgataccacatagaagcatcgggtatcctggaaggtttcgtgcttgtcgaccgttatatagtcaattgcactagacacctttgattgcttttcagggtggttctcaagaactttctctaggatgaacttttcgtcctctggttgaagtctaacaccattacatgcttcacggaagatccttctgacacgcatcataatgggttcaatttcaagtagaatgtttttctcctcagctgtcagttcaaaccgttgtcttggtggaggcgggcccctctcatctggtccccttgggggtctcccagaattgtttctttggccgctccagttaccagatttgccaccccatccttctgatttccagcctttgttgtcaccagaatcagttgtctcattacatttaccctgtgagttctcagcaggggcagcgttccagccatcccaagaatctgattgcttcgcatctgaattgcccgctggtgttgcagccagattaccccaggagtcctgtgcatcagaagtcgggaccttttctgctccattgtcccaggaaccattctgcgtgtttttattctggactgccacattaccccatgaatcttgctgtgaattggtatcctttacagctatcttgtcccaggaaccctcctgcgtgttattattgtcagctgcactgttgccccaggaatcctgcagtgcatcagttttctcccatgaactttcatttgatttccctgtattccatgggtcgaattcttttgggatttttgaatgctcatcagtctccattttatctttgttaccccaactggatcctgcatcagacttggtaattgatcttccaaatccctcgccagcatcccaagcattgtttgatggtgccatagccatgttatcccaggaaccagcatcagcatttgtcctcttccttttgtaagtgctggcctgctccggccatcgactgtcaccagcatgtgaatttatttttttcccttgcatcgccccacgagtcctgatctacattcaacatctgctcattccaactgctgggctgctcctcccagttgccatggacaccatcagacttctttttgtcccacatattgcttgatggtggcattgtcttcttaccccaagaatcttgatccacatccatcccttgttccttgcaagagcctgtttgcttctcccaggcaccatcacctccatctcctttttgttcgccccacgtattttctgatgctgatgctgatgctggtgctggcatgttgccccatgtgtcatgatccaaatttttctttgatttctcaggagcactggacttcatctcccagttatcatcacctgcacttgattccattccagcacccttatcagcccaagtattaatttcagcctgttctccatttgtctgcttctcagtgccccaacctccccaatcagtggaattgttctccactgttgcatgcgcatcccagcaagaattatcttggtccagtggtttggtagctgctgcagctccattactccaacctccccagtcaccagaatcattcccagcacttgcattttgttcccaactcgagttcattgttgtgtcattttcccatgagctgccattctggataccttgctcttcaacattatcctcaaaggtgggtttaccatgggtcccatccggttcaggagataagcatacatcatctactgcattctcttctacaaggtagtcgacgtcatccaagaatgcgtaccctgccttttcttggtcggtcctgaccaaagctaagaaatcatagagaccgtccccatactctttgttgcttttcagctggttttcattccaaagaatctgaaaagatgaccctgtaccgattgcagcatgcttgccccatgagcatgatgaaaccacacatcccaatgaatcagaatcacatttttcggcagccttctcaaagcatttcataggggtaaacaaagtggactctgtgaaaggcacttgaacttttaatgaacggaaagttgccttatagccactagtattgaacccaatcaagtttccagtgcatgtcatgctgtttgccacaagtattaaatggtccttgagaactcctttagcaaccatttttacagttgttgaaagccgctgcacaacttgatcaaaggcacatgagatgccaagaagttccttcacttgttgaataccataaggaatagaccttcgtgtgtcaatgagattaagaacaggtatgcaggcatccattactgttctccaggcatagccattgcgtacagcttcatctttttcaacaatgatttctagcgttggctcgcccttcaatgtgttctgtgtgttctttacccaagaggtcgcttctgattcaacccagatgattttagctgattgaattcgagggtcaccttttataattgtatccaaaagcactgaacagacagagtccgcaatcacatttactgctctctcaacagattcagataatatggtgttgtcatcagagaaagagaactgcacacatggagccacatgtaggtagccatcaattgtattctgtgcgaatgaacaatcacatgtagagaacgtgatctttttgaacaagtggcaaagatgtcctttcttctttccatatctcccagaaatttcttcgcatttttggagaatgtcttgagtactaatgtttatcctttctaactgtgccttgtcgaggtgaatgtggcctacaagagttggggcagcttcagatgtttcatctaaatttatttgcttctgatgctcaatgctgatatcagtagcgcaatccgctagtgtgactctcctaagacaactttgtactgtaagagcagccctttccttgcaaaacttcttgggacaagagcagtcattcagaaataggataactttccgatctttcatatcatttttgtagccaaccttcgtctgaagtatctccttcattgactcccacgaagcattgttactctgagacgaatccaagacagccctgtatgcaggtgtcgagatagctgtggcggctaagacacccacaggttcaccaggaggtaaggcacttgggaaatctgtctcatcatcttccttgtacttaagctgtatgattgagttgctgcaggtgttcctcacagttccatcatagcatataactacatcccgcaagatggccattaaattcttgaacagagttccaggttctgttaaccctcttgaggagcggacaatagcttctcttgtggaaatagaatgtactagctcctcataaggattgagaccatgaaaataggaactttgcacaagaccataagcctctggaggatgctcatctccaatgtctgagtgtttattcacaaaatttgagaagcaatcctcaaccaggcggcttgagtacagctttccttcatgataaagttgcaagccaacaaaacccagttgttgaactacttttgacatagaagcttcctttttggatcaattagcaatccaaggtcagagcacttgatgacaaactctgaaatctgttgtttgacacccttcagattgttttcaacccgcatctctgcaatttgacttttagagaaccttgactgctcaaggataagggactgtttctgaatgtttttatgtacctcttccaatatagccttgggaacattaaaatctttcagggtcacactaaaaccatccagaagtagaaactccatcagcaatggctgcagcacattcaaaaattgcagagcctctcctggacccttctcagaaagaacagaggacaccaaatcattgaatgagtcctgaacatgatctttgtcaagatccagctttataatgttaccgtccctcactaaaatgtgtttttcctaggtaccaagtaggtttaggtaagactagactagacaagactaccaattaactaccaaacctacca

SEQ ID NO: 28040 - DNA, 511 bp, Setaria italica
  Peptide Sequence Number=SeqID_94014
gcctacgcgctgctcgtcctcctcgtccttgccgaggtcaccagtctgctgcagaacgtctggaccgctcgccgggatctggcggaccagtcccctgctgccgctcgtgtctacggcgccctctctccgcccttctacgtgctctacacgctggtcaggggcgtcgccggtccgctcttcctcctcaagatgaccgtcttctacctgtccggccaggctgtcgatgtcatcccgtggtgggtgcggatctcttggattgttgttgttggcaccgccattgcggtcagcaacctgtggatttggaacctctggaaggagctattcagggaacggaaccaagctatttcaaaagcaaagaaagacacataggtcaggtcgctctaaccatgtactggtgtaccaaccatgtagcagctgaatcattccaaactgccccgacaatcgacatggatgatgaggaccatgattttgattagatggtaaatgctgaatcttaggatgacattggtgg

SEQ ID NO: 28041 - DNA, 1381 bp, Setaria italica
  misc_feature (1379)..(1379): n is a, c, g, or t
  Peptide Sequence Number=SeqID_94015
acggtggtgtgcatggacccggagctgaaccgccggacgctggccagcgagggcgccggcttcgtcccgggctacccgcagtccatgctcgacatcctggggcccaacaacatcgccgccgtgcacggcccgctccaccgcgccatgaggggcgccatgctcgcgctcacccgccccaccatgatccgcgccgcgctcctccccaagatcgacgccttcatgcgcgcccacctccatggctgggccggccgccgcgtcgacatccaggagatgaccaaggagatggccttgctctcagctctcatgcagattgctggcatctctgctggcccactctctgatgccctcaaggcagagcgtgtacacccttgtacttggcaccttctccctgccaatcaacatcccaggaaccaactacagcaaagggcttcaggcaaggaagaagcttgtggcaatgctgaggcagatgattgcggaccggaggtcctctggttgtgctcaagatgacatgctggatgcgctcttgagcggcaacgagggtaccagggccaagctcaacgatgaccagatcattgacctgctcatcaccctcatatactctggatatgagaccgtgtcgacgacctccatgatggcggtgaagtacctgtcagacaatccaaaagctcttgaacaaatcaggaaagagcaccttgacatcaggaagggaaaatcgccagaggatgcccttgactggaacgattataagtcaatgaccttcaccagagctgtcatttatgagactctaagattagctacggttgtcaatgggctactgaggaaaactacccaggatgtcgaaatgaatgggtatgttattccaaaaggttggagaatttatgtctacacaagggagataaattatgatccattcctgtacccggaaccgatggttttcaacccatggagatggctggagaagggcctggaatcacatccccacttcatgttgtttggaggaggcgctcgtatgtgcccagggaaggaagtaggaacagttgaaattgcaactttccttcactatttcgtcacgcgatacagatgggaggaggaaggaaacaacacaatatcaaagtttcccagagtggcagctcccaatgggctacatatccgagttcaagattactgaacttgcgagacattttgcaaagtttagataggatttagactcagatagaataactctgcgatgctgttgctgctagcttcttgtaaagattagaacagccattggtgtccgtgccaataggaatgttatagggagggtataggtatcataggtttactaggaaattgattgttagtaaagtcctattctagtattgtcttcctagttattntt

SEQ ID NO: 28042 - DNA, 526 bp, Setaria italica
  Peptide Sequence Number=SeqID_94016
gttcctgtactttagattctcgtttccatcagaaagtgatgataggtcatgtgctttgaagtaatattctttgaggcgagctgactcaagttgccgcagaacagaacagtacgacgaattgagccacttgaaattgtctatgttctccacatgaacagtagccagctggggaggatgagtaatgaaccacatcttcatggctgcaaaattaagtttgtcggtgacaatgtggaacacatgcttctctggtttattggcatttgtcacagttgatctgacaactactgaggctgcaagcacattatcagaaaatatagcatagtgatagagtgacctatcctcaagctttgctatattttcttcctccttcaaagcagcatcatgaaactgctccttggtcacaccatcacgaaaatagtaatcggttgtcagctgcatatgcaggcagtgcaagggcatggggacagtctttgcagcatgctgaaccaggaatgaattttgtttcttcactgcatcgatatttagt

SEQ ID NO: 28043 - DNA, 288 bp, Setaria italica
  Peptide Sequence Number=SeqID_94017
acaaccaacaacgaactgaatgaagaaagaaaaatctgcaaggttccctcggtttcgggggaatctgaggctctgatctctgaactccggaccgaacgcttctgctacctcggatcacttccatggccactcgcttgagctacagatacatctggtgctctctccactgaggtaaagaacacggcgcagagcacggtgagcgccaccgccgggagcttcccggccaacgagcccggcgaggatgaccggcacgaacgcggccagaggcaatgcacccgcccccttcgg

SEQ ID NO: 28044 - DNA, 179 bp, Setaria italica
  Peptide Sequence Number=SeqID_94018
atgtccaatcaatgttggacctctaattgctatgctgtaacaaatggaagctacttttcctttatatatatgaaccgtgtagaaaaacaccctccacccccatcattagtgacaaggtaagaccataagatgtaagttacacgattatgatgcttcaacttgataaacagtgctgtact

SEQ ID NO: 28045 - DNA, 534 bp, Setaria italica
  Peptide Sequence Number=SeqID_94019
agaatagttaggtacaaagaataggtttagtaacagctaaaaagttccatcactaatattgttctttgctgatattattaatttttcttttctgattgttagtgaagtttggccaaaaaagagaagctcttgctgtcagaaaaaaatctaaaaagtccatcactaaattgaacatttttggggctggtttagttagattgagatgttgcaaaaatcatttgtaccagaactatcctggttcttgttgttaaagcatttccaaagttcctattttggcctttactattttgatcacttgctaaccttcatgtttacgttccaaatacaaagactgaattctcaatttgaaacatcttaagctgggccctgtttttgagcctaaagctgttttttttcttcttctagaattgtcatgttctttttttagccccgaattgagaacatagcctggatgccaatcagcttctttaattgttctgcttgatcattacatcaaatctgctgattgctagttctaaaaacaaatagatatgc

SEQ ID NO: 28046 - DNA, 479 bp, Setaria italica
  Peptide Sequence Number=SeqID_94020
gcgggggtcgctggggtcggcggcgagttggctggcgccgcgggggtggccgtgggcgcgagcgctgccggtgtcgtcggtgcagcaggtgtcgtcggcgcagcaggagtcgtcggcgctgccggtgtcgtcggtgcagctggtgtcgtcggtgcagcaggtgtcgtgggcgcagccggtgtcgtcggtgcagcaggtgtcgtcggcgtcgcaggagtcgtcggtgcggctggtgtcgttggcgctgccggtgtcgtgggcgcagccggggtcgtgggtgcagcaggcgtcgttggcgactgcgccacggcggcgccgaggtggagcgcgaggacggcggcgagcacggcgatgcggcgccattgccggagcagcggcggcgcggccatgctgttggcgcggtgcggatgccgagctagctcgctgacgggaatgcggtcgatggatctcgcgcgacgacatgaagcaggtcgccggcg

SEQ ID NO: 28047 - DNA, 472 bp, Setaria italica
  Peptide Sequence Number=SeqID_94021
acgggtctcctagttggtgattctcagtgtctttgggagcttgattggcttcgtcttccttccgctgcctctactagtcttgtgggctcagtcgcttcttccacgtcatctacatcgtcgtttgctcagtggcatcatcgtctaggacatctttgtggcttgcgtttgtctacgctagttcgtcgtggtcttttagggtcgtcgtggtcttttagggtcaatttctggtgatgtatctttggatcagtgtcaaggttgtcagctaggaaaacaactattcttctagtgagtcggtgtcaaaacatccttttgatcttgttcattctgatgtatgggtccggctcccttcgtttttaaagggggtctatcgatattatatcatatttatagatgatttttctcgccacacatggatctattttatgaaacatcgtagtgaggctttatctctctataaaaattttgccaccat

SEQ ID NO: 28048 - DNA, 628 bp, Setaria italica
  Peptide Sequence Number=SeqID_94022
ttcggtccctactacctaccttccccttgtattgtaattggtaaagtaaagtccccttgtctaagcccgtgcacctagctacaccacctcaagcaccaaaacctcctggaactgtacctccaccacccccaagcacaaagatctcaaacgcagcagcgccgccgcctccattattaggaaggggacgaggcaacactactggatcaactaaaggccgtggcattggattggcgcagcaaagtaaccctcccaaaaaggcttcactaaagcctctgcattgggtgaaagttactagagcaatgcaaggaagtctctgggctgatgcccaaaaacaagggaatcaggctagggctcctgatatcgatttatccgagctggagagcttgttctccacagcaagcgtaaccagcacaagtgaaaagggggcgacaaaacgtggttcagctattagcaagccagaaattgttcacctggttgacatgcggcgggcaaacaattgcgagattatgcttaacaaaaattaaaatgcctctacctgatatgattagtgcaatcttagcttggcctccacacgtggaactttcattagctccaggaagaactgttcgcatttcccaagcatttcttt

SEQ ID NO: 28049 - DNA, 1415 bp, Setaria italica
  Peptide Sequence Number=SeqID_94023
ttttttgaactaaaatgcctctgatttgtttgttcctcggtaatacagtaacactgtacaagactcgtgtttattctcgggaaaaagaaaaaaaagaacactcgtgttgtttgcttcattcccgcgtggggccttggactattttatgtacaagtaagacagctataccccagtaactgctatatttacatacaaaattacagcagccgtggcgtccgtacgtttgttcagtcatctgatgtccataagacaggacgtgcgcacagagagctccaaaatcttggcattcgcaaaggcaaccatttaacagatggcgaccagctagcgagattcctgacaccacacctctcatatacaaaatattttgaagctggttctgcagtgccacatattatgcggccggtccttgtaaaatagtccacaattagtctcattccaagccttatttagcagacacacttgccttttccttttccttttccagtttctttttctcagcctccgcatttcgagcattttcgtcacgcgattttttgaacatattcacgaaaataaccaaaattgatgtcacttgctcgaaagggcagcgtgcaggatcctcaccaaaatactgagctagggaatcagcattccttcccacttcagcatacagggaaattagggacctaacctcagcttctgctgcatcaagaaagcttttcaatgccttacgaaagccaattgaaattgcaccatcattttctgaagcagctaactcctgctccaccttctcaagacctttgtttattgcttgcatttcttccgcaagcagcttcagttggatcttagaagctgcttccaaatgaattaggtctttgtcaaaatcaagaagttcaggcattttctcagcaagaagcttgcataaataatgcatcagtgtcatcttattatttctagctcgagtatccgacagtttaagaaggctgtctaatctgaatccaacagcagatcctcgtgctgtcccttgattcaatgagtttcctaatgtgagaatggtctgcattatctgccgtaacttcaaagactctttgacctcctttgttgcgtcgtttatggtggttaggttagttcttagatcatctacctgtgttgagaaagtaattctaaaagcaaaaactcttagcttggcctccacacgtggaactttcattagctccaggaagaactgttcgcatttcccaagcatttctttgttgccattataaccctttaacatctcaatctcttcctttgtagggcaaaatttaatgagattttccacttggtcattatcaagaacagaagaatccaaagccaagattgcactaatcatatcaggtagaggcattttaatttttgtaagcataatctcgcaattgtttgcccgccgcatgtca

SEQ ID NO: 28050 - DNA, 423 bp, Setaria italica
  Peptide Sequence Number=SeqID_94024
ttccttatttactttcttacttaattggttagtctaattcgtaagtaggtatgcacccatttgtacttctgcagaagtgagggatgaaaataacagtttatgtcgccaatctccaaataaatcatgatgcagtgtctatccggtcgtgctttcttttgttaggcctggagaaaaaggcagaactgagcccaagtcttctttgtcttcgtcggttgtgaccttgtggctctcttggcaacatgttcagtcatgtattgaacagcagcctacaaaatatgacaaaaaggaaaagaaaatgccaatgaacaaactctgacagtctggcaaatggccgctaatatatagttcaagaaaagaaagtaaaaatcacctgagctccctttaaagctacatctcttggtggcacttgtagagggttctctt

SEQ ID NO: 28051 - DNA, 2129 bp, Setaria italica
  misc_feature (1)..(34): n is a, c, g, or t
  Peptide Sequence Number=SeqID_94025
nnnnnnnnnnnnnnnnnnnnnnnnnnnnnnnnnnttttttttttttgttcttttgtctagtttgttgtgttttctgaatctctccagaaggattgtacacttaaataagttacaagaaaactgttcagaatgcattgaacagtaaggattacaaaaaggaaataaagttagaccagcatatccgtaagactttgactgtactaattctcaatccaaccatctggtatcttgcggatcttggtcctatcttcgaaactttaaaagaacacattgtcaaagaaagaaagaaagaaaaatgctctccaaaagcaaattctataaaaaaacaaagtcttagtttcagtggatgcatgtatatttttcatattgacaagttgcgcggcaggctaacgaaattcagcagccttgttctctttactcagctgcactcggccataaaaaaggccgagtgactacacaacttctggattctttagctgaagtagggatcttccgggggttattcgaagttgagttggcctggcggaaaggagagtgagcaggtttatgaaacctgaccattttggtttgacagaagacagctgcagcattgttgaagggaaagctctgggcatcacatcttgttgacccatactcacaatggtagcaatcgaagaggatgcacccatttgtacttctgcagaagtgagggatgaaaataacagtttatgtcgccaatctccaaataaatcatgatgcagtgtctatccggtcgtgctttcttttgttaggcctggagaaaaagcagaactgagcccaagtcttctttgtcttcgtcggttgtgaccttgtggctctcttggcaacatgttcagtcatgtattgaacagcagcctgagctccctttaaagctacatctcttggtggcacttgtagagggttctcttctgcgcggagaacacggagacgctgcagatttccaaaagaatctggaaacaccctaatctgattattgcttatatccaactcttccagcatctcaaggttgccaatggaacgaggcaagtattgcaggtcagcgaaattgttcccgacattcagtttaacaagagaagtaacaaagcagaagttctcaggaatagactcgagctcattgaaacttgcatcaagctccttcagctttgtgagagatgccattgttgttgggagccccctgatactgttgtaccgcacagagagtatctccagagactctagctttccaacagcctctgggagggccttgaggtgattatagcctgcccgcaattctaccagtgaaacacactgaccaatagtgtatggcagctcatcaaggttgtttgtctcgacgattaacttcttcagacgtgcaaggctccctattgaatcagggagtgaggtaagatggttcacactcacatcaagctcctcaagctttaccagcctgccaagagtagagggcaatgatgcaagctgattacccctcaggtcgagatatatcaaattgcagagatccccaatcgactccgggagctgagcaattcgattggaatgaaggtccagcttggccaaagaagaaagtctcccaatagcatctggcaaagccaagatccgattctccgaaatatcaagggtaacaagcccagtgagctttccaattgaatcaggcagccattcaatctggttcatgagtttgccttggaggttgagatcacgagagcctttctttgcagcaacttcaatcatgctagctagcttaatgagggtcaatttctcatcgttgtctccgtaaccgccatcccctcgagctgccaccaagtttgctgcaacagctcctcgtggcatatgagagcccgctgccacaaccccgtcatcccatactgcggccttggccttcttgacgtagctgtcatccatggagacgcgccccgtgcccgttgccgtcctcgccgcactgaacccattagtgcccgtcgaagagtagcggtcggcgttgctgcccgcagccaccgccgccgacgacgacgcggaggacgaggccgcgctcgcagctgccgcggacgcagtgatgcgcggcgcggcgcgggtggaggtggagctggatggcacgcactgcgacgcgcgctgga

SEQ ID NO: 28052 - DNA, 501 bp, Setaria italica
  Peptide Sequence Number=SeqID_94026
agtccagaggaagtacccaagcagctgagacctcactgcaaactctatcttgtgctgcaccacctgtgcactgtcgaagctgacccagaggtcaccgttgtagaaatactctgccactgactggttgtcgtacgtaacaacggtgcttgcagagttcatgtaatcttcaacctctgtatacgcaattatcccggtctggttgctcttcctctgttttgtcccagcagctgcagttggtgatcctattccattcttggccttgtttctgaggaaccaggaccttccaaatagaggtatacccatcaccagtttacatggtgggagtccagcatccagccatgagatgaccccgtagctcaccgagaagtgcgaggttgtgtcatatagaggtgcgtcgactgtagtgacattgctgcccccatggaaaccgaaggtgagaatgttcacccagtcgaggttgtttgagatgtcatctattgggtagtcgagattgctgtcagg

SEQ ID NO: 28053 - DNA, 184 bp, Setaria italica
  Peptide Sequence Number=SeqID_94027
atgacgcctatcataggttgaaagtgaatgagtgaatccaaaagtgcaaggtgttaaaactgatgctactgtaaggttgttttcctgttactggaaaaacaagtagtactagtttccattgatgtttcacatgtctctaaagatgtgtgttcatacctttttttatcaatactcaaaagttgaa

SEQ ID NO: 28054 - DNA, 426 bp, Setaria italica
  Peptide Sequence Number=SeqID_94028
tagtttttttttttttgtaaactattgtacacacccaaactatcacagttggccgcaacaacacactgtttgggaataaaactgtggcagcattctgcagtagtgacccagcacggctttgtctctcatgcagactaactctgctgccctatacatataactctgcttcacaatgtatgtccagtccacatacttaggaggcatagaattttgttaagattaaatggaattatgtcaaatatgtactcgttgggtagatcgattcatctatctaataagactagaaatgatagaattttataaatatttgattacctgacatacaaatctacaagacatcttatattatgaccagagacttagcatttccattttacactgatcctttatgtcataacaatatcatattattacaatgtagtgatg

SEQ ID NO: 28055 - DNA, 654 bp, Setaria italica
  Peptide Sequence Number=SeqID_94029
ctatcttttatctgccggaacacatcagagaccacaacagtagtcctgccatcacttgactccagagtaataatctgattactgaacatcattgcacggcctgacagtacaggcgagatgtctactatggagaactccattttgcgggtgtccaacacaagccacctatgtgtgagagctaccatccagtagaagcaaccatgagcatggttgcgctgtcctagtcgaacgcccattactcttctggtgctcaaagcgtagtgttctggaggtgaaagcacacgccattgctgtgactctgacgagtagaagaatgagaccagcttacctcgacagcacgccatccagatcacggtgaatgccgggtcctcctcactggcactgtcatcactacgagaagccaggaagatctcgctactgcgtgattgcaagtcgccatcgccgccgcactggacgtagggattttccacggaggcggcgaggtcgtcggggatgggcggtagcagacggtacctccggaaccgggggtcacagatggaaacctcggtgaaggcggtggagccgtcccgcgcgcggtccaggaggaagcgtccgtcacggcagtcgcggacgagccagtcggcggcgggcggcgggaggaaggagaaggagaag

SEQ ID NO: 28056 - DNA, 411 bp, Setaria italica
  Peptide Sequence Number=SeqID_94030
acgttttacttcctctccggatccagcgaacctctcttatctcctccacccgcgtcgttcgtttgctcgtcgccagccggccggggacgcgggtgcctgaaacgagaggcaagccaggcataggagccgggggagagaggctttgctcgccggcgtcttgacagctaggtcgccatgtctttcaccggcacgcaggacaagtgcaaaacctgcgacaagacggtgcacttcatcgacctcctcaccgccgacggcgtctcctaccacaagacatgcttcaagtgcagccactgcaagggcaccctctcgatcagcagctactcttccatggatggtgtcctgtactgcaagacccactttgagcagctcttcaaggagacagggacattctccaagaaattccaaggcggt

SEQ ID NO: 28057 - DNA, 1476 bp, Setaria italica
  misc_feature (43)..(43): n is a, c, g, or t
  misc_feature (1412)..(1476): n is a, c, g, or t
  Peptide Sequence Number=SeqID_94031
cgggggagtggagcccggagaccccgccgggtagcagcaggancgggggcaccacgccggtgggcgggaagccgccgcggcaccacctcacgtccatccgccactgcgccagcagcgcccgcatcgcctcggcctccgcggaattcgagctggattcggggacactgagcttgatctcgcccacagacatccgtccgggcttcttgcctgtgttccggtcggggagctgcgcggatatcgggcccaaatcgtacatggaggacgaacatgtctgcgtcgacaacctcgtcgagcaccttggactgcgcggcccgggcatccctgcaccgggtgccttctatgggggtgtttgatggtcatggtggtacagatgctgcctgttttgttcggaagaatatactgaagttcataactgaagactgccacttccccaacaacatggagaaggcaatcagaagtgcatttgtgaaggctgatcatgcaattgcggattcccattctcttgaccgcaattctgggaccacagcattgacagtccttatatttggcaggacattgcttgttgcaaatgctggtgactgtcgagcggtattaggaaagcgaggccgagctgttgaactctctagagaccacaaacccaactgcacagttgaaaggctcagaatcgaaaaccttggtggtactgtcttcgatggctacctcaatggtcagctggctgtagcaagggcgatcggtgattggcacatgaaaggctccaaaggctctatatgccctcttacaccagaacctgagttccgggaggtcagacttaccgaggaagacgagttcttgatagtaggctgtgatggcctttgggatgtgatgagcagccagtgtgctgtgtccatggtaaggaaagagctgatggcacacaatgatccacaacggtgctcgcatgagcttgtccaggaagcgctgaggcgggactgttgtgataacctaactgtagttgtcgtgtgcttctcagcagacccaccccctcaaatcgaggtcccaagattccgggtacggagaagcatctcaatggaagggctgcatacgctgaagggagctcttgacagtaatgtctgactccttacagtataccctttgcctgcaactcttgttgtatgatgatggattttctcttctttgttgttgatctgtcaaagttttggtccaaccattgggttttgagatatagatcttggaataagtgtcgtagaaatatttcgaaagaaattttgttgaggtgtaggctaattaatcattttgttgaggcaatgatttatctgtaccggctgccatttgattgttgattgttcacaatgtaatcgagcaattaaccgacattgttaccctggtacaaatgagagctaaagcagttgataacnnnnnnnnnnnnnnnnnnnnnnnnnnnnnnnnnnnnnnnnnnnnnnnnnnnnnnnnnnnnnnnnn

SEQ ID NO: 28058 - DNA, 292 bp, Setaria italica
  misc_feature (222)..(292): n is a, c, g, or t
  Peptide Sequence Number=SeqID_94032
acaagtttgttagtgttgtctggggcagaggcatctctggcttgtttgcgttgttttcttgtttacatctgcttctggtccagcgagttctgactgatcgtcctgctgctgtagtgtgatgaaacttttgaagaggtttgggagcaacgtgtggttgatgccttactgcgtttcagattccatgataaatctgcatcacaattttaaaaaaaaaaaaaaaannnnnnnnnnnnnnnnnnnnnnnnnnnnnnnnnnnnnnnnnnnnnnnnnnnnnnnnnnnnnnnnnnnnnnn

SEQ ID NO: 28059 - DNA, 331 bp, Setaria italica
  Peptide Sequence Number=SeqID_94033
tcttccctcctgcatgatagcgaatcagcgatagcaatcctctacacggcatttggctttgattcgagttgaaggctgctccttgagggaggcggcggcggaggtcaggtcggcaggtcccccatcaccttcccgtcgcatcgcatcagatcagtttgaaggcgacatccggaaacaatcgcaattccttgttatctccaccagaagaagaacaccaacaagggaggaaccatggttttctacgaccatgacccggatatcacccgatggggccttcacctcctcctccccgctgcacatggatgctctgcccatcatcacacccaaaccc

SEQ ID NO: 28060 - DNA, 719 bp, Setaria italica
  Peptide Sequence Number=SeqID_94034
attgatttccgtttcaaactctatctgtttttcatctcggatttgttatttatttacatatttctactgttctgtaggaaacaatcgcaattccttgttatctccaccagaagaagaacaccaacaagggaggaaccatggttttctacgaccatgacccggatatcacccgatggggccttcacctcctcctccccgctgcacatggatgctctgcccatcatcacacccaaaccaccgccactacaccttataccgcctacactccgcagcatcccagctccagctccgctgagatcaaggttgagcatgtccctcactgcagcgatgatgccgttgacaacgacgagatcatcgcgcaggccctgcaggaggagctgtcccacgtcgcccttgcagaagcatccggagcgtcatcctcccatgacgacaaccattccgctgttctcacgcaacactggttccgcccacgcaccatccatgtagcatcagcttctcaagaggcggagaccagggaggaaccttttagttcatgctcaagccctggggatgacaatgtccaacatggcgaggcttgcttgatagacctcatggatgacttctctgtcatcgatggtgaagttggcaaaagattgaatgacatggttcctgttcctcatgtccccaagacaaatggagagattccttctgttgatgaagctgtttcagatcatcaaaga

SEQ ID NO: 28061 - DNA, 386 bp, Setaria italica
  Peptide Sequence Number=SeqID_94035
ggcggagtagaggaagaggcggttgggctgggtgggcccccgggatggaggagaaccagcggtcgaagacggcgaaggccggggcgagcgcggagaaggtgggcaggagggaggggcggaaggcgcgcatgacggcggaggagagcagcgcgttgacggagagcgcgctgcggacgaagcccgacatggagggctgcgccgcggcggcgccggcgccggaggagatgttgccgaagacctgctccaggacgtcctcgaaggagtggcccgggtcgtcggggacgacgaggtcggcgtcggcggacacgcagatggaggaggaggacgaggtggtggtggagttggcggagttggggttgcactcggcgccggtgagcccgtcgacg

SEQ ID NO: 28062 - DNA, 274 bp, Setaria italica
  Peptide Sequence Number=SeqID_94036
cgggttcagtagggttcagacttcagacttccgactcccgcttgtcgcggctcccatggcggcggcggaggcggaggcggcgccggcgcccgaagcgagcggctcctatgctggtgctggcggcctctccaccggccggaagctggttccgtggtcgagctgggaggaatggcgcttcgtgcgcgacggcctcttctcccccttccccgccgccgcacttcgcaggatttcggcgtggcggagcaggggctccctcctgatccccgtggaccgg

SEQ ID NO: 28063 - DNA, 906 bp, Setaria italica
  Peptide Sequence Number=SeqID_94037
accagccatggctgcagcggcgcccttggtaaactgcagcctgagccgcccgccctcgcgcgtcgcctgcaggagatccttcccggggatcaccacctccagcagcacaaaccgcccgtcctcccggaacgaccggaagcacacgcgcgatttcccgccgccgcgcccgatcgaccgtatcggcggcgggaacgacggcggctgcttctccgcctttccatgttccactgcgccggcgccagcgtccttcacgtcgctgcttctctccgtgtccgtgtccgtgtccgtattcttgctgtggccgctgagcgccgccgcggctgaggcctcggcctcggcgtcgccgtccttgagcatgtcgtcggcgtccacggtgctctcggagccgaggccctccgtgcacagcagcagggacgcggagctcttcttcatgcagaagctcgcgctcctcttcacggtgctcgccggcttgggcctcaggagaccgtccagcgacgagtcgtccttgctcaagttgctcatctcggcctcggcggcgatgtcgacccacgacgccgtgcgcggaggagggcgaggcggtggctgcgacatgaggacggctcgctccggctgctgcttctcttggaagtggagctcgccgaagatctcggtgaaggacgaggggtcgatggacttattggggtggacgttgcggttgcacgccgacagcgcctccagcagcgtcgggttctccggcagcggcttctcgaacagccgcctcagcccgccgtccgccgccatgggcgcagccatcgactgcttatctatcgagaacatgcactgtaactgcaatggaaccggttcaggtatgatgtcagggctgaaggaatagcagaacagtttgaggtgcgtgaccggcagctacac

SEQ ID NO: 28064 - DNA, 1563 bp, Setaria italica
  Peptide Sequence Number=SeqID_94038
cctggaaaggacccatgcttgcagttgcaccaaggggggaatcaggatttgcctgcaagtattgtgcatacattgtctctgatggttggccctgaaaattggatccgttcgaaagaacatggccatagtccccatcaggattcagttgattgtttagcatggatgaagtaaaaccgcctgcatgagtcttcatatgccgtccagataaatcaatgccagggctatcaccattcaggttctggtagtgagaaattgatccagctgagctcatcaaaggtcctttcttgttagcattaccatgtggtgattgcatggggaacttgctattgctatgagacgccagcttactaacatgcaaattactgaagttactccccccatttgggaaaactgcatattcaggggcattaagcgagtcttcatcagtattttgagttaagctttgctgtgaaaattgcctatgttcctttggtacattaaacagcatgtctgtctgatcaccaaagttatggtaaacatgattctgaacttcagtttccatattcgacatcttatttccagataggcttaagctagacagggttgccgcaatgtcagcaccatcatgattaagtgaagcaactgctgtagcttcaacctttttatcagaactccccatacgaactccaactgggggaaggcaagggcttggagttcttcggatcagctgggggtcaggggtggtgcttcttgagacagaggagcctactgcagaagcaaaggtatgagacattgaagaaccaagactttgaaccctgaccagactgggtgaagtggatccagatcgaaggccattcatggattctgatctgttctgcagatgtggtttgggtgaatcagatgacctgattggatttgggctctcaagagcgttgcggctattagaacgtgaaagatgaccaggtgtagcaggacgggtaatattttcctgcaatgcatcagcaaagctcttgcgccgagacccaaggccattgacatctgacaagccgatgagtccatcggtgcccctaccaagccactccgatgactgctgtcgtgcaagcccattcctttcacctctccccattctatcattcagcagcaccttctcaccaccactctcatgtgcccctggctgcatagaaaacagtgagtttccacccccgacctctgagggcctcctccttctatcaccaatacctccagacacagcctggaaccgctgtgccgcacgccagtcctctttagacaccattggtggcggaagccttgggttgaggtgctcattagaatagtagtatgacagatatgctgggtgtgaacgtatctcttcctcggtgagcatgtcaacaccaacaccactactgctgccgccaccaagggtgttgacatgaagcggtggaccagagaagagcgcaccaatggcagtgcgagagccctcaacagtggggggagcgctgccactgcggaatatgctgaggtcgtcgggagatgacatatggttctggtccatcagaactgcctgcaagtcacgctcgaggtctt

SEQ ID NO: 28065 - DNA, 452 bp, Setaria italica
  Peptide Sequence Number=SeqID_94039
tgttcttcgacctgacgtaccaggaacgacccgttggctggttgtgcatgctgtccgggtcgccgttgaagaagtcgctggcgatggcgatgtccgacgtgatcccgatgtgccgcatcggatcccggaaccacatgatgtcaatgtccgtgaagaggaagttgaagccgagctcgaggatggtctgctggaaccggttccgggtccacatcatgtcgaggtactcgggggtcatgaagtgcttctcggtgccgaggtcggcggcggcgccgtcgtcagggcggaggaggtagcagtggcggtgcagggaccggcacgtcgctagcgcgccggggtcgacggccacgatgaggaggtggtccagcagccgcgccgtgccctcgccgagccggaagctctcgaaggaaagaaggtaccaaggaagggaagacccggacgaccgacgttaacta

SEQ ID NO: 28066 - DNA, 1315 bp, Setaria italica
  Peptide Sequence Number=SeqID_94040
cgcgctgctgctggagcccaagctcgaggacgaggagctgccgctgcagcagctggcgtccccggcccccttcgtgtccctggaccagctgatgccggcaacggggccggcgctgcccgagccgccgcgcccgctggaggcgttgctgcagggccagcagctgccgccgttcctgtccaagacctacgacctcgtgagcgagccggcgctggacggggtcatctcctggggcgccgccgggaacagcttcgtggtgtgggacccctccaccttcgcgcgcgacgtgctgccgcacaacttcaagcacaacaacttctccagcttcgtcaggcagctcaacacctatggtttccgcaaggttcatgctgacagatgggagtttgctcatgaagatttcctgcgagatagcaagcatctgttgaagaggattgtcaggcgcaggtcctccccagcacaacaaagcagcattcagcctggctcttcttctggagaatccagcctggaccctgagctacacacactgagaagagagaagaacgcactgcttgaagaggtagccaggctgaaacaggagcatcgtcagacaattgagcaaatgagcacgctgaatcacaggctggagtcggcggaggacaggcagaagcagatggtctctttcctggccaagctccttcagaacccaagcttcgtgaggcaactgaagctgcacagggagcagaaggagattgactcaaccagggtgaaaaggaagtttctgaagcatgtaccgcatggcagtatagagtcaggtgagtccagctcacagcatggtggagagagcggttcacattttcctgcgagttctcccatggctacatgtgtgcaagatgacattgcagaacttcagaattttctcttggaagacgatgacctcaactttggtatggatccagacaacattgggcttgacagagtcgaggcaccggatgacatcggggcactggttcagggcttcgatacacaagaagaacttgagctcggcagtggaattgaactactggagatgcccccagcttctggtcctcttggccaggatcccacgattggcaggtccaagggaaaaagtgtgctgtgtccaggattggacgctacctcttctgaagccagctacctcggatcaatatcagacactatgggggtgctttcaccaagcaccatgttagggacagcaagcacaatgatggacgctgacgaagagcaaatgtggggcgtggatgcttcagcacctctgcaaagcacttgtagcggctctagccagcaaaccttcagtagcctt

SEQ ID NO: 28067 - DNA, 379 bp, Setaria italica
  Peptide Sequence Number=SeqID_94041
cggcgtcgccagccgcgggctacggctccgacggcgtgtaccgctcgccgcgctcggcggcgcccatcccttccgatcccgcgctctccctctccgacttcgtcctcagccgcgccgccgtgtgcccctccgcgctcgcgctcgtggacgccgcgaccggtcgcgcgctcaccttcgaggccctccgctcggcggtgctcgccacggccgccgcgctgtcctcccgcgcgcgtgtccgccgcggcgacgtcgtgctcctcctcgcgcccaacagcgtgctctacccagtctgcttcctcgccgtcaccgcgatcggcgccgtcgccaccacggccaacccgctctacaccccgcgggagatcgccaagcaggttgatga

SEQ ID NO: 28068 - DNA, 375 bp, Setaria italica
  Peptide Sequence Number=SeqID_94042
ataacccttgccctacaacctgacatggagaaccttaaaagaatccagcacggatgtcatccaactccatacaagagcagttagggcatagccttttgccctccattaagtatgcgacaaggttgacaagagggactcaaccataaggcctacatgtggatatgcttttctgtcatcttcccaagttggagcccttgcaccagggagcaaatacccgtggtatcttcgacaggaagttgatcttcaagtggctttgccgcttggtgtgttgaatggtgctctcaatgctggagtggctgcaggaatcatccatccgtttttaaggggatccacgggatctgtcttgccactttcagaaaggttttacttgggtgg

SEQ ID NO: 28069 - DNA, 509 bp, Setaria italica
  Peptide Sequence Number=SeqID_94043
acaacaaacaactagaatagaactaacttccgtaagtattgttcttcttatataggagtatcattcagtttgtgataggcggcacacagatgcaccaagcattgggacagatctattgccggtactaaccctctgtacaagttgctgcaaaataaccctcctatcagaacaagctgacaagcgcttgcaaaatactgattgccagacctagagttaggattgacttaactaggcttaacttgcgcccttttcttgatcaatctcatagtcttccacttcttgtctttatctgaagcatgacagtgccctccgtgacccttccaggacacacatggggcagcaatgtcgcacacgtagcagaaacacttgtcacagtgacgctcatgaggcgtagtgccaaacgggttcttggcgcaagcagacctcggatgcgggtaatctctgcacgccaccttgccccgctcggcgacgaccgcgatttcgtcattggcggtggcgggcgaggaagg

SEQ ID NO: 28070 - DNA, 330 bp, Setaria italica
  Peptide Sequence Number=SeqID_94044
acggggaggagggtgtgaggagatgcgagaggaggagcagggaagtgtctagaagcggatagggtgaggtgcagtggagatttggatgaatgagcgtgtcaggagggcttgcgctagtagttgtgcggattttctatatggatttcgcgagagcaaagtgaaaggtaagggggctgaagaatattggattatttggcgttttgaaggcgaggatacactttatgatctaatgcaaagcaaggaattcccttacaatgtggagacaaaggttcgtgatccctctgaaaatatcacattttgtaggttttatatctctgtgaacaactcccc

SEQ ID NO: 28071 - DNA, 1840 bp, Setaria italica
  misc_feature (1818)..(1840): n is a, c, g, or t
  Peptide Sequence Number=SeqID_94045
cctcgttccggccggtgacggcggagctcggcggcgtcgcgacggagctggggcggcagctggtggaggcggtgggcgtggggctcccctgcaccgtcatgcagtgcggcgacgtcatctaccgcagcacgctcccccggaacgacgggctcaccatcacggcccccggcgtcgcgcttgccctcgccgccgcgtcctacctctgggcgacccccggcgtcgcgccggggttcttcgacatgttcgtgctcgccttcgcagagcgcctcttccgccctaccttccgcaaggacgacttcgtgctcgggaagaagctcggggagggcgcgttcggggtcgtgtataaggcgtcactcgccaaccccgaagctgcggagaagcaaggggatgtggttgtgaagaaggcgacagagtacggtgcagtggagatttggatgaatgagcgtgtcaggagggcttgcgctagtagttgtgcggattttctatatggatttcgcgagagcaaagtgaaaggtaagggggctgaagaatattggattatttggcgttttgaaggcgaggatacactttatgatctaatgcaaagcaaggaattcccttacaatgtggagacaaagattcttggtggtgtccagaacttgccaaagggaataggaagagagaataagatcattcaaacggtaatgagacaactcttatttgctcttgatggacttcattcgacggggattgttcacagagatataaaacctcaaaatgtgatattttcagagggatcacgaaccttcaaaattatcgatcttggagcagcagctgacttacgagtaggaatcaactacattcccaaagagttccttttggatccaaggtatgctgcaccagagcaatacatcatgagcacacaaacgccatctgctccttctgttccagttgcaactactttgtctccagtcctatggcagctgaatcttcctgacagatttgacatatatagcttgggccttatattcttacagatggcattcccttctttacgaactgacagcagcctcatacaattcaaccgccaactgaagaggtgcaattacgacttagaagcttggaggaatctggtggagccacgagcaaccgctgagcttcggaggggctttgatatcatggatttggacgatggtattggatgggaactcctcacgtcgatggtccgttacaaagcgcggcaaaggatcagtgctgaggctgcattggcgcacccatacttcaaccgtgaaggccttcttggcctctctgtcatgcaaaacgtacggctgcaactgttccgggcaacccagaaggactacagtgaagcagctcgttgggttgtcggcctcatggcaaggtcaggaactgaagatgtgggaggctttacagaagcacagcttcaagagcttagggaaataaagccgaagaaaggcagcgcccagcggaacgtgctggcctccctgctgcgcgtgcagaggaagatcgtgagaacgatcaacgagagcatggacgatctcaccagccagcgcaaaagcatctggtggagccggtggataccgagggaggagtaggccggcgcacctgtacattgtccacttcttcttctgtataaaacgtcgcccaatagcattggtaatggtatgattgatatactatactgcttacttcgtatacttgctggtgactggtgagtacaatttgcctggaagactgcagtaacacgatgtatagatgtaaataatttgcatatgcacttaagcatcgcaatttttgagaaaaaaaaaaaaaaaaaaaaannnnnnnnnnnnnnnnnnnnnnn

SEQ ID NO: 28072 - DNA, 131 bp, Setaria italica
  Peptide Sequence Number=SeqID_94046
cgacaagccgcggttcacgctggagcggaagaggtccttcgacgagcagtcgtggagcgagctctcccaccgccagaacgacggcttcgacagcgtgctgcagtcgccggcgttccccctcagggggggcc

SEQ ID NO: 28073 - DNA, 251 bp, Setaria italica
  Peptide Sequence Number=SeqID_94047
gtttgaccggacgtgaggcgtggtcagtggttagtgctcgctggatgccgggaatctgaaaatgatacggttttagatgtaagggataaggcgcagcgtccataacagcagcaaccataaattcataattcggccgtattgcgaatctgttgatggcctgcgctttcttccttccgtatttgattagcgagatgctcacatatgttttaccattgcctaccacaaacacttctatagttctatgatgagtg

SEQ ID NO: 28074 - DNA, 235 bp, Setaria italica
  Peptide Sequence Number=SeqID_94048
attaggagttttcctatttgttcaaatctgttaatctaatctatccggacatatttctaataagtgttgtttgttcaaggatgcagttagtttcaatgtgaacaagtaggtcagcacttcgtttcttatattaacttgtgtgctgtcttcaattgaaagtctattctagttcaaaagttatctctatttaaacatgtacaaatgtgaggcccttttttgcaccaaaaatataaca

SEQ ID NO: 28075 - DNA, 365 bp, Setaria italica
  Peptide Sequence Number=SeqID_94049
accgccccaccggaggcggagggagatcgggatcggcgggggatggcgtcgcgggagcgggacggcgaggggaggcgggcgcacgcggccatggtgggcgtgcagctcgtctatgccgggtaccacgtcatcgccaagcaggcgctcaacgtcggggtcaaccgcgtcgtcttctgcgtcttccgggacctcctcgcgctctccgtcctcgcgccgctcgccttcttccagcaccgcggctcgcccgcgcaggcgcggccgccgcctctcacctggcgcctcgtcggctccttcttccttctcgggctcactggcgtctttggcaaccagctgctgttcttgcttggcctcagctacaccaaccc

SEQ ID NO: 28076 - DNA, 449 bp, Setaria italica
  Peptide Sequence Number=SeqID_94050
tccccaaaacaagcaagaagcagcaggctcgtcgatcagcggggggaggttgtggttggttgatcgatccctttgggcgaggtcggatggcggcggtgctgtggtggccgatggcggcgtggatcagccccgccaccgcgtggttcatcttcttcaacaccgtcgtcgccgccatcgccctcatgtccagcgcgcaccgggcggacggtggggcgctgacgccatcgggggcggcgcggcgaaggctctgccgcagcgggtcgtccatggtcctggaccggctctggtcattctccatcttcgccgtgcaccccgtggccgccacgggggcgccgatcggcgacgacgctaccgctgccgcatcagagtcgcagttcattgctacggcacgcgcgaagcagaggcgacgagcagcgccgcgccgccgagcgcgtctgtcgcgttggcat

SEQ ID NO: 28077 - DNA, 606 bp, Setaria italica
  misc_feature (55)..(55): n is a, c, g, or t
  Peptide Sequence Number=SeqID_94051
gtacagatctagaagacaataatcatgcatgctcaggtatagtcggtctcagtgnttaaattctaaactactcgcagtgtcttgtcctcgtaaatcacatgtctgattatatatagtggcgtgacaagatggatcgatcgatcccaacaacagctctctcagccttgcagctcatcgatctgcaagctagtgctgtggccacttctctctttcctcgcttctacagaagtgtgtgcttacacgctgctcgatcgatcggtacactgagattgtatataccatcatctaccatcgtaggtagcatagcgagctggaagaatttttttatgaaacatattacacggatctatggatcggatcaagctaatggcgtctctacggcttcatgctgcggtggtcgatccagataactctaatcgattaatcaagctggtgataactagtatatgagtgattactgtcttgctgatatgcagagtgattgatcgatgagcctgcagcttgctagttgaggaaggtgtaggagtggcctgcgtgggtaggtgcggcgtaagttcgcgcgcgcctcgtcatgccgcggccaccgtgccgccggccccgggcttg

SEQ ID NO: 28078 - DNA, 602 bp, Setaria italica
  Peptide Sequence Number=SeqID_94052
agttgttctcgacccttgttaagttggagctgtcagtattaaggtactatgttatcaatgctttgaaatctggaagacaagaaaaagtagtagaattctttggtgaaagcagcaattatctgatgcaaaagcgtgaagattggctgccatggttcgctattccgtatattaagaacccaagctttgatccacagttccgtgtatatttctccaaagaatggttggacactttggttctttcatttaggaatttcttgagtgggatattcaatgatactcggatcccagctctgttgagaattagcactgaaaagaataccatcaaatccctcaagaacgacataaagcaactgaataataaattggcagagctccaagcgtcattagaggcaaaggaagatgaattatctcagttgagaaggaactccagtggtgctggttacggaaacaaaaatttagttggtactagtacagctggtttccttcttgaacaagagatgtcagaaaattatgaagaatcctcagcctcaggtaacgtgatacagggttttgattcacggtcttcaagttcagtgaaatcttcttcaagaggtgggaaattg

SEQ ID NO: 28079 - DNA, 256 bp, Setaria italica
  Peptide Sequence Number=SeqID_94053
gccgggttgaactccgtggcgtcgtggccccagagcgctacgtcgtggtgcatcgccatgatcgggatgagcagctcggtgtcgcgcgggacggatacgccgccgtcgccgagggtgacgtcgcgcctcgcgcggcggatggtggccaccgccggcgggtacaggcggagcgtctcgttcaggatcatgcccagcgtcttgagcttggggaggtggtccttggacgggagctcgtcggcgccgcacacggcgagga

SEQ ID NO: 28080 - DNA, 467 bp, Setaria italica
  misc_feature (466)..(466): n is a, c, g, or t
  Peptide Sequence Number=SeqID_94054
accatagaagctgtaatctgtcagtccagcaccgatggcagccttgttatccactcctgcagagaagctgtgatctgttgtgctaacgttgttggtacctaccacagatgcctgcatgccctggtcgccgggcacagtagccccaaataagtcgtcctctgctccttctggcaagaggtccccaaacggatctgctccaccggcactggtgctggaaccaaagtcgttccactgcacctgcttgatggcagtgtggatgcctttatgtgaccctggggacccactgtctggtgccatggcagcctcatcagcgctagcgtgcgtttcctgaacttcagacttggtctcctgacgcaggacagcagaccctgcctccaccaccgcctctgtagcagcatcaggatgttccaccagagactcaacttgtggatgcgccagcgtgggtcatcgctcctcctcctcctcnc

SEQ ID NO: 28081 - DNA, 261 bp, Setaria italica
  Peptide Sequence Number=SeqID_94055
ctctaagatagataaatccatcagggataaggccaggaagagatgacagcacagggtcaaaccaagagtcataaatgctcagctccattccattcaaccaattagcttcatgaacagcacgaacaaagaccattcgatcactgaagatgctccgttctaccaatctgagcggctttattcctccagaggactccttttcttgcatgagccttgttacaaacacataattttggaatgtgtaggcatacctctgtggttcag

SEQ ID NO: 28082 - DNA, 352 bp, Setaria italica
  misc_feature (308)..(308): n is a, c, g, or t
  misc_feature (317)..(317): n is a, c, g, or t
  Peptide Sequence Number=SeqID_94056
ggataacgtactctgctccggccatggcttccttcgcctccctccgtggcgccatcctccagggccccctcctcgcgcctcgcctcgctgtccgccgcgcgcccacggccaggcgccgcgccgtcccggccaagatctcctgcatcggatgggacccggagggcatacttggtgcgccgacgggcgggcacatctcgcgcctcgagttccgccgccgcctcgagagggactccgaggcgcgcgaggcgttcgagcgccaggtgcgcgaggagaaggagcgccgccgcagcgatcgcgaggcgcgggtnatcccgganacggacgccggcctggtggagttcttcctcgacac

SEQ ID NO: 28083 - DNA, 509 bp, Setaria italica
  Peptide Sequence Number=SeqID_94057
cgcgcgagatcgaggtcgagatcggcaggctacggccaaggctgaacgagggcttcttcaaccatgtctcgcgcgagatagcacagttcaaatttgcagtcaccagaacggcggagatggaagacagattgattgagttggaggcaatgcagaaggttcttcttgagggagttggtccgttaaatcctgcagcaacattacctactcaagtgtggactgaatacgtataactgtgtttaactgaaacaactcttgcagaggcatacgacaagttgcagaatgaccttgtgacagcaaaggaacggctaatgaaaattctgcagtccagtgatagaaaagcgacagtaagatccatgaaaagctagaagagtcttatgctgtttttcattggtaacttatttcacgcacctataaatttgtaactgttgttaattaactggtctgacacagttgcttgaaatggttgagcggaatgagctgaacatttccatactaacacttcttgatga

SEQ ID NO: 28084 - DNA, 1023 bp, Setaria italica
  misc_feature (938)..(1023): n is a, c, g, or t
  Peptide Sequence Number=SeqID_94058
taaaagaaaaaggaaaagaacgtaacgaaccgaacaaagaacgaagacgacgaaggacgacggggcgggcacatctcgcgcctcgagttccgccgccgcctcgagagggactccgaggcgcgcgaggcgttcgagcgccaggtgcgcgaggagaaggagcgccgccgcagcgagcgcgaggcgcgggtgatcccggacacggacgccggcctggtggagttcttcctcgacacggaggcgcgcgagatcgaggtcgagatcggcaggctacggccaaggctgaacgagggcttcttcaaccatgtctcgcgcgagatagcacagatcaaatttgcagtcaccagaacggcggagatggaagacagattgattgagttggaggcaatgcagaaggttcttcttgagggagttgaggcatacgacaagttgcagaatgaccttgtgacagcaaaggaacggctaatgaaaattctgcagtccagtgatagaaaagcgacattgcttgaaatggttgagcggaatgagctgaacatttccatactaacacttcttgatgagaatatagcaagtgcaaagacaagtaatcaggatgaggctgttgctttcatggagaacgtgcgatcatcgatcgtgaaatatataacagtataaatcttgtatgtatttgtcaatggtgcattaattccaggatttacttatctttgcagtacagttttgtaaacatgccatgagcatgtaatttacaaaggatgtcttgtggacgtggaagcttgaattagtgttggctgtatttagttgatctttcatatatgctcaaatcatcagcatcgttagtgtaactggtaaagagaaattgtgagaccttatacctgtactaccaagaaataatgcaaagtttgagctcttttttgttaaaaacaaaaaaaagtttaaaaaannnnnnnnnnnnnnnnnnnnnnnnnnnnnnnnnnnnnnnnnnnnnnnnnnnnnnnnnnnnnnnnnnnnnnnnnnnnnnnnnnnnnn

SEQ ID NO: 28085 - DNA, 227 bp, Setaria italica
  Peptide Sequence Number=SeqID_94059
cacaccaccacttgacgagctactcgcagcatcgggatcgcagtgcgctgctacctgctggcttgctctcgtacgtggagctgcgacgcgcgacctgcgagatctagacatccagtgaagtgtgggtaataatatggcgaaggttggcgtccagcatcaggcgggtgtggttgcgctgctgggcgtcctgctggttctgtcgtccgctctgacgacggccgaggccc

SEQ ID NO: 28086 - DNA, 237 bp, Setaria italica
  Peptide Sequence Number=SeqID_94060
ccctcctacaaggtccaccccattggccttcccatcgaagagcccggagttctccctccaggtcactctctggttgggtgggagcacgccggaccgctgcgcctcgaagtagaggatgctcttcttcaatgccagagcgtagtcatggccgccggccccggatgccatccccaccactgatgcaagtgccaagatcaggccaaggagtgccagcacgttcttggccatggcagtgca

SEQ ID NO: 28087 - DNA, 218 bp, Setaria italica
  Peptide Sequence Number=SeqID_94061
tgaccctcatgaactttcttgattttgagctgagccccatctcttttagcattgcattgcatttatatcatattgcaccttgtacactttgaactagatgagcttctcctatatatccttagcatttccttatgctatttgtgagctagtgcattggttggtgattgtgtagcaatgtgcagcatattctcttgatgatattgtcatataaccatgtt

SEQ ID NO: 28088 - DNA, 432 bp, Setaria italica
  Peptide Sequence Number=SeqID_94062
ttcacccccatctccaactgaagatgaagggactaaaagttccaaaccaagctttgcaaaaggaaataaatctcataaatggctttcagatattgatggcccggataaatctcatattgagcatgtgggtaggaaatcaaatctaaacgaggatagaatgagaaaaaggcgcttatcatcagctactgcttttgcctcttccggaacacaagaaactataatttctgagaaagaacaagaacaatacccagaaaactaccttacaagggcttttgatcaactggtagtggtgttgggaaggttccaaactaagattaagtctgaaacaagcaagaaaagttctgagatacttgcagctactggagagataatacgccagcagcttgagggggttgaggtgcaaatgcaggctgatgtggacaagctggtcaa

SEQ ID NO: 28089 - DNA, 381 bp, Setaria italica
  Peptide Sequence Number=SeqID_94063
aacgtcttgccgctgctggtctgcccgtaggcgaaggcggtagcgttgaacccgtcgacgacggcgccgatgaggtcccggacgaccgtgccgtagacccgctcgttggtcgccgttctgtcgaacacgtggtcgaagacgaagggtgcgccgggaacggggccggcggagcgatggacgagggtgacacggttgtcgtcgatgcgccactcgcggtcgccgcccccgccggcgccggcgggggaggggtcggcggcggccgggttgggagggcggaagcggacggcgacggagatcttctccatgggatgcggcggcggccgccgcggtaacgcgacgagcgcagcggcggttggtcggctctggctggtccgcggtgat

SEQ ID NO: 28090 - DNA, 339 bp, Setaria italica
  Peptide Sequence Number=SeqID_94064
ctcggatttgttggcgaaaaagcgaagaaataggttcgtcgttccattacaatatcatcaagaacaagagaaagagttaatatcctgtttgggtatttcaattgaaataccctttatgggtgttttacgtagaaatactatttttgcttattttgacgatccacgatacagaaaagataaaaggggttcaggaattgttaaatttagatataggaccctagaggaagagtataggactcgagaggaagagtataggactcgagaggaagactcagaggacgaatatgagagcccagagaacgaatataggacccgagagggagagggtaaatatgaaat

SEQ ID NO: 28091 - DNA, 588 bp, Setaria italica
  Peptide Sequence Number=SeqID_94065
cctcatcctcagaagacccaggccaccaaacagatggtacgaggcactgtaaatcatgcttatttggtatcttccttgtaagaaacccttcaaatgagaatgaaaaatcttctgagttccaccatagacacattacatccttatgcctaagaaggtgacaaaccagtgctaaaaatggatatgacccagaatatgggcactctgtcaacacaagtggtgcaactttgcacatgcaagaaagtgccacgatgagctcctgcaataatgatgtgcaacctgggaactgaaggaaaaggtcgagaatctgatcaaggcatgagagatcatgcggctcacgcgccctgaaaacatctaagagaagagtggtcaatgagccccaggcaatatactcaaggcacccttggctcacttcaatagcactgaaaaattctgcacatatcgcttctgaaattggtcgaaagagttcttgcagtggtgcgaatttcttgaccctcctcagtttctcaaagtatgctgattcagatttctccagattttgaacttctagcaatcggaacaaacatctaagaagatagtcgtgtaatgtct

SEQ ID NO: 28092 - DNA, 265 bp, Setaria italica
  Peptide Sequence Number=SeqID_94066
ccgatgcaaatgcatgtggtgataccacaatcctttcgtgcgtgcacaattcttcatctttagtgctcatgcgagcttctgtcctatgtacaaaattcctccattatatgttggtaaccaagtgccagcaatgtacatatggaccaccttttctcttctagtttttttttaagcggcggtacttaccactaaccatgcatcatacaacctaaaacctcagtgtgccatcatctgcaacttcgtttgtcacgttagggcaacacac

SEQ ID NO: 28093 - DNA, 1237 bp, Setaria italica
  Peptide Sequence Number=SeqID_94067
gacgggatctccaacctccgcttctccaaccacagcaacaacctcctcgtctcctcgtgggacaagacggtgcggctctacgacgccgatgccaacgtgctcaagggggagttcgtccaccccggggccgtcctcgactgctgcttccacgacgactcctcagggttcagcgctggagccgaccacactgtgcggaggttagtatttagttcagccaaagaagatgtactgggtcgtcatgatggtccagttcgttgcgtggaatactcttatgctgcaggacaagtcatcactggcagctgggataaaactgttaaatgctgggatccaagaggagtgagtggacctgagcgtacacttgttgggacatatactcaaccagaacgtgtatattctctgtcattagtaggaaataggttggttgttgcaacggcaggaaggcatgtcaatatctatgatttgcgcaatatgtctcaacctgagcaaaagagagactcatctttgaaatatcaaacacgatgcgttcgatgtttccccaacggaacaggatatgctctaagttctgtagaagggcgagtttctatggagttctttgatctatctgagtctgcgcaatctaaaaagtatgctttcaagtgtcaccggaaatctgaggctgggagggacactgtttatcctgttaatgcaattgccttccatccgatatatggaacatttgccactggaggttgtgatggatttgtgaatgtgtgggatggcattaacaagaaaagactatatcagtactcaaagtacacttcaagcatcgctgctctttcattcagtaaggatggccatctgcttgctgtggcgtccagctacacttacgaagagggagaaaaatcgcatgagcctgatgcaatatttatcaggacagtgaatgaagtcgaggtaaaaccaaagcccaaggtattggccgctccccagtagtatattgtaatcagttggtgacagtatcagtcagatggttagatgatcctccccttgatgtcaattacattagttgacgctgagcttgactacgttgaggtgaaatgtatcttgatccatctactactgaattgtgtccgtggaaacgtttcatgttccagctgattgtatatttcgtagattatgttttagtttattttgattctttgttgacatatttgtgtcttaatttagttagtttggaactctggatgaaaaaaaaaaaaaa

SEQ ID NO: 28094 - DNA, 542 bp, Setaria italica
  Peptide Sequence Number=SeqID_94068
aacgccggctgccggtgcaacggcacgcagtggatgacgtcgccgtcggggctctggattgtcttgttgcagtccttctccatcctggccatccgggccatgatcctcctgtacgcgtcccgctcatccccggcgcggaagggcacccgcgcccgcgccctgccgccgccgccgtccttcctcgcggaagccaatccgacgaggaggaggaggagcaggaaggggacaagggaggcaatgattgggaccttcctagaagccatggaccgacctcggattattcctttggagtaggacaggatcacgggaagctgccgtggccgtcgtcgtcgctctccttgttgtctgtatgctgcctctcctcctccttcttcctcctctggagctgtcggtatgcttgcacattgacctgcttgtcctcttcccctctcgccctccttcctggaggaagagcgctataaatacagccgcgtggcgtggaggcgcggagaagagctgagctgaagctctcggaggtcaaagctctctccgtgcgagttggt

SEQ ID NO: 28095 - DNA, 279 bp, Setaria italica
  Peptide Sequence Number=SeqID_94069
tagctgggtaggcagcttggctacgagcagtgcttactggctagggttcaattgagaggatctgagaggtctggttcgagcttgtggagatgaggggaaggcacaagagcaagaagcatgggagcagcaccgtggcgctgtggctcctgctgcctcttctcgtattgatcgtgctcaagaccaatctcctcccgcaggttgcacgctattccattgtcggctcaccaccttcttctgcatcaagagacgagacgactggcggcggcgacgcgacgaaag

SEQ ID NO: 28096 - DNA, 691 bp, Setaria italica
  Peptide Sequence Number=SeqID_94070
cggtaaaaagaaggttcccagtcccatacatgaatctccttccaaatggctgaaactgaaagcaataaagagtttcttgggatcaaagcaccaacctgaacgagatcaaaccggcagcgggaacacacaacacgaagaggcggtggaaaaggcccgctctcttgttctgttgcttgctactcttgttgtgagcatcacgtaccaggcaggattagatccaccaggtggcctctggcctgccgatggacgtgctgccaatgggcgtgattataagaatggtgacccaatactcctcacaacgcatcctaaccggtacaaagtgttcttttacagcaactcagcagcctttgtggcatccttgatcgtcatcataatggtccagagcagatttctgcttaaacgccacacactggaggcagccatgatactggatttgttcggtctaataggtgcatatgctgcagggagttgcagagatgaaatcacctccatatatgttgtcgccttggcaggaattgtccttgtatatgtggtgatccatatcatcttcttcaccctagatcatgaggacaaccgtcgagatgctaaaaagttggagaacaggcgtgaggtgctgctgctccttgcgatcttggctgcgacactcacttaccaagctggattaacaccaccaggtggcttctggttggat

SEQ ID NO: 28097 - DNA, 295 bp, Setaria italica
  Peptide Sequence Number=SeqID_94071
gactggcttcttcccgtgcttcttctttcttgacggcgactaaaggggcagcgctctcatcctcagagtgtgccccagcttctcgcttcactgatacccttagccgcttggttggatggctgatcacctcaaagttttggtagccttcctctgctgcttggttgtcaatcaatacatcctcggagctttcacggaattctccgatctgatgtggaccttcagacaataggctcatggtgctctcaaaaatatccatgttgctagcttctccatagctcgagagagcactatcagg

SEQ ID NO: 28098 - DNA, 341 bp, Setaria italica
  Peptide Sequence Number=SeqID_94072
cgccggcgcctccacccccgccggcgccgccgcccgccccgccgccgccgtgcgtcgggatgtcgaaggcgacggcgagatcgggggtgatgagcgtctgcgagagcggcatcagctcgtccggccgcggcagctgctcctcgcagcgcgcgaaccagctgggctcctcctccctcatggccgcggctcctcccctgctctgctcacctcgcagagcaattcttgcagctcactccactcgtcgtcggggcggcggcggcgacagcagcagcaccagtagactcgactccactccagcggaaggaaggaacgaccgaggagggagggagggagtagaaggg

SEQ ID NO: 28099 - DNA, 176 bp, Setaria italica
  Peptide Sequence Number=SeqID_94073
attgataccacggatgcgaatcacaaacagaagcttggcctcagggctgacatagaacccacccttcaaccgggccaacaacttcctctggccattcaagctgaaggcaccgctcggtggcctgaagaagaagaggaaccattacgttgatgtagttctcacggttgccagcatca

SEQ ID NO: 28100 - DNA, 175 bp, Setaria italica
  Peptide Sequence Number=SeqID_94074
gccttgggaagcacaacatcatctgcattgaggatcttgtccatgagatcatgaccgttggcccacacttcaaggaggccaacaacttcctctggccattcaagctgaaggcaccgctcggtggcctgaagaagaagaggaaccattacgttgatgtagttctcacggttgccag

SEQ ID NO: 28101 - DNA, 331 bp, Setaria italica
  Peptide Sequence Number=SeqID_94075
cggcggcggcctctcctccctcctcccacgcacacgcaggtcatcgagatgtcggcggcggaggctaaggcggcggtggtgccggagtcggtgctccggaagcgcaagcgcgaggagcagtgggcggcggacaagaaggagaaggcgctcgccgacaagaagaaggcgctcgagagccgcaagattatcttcgcccgcgccaagcagtacgcgcaggagtacgacgcccaggtcactgagccagcgggtttcccgtctccctatctcgatctgattgtcccacggtttagtcttctggttagacgagtcatttggtcggattgtgcagctt

SEQ ID NO: 28102 - DNA, 125 bp, Setaria italica
  Peptide Sequence Number=SeqID_94076
ccactatgttgagggtggtgacgctggtaaccgtgagaactacatcaatgagctcatcaaaggatgaactaggttcacgagcatattggtttctcttcttcttcaggcctcccagtggcgccttc

SEQ ID NO: 28103 - DNA, 247 bp, Setaria italica
  Peptide Sequence Number=SeqID_94077
cgcccacctccgacctccactctccccgcatcccccgtctcgcacgcagctcgtcgagatgtcgtccgaggcggcgaaggtggcggtgccggagtcggtgctccgcaagaggaagcgcgaggagcagtgggcggccgacaagaaggagaaggccctggccgagaagaagaagtccatcgagagccgcaagctcatcttcacccgcgccaagcagtacgccgaggagtacgatgctcaggagaaggag

SEQ ID NO: 28104 - DNA, 647 bp, Setaria italica
  Peptide Sequence Number=SeqID_94078
gatgagctcgttgatgtagttctcacggttgccagcatcaccaccctcaacgtaatggttcctcttcttcttcaggccaccgagcggtgccttcagcttgaatggccagaggaagttgttggcctccttgaagtgtgggccaacggtcatgatctcatggacaagatcctcaatgcagatgatgttgtgcttcccaaggccctcctcaatgacattgttgttgctcagaggaatcctctgcttgttcagcttcccataacctctcttgcatatgggtacccgaacctgaagagtgttagggaattgatctacaagagaggttatgggaagctgaacaagcagaggattcctctgagcaacaacaatgtcattgaggagggccttgggaagcacaacatcatctgcattgaggatcttgtccatgagatcatgaccgttggcccacacttcaaggaggccaacaacttcctctggccattcaagctgaaggcaccgctcggtggcctgaagaagaagaggaaccattacgttgagggtggtgatgctggcaaccgtgagaactacatcaacgagctcatcaagaggatgaactaggttcttgactccctagagtataacttctcagacattgaaatcaattctcacag

SEQ ID NO: 28105 - DNA, 802 bp, Setaria italica
  Peptide Sequence Number=SeqID_94079
cggttgaagggtgggtttcttatgtcagtcctgaggcaaagctgctgtttgtgatccgtatccgtggtatcaatgccatgcacccaaagaccaggaagatcttgcagcttttgcgtttgaggcagatcttcaatggtgtgttccttaaggtcaacaaggctaccattaacatgctgcgcagggttgagccttatgttgcatacgggtacccgaacttgaagagcgtcagggagttgatctacaagaggggctacggaaagttgaacaagcagaggattcctctgtccaacaaccaagttatcgaaggaagggacttagggacaaagcaacaacatcatctgcattgaggatcttgttcatgagatcatgactgttggcccccacttcaaggaggccaacaacttcctctggccattcaagttgaaggcgccactgggaggcctgaagaagaagagaaaccactatgttgagggtggtgacgctggtaaccgtgagaactacatcaatgagctcatcaaaaggatgaactaggttcacgagcatattggtagtgtgccctttggaaggcggcttctctgtgttatccttattttacaattaaggaagttggatcgtggatgaatatgcatgcaattttgatgtttggaactaggtgtgtatggaagaaatctgaccttttaccaagaggttctgaattttattgaacgcctttgttatcctgaggtgtgaatatcggtacgcctttcttgtttcctggctggccagtatgataaatcatctgcaaattgcctttagaaaactt

SEQ ID NO: 28106 - DNA, 1091 bp, Setaria italica
  Peptide Sequence Number=SeqID_94080
cactcccctcgcccgccgccgcctgcgcccacctccgacctccactctccccgcatcccccgtctcgcacgcagctcgtcgaggtaagatgtcgtccgaggcggcgaaggtggcggtgccggagtcggtgctccgcaagaggaagcgcgaggagcagtgggcggccgacaagaaggagaaggccctggccgagaagaagaagtccatcgagagccgcaagctcatcttcacccgcgccaagcagtacgccgaggagtacgatgctcaggagaaggagctggtgcagctcaagcgtgaggcccggttgaagggtggtttctatgtcagtcctgaggcaaagctgctgtttgtgatccgtatccgtggtatcaatgccatgcacccaaagaccaggaagatcttgcagcttttgcgtttgaggcagatcttcaatggtgtgttccttaaggtcaacaaggctaccattaacatgctgcgcagggttgagccttatgttgcatacgggtacccgaacttgaagagcgtcagggagttgatctacaagaggggctacggaaagttgaacaagcagaggattcctctgtccaacaaccaagttatcgaggagggcttgggcaagcacaacatcatctgcattgaggatcttgttcatgagatcatgactgttggcccccacttcaaggaggccaacaacttcctctggccattcaagttgaaggcgccactgggaggcctgaagaagaagagaaaccactatgttgagggtggtgacgctggtaaccgtgagaactacatcaatgagctcatcaaaaggatgaactaggttcacgagcatattggtagtgtgccctttggaaggcggcttctctgtgttatccttattttacattaggaagttggatcgtggatgaatatgcatgcaattttgatgtttggaactaggtgtgtatggaagaaatctgaccttttaccaagaggttctgaattttattgaacgcctttgttatcctgaggtgtgaatatcggtacgcctttcttgtttcctggctggccagtatgataaatcatctgcaaattgcctttgctttaaa

SEQ ID NO: 28107 - DNA, 1034 bp, Setaria italica
  Peptide Sequence Number=SeqID_94081
gcggcctctcctccctcctcccacgcacacgcaggtcatcgagatgtcggcggcggaggctaaggcggcggtggtgccggagtcggtgctccggaagcgcaagcgcgaggagcagtgggcggcggacaagaaggagaaggcgctcgccgacaagaagaaggcgctcgagagccgcaagattatcttcgcccgcgccaagcagtacgcgcaggagtacgacgcccaggagaaggagcttgtgcagctcaagcgtgaggcccggttgaagggtgggttctatgtcagccctgaggccaagcttctgtttgtgattcgcatccgtggtatcaatgccatgcaccccaagacccgcaagatcttgcagcttctgcgtttgaggcagatcttcaatggtgtcttcctcaaggttaacaaagctaccattaacatgctgcgcagggttgagccatatgttgcatatgggtacccgaaccctgaagagtgttagggaattgatctacaagagaggttatgggaagctgaacaagcagaggattcctctgagcaacaacaatgtcattgaggagggccttgggaagcacaacatcatctgcattgaggatcttgtccatgagatcatgaccgttggcccacacttcaaggaggccaacaacttcctctggccattcaagctgaaggcaccgctcggtggcctgaagaagaagaggaaccattacgttgagggtggtgatgctggcaaccgtgagaactacatcaacgagctcatcaagaggatgaactaggttcttgtatcctgtgagaatgatttcaatgtctgagaagttatactctagggagtcaatgctggatcatgacgaatgtgcaattttggcattccaaacagaatgtagacttgctctttcagtaagacttccaataggattttgctgttccaaacagaatgtagacctgtacccgtttatttttcggttctttcttgaggttgatggttgatgtgtatgctctcgtttatcacgtttcttagcttcaaaaaa

SEQ ID NO: 28108 - DNA, 402 bp, Setaria italica
  Peptide Sequence Number=SeqID_94082
cggtgctccgggtaggtgagacctcgcacggggccgccgctcaagatcgccaagcgcatgggctacaaggaaggctacttccgccagcccaaagacaggctctacagcagcgtgtcggacttcatcacagcagagctggtgagcgcctccagtaaagtggagaacgtcgacttctcaagctaccggagcttcaccaaggattactgggcttcacgtacagccctcagagacgaatgccggaggaggggcgaggtacggcgtagccttcgccggtcgccgttcgacgcgagcgtgctcctctggcacatcgccaccgacatctgcttccgctgcaggcctccgaagcacttcggcgaaaggcccccgcgtgccgaggtggttcgcgaggtgtgcacggaggcg

SEQ ID NO: 28109 - DNA, 245 bp, Setaria italica
  Peptide Sequence Number=SeqID_94083
atgataatctctacgctgccaagttgatacgtgaccgccgaacgacagcgccagcgcgtcgtctccgacgatgacggcgctggcgcccgccggcacgacggtgtacgccgtctcctcgacgatcgcgaagtccctgcacacgttgagcgtgaagggcacctcgacgacggcccccgcgggcacgaacaccctccggaacgccaccagctgcttcagcggcgcgtcgcccacctcggccggcggcg

SEQ ID NO: 28110 - DNA, 1495 bp, Setaria italica
  misc_feature (1)..(51): n is a, c, g, or t
  Peptide Sequence Number=SeqID_94084
nnnnnnnnnnnnnnnnnnnnnnnnnnnnnnnnnnnnnnnnnnnnnnnnnnnaacttcaatctctggctgatttctattaactgaaagagttcaatacttgtacacccatctgattctaacaaatcttaactaccattaagggataacaataaaaggaacaatactcctaaaccttcggactctcctaactgacacaccgcaagccgctcgcctaccacggcctcgtctagccacggctcgccctgcgatgttggtacactttgccgaccataacaggttaccagctcgactgtgttaattaagaaactagggtgcaggaactgaaagtacagctttgcaaggacctcaaaagactagaaattgtgaagaaatgtttttttccatcttcccctgggtgttttctacaagaggtcttgagcttctccatgaaggcctccatccagcctttcgcttggcgccatcaccatcccccagcagcagcacccgccacttctgcggaaagaaatgaagcatacttgctgggactcctccccaccacagggcgtcactgaagcatttccagacaaatttttgtatgctgcacaattgacattcccttccattcaatttcgtcctctcttcaaagccacccctgtttgcagtctatcttgccaggccagccacatgaatacttttagcttcagccttcaggggcagtctgctcttccacatgaatacttatggagatatgcatcaatgacaacatgaaactaaacagtggttctctgtttttgccaaccgaatgtgtatctccacatgatttttagaaccaattgaccgtgatctttacatattgcacatgatcagtaaacaaaagtcagcaaataaaaattcaccaaacattataagtaatgcatgaaaaagatgagatatggaacatggaagacaccttatgaagcataacctgtttctttctaatctgatgtttccactggctatttcctaagacagccctttcacaaaaaattaaattaatggagaactttttaacatgttttactatcaccagattttcaattaagggaaaagagtgcataggtaaacccataagtaaaaaagatcttcaggttattgctgagaaaacttactaagagaagtgttcaatacagattaaatgcactttgtgaattgaagagtttatacaccttcagttaattcatcagtttttgggagtaaatcataattttcatatttaatacttcctccgttacaaattatatattgttttgggcttttttagaagtgagtgcctactgcccacccgagtattctatcgttttctgacacacgaatttctgcgacgttggatgagcattgaacggacatccttcatcttcttccccagttcagcacctttcttcccaatagccaggccaccccaccgccgcccagatggaccaccaccccagccgagggcgcggtagctgccggtgtcgggcttcggcgagacccttac

SEQ ID NO: 28111 - DNA, 306 bp, Setaria italica
  Peptide Sequence Number=SeqID_94085
gacgagctctgcccgcggtactccggagtccgcatgatgagcctctcgtacccggagaagccctccgcttccaggttcccggtcgtgcacgggcccagggtctcctcgtccctcccggagaggaggaagaccttgaagcccttgtccagcagcgccgtgaacagcccgagcaccggcgggatccccgggcaggcctccttgctcgcccacgccttgaaggccgacgggtcgtacgccccgaactgcttggtctcgtagtagggcaggttggagaggcaggtgtcgtcgatgtcgaagacccaggcg

SEQ ID NO: 28112 - DNA, 372 bp, Setaria italica
  Peptide Sequence Number=SeqID_94086
ggatcctgtagccttcgtcgacgaggctgcttcctcatcgccgacttgaacaccgacgagctctgcccgcggtactccggagtccgcatgatgagcctctcgtacccggagaagccctccgcttccaggttcccggtcgtgcacgggcccagggtctcctcgtccctcccggagaggaggaagaccttgaagcccttgtccagcagcgccgtgaacagcccgagcaccggcgggatccccgggcaggtgtcgtcgatgtcgaagacccaggcgtcgaggccgtcggcgccggcgtcgacctggtcggcgtagtcggaggcctgctccatgacgccggccaggtccctgaggtactggccccgggtcatgtac

SEQ ID NO: 28113 - DNA, 245 bp, Setaria italica
  Peptide Sequence Number=SeqID_94087
gcgcgcggcggcgtcgccgggctgagcatcacctcggtggacctgcagggcccgctcccggccaacctgcagccgctggcggcgacgctgaggacgctggtgctctccggcacgaacctcaccggcgcgataccggcggagatcggcgggtacggcgagctgaccacccttgacctcagcaagaatcagctcaccggcgcgatcccgccggagctgtgccggctcgcgaagctcgagtcgctcgc

SEQ ID NO: 28114 - DNA, 235 bp, Setaria italica
  Peptide Sequence Number=SeqID_94088
cgactcccccggcttgctcttctcgccggccatggggggatttggaatgtcgcaccagcaggcccttgctcaagttacagcacaagcaacccattctccacttagaatgtttgaccacattgagcaaccatctttttcagcagctgcagcatcgtctggagctctacaacatatgaactctagcgccaatatgactggaatgccagagatggcaattacaacagcaaacaatgaa

SEQ ID NO: 28115 - DNA, 1766 bp, Setaria italica
  Peptide Sequence Number=SeqID_94089
ccaagcagtagctccgctcaggctcagcacaaaattagtcacatgatcattactaatacacaattacatgcacgcaacatacatggatgatcctggctaactggtgcgcaaacgacaaataggtcgaaaccataacataacaatattatttactcgcaaaaaacacagcaaaaagaaaaccgctgcataatttgattcccttcctattttcccccctactcattatagtttaggccatcaaaccagtcagcgatctggcagctgatggccgtcatctacaactatgctgggcagctcctcagggccaaccgacctgctgttggcgaccgctggctcacccccactctccaggctttcatgccggactgggcggagcagcagaccctgcaaccgcaccaagtagctttgccccaccggctgtgacctcacatatctagtcgctgaagttgctgttgttacatcgctggcactggcagatggatggtctggctcgctggtcgaccggagattgttcagcgcacttagatccaggttggggaagacagagcaccggcaccgcgggcacttgacgttcagccggagccattggtcgatgcactccacatggaaattgtgtgcacatgggagtccacggacctcattgccaacatgaaattcttcaaggcaaataggacattcactgcagtccgttggaacagctttcagcctgaattttggaagttcttgaatcagtgcctcaactgcttctctctgagctgcagttaaataaagacccggatggtatgctgtatcttggcccactctcatttccaggccaacggcctcaaatgcccagtcaggcacgcggatcatatcaaccaaaaccccatattcagagacgggaattccctgctgtgccctttgttgaagtgcatgccttcggtttatccactttccaacagcaacacaagcaatacaggcgagcccacagtaactgaacagcagccatatcaggaagccccatttttgtccttcctcaggcaagcagcttcttgcagtgctaaaccacaatgttcctatcacagtccaaacccaaagaaaggggtagagaagtagtacaagaactgagaggacaactattcttccacaaaagcgagcatatctctgttgccatccgaggtctaatcccatccctgcagcaagaccattatcgagaaacatcagcagacggaagatgaagacagtggtgtagtccaccactatccaaatatggagtggatgggcacataggcgatacctcttccaatttatggagacgatgattacgctagtggcgagcatggagaggaagaacccgtcgtaccacttgaaatcgacgccccgcatcgccatggtcttcttactcttgttctgaagcaccggagtggaagaactgagggggtttgtcttcccgcaggcgggaagcagggcagctgacgcgcttcccctcccccgaagcgggttctctgcggcgcgagcccgctgcctacgacgcgctcgcggccccaacgcaggcttgccgcgggcgagctcactgccccagcgggggcttgccgccgccggcgtcgcaggctcgccgccccgatgcgctcgacgccctacgcgtggagagggggagacgaggaggcaagggggctttagatccggtggtggtggttctgctcgtcggcgttggggtgagctcctcgccgccgcagcagcatcagtagcgccagcatctcatcgcagcgcccacggaagggaaggga

SEQ ID NO: 28116 - DNA, 543 bp, Setaria italica
  Peptide Sequence Number=SeqID_94090
gtccagagcagtgtagatgttgcaagcaccagccgggacaccggaaaggggaaaaagaaggtggtgggtggagtgaaatctgatattggcaaggcgccagttgctggtaatggaactaggaatcttgacccagagaaatcaaagctctttgctgaagcccctgtggtgccatggagctctgtcttggatcgttggggctccagcggggatgcacatgtaaaccagagagggcttgagctcgagagtcattggggaagggtggataatgatgccgttatacctgcagcaaaaattgcagagttgaatgttcatagctcagtttatagagaagccccagttgagatcctaccatgtcatgccccactaaagaaaggagggctttgccagagaagggatcttaaggtctgtccttttcatggaccaattgtcccacgtgatgctgaaggaaatccatttgagcagcacagcggtagttttggtgctgaagtagatcctgttgagcactgtgacataagaggaaactcaaatgagctgaatggaaac

SEQ ID NO: 28117 - DNA, 1651 bp, Setaria italica
  misc_feature (42)..(42): n is a, c, g, or t
  Peptide Sequence Number=SeqID_94091
atgacatgtatctaaggctcatggctattatgcatctgatgnttaaggctaccatgactcctactgattatgacagtgaactgggtagtatccctgctgtacaacgaggtatattggaaatcattcctatgctacgcccgacagctacactgtcttccatgtgggcgcctctcctccttgagctattatgctatctgaatgggcaagaaggccccctccagaaaaacagtaaaaaaatacatgatcagaattccgatgcaccagtagatggtacaaagcgtgccctcgttgaacgaagtaagctcaatggcagcagtacgaaactggatagtgcagtgggctgtggttggggtcttttgtttgtagaaaagcttgtgccaatcattgtcaacctttttctggaggctccaccgaatgaaaggtttagtgcctcaccagaagtcattcaaggtcttgggaggtgcatgaatacaaggagagacaacccaaggggcaccctttggagaatatctgctgaatgcttcaatcgtgttgtgacagatgaggtgaggcaggacaatgccgattgcagaagtgatgtgaattcatataaactttctagagctcgtttctggaaggaggtcgcggacgtgtatgaaacctttcttgttggttcttgtggacgtgtgttgtcatcagatgttccttcagctgattctattacagctgatgagacccttgagatgagtgtcctcagtgtctttggagatgatattctgaaattgcaaaaggatgctccagttgaggttttgcaaaggcttgtgaactgtcttgatcgctgtgcctcacgaacaggatccctccctgtagaaactgttggtcttttacctttgcactgcagccgattttcgctgagctgtttgcagatgatgttttctttatgcagctgtatagcaaaggcaagcacatgtgctgcagcatcagaaaccagcaaagtttcaatttccattcttatgaagcggtgtgaggttatactggggcagtttttagcagacgaaaatgaccaaggagaacatcctttgcctagtgtgagagttgaggaaacgatttgtgttcttcaagagcttgctagactaatcatagacattgacgcagctaatgctctcaacatacctacatatctgaaagaagctttgggggaaaacaaatcccatggacgagctcatttattgtctttgcttcccactttctctgagcttgttgtctcaagagaagctagggtgcgggagcttgtacaagtgctgctcaggcttatttcctcagagcttggactacaacgtctgacataacaactaaagatgagactctgttttccattctgtcgttggatgaaaatcatatagttttgtcagtatttttccccttctcttatatttgattttgtatatccatcttgacaagcaacttagtgcttgtcacgtgtatctaggaacagagtttgtatatgtaacattttgatgggaaaatgtggtggctgtttctgtagtttatagcccattctttggacctttctgacgtaaggaatacctcttcagccactgatgtaagatatgccactcccttgtacctttttgacatgaatataggttggagttgtcttcttccccacgcg

SEQ ID NO: 28118 - DNA, 240 bp, Setaria italica
  Peptide Sequence Number=SeqID_94092
gctgggagaggacgctgggcgccgcgagcgtctgcacgaggcggcgcacgacggcgtcgcgcgtgcgctgcgacggcggccagatgctcagcgacgggagcagcgcctccgcggccttcgcgccggaggccggcgcggtggcggatccctcggagggagcgggctgggtgccctcggccgcggcgttggggcgtcctccgccatggctgcgggaaagagtgacctagagggagggagggg

SEQ ID NO: 28119 - DNA, 513 bp, Setaria italica
  Peptide Sequence Number=SeqID_94093
taagtaattatgcgcaaagaaaatatcccactagacgtgataacatggagtgctgtaatttcagggtatgctcagaggggatgtggccaagaggcccttgatgctctccggcaaatgtttctttatggatcagagccaaattctgtcacaatcatctctgtgttgtctgcctgtgcttccttaggagcattgtctcagggtatggaaacccatgcgtactctctgaagaaatgccttctactcttggataatcattttggtggtgatggggatggtgaggatctaatggtgcacaatgcgttaatagatatgtactcaaagtgcagatgcttgaaagctgcacgttccatatttgattgcatacctcgaaatgaacgcaatgtggtaacttggactgtcatgattggtgggtatgcgcaatatggggactcaaatgatgccctcaagcttttctcggagatgatttcaaaaccttatgcagtttctccaaatgcttatacaatttcctgcatt

SEQ ID NO: 28120 - DNA, 300 bp, Setaria italica
  Peptide Sequence Number=SeqID_94094
cgcactcctcgcaccggctgcgcaagctgccgataacaaggacaaagataaagagaaggataaggaaaagacagagacaaagataaagataaagataaagacaaggacaaggacaaggacaaggacaagaacaagaacaagtctccgccgccgccaccaccgtaccatcctccgccacccccaccgcgtgtgccatctcccccgccaccgatcgtttcatactcgcctccacctgtcgtgtcgtctccaccgccaccgttgccttcgtcacctcctccgcccgtcgtctcgtcgccgcca

SEQ ID NO: 28121 - DNA, 404 bp, Setaria italica
  Peptide Sequence Number=SeqID_94095
taacaaaaacaaaaaagaaagaaacaaaacttaaaagaaataggttaacctaataagacaacaagttagtactagtggggaagaaagtttcaatagcagggcaatcaggaaaactatggagatggaaaaggagccatcaccagtggcttctgcagttcaaatggaagtggcagaagccctggaaactgtctgagatgatccggcacagcgatgaaaccatcacgaggactaggcccagacctcaacttcttcctcctaaaccccatagagtgatgtgaaacggacttttctttttgtctcgacatgaactgacacagtatgcaaacctacacatacttgtcgatcccgtggccaagtaaaaacaagcacgaaggagatctcatggagttctttagtcttgtcta

SEQ ID NO: 28122 - DNA, 520 bp, Setaria italica
  Peptide Sequence Number=SeqID_94096
atggagatggaaaaggagccatcaccagtggcttctgcagttcaaatggaagtggcagaagccctggaaactgtctgagatgatccggcacagcgatgaaaccatcacgaggactaggcccagacctcaacttcttcctcctaaaccccatagagtgatgtgaaacggacttttcttttgtctcgacatgaactgacacagtatgcaaacctacacagctaactacctgcacaagccttcactgacggtgagatgtcaatagtcgatgttcgtcttcataaagaattctgccgaaggaaggcgccttgtaaagtctttctggtgctgttgtgctatagatttgcgtgaagggtgatgaagttaaatgtttttgtgcttgagtggtggtcctttttcccctcttctttttgtttgtcgatactaaagatgagaaaaatcaagtgacattggtttggtttactaggagtattgtgatgtaatacagaaacttgttaacccctaaaaaaaaaaaaaaaaaaaa

SEQ ID NO: 28123 - DNA, 1622 bp, Setaria italica
  misc_feature (1613)..(1613): n is a, c, g, or t
  Peptide Sequence Number=SeqID_94097
ctcatcagtcatctccctccccctccccccttggcccttccttccctttgcttgtcctcctcctccatttccacccaccaccaaacacccaaggatccccctcttcctccctgtgccaagaacaccaccgccagggaggcgaatcaggcaagaagatccaagcaggaggagcggcagcatttgtaggctcggctcagctgaattgcggttgcggttggatcggcggcaagaagggaattgcctgtgctgctgctgctggtggtggtggtggaagtggttgcagaagtgacggccaagttttcctcgtccgtttgcttggccaggccaccaacatctccacctgaatcccatctccatctacccatctccaactctatctcccctgcactgcacgaagggagattgatagagagatacggggaggggaattgcagtgcaacccaaggaaccatgatggcgtggcaggcggaggaggaagattgatcgattcatccatccatcggtggtgctagtgcctgctgttactcgccactcgccgtcctcctcctttaatccttgcttcacccctcctctccgatctctccctctctcctctgcagtcttattgccctcccttgttctcgcattgaggggcaacaaagaatagcgagtgcttgtggcctgctgttgctgttgttgtatggtcgtcggtgggcacgatgaccatggagcacggcgaggattgctgcgtcagggtggcggtccacgtgcggccgctcatcggcgacgagaagctgcagggatgtaaggactgcgtcgccgtcgtgccgggcaagccgcaggtccagatcggcagccactccttcaccttcgaccatgtgtacggcagcaccggcacgccgtcggcggccatgttcgacgagtgcgtggcgccgctggtggacggcctgttccagggctacaacgccaccgtgctcgcatacggccagactgggtcggggaagacctacaccatggggactgcctgcaaggagggatcacatatcgggatcatcccacgagctatggctgcgctgttcgacaagattgagagcctcaaaaaccaagtggagttccaattacgcgtctccttcatcgagattttgaaagaagaggtgagggatttgcttgaccctactgctgctactgtgggcaaagttgagaatggcaatgggcacacaaaattgtctgtgccagggaaaccccctgtgcagattcgagaggcatcaaatggagtcataacactagctggatcgactgaagtgcatgtcagtactcagaaggaaatgactgcatgccttgagcaaggttccctgagtcgcgcaactggaagtaccaacatgaacaaccagtcaagatgcgcaaaacagatcccatcatgactgcagatggaatgcccattgaagaaatgaatgaagactatctctgtgccaaacttcatttagtagatcttgctggatcagaacgggctaagagaactggttcagatggccttcggttcaaggaaggtgttcacatcaacagaggacttcttgctcttggcaacgtcataagtgctcttggagatgaagaaaagaggaaagaaggtgctcatnttccttaca

SEQ ID NO: 28124 - DNA, 3328 bp, Setaria italica
  Peptide Sequence Number=SeqID_94098
aggtgagggatttgcttgaccctactgctgctactgtgggcaaagttgagaatggcaatgggcacacaaaattgtctgtgccagggaaaccccctgtgcagattcgagaggcatcaaatggagtcataacactagctggatcgactgaagtgcatgtcagtactcagaaggaaatgactgcatgccttgagcaaggttccctgagtcgcgcaactggaagtaccaacatgaacaaccagtcaagtcgttcccatgccatcttcacaatcacattggagcagatgcgcaaaacagatcccatcatgactgcagatggaatgcccattgaagaaatgaatgaagactatctctgtgccaaacttcatttagtagatcttgctggatcagaacgggctaagagaactggttcagatggccttcggttcaaggaaggtgttcacatcaacagaggacttcttgctcttggcaacgtcataagtgctcttggagatgagaaaaagaggaaagaaggtgctcatgttccttacagggacagcaaactcactcgtcttttgcaggattccctaggtggaaatagcaagactgtaatgatagcttgcataagtccagcagacattaatgctgaagagacattaaacactttgaaatatgctaacagggcacgtaatatccagaacaaaccaattgtcaacagaaatcctgttgcagatgaaatgaaaaggatgcgccagcagattgagtacttgcaagcagagcttgtttcagctcgtggaggagttggatcagatgatgttcagggtctcagagaaaggatatcttggcttgaacaaacaaatgaagatctttgcagggaactatatgatattcgcaaccgttctcaaactgatccttgtgaaccagaaatgcaaaaaacttcaaatggctttacaaaaagtgaagggctcaaaagaagcctgcaaagtacagatccatttgatgtccctatgactgactcagtaagaggcaaccctaaagatattgaagatgaggtagctaaagaatgggaacacacaatgctgcaggatagcttgggcaaagagctgaatgaattaaacaggcagctagagcaaaaggagtctgagatgaaaatgtatggatgcgatactgttgcacttaagcaacactttgggaagaaacttatggagcttgaagaagagaaaagagccgtacagcaagagagggacagattgttggctgaagttgaaagcctaaatgctgatggtcagacccataaactgcgagatgcccaactgcagaaactaaaatcccttgaagcacagattctagatcttaagaaaaagcaggagaaccaagttcagcttttgaaggaaaagcaaaagagtgatgaagctgctaagaaactgcaagaagaaattcattttattaaggcacaaaaggtacaactacaacacaaaatcaaacaggaagcagaacagttcaggcaatggaaagctacccgtgaaaaggaacttcttcagttgcgcaaggagggacggagaaatgagtatgaacgccacaagcttcaagcgcttaatcagcggacgaaattggttctgcaaaggaagactgaagaggctgccatggctaccaaaaggctgaaagagatactagaagctaggaaatcttctgcccgtgacaattcagctggcaccaatggtacctctccaggctctaatatgggtgagagatctttgcaaaagtggttggatcaagagcttgaagttatggtgcatgtgcatgaagtccgaaatgaatatgaaaaacaaagccaactgcgtgctaagcttggtgaggaacttgcaattcttaaacaagaagacatacgtgctggcgcatctagcccccagagagggaagaatggaaattctaggccaaataccttgtcaccaaatgcaagacaagctaggatagcatcacttgagagcatggtgacaatctcttcgaatactcttgtcgcaatggcttctcaactctcagaagctgaagagcgagagcgtgccttctctgggcgtagtcgatggaatcaactgcggtcaatgggggaggcaaagagtttattgcagtacatctttaatgttgctgccgatgcaagatgccaagtaagggagaaagaactggagatgaaggagagaatgacagagcttgtgggcattcttcgacatagtgaatcgcggagaagggaaatggagaagcagctaaagcaaagagagcagacagctccaatggccactacacctccgagaagtggaaatggcactgcaaagcactctgctgatgaccccagcacaccactgtcccctgttgccgttcctgcacagaagcagctcaagtactctgctggaattgtaaatagccccagcaaagggattgctgcattcaacaaagagcaacttaagatggttcctatagcacagttgtctgtggggaagaaagtttcaatagcagggcaatcaggaaaactatggagatggaaaaggagccatcaccagtggcttctgcagttcaaatggaagtggcagaagccctggaaactgtctgagatgatccggcacagcgatgaaaccatcacgaggactaggcccagacctcaacttcttcctcctaaaccccatagagtgatgtgaaacggacttttctttttgtctcgacatgaactgacacagtatgcaaacctacacagctaactacctgcacaaggtaacaatgcagctaagactccatgagatctccttcgtgcttgtttttacttggccacgggatcgacaagtatgtgttgatagggtgactcgtctttggatgtaaattccctgtgcgtataaagtgagatgtgaactagaaaaaagaattagtgagtgggtgagtgtgagcagagtgaatgggcattctttcatgcaaatactgagcacaatacttaatgtttcagccttcactgacggtgagatgtcaatagtcgatgttcgtcttcataaagaattctgccgaaggaaggcgccttgtaaagtctttctggtgctgttgtgctatagatttgcgtgaagggtgatgaaagttaaatgttttttgtgcttgagtggtggtcctttttcccctcttctttttgtttgtcgatactaaagatgagaaaaaatcaagtgacattggtttggtttactaggagtattgtgatgtaatacagaaacttgttcccctatatgaatccaccctttctagtgtgcagtactgattgctgatcaagtgttaacatgttcatgttccttgagaaatgtctctgaaatttcagcaagaatag

SEQ ID NO: 28125 - DNA, 356 bp, Setaria italica
  Peptide Sequence Number=SeqID_94099
ccgccatggcgctcagcctccgccgcaagcagctcgatgtgatcgtgcggatgctgcatctgaaccagcagcagttgccgaacggcggagaggggcagggggaggaagaggcgtacaagctcctggtgatggatccggcctgcgtctccctcctctcgccggtgctcaaggtcggcgacctccgccgccacggcgtcaccctcaccctcggcatcgatcggccgcggcaggcggtccccgacgcgccggccgtctacctcgtccgccccacgccgtccaacgtggaccgcatcgccgccgacgccgccgcgggcctctacgcgtcgttccacgtcaacttctccacctcccgtccc

SEQ ID NO: 28126 - DNA, 452 bp, Setaria italica
  Peptide Sequence Number=SeqID_94100
gaatgcgagattcagagcaagtaacgacggtggcaggccgggagcggggatccgcagaggcacttgttgtgctggtagctgtaggcgtcgaacttcgccatgaccccgcccggtgggcagcacgttgcagagcttgttgtagctgacgttgaagagctggaggccggcgaggtcggcgacctgcgccgggactcggccgcggatggcgttgtggctaaggtccaagtaggtgagcccctccggcatctccacggccgtgaggctgaatcggaagtcgttgcgggacaggtcaaggtgctgcagcggcttcccccggccgaggacgggggaggcgtcgccggagagggagttgcgcgagaggtcgaggtgcgtgaagttgacggccgcgaagccggcggggatggcgccggagaggttgttgtgcgagagccagagctcggcctcgccggcgc

SEQ ID NO: 28127 - DNA, 1521 bp, Setaria italica
  Peptide Sequence Number=SeqID_94101
tcctcgattggagttcaggtgcggggcggttctggttgtgcgtttgtgtgctgaatcgcgctattctgtcgatatgatctcggaaacagggtgggtctggtgagatctcgtcatttgccgtgcaacaccggcgacgacaattgatttcctataattcctatgctaacccgagttgatttgcgggcggttcaccacggcgccaccaaagccttccgtccagtcccaattcatcctggaagccatggggagagggccaccaaggaggatgcgcattgggaagctatagaggagatggtcgccaaggacgatgtgcgttgggacagcatgctagagagccttgattgtcctggtcgacggcatggattgggtgcaacaacggatgcaggtgaaccatgatctcgcaaccaaggcactggagcatgtcctcatcgatcaatctacgctctcacgactagattcaagccaccgggcaggcagtggccaagctgacaatggagaggatgcaagacgattattcggatgcgggctcgttgtttcgacatctcatcgtgatgctacacatcgtcctccactccgaccacatccacatcgctctggtgagattcctccacactgctcccggagggggggggggtgtattaggcaaaattatgaagaaggaactctagctgggggtaaacaagacatcaaacaccttccagctccttcgcagttcaataaagaaaggcagaagagggattattgcaaagcaaacaatctatgctactattgtatggaatcttatgctactcattcatccaaatgttccaagcatcccagagctcaggtgaatgcactggtggtgagtgatctggatgttgctcttacagatgaagtgttagagcagttggcaattgaggtttcttggctgctgagttctgctcactatccattaatgcaatctctggtaccgatgaaggagatgcactgaagctcaaggcaatggtagaaaaacagattatgctgttgttggtggatagtggaagctcccatagctttgccagttcagcttttctccagaaatatggcattacacctacaaccatgaagtcgaaactggtgaaagtagctaatggagacacactgattactgacaaagaagtcttgcagatggagtggtggattcagggctataccttcaggactgatatgaaagtaaatgggcaccgatgttaggatcgatctcacaagtgtgagtctacctacttttacaagaagcttgcttttccaagccaggaacttggctgcaattttgtcaataagtggctgcacttcaattctagtccatcgtcttgtgcttagtagaagctccaaatatttgcatggaaaacttttcaattgacatggcatgctttgcaagacatcctcaaaatctatcccttcacaacgaattggatatgcaacactcttagcaaggtttatattgagtcctgacactcttccaaagatatcaaatatctccctacttgtacctcttcttct

SEQ ID NO: 28128 - DNA, 667 bp, Setaria italica
  Peptide Sequence Number=SeqID_94102
tcctcgtcaagggcagtctcttccaaatcaccatccccgttgtatggaacaactctagatcctgacttgggaccaaccaacttcttgtaacccttctcaccagtcttctgaaacagcaccctccgcgcttcaagcctctctctaacatttccctctttcaggagcttctcctcggtcaccattttgattggtgttgcgtccggagcaacagtaatatcaaccttgtcctcatagttcttagcttggtctgcgttgcggcgcggaggcggcaaaattttcttgcttgcgttggaaggagggctggcttttctgttgctggcattgtgcaatgcatccggtgggagctgcctgttagccggccatgagtttctccttgtaattgaaggggcagagctggagcccaaggaatcagtggggtatctgccatcacttacagtctctgtgagagaagatctagcgcgggacaatgatggcacatcggaggagcagacttcctcatccacgtctgggatctccctccacgcctcgatcatccgattcatggactcacgcacaatctttacctgctttgtgccaagaaagtgtcaaaaaaatgtagaaagccgcagatctacgaggataccgtggccaagatcaaaacttcataattgcgaccgtaccttatcaa

SEQ ID NO: 28129 - DNA, 1173 bp, Setaria italica
  Peptide Sequence Number=SeqID_94103
tatagtagtgaacccttactttactttagttttctttttacgtttttcgttttcttttaaccgggttttcttttagttttagttttaggtttttactttattttcctttagtttattttctttacgtttacctttacggtttatttaaccttatttgttagttttctttggtttctattgaaagaacggaaagaaagaaagtaacgaataaggacggacgtacgtagggactagactccgccgtcggggtacccggtcgggcacgggcaggcgtacggcaaccagcaggcggccgcgccgcagccccagtcgacggccgtgccggtgaccgtggcgagcaacggcgtgggcaacccctacgtgatggtcacccccgcggccgccaccccgtccacctgccagaccgtcatgaaggcgctgggccggtacggcaagctgctggaggacggcacccgcaaggctgccgacgccaccggcaacatctggcaccacctgcggacggcgcccaacatggcggacgcggcggtggcgcggctgtcgcaggggaccaaggtgtacgctgagggcggccacgaccgggtcttctaccagacgttcggcgccatgcccggggagcagctccgcaaggcctacgcctgctacctctccacctcctcgggccccgtcatcggcacgctctacctctccacggcgcgcctcgccttctgcagtgacagccccgtctgctaccagggccctgccggccagccgattgagtgcatgtattacaaggtggtgcttcccctgagccaagtgaggtcggtgaacccttcttccagcacgcgcaaccgggcagagaggtacatccagatcacgaccacggataaccatgagttctggttcatggggttcgtgaactatgacaaggctctcaagaatctctacgaagccctgcagcaccgcgatgtccacggccagaaacacagttaatcaggctttggtttgatcctacttctactgcactgtacctgtctttcgttcatgatgaactgggacatctattgagctgccgttcttgaataagatagacactgaaaaattctgatgtctttgtgctactaatatgatatgtgcagactctgaatattagatgaagaaataaatcttgccctgtgccattgcaaattaaaaaaa

SEQ ID NO: 28130 - DNA, 266 bp, Setaria italica
  Peptide Sequence Number=SeqID_94104
actggagcatgttaattattttttcatttctactctccagtcccgggtatcaaagaaaggtttgcaataaagcttaatttataggaatgtaggctgaaaaaagattcaagaaaaccaaactatatgttggtttagtgatatactgtgatcctttttaatctcaagcaacatacaggtattccatgattacaaataaaaagatcacactctaacaggtcaatctaacgcaaagagacaaatttatgacagatcactttgctagactt

SEQ ID NO: 28131 - DNA, 226 bp, Setaria italica
  Peptide Sequence Number=SeqID_94105
ctgacacttcacaagtgctgctagatattgatgatgaagatgtgaaagagagctcgctagctcttcatagtaagaagcttgcgatagcctttgggctgaccagcactgctcctggcacgcctattagagtagtaaataacctccggatctgcggagattgtcataatgccataaacttctaagcgagatttacgggaggagcataattgttagagatgcaatcgta

SEQ ID NO: 28132 - DNA, 319 bp, Setaria italica
  Peptide Sequence Number=SeqID_94106
aaaaacttactaaagcgaagaatttaatggcattatgacaatctccgcagatccggaggttatttactactctaataggcgtgccaagagtagtaaataacctccggatctgcggagattgtcataatgccataaaacttctaagcgagatttacgggaggagcataattgttagagatgcaaatcgatttcatcatttcagagaagggtcttgttcttgcggggattactggtaatattttgattgcaatgatgttcctttatttttacttattacactgaaatgtatagtatatgagacaactgttgccaatggtta

SEQ ID NO: 28133 - DNA, 507 bp, Setaria italica
  Peptide Sequence Number=SeqID_94107
caattttaggttctgctctgggaatgacacaggttcttcttgtcactggcctcaaccggaagcttggcataagcgacgagtggttctccattggggattccttgattatcacagtccttggtcaggcttccttcatgcctgttttggtgttggctgcgaaattgtgccctccaggagtggaagcaactttatttgctactttgatgtccatttcaaatgcgggcagtgttgctggtggtctagtgggcgcaggtctaactcagttcttgggagtcaccagagacaattatgaaaatctggctctgctgatcgccgtctgcaatctcacttccctgctacctcttcctcttctgggtctcctgcctaatgaatcccctacagatagtgcaccgacaaaaaatgattgacgttctcttttgatggattttcacaagacgtggatactctttcgccagaaacttatgtcagactgctttttgtctagagcagtgcagtgctcatcactgt

SEQ ID NO: 28134 - DNA, 272 bp, Setaria italica
  Peptide Sequence Number=SeqID_94108
atcttcgcgaggccgcgccggacaaggcgggtggccgacggcatgggggcgggcggcggcggcgtgggacggcagcgggcgagtccaggcggctgggagggtggtggtggtggtgacggccgcgaacccacgtcgaggaaagagaggactggagcggccagtgcccgaagcaacgtgacgggcggcggctgcccgagcggctacggcagcggtcgaacgggcggcggcggcggatgccatatcaacgagatggccggaaaggaggactggag

SEQ ID NO: 28135 - DNA, 1989 bp, Setaria italica
  Peptide Sequence Number=SeqID_94109
cgcctgtcacactgctggtctccgcatgcgcaagcggttacccgcggcaattgccaatggaaactgtggtgaggaggagggccgggggcagggtgcgtgcatggttatgagggagacatttggtggggcgctgcttagtcaggtgaagtgccttgtgtgcaagggagagtcaaacaagacagacgagataatggatatcagtcttgatctacctgggagcagttctgttgctgatgcccttgctcgcttctttcagccggagatcttggagggtgcgaacaaatatagttgcgaaagatgcaaaaagctcacctcagcacgtaagcaaatgtttatactcaggtcacctaaggtgcttgtcatacaactcaagaggtttgaggggataaatggtggaaagataaacaggaatatagaattcaaggaggctcttgttctttctgacttcatgtataataaaaaccaggatccacaaccagcatataatctttttggctgtatcgtccactcagggctctctcccgagtctggtcactactatgcatatgttaaggatgctattggtcgatggttttgttgtaacgattctcatgtctccctatcaagctctcagaatgttttgtctgagaaggtctatatcctattttatatactgaattcgaaaaatcaaaagcctagtacaaatggttactcttctactgcagctaagtctttcagcaccaatggaattggcatatcaagcacctcatctagtgagaccttgaagatacctttggtaaaacagaatggttcatgttctaccaaaggtaatgcattgctgcccctgaagaatggcaagattgcatcaggtccacttatcaagccgattcactttaagaatagtgtgacagaaaaggttaagtcaaatggcaaagaaaacctcccttcaaaaatgaacccagaagttaatgagagtgctacactgtcagtatcaaatgggcgcatgactggaaaatttgtggaacccagtaaaaagagtgccgatggtactatttcttgtggaaagattgatgatcattcagaaagaaaattgcaggatgcaaatggaaatggccatccaattcattcccagtatcttggtgaggcaagtaatggtaataccacatgtgctcaacagtattctgagaaatcatctggtgcccttgcctctaaaagtccagttttacatcatgaaatcgaagagtctgcaaactcagtaaaggatgtggtgatttcaggcaaggatagagcacactcgaaacgccaacttgaagaagacaagtttaaggaagagcttgctgagtcagcttcttctgagcttcggctgtctgtttgggtggatgatgtctgtgattttatgcgctcacaaaagagacggcgaattcaaagctcaggcattcctcaagatgttgattcaatgagaaaacacctaaaatcagattctgaaagaatatttagatcaaaagttccggagtcactggtggaaaatctcattaaacgcctgagaccatactttgagggcatatatccaccaaatgcttagtttttcatgcagtagttcttcagaatccacttaggtgccaattggatcttggtggtcaactatccagctccttgcgcggcttatttttgaggacatttttgttttccttcctgagtttaagacgaggagtggccaagttgcatgtacaatatcctttttgatgctattattccccatgctataggcaccaatatccccaccctgattctctccctttatgtctagaatgtagaagatccttccttttcttttgtaacataatagctggcaggttaaagcatgagttatcatgttttttgaccggacaaacgaactcacaccctttcaggtccctgattttggacaagttcagttatggggtgaacactcgatagaaacatttgtagatttttggtgtaatctctgggtgcaaattgtcccttgtagta

SEQ ID NO: 28136 - DNA, 392 bp, Setaria italica
  misc_feature (339)..(392): n is a, c, g, or t
  Peptide Sequence Number=SeqID_94110
gatctggttgcttccattcaatcaaacaatatggaacttgaatccacagatgttgaaatgcaagattaaagattgggctttgttatcactaatgcaacagatgaatgccaatacaaagctagagtgaaggggctgcaaaagggagtggcgcgtttccaggtctgatagatattagcacctcaagacctgcaaaaggaaagggggttaaacagtgtagcacgagtttgtggagtgaacattgatttgacatctacatggatgcaatgtgtaatgtaattcaacttgtgaagtatgttcgtcctgagtttgcaatctatgaatgacaatttctagaaaatnnnnnnnnnnnnnnnnnnnnnnnnnnnnnnnnnnnnnnnnnnnnnnnnnnnnnn

SEQ ID NO: 28137 - DNA, 844 bp, Setaria italica
  Peptide Sequence Number=SeqID_94111
ttcagtgctgtcccaatatatgagtgcactcttgagggtcttcaagcagcttactctgggagcacaccttatgtcaaagatggcttgctgttttacaacaagcatgcacattatcaagctggcatcacaccccttacactagtatggaaagatgaaacttgtagccaatatgttattgatactgacggcaaaggagaaattccaaatgagcagcaccttgtgttggaattgcaagaggatggaaagctagtaacatctgacgaccctccagtcgtgtttggtagcttggacaacgaattcatacagaagtcaaacctgcgagcagggaatcttctccgctttgctgtaagagacgagagtgtgaaacttgttgatggaaagatgcagattggtgagctgcagtttgttggaaagccaaatcgtgctcgtgctttcgctgacagccattcgaaagctttgttccagtatgctgcaaggcgtgctcctctgagaattgatgatctggttgcttccattcaatcaaacaatatggaacttgaatccacagatgttgaaatgcaagattaaagattgggctttgttatcactaatgcaacagatgaatgccaatacaaagctagagtgaaggggctgcaaaaggttgcatatccgtaattcatctgatatcagcaaatgtagtgattgctgcaaaaggaaaggggttaaacagtgtagcacgagtttgtggagtgaacattgatttgacatctacatggatgcaatgtgtaatgtaattcaacttgtgaagtatgttcgtcctgagtttgcaatctatgaatgacaattctgatagaccgaaaaatgc

SEQ ID NO: 28138 - DNA, 435 bp, Setaria italica
  Peptide Sequence Number=SeqID_94112
tcgagaaccttgttgaaatggcgcacggcctcggcagggagaccggcgtcgagcgccgccgccgccgcggcgcgacggcggaggaggagcttcacgtgcgcaagcagctgcgacacggactccgcctcgcttgccggcgccaccgaccccgtgccggacttggacgttcttctcttggcggcgttggccgtcaggttggacggggagaagctgtcctccgaccagcacacgctctcgcggcggaacgccgccgaggcgaggcggcggccggtttggagaagcaccaccgcgtcctccattaatccgaggtggaagcaggcctggcccaggaccaagtacctccactgggcttcggtgttggatttcttggagaagccggcgacgaggcggcgcttcagctcggatacgtcgaagcagcacaggaagcgggtgcgg

SEQ ID NO: 28139 - DNA, 311 bp, Setaria italica
  Peptide Sequence Number=SeqID_94113
ccatgttgaagtggtcccccgagatggggtcggggaagtagttgttgatgatgccgtgggaggaggggtagaggccggtgacgatggagtagtggttggggaaggtgagcgtggggaagacggagatcaagccctcggcggcggaggtgccattggcgaagaggcggcggatgtgcgggaggggggccttgaactggtacccgaagcggaagccgtccgaggatatgagcagaaccaccggcttctggagcttggagagcggccgcgcggtggcggcggcggaggccgcggtcacggcgaggaggtggggg

SEQ ID NO: 28140 - DNA, 843 bp, Setaria italica
  misc_feature (794)..(794): n is a, c, g, or t
  misc_feature (799)..(799): n is a, c, g, or t
  Peptide Sequence Number=SeqID_94114
ccgaatggactcggccagccgaggtggataccggcctcaccccgctcagacagttgaccagtgctgggatgtcttcttggccggatcgcccaagctgagagctacagttccatccccatgagaggacacccgtttccacaccgtcagtgccttcagttgatgtatggcatagtgcgagggagtggccaacactagccgaaatggagaatggcttatagctcatgtcaacaggaagcagtttgggtagccctgccttcctacccagctgcccataagtgttgtcaccaccgctcagtagaacgccatcagagaggaggatcagggaatgatcaatgccacaagacacatcagacacctcaagaggacttgcttcatgaacaagagatggttcccatatgatgggcatattgtcttcgctccgaattttctcttcaaccatcttttcaacagcctccatcattgaactagaatacttatctaccattttgcctatgtattcttctgcagaaggtgccctagtgctttgacccatttctcctaacctaccattttctgagtagccccaaccaaatagctttccatccttggtcaatgccatggcatgcccccatccaaatgatacctaccattattccttcagttaatgtcactgcccatccagttatttaatttgtgggagaaagttagcaccttagtgacgtggtagctagaaagtgcttccactctagatggtactgcagcttctacaatgtccttccgagtccaagttggccagctttgacctccccaaaccntaganagccatcagatccgattgctgctgaaacaacacctgacgcagat

SEQ ID NO: 28141 - DNA, 376 bp, Setaria italica
  Peptide Sequence Number=SeqID_94115
tgcagctcgccgcgtccaccggcttcgcctgggccaagaagccccggccggacgccacggcggcggcggcggcggcggcggtgaccaagaggagcggctccaaggggccaggaaccaacagcaatgccggaggagacgccgaaagaacgacggcggcggccaccgccactaccccggcgccatacgaggcggagaagcaggagatgatcaagcagtgggcacaggttgctgacgccttcagcacctccgaagcttacaacaacaggctcaggcagacgctggatgccaagcacctcaagactggaaagaagtacaagggaaaggtggacagggtggacttctcagggccgctgctgtcgcagccgcggcgcattga

SEQ ID NO: 28142 - DNA, 372 bp, Setaria italica
  Peptide Sequence Number=SeqID_94116
atcgattttgttcaccttgatactccattgcaccacatcaagattagcagtgtgctactatcacttggattccttgataggtgcaggttccttgatcgccatggaggtggtggaggaagccaaccgggccgccgtcgagagctgcaagaagctcgtcgcctttctctcgctgtccgccggcgatcctttccggcctatgcccgtagccgtggagaccgacgaggcggtcgccgggttcggcaaggtggtcgccgtcctgagcgacaggctcggccatgccagagcaagggttggcaagaggagcctggcgcctcccgtcgacgcaagctgcctcttggatcatccgtcgatggcaccgcgccaccctcccaa

SEQ ID NO: 28143 - DNA, 506 bp, Setaria italica
  Peptide Sequence Number=SeqID_94117
tctctttttccgcttccgtaggccttgtagcacatcggtcgcggacatctgtcgtcctcatgcttaacataggatccatgtcgacaggcgcccgcgtgcttgccgttaagaacgatcttgccaagctacagctcaccgcgcccgtctgcacaagcaaaggagagaaggttgccctgagccgtcgtgttgagaagcattggcgccttatcggatggggccagatccaggccggttcaacactcgaagtgccaccctgcccgctctgaagcatcatcacaccagaatttgagctgaagctgtgagtgctgtgaggagaaaacatgagattgttggtagtcctgcctctgtgttacttagccactagtcgggttttgtttcttggaaattttgaagggcactttacattgtgttactataggacgagtcctgtgaacattagcaggttgaaaaaccaagactagacctagtaggaataccaagtaattagaccttagtacgaacaaaaa

SEQ ID NO: 28144 - DNA, 466 bp, Setaria italica
  Peptide Sequence Number=SeqID_94118
atatgtttgtattctttgttttctttttggttttccttctagcaatctattcatctcatgaacaggggcgatgacattctcatggctacaatgcttaatggagctgctatcatggatggagcacttcttctgattgcagcaaatgagagctgcccacaacccccagacatctgagcaccttgcagctgttgaaattatgcgtcttcaacatattatcattctgcagaacaagatcgatcttatccaggaaagtgcagcgatgaaccagcatgaagcaatccagaaatttatacagggaacaatagctcaaggtgctcctgtggtgcctatatctgcacagctaaagtacaacattgaatgttaatactagacgaaatgttgtaattactatttgttgtaagtaaaattccccttatttccctttgttaaaggttaacttttttacctttctttaccttttcccttt

SEQ ID NO: 28145 - DNA, 563 bp, Setaria italica
  Peptide Sequence Number=SeqID_94119
cgttcaagaatgaactggagcgcaatatcactataaagcttggctatgctaatgcaaaaaatctataaatgtgaagatgataggtgcccacgaccaatgtgctacaaggcgtatggcagtggcaaagaagatagccctctctgtgatgtgccaggttttgaaaactgtaggatgaagctcctgagacatgtttcatttgttgactgcccagggcatgacattctcatggctacaatgcttaatggagctgctatcatggatggagcacttcttctgattgcagcaaatgagagctgcccacaaccccagacatctgagcaccttgcagctgttgaaattatgcgtcttcaacatattatcattctgcagaacaagatcgatcttatccaggaaagtgcagcaatgaaccagcatgaagcaatccagaaatttatacagggaacaatagctcaaggtgctcctgtggtgccaatatctgcacagctaaagcgcggagactcaggtgtaagtccaaagaaaggaagcaagaggaagcatggaagggcggtaaatgccagtagcca

SEQ ID NO: 28146 - DNA, 598 bp, Setaria italica
  Peptide Sequence Number=SeqID_94120
caaactccagtcgaaatcagtctgccctctgagatcaatcttcgtcgctgattctctgctgtgtgctcacgctcccgattgatctcgccggtgagctaggggtagttacatttgtttgcttgcgcccgactcgccgcgccaccgtcgctgaaccgccctgtccgcgcgcccgccccagttttaggccccagtgttactcaaacagaactgaagatggcacgccgaggattgatggagcaggatctgagcaggctcgatgtcgccacgctgcaccctctatcgccagaggtgatttcacgccaggcgacgatcaacatcggtaccattgggcacgtggcccatgggaagtctactgttgtcaaagctatatctggtgttcagactgtccggttcaagaatgagctggagcgtaacattactataaagctgggttacgctaatgcaaaaatctacaaatgtgaggacgacagatgtccgcgaccgatgtgctacaaggcctacggaagcggaaaagaagacagccctcactgtgatgtgcctgggtttgaaaacacttaggtattgtaagtcttccttgtagtactattgttttcttttt

SEQ ID NO: 28147 - DNA, 604 bp, Setaria italica
  misc_feature (482)..(482): n is a, c, g, or t
  Peptide Sequence Number=SeqID_94121
ttcgagttagaggtcagtgatacctttgctggttagaatcactagtgtttaagcagatgttgccattttgatactctgttttgcaggtgaatttcttcctcctaaggaggctgctgggggtgaggacaagtggaacagaaagggcaagcagggtctcaaagctcgccaagggtgagatcttgatgcttaacatcgggtcgatgtccacaggagcccgcgttgtcgccgtgaggaatgatcttgcgaagctgcagctgaccgcaccggtgtgcaccagcaagggtgagaagctggcccttagccgccgcatcgagaagcactggcgtctcataggttggggcacaatccaggccggcaatacactcgaagtcccccctgcccgctctgagtcatacaccacctgtttgacgtgaaggatacaattgaaagagtggagatgtggcaaggcagagagctgttaggaatgatttttgtgaggtggngaaaacctgaacataaatattatcttcttggatttttattcttaattttggtagtttttgcattgttattatgttagttagcgttttacctggtgagcgtaatgataagctttatattgaat

SEQ ID NO: 28148 - DNA, 2091 bp, Setaria italica
  Peptide Sequence Number=SeqID_94122
taatgctggcttcattagccggtttcatttcatgcatggatgatgcgttttctgtttttttttatgcagttgctattgagttagcactgaataagacactaggtttacccgagcatcattgtgcagtttctctcatttgcacccgcctctgcttctccatctcgttcacgccggcggaggaccctctcccactcgtgctcatcgttcccctcgccgtcagttgctccaccaccgggctcctccgcagcttctggtgtttccaagatggctcgccgaggattgatggaacaggacttaagcaagcttgatgtgacaaagcttcacccattgtcacctgaagttatctcacgccaagcgaccattaacattggtactatcggccatgtggctcatggaaagtccactgttgtgaaagctatttctggagttcagactgtccggttcaagaatgagctggagcgtaacattactataaagctgggttacgctaatgcaaaaatctacaaatgtgaggacgacagatgtccgcgaccgatgtgctacaaggcctacggaagcggaaaagaagacagccctcactgtgatgtgcctgggtttgaaaacactaggatgaagctcctgagacatgtttcttttgttgattgcccggggcacgacattctcatggctacaatgcttaacggagctgctatcatggatggagcactgcttttgattgcagcgaatgaaagttgcccacagccccagacatctgagcatcttgcagctgttgagatcatgcgtctccagcatatcatcattctgcagaacaagattgaccttatccaggaaagtgcagcgatgaaccagcatgaagcaatccaaaaattcatccagggaacaatagctgaaggcgctcctgtggtgcctatatctgcccagctgaaatacaacattgatgtgatctgtgaatacattgtgaagaaaatccccatccctgaaaggaactttacctcacctcccaatatgattgttattcgctcgtttgatgttaacaagcctggttcagaggttgatgaaattaggggtggtgtagctggtggcagtatcctcaggggagttctgagggtaaaccagaaaattgaagttcgccctggcattgtcatgaaggatgaaagtggcaacatcaaatgcaccccaatctactcaaggattgtctcgctatatgctgagcagaatgagctccaatttgctgtgcctggagggcttattggtgtgggaacaaccatggacccaactctaacacgtgctgatagactggttggtcaggttcttggtgaagttggctctctacctgatgtttacgtagagcttgagatcaatttcttccttctccggagacttctgggtgtgaggacaaaaggtacagagaaggcagggaaggtgtccaagctcaccaagggcgagatcctcatgcttaacataggatccatgtcgacaggcgcccgcgtgcttgccgttaagaacgatcttgccaagctacagctcaccgcgcccgtctgcacaagcaaaggagagaaggttgccctgagccgtcgtgttgagaagcattggcgccttatcggatggggccagatccaggccggttcaacactcgaagtgccaccctgcccgctctgaagcatcatcacaccagaatttgagctgaagctgtgagtgctgtgaggagaaaacatgagattgttggtagtcctgcctctgtgttacttagccactagtcgggttttgtttcttggaaattttgaagggcactttacattgtgttactataggacgagtcctgtgaacattagcaggttgaaaaccagctgcctgtggatcagtattgccttgtcgacatttatggtggtgtcatcctgggttcaatgttttcgcaccaaatatttgtacttttcactaatgttgggttggctacttgaagaagcctaccaaatagaaccacgtgtcgttgtgcatatgcgcaattcaataattgcaatgttcattgatgtacgtaaaattcccctattcccttgtaaaggtaacttttaccttctaccttccctaattatt

SEQ ID NO: 28149 - DNA, 259 bp, Setaria italica
  Peptide Sequence Number=SeqID_94123
caaatgagtaccatcttctcaatttcatccttacttgaagaattaccatcaggatcactggaagaattaccatctgaatcacttgaagaattaccatcctaattgatcaagaaagaaacaggtcagtaagatacaacaagatagcaacatagaaacaacaagatagcaacagcaacagcaagataacaggtcagtaagaaattagaaacaacaaaatagttctttcatagaaacagccacataaaatttatagaaatag

SEQ ID NO: 28150 - DNA, 562 bp, Setaria italica
  Peptide Sequence Number=SeqID_94124
cttcccgctgggcgcgtgcatcatgcgcaccaacatggacaacgaggacttcgtggacttcttcaccaagaacttcaactgggcggtgttcgggaacgagctcaagtggtactggacggagccgcagcgcggtcaggtgagctacgccgacgccgacgacctcctccgcctctgctccgaccacggcatgtgcgtgcgcggccactgcatcttctgggaggtggagaacaccgtgcagcagtgggtcaagacgctgtccaccgacgacctctccgccgccgtcaagagccgcctcgacgggctgctcacccggtacaagggcaagttcaagcactacgatgtcaacaacgagatgctccacgggtccttctaccaggacaagctcggcaaggacatccgcgccaccatgttcaagacggctgctgagctcgacccggacgccctgctcttcgtcaacgactacaacgtcgagagcatgtgcgacatccgggccacgcccgaggcctacatccagcagatcatcgggctgcaggagcagggcgcgccggtgggaggcgtcggg

SEQ ID NO: 28151 - DNA, 793 bp, Setaria italica
  Peptide Sequence Number=SeqID_94125
tgggcggtgttcgggaacgagctcaagtggtactggacggagccgcagcgcggtcaggtgagctacgccctgctcttcgtcaacgactacaacgtcgagagcatgtgcgacatccgggccacgcccgaggcctacatccagcagatcatcgggctgcaggagcagggcgcgccggtgggaggcgtcgggctgcagggccacgtcagcaacccggtggggcccgtgatccggtcggtgctcgaccggctcgccgtgctgggcctgccgatctggttcacggaggtggacgtgtcgtcggcgaacgagcacgtgcgcgctgacgacctggaggtgatgctgcgggaggcgtacgcgcacccggccgtggagggggtcatgctctgggggttctgggagctcttcatgagccgcgacgacgcgcacctcgtcgacgccgaggggcaggtcaacgaggcggggcggcggctgctgcagctcaagcgcgagtggctcacgcacgcgcatggccacgccgacgacaacggcgagttcaagttccgcggccaccacggcgagtaccacgtcgacgtcaccacgcccaccggcaagatctcgcagacattcaccgtcgacaaggacgacgcgcccctggtgctcaacatcaaagtgtgagcaatatatgcgtgcacattcaaatcatatacattggcgggaaatatcaaatatggtgcgtggtatgatgacatcctagcggatatagtgtgcatttgcattgtttatgcctagctagccagcccattattaatgaaagaaa

SEQ ID NO: 28152 - DNA, 280 bp, Setaria italica
  Peptide Sequence Number=SeqID_94126
gctacaatggaaacacatttgtcggcgtaagaaagttctagaatcttgggaagactttaaatttctttttagagatgcattcattcctgaatattatgctgattatttgcttgctaaattagacaacttgaggcaaggtagtaggactgtgaaacaatactttcatgattttaaaatttgtatcatgtatggtggattagatgaatgcatggaagatgtgatgagtaggttcatgagagggctcaattctgaaattcgaactttgttaattagcaaatca

SEQ ID NO: 28153 - DNA, 751 bp, Setaria italica
  Peptide Sequence Number=SeqID_94127
tttttttttaacacaggcatattaatggcagcacaagcatataaattgcaccacaggattcacaagcaaaagactagcattcataagttctcgtctaaataagtaattcacaagttttgcatcacaaacacagaaatgacaattcactgagaaggatgaggaggacgtgcaggtggccactgcccccaagaagattctgcattggacgccgccgattgattaggagtagctgcaggaggtggtggaggtggcgggaagaggttcggtggcataggtggtggagtttgacctaaactgtggaacacactctgcatgtattggaacatctgctccgtcctctgcctttcaagctgccgatccgcctcgatcctcgcctctagttcctctcggcgcttccgttctacctccacctgggcctccagagcctgcatctgtagctgtgcagcggtagggcgtggccgtatcgcggggctcgagtccgtgctccttgctcggatctgggagagagtgggagtactggcagtgtcgatcacgctatctccaatccaatacctgccatgcttcttccctcctcctaccctcatcactatttcagcatcgatatcctgagagctcggatcgaactctggcccgtgaacctccctcgccatggatgtgtactcggtgacgcggctgtggatgctgggatggctgtacgcctcgggcgggtcctccgggttgaagtcgatgtctgccgtggccttgccctttt

SEQ ID NO: 28154 - DNA, 2000 bp, Setaria italica
  Peptide Sequence Number=SeqID_94128
ccagttttgtggaaggagactgagaaagacattgagatgcagagattggatagtccattgcgacatgggcggccattgagagtgaagaatggcataaggcatggaaggaagaaaagatctaggaagatactttatggaaagggtattgcttgcatatcaggggagcctggaattggcaagacagagttggttttggagtatgcttatagattctttcagagatataagatggttttatgggtcagaggggaaagcagatatattcgacagaactatttggctctgagaacttttctggaagtagatttaagcgtggatagtcacttgcatgaaaagggaagtgaccgatgctttgaagagcaggaagaggaagccattgccaaaatccggcaagaattgatgcgtgacataccatttttagtcataattgataatttggagagtgagaaggactggtgggataagagagtcataatggaccttctgccacacttcggtggggagactcacttcatcataacaacacgtcttccacgcatgatcaacttggagccaatgaagctttcttatttatctggtgctgaggcaatgactttaatgaagggaggtgtcaaggactatccactggtggaaatcgatgctctcaaaatcattgaggaaaagcttggaagactccctctcggcctaagtattgttggagctatactctcggagctcccaataactccgactagactacttgacacattgaatcggacaccactcgtaagaaatttctcgtggaatgagagagaagttctcagcttgaaaaatcatgaaatccttgtccggctgctggatgtgtgcttatccatatttgaccacgctgatggtcctaggagtctggcaactcggatggttcaagttagcggttggtttgcaccctctgcagttccagttcacatgctggccctggctgcacataaagtcccaaaaaagcaccggagaggtccaaggtggaggaagttgtggcaaacactaacttgtggccttgcaacttctaggatgaagagatctgaagctgaagcagctgcaatgttaatgaggtttggaattgcgagatgcagcgcaaagcctgaccatgtacagtttcatgatctgatcaggctatatgctcgacagcgcggaggcacaagaacggctcaggctgtcgtccaatcagtgtacctccaaggctcaatcaaacattcttctgagcacctgtggtcttcctgcttcatggttttttggatttggttctgatcctctgttggtagaactgaggccatctgaactgatgttctttgtgaaacagattgttgtgccacttgctatacacacatttataacatattcacggtgtaacgctgcactggagctgctgcgcctgtgcactgatgcgttagagagagcagctgagtccatgcttgctcatgctggcaaatggagagaaacatcattctcctgctttaggcaagctcagtcggaagcccagtacacttatctttggcaggagctggctattctgaaaagcttctgtattggaaacaagggccaagctgatgctccgaggtggacaatatgacattggagatgacctgataaggaaggcaatatttatccgcacatctatctgtggcgagcaccatcctgacaccgtttctgctcgagaaacccttagtaaactcacaaggcttcttacaactgttcagcttagttgattcgtatagtttaggagttcacaatatattcttttcagtgtggcttttcatgaacgccatacaaaatgcaccagatcttgaaataacaaagtaaatttgtcttcagtattctttataactcttttttgttgttttccagcattttgtttcttgcttcataaatatgctagcattggagtaaactactgtattttgttttctggactattgcaactgcatgcacaaaaaaagtagtgagctaatgtgtaagttcgcatccct

SEQ ID NO: 28155 - DNA, 278 bp, Setaria italica
  Peptide Sequence Number=SeqID_94129
aaggcctaattattagggttgcaatgtgctaaagatagattaagaacaaaatatcaaattagcttgtttaatactaatgcctgaaaactgaaaaggcgtgaaactgtatcatggtgattggtgaaaattatgaagaacttcaaaatactacccaaaaccaatgcctgaaaaggtattcaagaatcctgttttcatacgcaaaagacaaacatgatataagaagaattttggttcacggtatactgggatagaaactagaaagtgaactccatgcttta

SEQ ID NO: 28156 - DNA, 325 bp, Setaria italica
  Peptide Sequence Number=SeqID_94130
aaaagcccgttaaagcagatcccaaaagaccactattttttcctggattatatttctagagtaggtatattctagccattctctctcgccaatacagcatgctccatggatagtgccatctcgcaacgttgcattttgttgtgcctagtgcctaccatggataatgccatctcacagcaccaagtaacaacaacatcatctcacatggttccttgcatatccacgatatctctagcttttacacacaaatagcagcgaaccatccaaataaaagggggaaatcctcggaagattgagctcaacaatttagtgtgtcttctttctt

SEQ ID NO: 28157 - DNA, 436 bp, Setaria italica
  Peptide Sequence Number=SeqID_94131
gttccagctccaaacctggaacagcagctcgtccgcatggaccttcctctgggattggacgcgcggtgccggcgagtgcagccgctacagctactgtggcccgaacggctactgcgactacatagagcttcccgcgacgtgcaagtgcctcgacggttttgagccggcgagcttagaagattggaagggcggcaggttctcacaggggtgccggcgaaaggaggcgctgcggtgcggtgacggtttcttggccttgccgggcatgaaatcgccggacaagttcgtgctcgtccagaatcgaacattccaggagtgcgcagcggagtgcaccaggaactgttcgtgcgtggcctatgcttatgccaatctgagcaccagcagaacgaacggggatgtgacgaggtgcttggtgtgggccgggcgatctgattgacac

SEQ ID NO: 28158 - DNA, 553 bp, Setaria italica
  Peptide Sequence Number=SeqID_94132
cccagtttctctcggccttcctttcctagcggcgacgacagggcgagcgccgccgccctcgcccagttcttcgtcgggtgcttcgccggcgacgagcatccgacagtcctgcactgggtccgctcctgaactcaggtgggatccggagaaatctgggaatacttttcaggagcatgtgatcctgagcaacggtgggtacagtcagaaatgtcttccgttgggagcagcagtggcaccagggcgacgaatggtgccgctgccatcagtgctgccgcgacggcagcaggttcggccgacgccagattccactcccaactactacagcaggacaggcggagcagatgggctggctgcttttcaggcctatcatgttttggactgcagaagggtgggaagagaatagttccagcagcacgttctgatgggaacggatcaactactcgtgggaatggtgtccaatctggtgccaattcgaaccaaaatgtgcctttgaatctatctcttctggctcctccatcatcaccagcatccttctcaaactcagcacttgctt

SEQ ID NO: 28159 - DNA, 1831 bp, Setaria italica
  misc_feature (119)..(119): n is a, c, g, or t
  Peptide Sequence Number=SeqID_94133
atgtgcagacagagatcactgatcctttgtaaatttcattgctgagctagtaccctatactatttatttctgtttctagcaacagtatcgtgcttggactaatatgtgcttccgtactntaaacagcggagcagatgggctggctgcttttcaggcctatcatgttttggactgcagaagggtgggaagagaatagttccagcagcacgttctgatgggaacggatcaactactcgtgggaatggtgtccaatctggtgccaattcgaaccaaaatgtgcctttgaatctatctcttctggctcctccatcatcaccagcatccttctcaaactcagcacttgcttcgactgctcagtcaccaaattgcttcctgtcagtatctgcaaactcgcctggtggtccgacatctaatatgtttgctgttgggccatatgctaatgaacctcaacttgtctcgccacctgtcttctcaacttacacaactgagccatctacagcaccattgaccccaccacctgaactagctcatgcaactactccttcctctccagatgttccatatgctcgatttctttcttcttctatggatatcaaaactgccagcaaggagcataacatgtctttcttatcaacaacctattctggtggttcaggactccaggcatcttacccactttaccctgaaagcccttgtagcagcctcatatcacctgcttcagcaaccccgaggactggtctctcctcaccaatacctgagcaagaggttcctactgcccattggaagacctctaggtcagcctgtgacacaccatacttcagggcttcacccattcctgagcaagaagccactgcgcagtggaagacgtctagatcggcttgtgacacaccatatgccaggacctcaccagccaatattttcgggttggattcatctaccccgagaaactacatgttagatagcaacttctttcggccagcagcatctgctcaattctacttggaccaggctcagcagacatttccacataacagcgggagagttagtgtctccagggagaagcaagatgctgatgaaattgaagcttacagagcctcatttgggtttagtgcagatgaaatcgtccaaactcagtcttatgtggagataccagatgcgcttgacgagtcattcagtatatcaccatttggaaacattgctcctgctactgagatctgcgcatttaatgatctgcctaatgaggctcagaaggtggataaatcatttgtctatgtgaaagatggcacaagtccaaagaaatcagcaaaccagctctccattgattctccaaataaagtgctgcatttggacatattcaaaggaacaaaaggaggtcatcagtgtgagcatgagggtattgtgaaagatagccatcctttcagaaaggcaactgatgaaatattgctaaaacccatagaagtaaggaagaaatctcctcctggccattcgtgctcggatgcagaaatcgagtacagaagggcaaggagtttgagggatgccaacggcgttttatcgcggcgcagtgcattggcaagacagctgcactaataagttactagtatgcaggataattccatagttcatgtagcctagtgtcatcgaatgtgagctgttgttagaagtaatctgtaggcgaagagtagccttttgtcgtatctggggattatattgccagattgttcactctggatatgtgatggtgagcttgtactctgtttgaactccaagatcctcctttgtagacactctaatcatccgcatgagcagtgaaatggaagggcgttggcacatt

SEQ ID NO: 28160 - DNA, 294 bp, Setaria italica
  Peptide Sequence Number=SeqID_94134
ggaatcattcagggctcagttgtttgtaacgagtgaactcttggattacattgagagcagggccaattcattgaagagcatacaattaaccaattgctggtatctttggacccaaaaattgagtaggtttgcatctaaatgtccccttttggaggagatagagttctcataccaaaaaatgctaccagaacttatcaggcatcttggtagcgtgcacccaaacctgaagcgtctaagaatctctctaccatccatttggcaaaacggggtacatatggatggtagcgtgcaccc

SEQ ID NO: 28161 - DNA, 734 bp, Setaria italica
  Peptide Sequence Number=SeqID_94135
tagaacgacggaacgccaaaccccaacgacgccgccaagcagagcgcgctcctccacgagctcaacaagttcagcccggaagatgtcattaaaaaggttggagcaaagaagccatgctgtggatagcaagggggttgcagagtaccttcgggcacttgttctcaccaatgctatagctgattaccttccagatgaacaatctgggaggtctgcaagtctgccagccctgttgcaagagttgaagcagcgtgtatccgggaatgaggacaaacctttcatgaaccctgggatatcagaaaagcaaccgttacatgtagtaatggttgaccccaaaacaactggtagatcaacacggtttgctcaagagatcttctcaactatcttgtttacaattgctgttggagtcatgtgggtgatgggtgctgctgctcttcaaaagtatattggtagcttaggtggaattggggcatctggtgttggttctagctcatcgtattccccaaaagagataaataaggatatcatgccagagaagaatgtcaagacatttaaagacgtcaaaggttgtgatgatgacaaaaagggaacttgaggaggtagttgagtatctaaaaaacccttcaaagttcactcgccttggtggaaagctaccaaagggcatacttttgactggtgctccaggaactgggaaaacactacttgcaaaggccattgctggagaagctggtagtaac

SEQ ID NO: 28162 - DNA, 830 bp, Setaria italica
  misc_feature (823)..(823): n is a, c, g, or t
  Peptide Sequence Number=SeqID_94136
agcaaccgcagtggagacatgccccctccgcataggggtcgcgcttcctgtcccgcgccgaggaggtggacgaggagcggggaggcggtgacgattgcgaaacggaaggcgcgggtcttgcgggggcgcctggttcccgggtcttgttgggcgggcgcggggcgtcgtcgtcctcgacggcgtggtgttagttcttggctggcgtcttcgtcctcgcgcggcgcggggttcaggcggagcgtgatcaccaactcttcgggaggccgctgaacagggaggaaaggagacgggtgcacggaggggatcggcattgggtggtgcaggggactccggggatggatcgccggagctggctgtggcggcgcaagtcgacggacaagagccccgccgacaccgagacctcggcctcggcgtcctcagcatccgagaggctcactgacgagcaggatactgcgaagagctctccaaaatcgacgcagtcaccggagatctcatcgaaggaattggaggacgacagcaatgtaaaagtgaaggtgttgagcgagaggctgtcatccgtggttcaggacattcgtgccaaggatgatctcgtgaagcagcattccaaagttgcagaggaggctgttctaggatgggagaaggccgagaaggagatcgcgtcgctgaagacgcagctgagcgctgcgacggccaagaactctgcgctggaggaccggctcgtccacctcgacggcgccctcaaggaatgcgtctggcaactccggcgagccaagggaggagcaggaccagatggtgcaggacgcgctagcgcagcaggcccggnaatggga

SEQ ID NO: 28163 - DNA, 668 bp, Setaria italica
  Peptide Sequence Number=SeqID_94137
gatgcttgcatcaattgattctgtggttggacaagatgatgccaactttgagggtgctgagcaggatggggtttctattctggaaaggaaaatttcatctctagtagagaagtacaagcaggtctcgacgggtattgaacagctcgagcaggttttagcagaggtgaagcctgattttgtggccacagcacaaggtggccttgctaccatcttaggtattgctacagaggaattggtcagttgcaagagaaatgaggtggatttcctgcagaagctgaactcttttgcagaagagaagaaggctcttgccgatgaacttgaggaagtgaaagctgctcgggatgcagcaaattctgaggcaagcaaagctaaggcagagtttgagcagatggagcataagttatcaacgaccaaggagaagctcagcatggctgttacaaagggcaagtcactggtacagcaccgtgattccttgaagcaggccttggctgaaaagacggctgagcttcaaagttgcatggcagagttgcaaaagaagtctgatgccctgcaagcagctgagggcagagttgaggagctaagagtttctctagacgaaaagacgattgaacatgagaaattgtctttggtattgtagtctttcgtagttaaacttatttatttagttt

SEQ ID NO: 28164 - DNA, 268 bp, Setaria italica
  Peptide Sequence Number=SeqID_94138
gtcgcggacgcgatccccgaccgcgtgccgttgatcttcggatcgccggatcccgcgggggccggtccggggagggccgaaagcggcgtagctacgcggagctcgagcgccgggcgaatcggctcgcccaccatctgcagtcggtcggggtgcagccgggccagcacgtcggcatccacatgcgtaacagcatcgagtacgtcgagggcctgctcgcctgcctgaagatccgggcggtgccggtcaacgtcaacttccggacaccgac

SEQ ID NO: 28165 - DNA, 313 bp, Setaria italica
  Peptide Sequence Number=SeqID_94139
caccgatccactcctacaacctccggtctccccggcgtcccgactccgagccccgccgcggagcctcaccgacatggctacagccagcggcgccccgccgccggcaatggacgagaaggcacggcgcacgcgcgacctcctagccagcttctacaacaccgacccctccgcggcttcagccgccggggccgcggccccagcgtctctggcgcggccctcccccaccgcggctcctgcgtcgcccctggactccatcaactccacctccttcgatccagagatctacatgaatgtcctggtacaacaatccaat

SEQ ID NO: 28166 - DNA, 237 bp, Setaria italica
  Peptide Sequence Number=SeqID_94140
tgattctcctccatagtgctgccatcttgagacctccctgaagatcttaaagatggcagtgacaagcctgatatcagttcagatgatagattacgcaaataaggtgagcttgatcgttctttggatgaaccatcatttcttgagctagttattccattaagggatgaatatgaagcacgtgtagcagatagggtaggaggatcatgagaggatgtatggtcaactcctgcaacaata

SEQ ID NO: 28167 - DNA, 684 bp, Setaria italica
  Peptide Sequence Number=SeqID_94141
ttcagaggaacgagtgcagattgacactgctctggagcaaggggtggacgctgtgaggacccttgtgcttaagggttttagcgggagtattgaaagattcaacctggtgcagaagtataagttccacagggtttgaatgcttgaggatctgttaaatgcttgggttaacttctgcaagaaacgagatacgctccaacatcattggtagtgttggatgtggtaatttgcagttttgaactacacacataggtgtactgagttgctgccagcctgccaaagtgtcctgcagttttgaggatattaagaactcatcagggtgtacataaggtcagtggcagagcttgatgaccaacccaggggggcaaagctgtgaaatccatgctaggatttgaatttttcttagtatagaaatggtgaaattagatggttcctaatgaactttgcggaaggaggggccatgccacccctttggccttaatgaaactctgtttctgcataagttagtattttctccacattttccttacgagaacatatgactggctgaatttggagtataaaataggttaaatttgacaaaggccttgtatttcttctgtaagctgatgactaagacatttgaatttgatataaagagaaaatatagaccattttgatcctaaaaaaaaaaaaaaaaaaaaaaaa

SEQ ID NO: 28168 - DNA, 505 bp, Setaria italica
  Peptide Sequence Number=SeqID_94142
tcagcgatccccagctcctggagagctctacgtacagtgccggagcttacactacacccgcttgcctccatcgccggcggctttcgcgtacacgccggagtcggttcgcaggatgatcttggtggcgtcctgcgagacggagatcacccaggtgtccacgtatgacagcgggccgggcctgatcagcggccgcgtgtcctccaggtcacggtccacgtcctcgcccttctcctcctcccccgagtaggcgtacctcgtcgaggtctgcgagggtgcccagatgaggcagatggcgcagagcagcgagaaggagatgagctgccaccccgccgggatcacccacgccgcgcgccaccgctcgttgtactcctccgtcgacttgaagtggatctcaaatgttatccagccaagagacacggccacagcgatgatcaacgcgttgttgagtctccggtacatctccagcttcgccgtcatccgtctcgccttgagcttgttcagagtt

SEQ ID NO: 28169 - DNA, 342 bp, Setaria italica
  Peptide Sequence Number=SeqID_94143
caagtcatctttgtacattcaattgtagaaactgtatctcttcagtgtaaaaggggactgcatatctgatgttgtttattctattgtacataatatccttcatccatattacatatttgattccatcactgttttgcattttgttaagaaacaaccttggaagacaacttatccattacctttactagttagatgatcatcgttctcattacctaaaccacgtgtcatagttaacagtttctttacaactggaatatgatttttttcctattacagaaagtgatagctcactaaaacagaaacaaaaggatgaggttacttcagctccacccttagtacaca

SEQ ID NO: 28170 - DNA, 1358 bp, Setaria italica
  Peptide Sequence Number=SeqID_94144
tgttcagcatgaacatcatgccagccatggcaaagcttcacacgtagcattccagaacccaaaagtacagtaaattcataaagtgattactaagcaaaatcgagttgatgttacaaaaacgaaaaattgtaaggcgattgatgcctaataaattacagtaaacaatattttaacaatgtctacacaaagactgactggccgaatttctaacctcaagtaggtacaatctccggagaagagggcagaaagcgaacgaggagggtccccatggcgatgcacagcagcacgaactggatggagcagaacaaggaggctctgcttgctctggcctgcagcttcaagacttctgaagtctcagagagctccttgcactgtgactctagtttatccaccatctcctcgagcatcatcgccctgttctctgtgtgccgcagcttagtttctaaggattcgtaatcccccgtcagggatttctgagcctcgtaaagagcaaattgatccttggtcaggggcatccaatcctgtgaagctcttgtaaggataaagcattgaatctctgtctccatcttctccaagaacagttggtctacatcagactgcagagacaacagatcgttgttacatggcgcagtatcctgtggttgtttctggctaagtgcacccagttcaagtatttttgaatcctgctcgttgatgagcatggttgcttcttccagtttggactcaagtacctttatcatctcacttagttcttctacagattcgtcaggatggggtgagctgctccattctgtttcactgtggtgagttgtggaattttcatcagattctttcctgatctccacaaacttttggatctcgttctcaagtgcttcctgtgctgactgaagcaatgcaatcgactcaatatatggatcaagacctgaatgagtccctccattctcgaacttgccgacactcgcttcatcaaagatatgattgttggcatcggaatcacagttgcccaatctcccaactacactcccgttctccttgtagaaacctccggtggtatacctcacctcctcacttggagcctcgtcgtcactctgatggtcatcagggaacagaaccttgtgaacaccgttgctggtgatcccggcgctggatcgccgcgcatgagcagcattagagctgcgaaggttggactcaacactggagcgcgaattctctgcttccacaggagaggcagcagcgcgcgcactggcgcctcgcccgcgcgcagcgcggaggttcttgccatgagcagcgccgccgggggctcgggatcgtggcctgtcgcggtcccggccgaagccgaccggaacgaagaaaagtaa

SEQ ID NO: 28171 - DNA, 221 bp, Setaria italica
  Peptide Sequence Number=SeqID_94145
gctccgggaagtaggcgcgcatcgtgcggaggaggcgcgagcaccggccgaggaagagggtctggaagaaggcgtggttgtcctgcacgacgacccggatggtgaggtcggggacgtacggctggaggatgagcgtctcccacttggcgacgatggcggcggcgccctcgtcgagggtcctctgtaggttgaccaccgtcaccgtctcttccaccatggac

SEQ ID NO: 28172 - DNA, 1671 bp, Setaria italica
  Peptide Sequence Number=SeqID_94146
tggtcagtcaggaaataacttgttgggtcacataatggctcatcgatcgatcatacaaatctacactacataatttacaagttgctcttgtggaagccgcatcaaaggtatgggacaagctcacatagctattgttgtgattcaatgtcgtttcctaccctgttgtcactgtggcggcgcccaaagccaatggctggaacagtcgttgagacaacatcaagctcagctttgcagagggggcacagtgcatttatcttgagccacttgtcgacacagtccttgtggaagaagtgcccacatgggagcaaccgaagttcgtcattgtccacataccttgccaagcagatacagcaaacagcatcttcggcagaaacaactcgttccttgtctgttccagcagccaagacgccacccccaccttcatttccctccccgttgcgaggcttcttcagtttaaacttgtatgtgcccaaggcattgatagcatctgaactagcacctctattttggttcaaatcttcccggaagcccattacagagattatgcagggtaggcagcaacatatcaatgtgcagagaatgaagggcatagcatagcctatgcagctgaatgtgaggaaggctatacacaacctgtacaagttaggcgcgtcatgggcagaagaatgtccaccaaatacccagacatttcccacaacaaaccacacagcgaagaaacagtccagagccatcttgaagtgatcagcgaaagcttgggcccttgtatttgcagtaaccacattgtttcttgagactccattcgtgccagttataacaccagcttcagacactcgaggggctgaaatttctgtaaaagaattaccttcagggatattgtttggaatgtagttctgattagctgattcttgaacagttgccaggtggttgcgttggaggtagcgccagtaaagatgaggaagagttgcaatacaacctattgtgtaaccaatgacccactcaaacaatggtgcatgaggatgttcattccttgacacatacagaacacaaatagcagctataatctggctaaggtttacaactagttcaattgagatccagaagccagaatttagaggactttgccgacgattattgcgattatcatctcttcttgctagaggagatataggaattgttccagaagaactttccgagtcacgagccaattgatccatgccatcacgattctctcgacgaggtgttgatgaagaagcaacgtcatcccttgggataccaatcgcatgctccatgagtaaagggtggatatctgtttgactttctctttccgattcaacaggaagagcatccatcaaccaagactccaagaggttgcatgggaaaatactggttgctgttcccagaaacagagtcgatttgatttaagataaaaggtagcgaaatgcagattttacaagataatgtgcttagctctttccccactacagatgaagtcacctcctctccacctcggaagaagagaaagaagttcctgagccaacaatcgcctcaccaaccggtcaaccacgggcagctccactccgatccaaatccgtgagctggaagacttggagacgaattcttcctccccggcctcctctcccagtctggagtggcaacgtttatttagatact

SEQ ID NO: 28173 - DNA, 194 bp, Setaria italica
  Peptide Sequence Number=SeqID_94147
ctccaccctctcggggacggaggaggcggcggtggtgctggacatggaggccggcacggtgcggtgcccggccaactacgcgccgctgtcgccgatcagcttcatcgagcgcgccgcggcggtgtacgggcccgcgccgccgtggtgtacggcgagcggcggcacacgtgggcggaggcgcgggaccgctgcgt

SEQ ID NO: 28174 - DNA, 592 bp, Setaria italica
  Peptide Sequence Number=SeqID_94148
taccaaacaaacaaatagggactactttactagtaactagaaacaaacttaactagacaagacaaaccaataagttccagctcctggccattcttgggcagatgtcatatgtccagttggatcacgattggtcgcaatgaaaaggcagcctggattctcactgatacatattcttgcatactgcattttgaataattgaagtactgatcaagtccaacaacaacagctccaacactttgtcatgttcaaagtagaagtctgcctccaactttatgtttttcttgccatcctccggaccaccaaaaacaattcaaaaccagctaacttgagctcttccaaaattccgtcttctccaacaacataaactcattagtttaaggcgcccaatcttcttgtaagcgtgtaggctgtcatgttagtaagttcctcatgtacgcatatgttagtgtcttaatttattcccttcttttctggaggaaaattatttaactttaagaacatggctgccgcaaatgatgatgtaaaaatctcttcctcagtaacttcaagtcccagtgatctgaatttctttgaagtaactagaccttactta

SEQ ID NO: 28175 - DNA, 490 bp, Setaria italica
  Peptide Sequence Number=SeqID_94149
acgcatatgttagtgtcttaatttattccctgtttgatgatgattttagtaactatcatatgctaaagaaattataaatgttaacataaacaaaaggaaaggacattaaataatccatggtaccttcttttctggaggaaaattatttaactttaagaacatggctgccgcaaatgatgatgtaaaaatctcttcctcagtaacttcaagtcccagtgatctgaatttctttgagtactgccttcttgactttctagagttgtttgttacaaaaactaatttctttcccattttccgcagcagctccatcgtctcggggaccccttcaatgagcttatcccccttccaaatgacaccatcgcaatcgaagaggaaggcgtcgacggaatcgacgagggatcgagcggcgtcggcggtgaggaggcccgcaggggagggtcgggagcccgttgaccatggcggcttcttccttctccgcggctgctctctt

SEQ ID NO: 28176 - DNA, 661 bp, Setaria italica
  Peptide Sequence Number=SeqID_94150
agtaaagtgttgattgatcagcgtgcagagcaacaaagataagattatagacaccacggttagagcagtaactgcattttgtaataattgaagtactgatcaagtccaacaacaacagctccaacacttttgtcatgttcaaagtagaagtctgcctccaactttatgttttcttgccatcctccggaccaccaaaacattcaaaaccagctaacttgagctctactgtggaaggagatgagctaaaaggtcctaccaaaactcaatcagcatcattaattatgtcccaaaaaattatctctgccttagtatttttgaataaatcataaaaaatcaatgtctaatcttgtgaagatatgccagaaaaaccagttaagccaatcagcagagagaccagccaccagaaaacagctggatgtaaaacctgatatattgaggaaacagtgagtcaaaactatggtgcagtattgattgactcaaataagtgtcatttggtttgtcttctagcacaaaattgcaaccacatggtctccacatagctttttcaatcttatggcaaatccttactcattagtttaaggcgcccaatcttcttgtaagcgtgtaggctgtcatgttagtaagttcctcatgtacgcatatgttagtgtcttaatttatt

SEQ ID NO: 28177 - DNA, 540 bp, Setaria italica
  Peptide Sequence Number=SeqID_94151
ttatgaaaaaagtaaagtgttgattgatcagcgtgcagagcaacaaagataagattatagacaccacggttagagcagtaactgcattttgtaataattgaagtactgatcaagtccaacaacaacagctccaacttttgtcatgttcaaagtagaagtctgcctccaactttatgtttttcttgccatcctccggaccaccaaaacattcaaaaccagctaacttgagctcttccaaaattccgtcttctccaacaacataaaccttcttttctggaggaaaattatttaactttaagaacatggctgccgcaaatgatgatgtaaaaatctcttcctcagtaacttcaagtcccagtgatctgaatttctttgagtactgccttcttgactttctagagttgtttgttacaaaaactaatttctttcccattttccgctagcagctccatcgtctcggggaccccttcaatgagcttatcccccttcaaatgacaccatcgcaatcgaagaggaaggcgtcgacggaatcgacgaggg

SEQ ID NO: 28178 - DNA, 1377 bp, Setaria italica
  Peptide Sequence Number=SeqID_94152
taacttttaaacgtacgaagaagacaacaattagcatcaagattaaattcattgcaattcagttgccacaatctcaattcagtgcaattaccgctgtctatattttcaagaccggcaaatgcagtcccactgccaaatttgaagcgttaacagattccatggtacatttatgaggttgtgaagctgtcttaacttgaaatggaaggactggagtttacttcaattaatatgcagtcctgggttgctatgaaataggtacccaaaagaatataaatgttgtttccaactttccatggcccatttgatttgtgcatgctgttcacgtagtaattcccaactggcactatccaaagcgtcgtgggattgtgaatttgtgataatatagtcagaactccctgccactgcgattgccttggccgagaaattatttctgcaataactcaacgagatcatacacgctatttgtgtagagatccggatagatgttattcgaagcgtcctgcagttctggtaaggaagtacaaccagacaaaacaaggagggtcttgcaaccagtactctggccaaatagtatgtcggtgtccagtctatcacccaccatgcacatccttgatgtttccagactgaagcttttcaaaaggaagtccatcaaaaaggttgaaggttttccaacaacaatgggctctttctgtactgaacaacttactgcagcaaccatagttccagctcctggccattcttgggcagatgtcatatgtccagttggatcacgattggtcgcaatgaaaaggcagcctggattctcactgatacatattcttgcatactgcattttgtaataattgaagtactgatcaagtccaacaacaacagctccaacacttttgtcatgttcaaagtagaagtctgcctccaactttatgtttttcttgccatcctccggaccaccaaaacattcaaaaccagctaacttgagctcttccaaaattccgtcttctccaacaacataaaccttcttttctggaggaaaattatttaactttaagaacatggctgccgcaaatgatgatgtaaaaatctcttcctcagtaacttcaagtcccagtgatctgaatttctttgagtactgccttcttgactttctagagttgtttgttacaaaaactaatttctttcccattttccgcagcagctccatcgtctcggggaccccttcaatgagcttatcccccttccaaatgacaccatcgcaatcgaagaggaaggcgtcgacggaatcgacgagggatcgagcggcgtcggcggtgaggaggccgcagggaggggtcgggagcccgttgaccatggcggcttcttccttctccgcggctgctctcc

SEQ ID NO: 28179 - DNA, 515 bp, Setaria italica
  Peptide Sequence Number=SeqID_94153
gatacatattcttgcatacctacaagaacattactatgacttgatcatcgcaaaactcatgatataaaagataaatagcgtagatggacagaagtcagaactaagttgaatgttgatgaaaagatgctctgaaatatataggtatgtctccgtcctaaaaagagtgtcattctagctttgtcctaaatcaaactaccttaaggttataagacaaacaaggctccttgacaaacaattaaaaactggaactgtgttgagttataagacataaaataaggtggacaaaaggtttcatctttatagttgcttggttgaattatctgaaattagaagcttctgaatttcagatccaagttaaatgctaaacagaaacaaaaatataaatgctgaggaatcaatgaaatttattggactggctcaaagaagatataagctacttgaggaaacaagaaaaggaacatggactatgctagaataatgtgataaaggaagcccgaactttcaatttcctagac

SEQ ID NO: 28180 - DNA, 266 bp, Setaria italica
  Peptide Sequence Number=SeqID_94154
tggaatcagtggttgttgtctgaattcccttctttgtttgtcaatgcccaagaaaccttttgtgctcttccctgttttcagaggtgccctggaaaagctgtcacagccttcttgagttttattcctctagcgggagaagttcatggattcttcagccaccttcctcacttgatcctttccaagttgcgtctgacccgctgcatgtttttggatggctctactttgcaatgggtctttccgtgcaatacacttaggggttgggatga

SEQ ID NO: 28181 - DNA, 228 bp, Setaria italica
  Peptide Sequence Number=SeqID_94155
aaaaattaaaaaaaaagttataacggatgaaacaatcaggcagaatatgcatagcatgaactgtgaggtaaatatacatgcttgagagttgagaaggaggaaaggccgcatctattgatcaaagaacaagtggcaacaagatcaatatccaaaaccatcacaactatatagcaaatgtatgattatcctatattgcagcaccaggccaagactggccaatccatgtct

SEQ ID NO: 28182 - DNA, 305 bp, Setaria italica
  Peptide Sequence Number=SeqID_94156
tttagttgttcgcagataactagggtccgcaacactaagtcagacacatgctggctggatatttggagcaatagccgagctcattgataactccagagatgctggtgcatctaggttgagtatttccattgaatctttgttttcaaagaaagcacagaggaaaattcctgtcttatctataattgatgatgggcatggaatgacttatgctgatatgatgaggatgatctcttttggtcacaaacgtccaaatgagcatcgcgagaatcagattggggagtattttgggaatttgggaattttaa

SEQ ID NO: 28183 - DNA, 986 bp, Setaria italica
  Peptide Sequence Number=SeqID_94157
tcaaaataaaagcattacaacacaagcacagccaacacaaaattaacctcagttaaagatcaccactagtaaacctacactctacttactcccctctcttctccagcatcttctaattcaaacgaagtctcttctctaccttgtaagaaaaccatcattgccaacttcttgcaaccttgcaagttgcaaattgcaagctgcagccaacatcacacaacacagctgtcattcccagcaacgtcagctgatcagtgccgccccgaccttgccgacgacgagctcccgggctgctcggcgtatggcctgacgaatgtcctcctccaccagacctcgaacgccctctgcaggttgggacagccatccccggccttgaggaaccttcccagccacgccatcagcacggcccgctggtcctccagcggcagcgtcaggatggcctgcccgacgccgtcctccaccaccgcccggtcgaaccaccggcacccgtgctgcagccaccggtagtcgtccatcagcggctgcagccacacgtccagcagccgccgccgggtcccctccgacggcagcgcctcccctctcccgacggccaccagcagcctcgcgctcacgcagctcaccaggtgccggtgcatcaccggaatcctggggtggagctccgccagctcgccctggccggcccagatcactgtcaactcatcagctgcatgcctatctgataaaatctcagctagccagagaaggttatcagcctccagagtgatcttcctgaacatctgctccttgtcgtctgaagattgtccagcaagcacttccggatccgaagctcggcggaacaatgccagcagggaatccaagcagttctggaaagaactgtacaaggtcatgacacatgaggaggagtctgctgctgaggaaccattgctggtgcagatgctgttgttgttctccttgaaaagcttcaggtacctagggtatttctattctta

SEQ ID NO: 28184 - DNA, 241 bp, Setaria italica
  Peptide Sequence Number=SeqID_94158
cgccttttaatttgtcctatcaacaaacaaacttcattcacatcttcgaagaagtgtgcaaccaataatccaaagaagaaactgtctctccaacgatccatcgatccttttaacttcatctcatcctatatatgaaagatatatgggtcatttaatttcttcattatcacagctgctgctcattcgggttgttcaaccatgacatttgctctagcaagtctctccagctgtcgctgttgaa

SEQ ID NO: 28185 - DNA, 262 bp, Setaria italica
  Peptide Sequence Number=SeqID_94159
ggccaaggcggtcaagtacaactgcaacttcgacttgtacgagtcacctgtggccaactggcgcgacacgctctaccttcgcctggcgcctgacccgccggccgacggcgagatgccggagaactgccgggatgcgttctttgactacgccaggcacaccaagcgtttgcttggcacattgtacaggttgctgtcggaggctcttgggcttggcccgacctacctaactgacatagactgcaacaaagggcagatgatattg

SEQ ID NO: 28186 - DNA, 275 bp, Setaria italica
  Peptide Sequence Number=SeqID_94160
ctgaagttcatcgaccccggcgccgacggcgggcggaggaacggcgcctcgccggacaggtgctgcggcgtgtacgacggcacagcgaagccggcgtagtagccgtcggcctgcttccgcttccgccgctttgacaggcagacgaacacgccagcgaagccgaggacgacgatcaccaccaccaccgccacggcggccgtttcgccggagctcagcccgctgctgctggacggcggcggcgtggcactgctatcaacggccgcaggcgagtgcgt

SEQ ID NO: 28187 - DNA, 241 bp, Setaria italica
  Peptide Sequence Number=SeqID_94161
tgctccggtgcggcaagagctgccggctccggtggatcaactacctgcgcccggacatcaagcgcggcaacttcagcaaggaggaggaggacgccatcatccgcctccatgagcagctcggcaacaggtggtccgcgatcgccgccaggctgccggggaggacggacaacgagatcaagaacgtctggcacacgcacctcaagaagcggctcgagcccaccaagcaggaggaggcgcagcg

SEQ ID NO: 28188 - DNA, 390 bp, Setaria italica
  Peptide Sequence Number=SeqID_94162
ggtcggtgaggcaggccatggccggcggctgcggtgggaacgagcagaggctgggaaggaggaggagggagatcgcaatggggagggctccgtgctgcgagaagatgggcctcaagaaggggccgtggacgccggaggaggacaaggtcctcgtcgcccacatccagcgcttcggccacggcaactggcgcgccctgcccaagcaagccgggctgctccggtgcggcaagagctgccggctccggtggatcaactacctgcgcccggacatcaagcgcggcaacttcagcaaggaggaggaggacgccatcatccgcctccatgagcagctcggcaacaggtactgcttctgctcactcaccaattctgtctgcccccttcccttccccc

SEQ ID NO: 28189 - DNA, 654 bp, Setaria italica
  Peptide Sequence Number=SeqID_94163
ttttcagctcacatgactagagaccaaaaacaaacaaacaatttctacagctaggatctcatacacatatcttgtatatccaaattagggtttagggttaggacagaatcaaaccatcaatcagagaatcccttcctaacctgataatatcttttgaagtggtagaatcaaacattatccttgcctcatcaaaattcagtaaagcctcaacatctgaaatttatcttaagtggtgctcatcagttttgaaccagtgctacattgcaagcttctgagacttgttgtcattcaagaatcccttcctaaccttggcaactcaagatattgctcctaaccacttggacatggcaatctcatgcttctccaagttgaatggcactgggttgcacttgagcaataggaagtccagaaaattctacctgatacaaaatttcaccaaacaaactaagtggcataaaaaaacagaatttgatttgcatatccgatcttcccaagataagccataaaaacctcagttgaataatggtagcatgatgtaattggccgattattgtaactctttgaactccgcttctaagcagcaggcattccatttgcagttgctgcatcatccttctgctggccctttatcctaaaaggtgtattatttcctga

SEQ ID NO: 28190 - DNA, 226 bp, Setaria italica
  Peptide Sequence Number=SeqID_94164
ggcttgggcatgagggggacgcgggcgccaccccagtggcggtggtgcgggtgcgcgtggtggacctcattccggccggcgagcaccgcggaggtcatcgccggctgcggcgggctgcggcgcgcgatctcacgggccccggcggcgcatcggtcgcttcgcgggcctgggcttcctgggcttctcggctcagggcggggcccgcttgcgggagggggtggggttg

SEQ ID NO: 28191 - DNA, 747 bp, Setaria italica
  Peptide Sequence Number=SeqID_94165
catactccctctgcaaccatctcatcaagcaaggtctccgcatcttccaatctcccacaggaggcaaggcacttgatcacagaagtgtaggttgccactgtggggcaaatgcctctctctttcatcaagcggaacatacagagacacaactcaggtttatgtgcacgactgtaaacatgcaagatgattgagtagctggtcacgtctggttcaattcgcttgtcacgcatctccttcaagagattctcagctgcatgaactgttctatcaaatcggttatcagggtgcaaacttgcatgcctgcagatactattcaggagaatgttgtatgtgactatgtttggttctattccatgatcaatcatgtcttttacgaatttctgagccatgtcactccgatttaccttgcaccatccataaattaaaatagtgtacatcttttcatttggcccatacttgtattttctttattaaatatctctgtagcaaccttggggtacttgtacttgcagagtgtgtcaagcagcgtggcgaactcgccggcgtcgggctccctcccgacgaacgcctccatgtcgtcgaaggttcgaatggcctgccgcgtcatacccgcggcaacgtacctcctcgccagcaccgcgaacgtgcgtggcgaggcggcgccgtcggccgaggcgtccacgacgacccgccacgcggcgtcgaactggcgcgcgcggccgagcgcatccacgacggcgtcgtagg

SEQ ID NO: 28192 - DNA, 132 bp, Setaria italica
  Peptide Sequence Number=SeqID_94166
ttatcttggatatgttatataatcttgaagttgctgcctatagatagatagttttttgtttatctttgcatctgaatcaatggctacttcctcgtttatccgaatcgatcgtagatgataccaaaccactgg

SEQ ID NO: 28193 - DNA, 849 bp, Setaria italica
  misc_feature (1)..(1): n is a, c, g, or t
  Peptide Sequence Number=SeqID_94167
ngtacaaggccactgctaacagaaatcgctactgttgatttctcaatggacatggatagtaagtgctactttggtcatttacagctactgcttccaaaggaggacactgaataaatatgttgatagaataataagataaaattgaaattcagactgctgtaaatacctatcaatgtatgtgtgacggctatcaaggtatatgtgacagccatagccaatctctctgcactctgaaactgcgttcaggtttgaaaaggaactctcgctctgaccatcgagtgcctcttgctcattgcagaactgtctgctataactgagatgagcttgttctttccagatatctggataagataccaaaatatcattattcaaaccatggatacttcgtcaaacaatagaaaagaagcactactccagatagtactgtttcaatacaagtaaatagctagtaaaatggatatacagtaaaagtgagttgcaaataatttcagcaaacctatcttcaatggatgaagaaatatgtttgtttaggataacacaactttaagcatgaggtgtttacagttgatttgagagaaatactaaaaatgacaagctggaactaatataactgaaacctatgctatgtggaaaatccagttgtgtgaaaccattatatatttatgtatcatatatactgtaggaaatatcattgtaaaaaactcatttttttacatattccaagttacttcagaatacttccaaatccacagataatatttttgacttaccatcacaataaacagtgccatagtctgtaacttgtggaacttttatgttgcttttctacgcaacatgctcacagctgtg

SEQ ID NO: 28194 - DNA, 167 bp, Setaria italica
  Peptide Sequence Number=SeqID_94168
tactattctagctgaaaattataggaaattcaatagcatccagctggcagtttcaactttaggcaaaaagatataaaattccatgaaaaacatttcattaccctttacgtatttgccaccataggaaaacaccataagtacctgcatggctgataactagggaagct

SEQ ID NO: 28195 - DNA, 330 bp, Setaria italica
  Peptide Sequence Number=SeqID_94169
aaattaagtaagaaaagaaaatttttaagaacaaagaacttagacaaaaggaagaaacaaggtaagtagaaaggggaaaatgtcagtcaagctagacataatggcaggaattgatgataatgacatcatgaaggtttttgggaagggtggtgcagatgttgagcgcaataagcctggtgacctttatgttactatcaaggtcagagaagaccctatctttcggcgagaaagcaatcatgtgcatgttgattctgccattatgtctagcttgactgacattttcccccttcactacctgttctcctttgcaagtcttgtcaaaattacttc

SEQ ID NO: 28196 - DNA, 1523 bp, Setaria italica
  misc_feature (1446)..(1523): n is a, c, g, or t
  Peptide Sequence Number=SeqID_94170
ctcgccgccgcggcgacctcttccccgacgcgcgagctgttcgctcgccacctcgccgccgccgcggccacggcgtggactggtccgtcgcggctgcccgaaccagggagggagcggcggagcgcgagctggtggtgcccgagcaggtctttccatgccacgaggaggatgaatacaagggattactatgatgtacttggagtgagcaaggatgcttctgcaccagatataaagaaggcatattatgcgcttgcaaagaagttccatcctgatactaataaagatgatgccaatgctgagaaaatttcaggaagttaaccgtgcctatgaggtcttgaaggatgatgataagcgtgaaatatatgatcagcttggatctgaagcatatgagcgtcatgcagcaggtggtgaccctgcagggcagggttttcctcagggtaatccatttggtgacatctttggagacatctttgataatgcgtgcagaggaggccaagatgtcaaggtttctgttgaactatcattcatggaagctgtccaaggctgcagaaagaccattacatatgaagccgatactttctgtggaacttgcaatggaagtggtgtcccccctggaactgtgcctaaaacatgtaaaacatgtaaaggttctggtgtgatatacatgaagaagggtatattttctcttgaatgtacctgttccctgtgcaatggaagtggaaaaattgtgaagaatttttgcaagacttgcaaaggagaacaggtagtgaaggggaaaatgtcagtcaagctagacataatggcaggaattgatgataatgacatcatgaaggtttttgggaagggtggtgcagatgttgagcgcaataagcctggtgacctttatgttactatcaaggtcagagaagaccctatctttcggcgagaaagcaatcatgtgcatgttgattctgttttaagcattgcccaggctgtcttaggtggaacggtctcggtaccaaccctcactggaaatgttacagtcaaggttcgccaaggtacccaaccaggagagaaggtcgtccttcggggcaaaggaataaaagcgaaaaactcatcggtgtttgggaatcagtatgttcacttcaacatcaggattccaacggaggtgacacaacggcaacgggagttgatagaggagttcgataaagaggagtgcacagaccgggaaagagttgcggctgcttccggttgaaatttttggcgctggcattcattggtcgtatacacccattagttgatggccccagcgccctttgtaaggtgcttaggcaccaaaacttactgtaatattttgaccctcatatagcagctatctgatgtataatgtatatacattacgcgctgttgttacgctaaattattgtaacattttcaattgtttatgttgcagctattaattatatnnnnnnnnnnnnnnnnnnnnnnnnnnnnnnnnnnnnnnnnnnnnnnnnnnnnnnnnnnnnnnnnnnnnnnnnnnnnnn

SEQ ID NO: 28197 - DNA, 361 bp, Setaria italica
  Peptide Sequence Number=SeqID_94171
ggtggtcaagaactactacccgtcgtcgagcgggtaccaggacgagctgctgtgggcggcgctctggctgcaccgtgccaccggccgccgggactacctcgactacgccatcgccaacgccgaggcgttcggcggcaccggatgggccgtctccgagttcagctgggacatcaagtacgccggactccaggtcctggcatccgagctgctggtggaggcgaaggagcggcggctgcggctgagctcggaggagctcgcggtggtggagcagctccggtcgaaggcggagtactacgtgtgctcgtgcatgaaccggaaccccggcggcgccgagcacaacgccggccgcaccccggcgggt

SEQ ID NO: 28198 - DNA, 445 bp, Setaria italica
  Peptide Sequence Number=SeqID_94172
agacaacttgaaactctgaactatgtcacatgccaggcacatgcacagcaatccgatcattcagttcatgcagaacatccatcagaccatacaattcatgttggtgagacacaaaatgagtctgctaatcatggaattcacagaggtctggggcatgttgagctgattaaggagaaacctgtgggaaggcacaccaaccaggtaactggtaccgctattggccccaaagtcgtaagtgtggagaagaggcaggttcaaactttgaaacagatcacacgggacagactgcaaaagaccagtcctccaaaactgcctagtcccattgaacaagacccagaacactccagtgataacattcaggcagagcaggatgaagctgaggtgggccaccaggtgactgcaagattggctcgtaagagcacaaagaggaatttgacatctctta

SEQ ID NO: 28199 - DNA, 573 bp, Setaria italica
  Peptide Sequence Number=SeqID_94173
tatgtcttcaaagctgggcgacaagcctgaaactagcatgaaaccgttgctggactatttgctttcactaaactaccgtggtgagaagctgatggttaacgatatcattgacacggtgaacaagcttcagacagcgctgctacttgctgaggtatacgtcagcgggctgccaagatacacgccattccccaagtttgaacaaaggtttcaagagtggggattggagaaagggtggggtgacactgctgaaaggtgcaaagagacactgaattgcctgtctgaagtgctacaagcgccagaccctatcaacatggagaagttcttcagcagagttccaaccatattcaacatcgtcgtcttctccattcacggttactttggccaagagaaggttcttggcttgccagataccggcggtcaggtggtctacatcctggaccaagtcagggcccttgaagaggagttactgcaaagaatcaagcagcagggtttgaaagtaacaccaaagattcttgtgctaacaagactgataccagatgccaagggcacaaaatgcaacgtggagctcgagcc

SEQ ID NO: 28200 - DNA, 275 bp, Setaria italica
  Peptide Sequence Number=SeqID_94174
ctgctaggtggcccggcccggccgggcggggatacgcgtacgcgtccgtgcctggccggcccgcggcgcaccgcgcccctgcgagatgatgcgcgccgcgcgcccacatgcttgtactgttcgtttcaggatgggctttgttggtgctgtacctgtacctacacggctgtacaattcgttgtttattcggcgcgaggtgtggacgtgatcgtgtgtagtattgtacacagcggggaggtactttgaatttacacaactacttttgaatttgcccg

SEQ ID NO: 28201 - DNA, 1227 bp, Setaria italica
  Peptide Sequence Number=SeqID_94175
ggggtgaaataaatgattggattaagaaggatcaatatactcaagtgacgtgaaaacaacaaattacgaaatgcacaaatgaagtcatgacaagcaaaaatataattgtatggatggaaagccaagcaacaagcaatgcaagaagaaaattaaagcatctgctagctagctgtgtctagagcttcatccgttgcaagaagctcttgccctccaacttggcggagaagaagagcctcatgaagctctcgtggcccaccgtcttgtacatcaccatctccggcccctggtcagtgacgagctctctcagagggcctatcgtcgcgtggatgctcggagagtggaatgccgcaacggacagccgcgctctctccgtgttgatcacagcccggtgctcgatgctccggtaccttccgtttgtgaagatctgaagaatgtctcccacgttgacaacaaaagcgccctggagaggccgcacgggaacccagctgccatcgtcccgctttacctgcagaccttgaacctggttcacttgcaggacgagggtgaggagatcagcgtccgagtggggcgagaagcccacaactttgtccgcctcggcgcatggaggatagtagttcattctcattgactgtattccgccgacgcatttgctagcaatcgcctccggttgcagacccaagttggtggacatgatacccagcaggcgatctgccacattattcacagcagccgaatacgcgtccagcgtcgatctgaaggtgccgggcttgtcaggccagaatctcatgttcctgtgctgaggcggctgcgtattcaggtaaaggatgtcagcccagtccagcttctgatcctccgagaccacgaacagttgaccgtaaccctccagctgccctcgttcctgagcaacctgcttctttgtttctgcaggcaacccaaagaatccttcaacattcgccttcatcccctcgatgacatcatccggaacatcgtggtttatgagctggaagaagccccactcctggcaggccgtatggaggcgtgcagattcatcacgacaaacctccgggtgaagcagcctctcaaagtaaatgatgggtatcgcggcctcaccgtcgccagcgacagcatctgcagccacctctggccggagatacctcggcggcacatgggctccaccggtggccgccaccattgcttgcacgctcggcacagggagagactccatct

SEQ ID NO: 28202 - DNA, 582 bp, Setaria italica
  Peptide Sequence Number=SeqID_94176
cgggtagtaagataaataaatacttcacaataacatttcataatgaaatgcgaatggtgcaatgcaatgcataacttcacttctacccatatatcccaaggaaggaggcaaggaaggaggtgagagctgcaaccacattattatatctcaacgtgcgttgctgtaccggtacttcccgcaccaatccggctacggtttcttcgtatgcgtaaacaacatgagaatgcgaatgcaagattgcaatgcatgaacttcatatacttcaaattcataacttcaaaagtaaagcctcaactggaacaagatacttcaatataaagaaaaatttcagatttatcttgctagtgtgaggtactgaaattaaatggaggcaattcaaacaacaaagttacagcatgtagaccacatcgctacgtttacttaccttcaccgaagactaagaccgtgagctaagcacgatccaaaggtgcaccacctgttcacaaatataactcagcaccaacacaaacacaagcataaacaacataattcaaagtgtttctaggctcgaacccgacattctcacaaaaacacacacaaatc

SEQ ID NO: 28203 - DNA, 585 bp, Setaria italica
  Peptide Sequence Number=SeqID_94177
tttgttttgttaggttctttgtggcggtagtagagggagttgaggctgtagaagcaggcgttgggctcctggctcgggaaggagatgtggccgacggtggtggtgacggccggcacgttgcagagcgcggaggggttgtccagcacggccgcccggcagaaggactcggcggcggtggcgccgggggcggcgcactcgaagccgtcgatcgccgggatgtcaagttggtaggtgccgtagctgttggtgaccttctccgccgtgatcttgatctcctcctttgaattagagttcactttgatcatgcagtccagcctgactttcacgcctggcaagaagtagctgtttttggagaaggagctggaggagcaggcgtcacagaacacggcgccgaccaccgtgaggttcgcggcggtgccgccccctccggagccgccctgaaagctctggcattgcgctccgcaaagaagagcggcaaacaccaccagtatctccaacgcaagagatgctcttggcttcttcatggcgtaggcaggacctccctagtattcgctcttcacacagagcagagctcatgtgtgagct

SEQ ID NO: 28204 - DNA, 442 bp, Setaria italica
  Peptide Sequence Number=SeqID_94178
tcggcagtcattgtgaagatacgcacccactgggcggtaccgagtgctatttcatacctcacacaccagtccaaaactggggctggctgaatcacgtgcaaaacatcatgaaggctgcctttatccatataatcatatagtatgaacccatcatcactcctcaaccaaaactcttttagctttaccaagtttctatgcttaattttatatattgtcttcagttctctcatcatgcttttgtatgaacctttatgtgcagaaatcacaagcttctttatagcatacacttctcctgacctcagtgtagccttgtaaacagttccatgagcaccagtgccgataatatacttgtcatcaaaattttcagtcgcctctataacctcatttaatttagaggatgaaccttcaagcatagtagttacttcttcctctatttccttct

SEQ ID NO: 28205 - DNA, 379 bp, Setaria italica
  Peptide Sequence Number=SeqID_94179
gcggcgcaatgggtgattaccctctttgtttggttgcactctggtaacataatcagattacggtgtgggtgttgtatctgattacggtggaggagggataacaagcttgtatagatattatttaggtaagggattcgattccactgtcaattgattacaaaccaccacaaccaaacatatgtaatgggattcattaccttcagtaatcagattacgttacatttgagccaaccaaacaccatctaagagtaacccttaagtgctctatggtatctgatatagttttagaattgtagtttgtgctaaacttatagttagcacatactagttaatcctacaagaaggccagcttcaagataaaaattgcacagtacatccg

SEQ ID NO: 28206 - DNA, 1486 bp, Setaria italica
  misc_feature (1462)..(1486): n is a, c, g, or t
  Peptide Sequence Number=SeqID_94180
ccacctccccacccaaatctccacgctcgccgtctgcctccacccctccggcgcgcagtccccgtcccgccgccccacccgcctcaactccgccacctcctccgtcatctcgccgctgcccgcctccacgccgggcctctcccgctccttcccgtccggcgcgcccgccgccgcgggccgccgccgcacgctcgtctggttccgggccgacctcagactccacgaccacgagccgttccacgccgcggccggggcgtcgtcctccctcctccccgtcttcgtctttgacccgcgggacttcggcaagtcgccctcggggttcgaccgcaccggcccgtaccgcgccaacttcctgctcgactccgtcgccgacctccggcggagcctccgcgcgcgcggtggggatcttctggtgcgcgtgggcaggcccgaggtcgtcatccctgagctcgcgcgggcggcgggcgcggaggctgtgtacgcgcatggggaggtgtcgcgggacgagtgccgcgccgaggagagggtgcaaaaggccgtggagaaggaaggcatcaacgtgaagtacttctggggtagcacgctttaccatgtggaggacctgcccttccgcctcgaggacatgccatccaactatggcggcttcagggaggccgttaagggcttagaggtcaggaaggtgctcgaggctccggaggaggttaagtgcgttcccatgaagaacgtgctcgagcctggggacatccccacgcttgccgagctcgggctcactgcgccaccagccatgccacaggactccaaacctgctgtcggctctactcttattggtggtgaggcagaagctctggagaggttgaagaagttcgctgcagaatgctctatgcagccaaacaaagtagacaaaagcaatacccgagatagcatatatggtgctaatttctcctgcaaaatttcaccatggcttgctacgggttgcctctctccacggttcatgtatgaagagttgaagaagcatgctactagagcaattccttctgggtcaacacccaagaatgatgatggcacatctgatgctgggacaaattggttaatgtttgagttgctatggagagatttcttcaggttcatcacaaagaagtacagctccgtacaaaagacatctgaagtcgccactggttgcactcccaccccggcgcttgcatgaacatagttagacaagctgattggcagcttttttgggtgatgaacttacacacactttcaatggagtttaaatcttttttcccaccaataaatgttggtagtgaaagtgatgactgagtgtgctgttcttttgcttttggttcgattgatctcagaatcgatctttgtatctgtcgacattcctctaaataactgttcaatactttgaatggcattgtgatcaatcttgaaaacttaagagaaaaaaaaaaaaaaaaannnnnnnnnnnnnnnnnnnnnnnnn

SEQ ID NO: 28207 - DNA, 219 bp, Setaria italica
  Peptide Sequence Number=SeqID_94181
gcatcgattagtgtgggaggaggaactgctaaactttggtttttcataagtatctagttcagtatatgtatgtacaagttgaatgacccggaataattgcatgattagtttcttcatgggaaaactgcaagtgtaatgttctccagaactgactgtaagatgattatgtacagtgttggggagatgaagaagtactgtaatccataatagacttataag

SEQ ID NO: 28208 - DNA, 262 bp, Setaria italica
  Peptide Sequence Number=SeqID_94182
gcttgttccggtcattcactggcctccaggcgcaccagggcgtcgggctcgtcggcgccagcccgtcgacgctggtcaccctgacagcttgctccgaggtggacccgaccaccggcgcgtgcctcgacggcaccatgcggagcccgacgttctggctcggcgccgtcggcttcctcatcacggcgacgtgcctggcgagggacgtgaaggggagcatgatctacggcatcctgttcgtcacggtggtgtcgtggatcagggg

SEQ ID NO: 28209 - DNA, 466 bp, Setaria italica
  Peptide Sequence Number=SeqID_94183
cccactgcggctaactgcctcgcctcgcctcgcctccagcagtctagactctagatagctagctcagctcgtcctaggcagccaggtatagtagcttgctggatccccgcgacagcgaccgcgcacgccgtcgcacacctcggcctgcctgcgcgcgtgtatataagcgcgcccggtgatccaaggctcacccattccgctcacagcgcagtaatctcaacttctcgagttagtagttcgaggatccaggattaagctcatcagctagtcctaccggctgcgctaatggaggtcgccgccaggaccgccattgctcttctcctggcgctcgccgtcctctgcggcggcgcccagggccgccaccaccgccacaccaagcacaccaggcacaactccgcgcacgcgcacgcgccttcccactcccaggctccgggcccgtcgagcgcgaggcggcacgcgcggcccg

SEQ ID NO: 28210 - DNA, 294 bp, Setaria italica
  Peptide Sequence Number=SeqID_94184
cggaataccatcaagatgagcgatcttaccatgtggattccgacgtctcagagctgacgactctttggtgctgacctcatctgatcgtgaggcgtcaacaaacacgttcactaccactattatgctcctttaaatttcgaacgatgcttctgtaatttattttcttctcctcccaagttacactctttgccctatctgaattgtatgaagttcatggtcggcgtggcgccgttgttattgacctgttaatatcgaaggctcagtttcgagttactccataacaaaaaaaaaaaa

SEQ ID NO: 28211 - DNA, 398 bp, Setaria italica
  Peptide Sequence Number=SeqID_94185
cctcatggccggcgtcccgtcccgcccgatctcctcctccccgtccgccctagccccccactccgcagccgccgccttctccttcgccggccccgccgccacgtcgcccttctaccaccaccaccacccgtccctgagttactatgcctactacgggaagaagctggacccggagccgtggcggtgccgccgcaccgacggcaagaagtggcggtgctccaaggaggcgcaccccgactccaagtactgcgagcgccacatgcaccgtggccgcaaccgttcaagaaagcctgtggaatccaagaccgcctcgcctgcgcatccgtcgcagccccagttgtccaccgtgacaacgacgacccgcgagaccgcgccccttgactccctcacggcggggg

SEQ ID NO: 28212 - DNA, 1102 bp, Setaria italica
  Peptide Sequence Number=SeqID_94186
ccggtgcccttcacgcggcgcagtacgaggagctggagcaccaggcgctcatatacaagtacctcgtcgccggcgtgcccgtcccgccggacctcctcctccccatccgccgcggcttcgtctaccaccagcctgcccttgggtacgggccttacttcggcaagaaggttgacccggagcccgggcggtgccggcgtacggacggcaagaagtggcggtgcgccaaggaggccgccccggactccaagtactgcgagcgccacatgcaccgcggccgcaaccgttcaagaaagcctgtggaagcgcagctcgtcaccccgccgcacgcccagcagcagcccccggtggccgcagccggcttccagaaccaatcgctgtacccggcggtcctcgccggaaacggcggccgtgcaggcggcggcggcggtggcggaggtggcctcgcgactggcacgttcggcctggggtccaccgctcagctgcacatggacagtgccgccgcttacgcgaccgctactggtggagggagcaaagatctcaggtattctgcttatggggtgagatctctgtcggacgagcacagccagctgatgcccgccgccatggacacctcgatggacaactcatggcgcctgctgccgtcccagacctcgacgttccaggccacaagctacccgctgttcggcacgctgagcggcctggacgagagcaccatcgcctcactgcccaagacccagcgggaaccgctctccttcttcgggagcgacttcgtgacggccgcgaagcaggagaaccagacgctgcgccccttcttcgacgagtggcccaaggcgagggactcgtggccggagctgggcgacgacaacagcctcgcgtccttctcggcgacgcagctctccatctccatccccatggcgacctccgacttctccaacaccagctcccgatcgcccagcggaataccatcaagatgagcgatcgtaccatgtggattccgacgtctcagagctgacgactctttggtgctgacctcatctgatcgtgaggcgtcaacaaagagtcgtcagctctgagacgtcggaatccacatggtacgatcgct

SEQ ID NO: 28213 - DNA, 398 bp, Setaria italica
  Peptide Sequence Number=SeqID_94187
atcacctccttggcgccgccgccgccccggggcagtggcaccggcacctcgatgtggaactgctcgccgctcggcgtctggtcgaactggaagctcttctgcttcttcgcctgctgcggctggaactggatgtgagtggagatggtggtgcaaggattgggcgaggggacagtgacaactgtcgaggtgctctttggcaccgccgccatgggcgccgtggagggaagcacgctgtaagagttcagctccaggagtggcgtctcgaggaacatgttcctgtcaaacttcctggccgccgccgccggtgccggtgccagtgctacgttggcacaaggcgacaccatgaccgccggtgccacctccgcttcatggcttctcatcagcggcgcaacgcttcg

SEQ ID NO: 28214 - DNA, 355 bp, Setaria italica
  Peptide Sequence Number=SeqID_94188
gtgccaaatactaacctagtcaatgctccgacgctccggcgccgctcccgctctgcctcgccgcctcgccacaaggagaatggctaccgccgccgccagtaacagcagcagcagggctctggtcgccgggggaggcgggctcttcaatgacaatctccagccggccatccgtccccgtgtccgtccggtgcctgccgtccgcttgcggggacgcggctgtgatgtcggacgacgacgcggggacctgggtggtggaggccgccggtgccgccctcgtggcggcggcgctggcgacgaggacgctgtagtcgagcggcgtggcgcggttgccgctgctctgcttggcgcgcaggga

SEQ ID NO: 28215 - DNA, 690 bp, Setaria italica
  Peptide Sequence Number=SeqID_94189
ccgcgacgttaaataaccgcgcccccgtccaatcatcgtgctcacgtcatgcgggcgtcacgggagattgcgctctgttttctcctctgtcgttggaaaactgagaagaaatagcaacgatcacttaaattagactgggtgatcttaaaaaattactgttagtacttaattaggatgggcgttattgggtttgaaaagccagaggcattttgcgacacattgtctgggacacgtcagcagcttagcgtaaagcgaatcgcaacagccgggaacatatcttttaggttttcaaaagaaagaacggatctttttaggggcggtataaaaaaaagatggcatactgactgtacgactgaccggtgggagcaccgtggttttttgaaagggaccaccgcgtttcttggtaccaacacaagtgctcagctcagtttaagaatggcttttagttaaaacgccacgagcagttactggcacgtgggcacgagtccgtttggactgtcgtattggttaagcactcatgcacgcatgaatcgttgccttgtggtctgatcatcggagcgagccgacggttacgacatgcggaactgatgtgttcttctgatgcacgaacggcaggcatggctccgacgagaggtatgggaagctactcgcaggcgggcactgacgcttcgatggcgcacggccacaggc

SEQ ID NO: 28216 - DNA, 1250 bp, Setaria italica
  Peptide Sequence Number=SeqID_94190
ggcggctccggcgagatccgcgtgcccccgccgccgcttcagcagcagcagtcgctcgcgcccccggggcctccgcacgggctgctccgccacagcagctcccccgccgggctgctctcccgcctcatggccgacccgcacggcatggctccgacgagaggtatgggaagctactcgcaggcgggcactgacgcttcgatggcgcacggccacaggcagctcagttcgcagtggagcttctcgaggcaggacctgccgcagatatcggagatggggatgatccccgacatcggggagagcatcgtcgccggcgggtgcaacagctccagcgacggcggcggcggcgcgcagtcctcctcctacctctcccggaacttctccgtcagctcctgggacgacaccaactccatcatattctcgtcctcgagcaagaaggccaagctggacccggccgacgaaatggtcaccagcttcagcaacatcgactcgcagtttgggttgtcaaagtcgtcgctggagatgcccggcatggatgattacctgcagctgcagcaggattccatcgcttgcagagttcgtgcaaagagaggctgcgcgacccacccgcgaagcatcgctgagagggaaagaagaacaaggatcagcaagaggctgaagaagctgcaggatcttgtgcctaacatggacaagcaaacaaatacgtcagacatgttggatcttgctgtagactacatcaaagagctgaaggacgaagttgagaagctaaaacacgaccaagcgaactgcttttgctcaggcaatcagaactgctgacactggagaagcaaaggatatgattttcgagccccagtgtttgcttcagaataactggctgcagcaatgcttaaccgcttccatgactcagctttccctttcatggttgtactatggatagcgtcaatggcttcaagactaggagatgacacgtaggttatcataattcacatcctgtgaagcggtgtcttgtgtgtaaaaattcctccatttcagcgcgaatgggattgctgttgataaaattattgtaggaataatttttgtgctcttttgtcatcgagctcaattttgcaatttactaatttttgagaagaccgtaacttggcactaatgctaatgatttgagaagaccgtaactcaggcatagcaaggataattctaacttgagcattcagctgaacaaaagaatattttactcgtattcatatatcaactct

SEQ ID NO: 28217 - DNA, 457 bp, Setaria italica
  misc_feature (31)..(31): n is a, c, g, or t
  Peptide Sequence Number=SeqID_94191
ttcattcatgtatgtatctgtgaatctggtncttactgactatgtgattttttcttgtttttggggagttacttcttagtttttattcaagttttttctttaactttactgatcttgtcatgtctaacttggtcatccaacatcccccctccctctttctcccaactcaaaaaacacttgcaaataatttaactatgccagtagctagcatatttcatttttgtatttgggtcactcgtattgaaatgttattgtggacattgttccccacaataaagtgttaacgaaacatattataacaaaaggtttcacttagttttacatgtcaggatagatgttcctcaggacctcatcttattactttgctgggaagaaaatggacttatctaaactaccattaggttatattaatcaccaatgtcatgttattatgtgcatgctgttgagaatttgggga

SEQ ID NO: 28218 - DNA, 650 bp, Setaria italica
  Peptide Sequence Number=SeqID_94192
aaaaatcaagtccagagatttactgagacacgttggtcgagaatatactgtcatccgactaggatcttgttagatgactggacagaaatgcagcaaggtcagtagaggtcagagaagatttaatacgaccacttcattgaaaactgacagatgggtgctccgaattccagctttcggtggtttcaagcaactgggcctataataattaaccaaaggaaaaacgcaactttgccatgcctacgaggtgtcaaagttttcctcataaaaaaagtttttctcgcaaacataaaaggaaaaaaggatttggaatgatgtaaacaaagatttggaatgaggtcaaccatcctgatgcgcgtgagggcttatttttatcaaggagtactttatgcagcacttcttgcagttaatggcctccaaaatatgggtagacaatagcaaaccgtggatcataaacgagtatgaacggtttacccagcaaatcatagctcctgaacagcaaacaaacaaagcagccaattcatatgactgacaaactactcccaaccattcaatgagttgacatagctttattcctgtcgtccacttttgcatcatgtcatggatgatttcacagttcaaacaataaaaaatgagagacgaaataatttatg

SEQ ID NO: 28219 - DNA, 1520 bp, Setaria italica
  Peptide Sequence Number=SeqID_94193
ttttttttttattttcacataaatgacacttttcacaagcatataaacgtccagggttgaaattgcacatggagcagcgtatggcatgacatggcatgacatgaatgaactggataaatactggacattcaaagaacctacatataatagaataatagggctcgttggatactcggatagtcttggcgaacatcactaccctgccgctctgaatattctgtatgcaaataattccatcaggatcatgcctttatgccttttggaaatgtaagtgaatcaccgtccatagggtcctgctctatcgctgcacaattcatcatcaatatcaatactgtccaggcacatcaggttgttgttgacactcggctccgagctggcattgctgcttgtagcaagaggtgagtctgaaacgctcatcggtcggctccttgtggatcctgatcgtgcactatggacagatgatgcagggatggttgtcataagaggccgtaaattatttggaatgctgcgccttatgtccatatgccgaagtgccatatccagtgattttttgacaatgtcctaccgaagcccgagctatctggagaatttgacgatttaccagatatgctgttgaggctggatctttgatcatcatgctttggaggaactagccttctcatgtgcacaaccctttcaaccatcttgttacccatttgaactgggttcacactgtcacctccattgagatgtgatcttcttactgcaggcatggagctccctgaaggtacactgccacttaatgtccttcctctggaaggagagcaagactgccgtcttggtcgagcagctggcccactctcaacagaggaagatctagaactaggtgccccaggtcttccccgggtggcagaggtcggtctttctggtagcgatgttcttaggtttggaggcgcatcaagagagaagccaggcatttcagatggtttccatggtcttgatttgacagtaggtgaactgcctcttgaaggtgttggtgctgttgtttttgctggagaacctttaggcattgtagaacctggtttggagattgaggaggatctaactggtgcagccgagttaccatgttgggccgaagggccagaaggtcgccttgttggggttgatgcccttgatgtaggcttgctttgtgctggtatggagggcctggatgaaggcgttgttgacctggtagcaggtattgatgatcttgaagtaggtgttgatgatctactagcaggcgcggatgctctgcctggaggagctggattcctgctagcagggccagctgccctgcttgaaggggtcgttgacctggctgaaggaagtgttgaccttgaagtcggtgttgatgatctcgggacagaagctccagttttggcaggtacagttgcccgggaagtgggggttgaaggtcttgaacctttggtactagttgtcagtgcaaggccttcaacaccaactggacgccctgatgaattcgctagtaccaaaggttcaag

SEQ ID NO: 28220 - DNA, 626 bp, Setaria italica
  Peptide Sequence Number=SeqID_94194
cgccgggcgggcatttcggacggcgaggccagggggcgcacgctgggcgccgtcatcaaggagaaggatgaggagctcgcgctcttcctcgagatgcgccgccgcgagaaggagcgcggtgccgcggcggaccagctcctgctctccggcggcgccgcggcggtggacggggtactgcaactcgacgcgctgccacccgccgaacccaagccggcggcgtacaaggtggctggtgttggattcaggagggcgcccggcggagcggatgacttcctcaatgcggacgccggcgacaagaacgattacgactggcttctgacaccaccaggaactccacttttcccttctctagatgttgagtcgaaaaggtccccagcgagccaagttggaacgccaaagactcgtccaactgccttaaaatcaaggttggccaatcatccagatcctccaacaagaaccaacctcccattaagaacagcgtcatcgaacagcttgaactcagctgctacaacacgccgaccatcatcgtctggggggcttacttcgaattcatcaaggccttcaacaccaactggacgccctgcactgacaactagttaccaaaggttcaagaccttcaacccccc

SEQ ID NO: 28221 - DNA, 1070 bp, Setaria italica
  Peptide Sequence Number=SeqID_94195
tacccccaccagctgttaaaagttcagttgctaatgagtcaaacattgctgaagaaacacaagaggggacacttttgccgcagagagaggagcctgctcctttgcttgagaacagggggtcgctatcattacaggatgttgaaaggaacagggacagtgcttgtcatgaggcattctttgaggaaagaaatgccagggataaatctgaaccttcggtgtcaaagactggggactctcctgcgttagacaattgtagacattgacaaagacaatggcaatcctcagatgtgcgcttcctatgttgtagagatatactcaaacctaatggcttcagagcttatgagaagacccagtccaaattacatggagggtttgcaacgggacatcacaaagggcatgagaggaatactcattgattggcttgtggaggtttctgaagaatacaagcttgtaccggacacgctgtacctcactgtatatctcattgaccgctttctttctcggaactacattgaaaggcagagactacaacttctgggaataacgagcatgcttgttgcttcaaaatatgaagagatatgtgctcctcgggttgaagagttctgtttcataaccgacaatacatatacaaaggcagaggtgttgaaaatggagtgccaagtgctcaatgacctgggatttcatctttctgttccaacaacaaaaacatttctcaggagattccttagagcggcacaggcatctcgtaaaactccttctgtcactttgggatttctggccaattatcttgcggagttgacattggttgaatatggattcttgaaatttcttccttcagtggtggcagcatcggctgtttttcttgctagatggacgcttgaccagtctgacctcccatggaatcaaactcttgagcactacacctcttacaaaagctctgatattcaattatgcgtctgcgctctacgggaactgcagcataacaccagtaactgccctcttaatgccgtccgtgaaaagtatagaaatcaaaagtttgaatgcgtagcaaacctgacttcaccggagct

SEQ ID NO: 28222 - DNA, 776 bp, Setaria italica
  Peptide Sequence Number=SeqID_94196
cgcacggcaatttcctcctgctgttggagggagctttgtttcttgctgttgagagccttctagtggagtgtgaaaggtggttccgcaccatgggctctcgaacttcttcggcgctagttccactggatttcgttattgaagtctggtactttgctcaagagcatggtgttacttttgttcaagacatatgcaaataatatctagctcagaattttgtaggcatttgttatctcaaggaagtcgtttaataaaataccttatgatttgttatgttcaagcattgaatgtccacatctgacggtcgatagtgaaaaacaattgtgtgaagcaattttatattgggtttcagaaaatatggaaccctgtgaccggccaaattccaactcagtagatggccacctcttccttcttagcaaggtgaagatatgccttttaccattagaacttgcgacaggaataaagaggcattggtttgactttggaaacaatatcgtttgtacaattcttaatcttctcaaggacagtttgaaaactctattggatgccattgctggcggtaatttgaagggatatggcattcgaattacagaatattcaaagaacatagtgctttcaggatgtccacaaataactacagcattcttgtacatatctgttctccctactgatctggattgtttcatttaagagaaggatagtaagttcatacacccaggttgatcatcaaagcttcattctgtatgatgaactggagaaggctgactaaacccttatta

SEQ ID NO: 28223 - DNA, 353 bp, Setaria italica
  Peptide Sequence Number=SeqID_94197
taaatctagaatagcatattaaggttcagcgtcaagtcggattattattcaaccgaagcctcgtcggctcgcggctatttgacaactcctttacaaactcccatcatatatgtcacatcgcagctgctgcatattgaagcattctgcacgccgtcgatcggcagcaacaccgccgtcgctactccatggcagccgagctcagagcttgctgtggacagcgatgggcctgggcttgggccgggccgtggcgggctccttgggcaccacgacggtgagcaccccgttctccacgccggccctgatccggtccacccgcacgtcctccggcagcgccaccgcgcgcgcgaactccg

SEQ ID NO: 28224 - DNA, 516 bp, Setaria italica
  Peptide Sequence Number=SeqID_94198
tcgtaggtaattgtttcttgtattgtctagtttaaattcttggtattggttgtattcacctttccggtcatcatcagatttataagattcaacatgctcatcatgatcatcaacatattcatcttctgattcatgatcgaactcttcatcgtcatatttatgcctgtcgtcctcaatttctgaatgataaccaacataattttcttcggcgggttctggtatttctgattcatcttcaagtgattcttctgctggttctggttatttcaggttcatcttcatgtcccttatcttctttactaacctcatttacactctctccagtccagcgagaagccacattcccatatatatttgaggaggagggaaagatgggaaagctaaatccagagagaagcaagatgatcaggaggctggtgaatgctgttcaatcattccgtcaagccatcaatttagctccagatgcttggagtgccatgctaatccgtactttgttgaaacatgaatcacagtaaa

SEQ ID NO: 28225 - DNA, 651 bp, Setaria italica
  Peptide Sequence Number=SeqID_94199
aggacgggttactaggtaatttactagaattacaatacttacaaagtagaattcttctgctggttctggtatttcaggttcatcttcatgtcccttatcttctttactaacctcatttacactctctccagtccagcgagaagccaccatacgacctaactcctcccttgacaaaccctcaggattgtcagagctaggatcctgttctgaagtagttgcagactccttcggtggtgattcatctacagttccactatcaccttggctttcagaaccatgctgctcaacagatatcccgctttctgctacatgattgtcatggttcgtggcatgcccatcgtgttgttcagctaccttgctttcatcttcttgcacaggggggtcagtttccttagaatctacttcctgagaagcatcctgtgctttcttttccacagtggctttcttttcagcttcttcttttattctcttctcttccttctctttccttagacgctcttcttcctctgccttctctattaatctcttttgctctttgaagacctagtacgaacaaagtaccttaggaagtaaatttaactaacttaacaaacccttaacaaaactttaagaactaaagaactaaccgaacttaacaaataactttaaaga

SEQ ID NO: 28226 - DNA, 2464 bp, Setaria italica
  misc_feature (1)..(126): n is a, c, g, or t
  Peptide Sequence Number=SeqID_94200
nnnnnnnnnnnnnnnnnnnnnnnnnnnnnnnnnnnnnnnnnnnnnnnnnnnnnnnnnnnnnnnnnnnnnnnnnnnnnnnnnnnnnnnnnnnnnnnnnnnnnnnnnnnnnnnnnnnnnnnnnnnnnntactgtgaatccacctgaggaactgacatttaaattatgctggttctggaatgcactgtttttaatcaaatgtataacaagttctcaagacacagcagcctggcatctttccctgaataaatgcagcaccgttaaatcacaaagaaaagctcagttgcagtcgcctctaccagacaagtcaggatgaggctggaaaattgcaacatcctaccaagctcagctaaaaagatgttctatgcgagctagctagcattgcctcggtggcgatctaaatgaggcattccggtttctccagcttgatcgtttttcgttcatatacctagttgatttccactcttatggttatgaatgtaactgagagttatgcttcctgatgacatttgtttttattgttccttgagtttagagctcgtcatgcccgggctgtttcgaagacaaggcgtcaaatttgttttgcagctccttcagtttctcctcaacgcaaagtgcgggagttgacaatacagccacatactcgcatcggctaggctcatcaacatcattaagctcattgctcagcccacatctaagcctaactttcaggcttcggtctgggccgttccagcatcggtccccgtttgaaaactgcataactcggtatgattcttcaaatttgtcccaacgccccaggttggtggaactgtgtccttcagcttgtgttgctttcttgtatgcacagaccttgtaagtatacttgccctccttgctctcaaagcactgatcataaaaggaatagaactccttgtccttaccaaagtcgtgttttagcttctcagatagtgtggatatcttggactggatttttgaaagctttgagctggcatcatcatactccttgcgaacacgagaagcctctgataaatccacaggggtcttgaaaaagttgaatttttgaagaacattttgtacagtctgctgaattttgttcatccacgaggaatgttctgatgcagttaaatctggatggtgatcacctttccggtcatcatcagatttataagattcaacatgctcatcatgatcatcaacatattcatcttctgattcatgatcgaactcttcatcgtcatatttatgcctgtcgtcctcaatttctgaatgataaccaacataattttcttcggcgggttctggtatttctgattcatcttcaagtgattcttctgctggttctggtatttcaggttcatcttcatgtcccttatcttctttactaacctcatttacactctctccagtccagcgagaagccaccatacgacctaactcctcccttgacaaaccctcaggattgtcagagctaggatcctgttctgaagtagttgcagactccttcggtggtgattcatctacagttccactatcaccttggctttcagaaccatgctgctcaacagatatcccgctttctgctacatgattgtcatggttcgtggcatgcccatcgtgttgttcagctaccttgctttcatcttcttgcacaggggggtcagtttccttagaatctacttcctgagaagcatcctgtgctttcttttccacagtggctttcttttcagcttcttcttttattctcttctcttccttctctttccttagacgctcttcttcctctgccttctctattaatctcttttgctctttgagcctgtcgacaagtccttggagtaatttctcttcacccttcaactttgctagctccgcttcatctttagcaacagcctcttttgccttttcaacttcctgtttccgaataacgacaccgcttttgtacgtagcgattttcttcttcaatttctctcttgccgccttgccagcctcccagcaagtgttcttacaggtcacattgctatcatattcgtcgctcccatcacagcaatcacaaatgccgtcattcactcgtgacgagaatatggtgactggagtgtggcctgcattcttgcagtagaatttcccctcagggcacgcggatgtcccaggctcgtcggtgccgtcggggcagtcgcagaaatcgtcgttgagctggtccctggagaacctgcccgatccgtccctgcacttgatcactccgcccttgtagtacgcctcatcttgcggggggatgccgagggtgtcgagtggcggcttggacgcagccgccgcggaggcgcagaggaagagggcagcgacgaggaggagcctcatgcctgcgcggcgcacggaggagggtcaggagcggcggatcggcggtggctcgctcgagtccgggccgttcttcaggccgggccgtctccgcctatcaggggactggaacgagttg

SEQ ID NO: 28227 - DNA, 324 bp, Setaria italica
  Peptide Sequence Number=SeqID_94201
ctgggagatgatgtcgggcgggaagtcatcgacgcggccgtggcggctgtaggcggcgacggcgcgcatgccgcgcggcgtgatgccgtcgcgggagaagtcgatccggtcgcggtgcgcctcggcgaacccgccgtagaggagcgtgttgagcggcttggagagcgcggcgatgcacgagcgctcgcacgccacctcctcctcgccgatgacgaaccacaggtcgttggtctccggctcctcctcctcctcgctcatctcggacgcgttgcgcctcaggcggtggggcggaggggtggcgggaggaggcggtgggcggcggca

SEQ ID NO: 28228 - DNA, 513 bp, Setaria italica
  Peptide Sequence Number=SeqID_94202
tagggtttgtcgttaagaattagtcgtaaaaattagaacctaaacttgtgataccatatagaaggaatagattacgtataatcgatgtattgatggttattgcattgagcttctcggccggtacatattaagtacaagatttgtgggccaaggctccccagatacatatggcagtctacgacacgtatatctacaactaccaaatatactctaacacttcgttttgggagattcttattgtatatttggcagcacgccatgttgatagtcctgttggaacaatatccatgaatttatcaccatttaatagcagatgcatgcaagtagagtgtcactccatcagctttcaaccactttagattcaagggagatctttctgtaaatcacactgtggactctacatgttgtggttattatttcactcatcacatttggtcagaactctaaagttcattatagtgcaacgagcccatcctaacgtgacagttcataacgatttactgttacaatcaa

SEQ ID NO: 28229 - DNA, 291 bp, Setaria italica
  Peptide Sequence Number=SeqID_94203
tatgagactctatgcgcagaatggcttggataaataaagagaaacagaaaggaaaagaaaaggcagaaaacaagaagaaagattacagatcaaatgtgttgagggcatcatgtgtgagctcgctgtgaagtgttgttatcctcgtgtgtagactggatgtctggataagaactgttacagactgtagtcttcagcttacggattttaactaaacagtttaatgatgattattttgttttctttttttttgttttatccatggacatgaggactataatcgttttgtttgct

SEQ ID NO: 28230 - DNA, 1531 bp, Setaria italica
  Peptide Sequence Number=SeqID_94204
ctcataaagctcgcaacagatgggatgacatggtgccctgggtctgccggttttgatgcccaagggaacctagctttcatgatttgtgacccaatgaagctggcctcttctccggctgcaagatcatcctcagcatcctcgtcctcatcacattcgtggaagaaggaccacccaatgcaatttgggatccccatatctgtggtttgcgattggttgtatcaacattggcagggcaacttggacgaggttagcaagccaaagttacctcttgttcggttgatgtccagcaggagtgatcactcaagcacctcattcactcgtcgtcatgtattcaagcctgacgacgagaatgatgatgcctctgtttgttcaaagcctaaacatcagcaggcatcaggaagctcagccaccgcaaggatctcgcatgaagcgaatcctctagttgatctgcgcactagcagcgagcaagggattgcgacgccagaaatatatgaatcgccaaggcgaagttcttgccaggctcacaaggatgctgcaccagttcaacttttggacatcaacttcccgcccagggctccaaagactatctttctaccactgcctctgaagcaaatgctttccgatgagaacaatgtcgaaacatccaggccaaaaaatcgatcgaaaggcaatggtttcccatcaggactgatatggcaccgtaacagtgaggctgagtgtagggaccctccagtagctcttcggcatgaggattgcagcagtgaggggcagtcgagctcatcacctgttgagatactggagtatggaggtcaagataattatagcagcgaggaggaaacaatgtactcagctgaaaccatggaaagcaggaacattccaagccccagggaaaagcatgtggggaggagccagagctgtgtcacctacagcaggtggagctctccaagaacctcgtcgatgcaaaacggaaccttgcgaaagcagcatacactgatccctgtgcggaagacacactcgcagaacaccgctctgccgcagaggagtcatgactatttaagcccaacggtctcctcagctatgaagaagaggaattccatggaacagcaacaacccacaaagcctcgtcggagcgctgttcagtcttccccaaaatggatgttttgatggttctgcacatctggatttgtgggtggtgacgatgaacaaagatttgccgttttggtgggaatctactgctcctatgtttccttctcaaagcttatctgtaagtcgatgctgtcttccttgctttctctctatatgagactctatgcgcagaatggcttggataaataaagagaaacagaaaggaaaagaaaaggcagaaaacaagaagaaagattacagatcaaatgtgttgagggcatcatgtgtgagctcgctgtgaagtgttgttatcctcgtgtgtaactactcacactgagtcggagatgttacagactgtagtcttcagcttacggattttaactaaacagtttaatagaaaaaaaaa

SEQ ID NO: 28231 - DNA, 559 bp, Setaria italica
  misc_feature (532)..(559): n is a, c, g, or t
  Peptide Sequence Number=SeqID_94205
ccaagggcttcgcgcagtcgcggcgcggcgactgcgcgccccggcggtcgccgctgttctacttcggcgagaacgtcgtcgttgggaagggccggcactggaacgcgacggctctggtggcgccgtgggtggcggaggggcagtggtacgactacgggagcaactcgtgcgccgcgccaccgggcgccgggtgcctgcggtacacgcaggtggtgtggcgcaacaccacgcaggtcgggtgcgccaggatcgtgtgcggctccaacgacaccctcctcgtctgcgactacttcccgccgggcaactacggcaccggcaggccctactgatcgtcgccggccagctgatcatgttgctcggtccgtgcaaaatatagttggttgccatgcatatggtcgagtcatcgagttatgttttactgtggattattgtgtgtctattcgttgtgtgttgtgattcttaagcatcaccgagacaccaacgtcccatggacgtacggtatgctgaaataaactgagattccattgaattnnnnnnnnnnnnnnnnnnnnnnnnnnnn

SEQ ID NO: 28232 - DNA, 377 bp, Setaria italica
  Peptide Sequence Number=SeqID_94206
ctactgtggatctgcaccgggcggcgcggaggatgcgcgcgcgacgaggtcgggcgggaaaagcgccgggtcggagaagaaggcgcggaggcggagcgcgtgcgcgtggcgtccgtcctcctgcagctcctgcagcagttcgaacgccgtgaggtggtaccgctcctccagcaggaagttcaccacgcagttgcacagcgacgcccaccgctcgtccgccgcgccgccgcccgccatctccatcctcctcgggttccggcgggcctacctcgatcgcgggggagctcgtcgggcgtcgttgtgtggcatgtggccgcgggcccgcggcggaaggcagatctcgcgcgggcgactcgaggccggtggggaggaaggtg

SEQ ID NO: 28233 - DNA, 1738 bp, Setaria italica
  Peptide Sequence Number=SeqID_94207
gcgcgcacggcattgtacttctagttgttcacaggaggtgagatgtatgttgtgccgtgcagcaccaggcagcatgttgggttttaccaccaacaggaacatcatgtaattggatagtacctcggtagcctcaaggagctcttttgtatgtttgcccttggatttccggatgtacacctcagttgcaatgtgccaaacaagaatgctctcgtcaaagtcgatgttgacactccagcgagcaaagtcctcataggcttccatacttttaagtataaagctgcctcttgagttcgaatcggtatttttgtattgcagcgctcgatccttgtctaccagtgcttgcagaaccaatttcttgatatcttgtattgacaatatgtcgctatgtgagaaagtgcccgagaaatgcatctggttccaccagtcctggagccccaatttcattgctagtctgctccctatctcattcgtgttgcgggtgcacaggtggaacaaattgtactgaccaatggagcccgaccagagcctcctacttgctggatggacacgctgaccaagggaagtgataacatggagaggccactcccatcccctgcccctgcggtgcaacaaagaacatgtccaggtggatagtacagccctgcacactgatatgatttccaggaccaaagccccaaccagtaaaacataactgataatcacatccactctgctgaaaccatttccactactgttgatactgagttgaaacaacagaaacgttgtggctgtgccaagcaatgaaatgaaatggatgcagaagccataccatgtgtggattaccgctgccttggtgtacaggaagtcatacatcagagacagctccatctcgaccaacttgtatagatcctctcccaaataagatattacagaacctggtttagaattagatattgaacggaccaagtggctcggtaccattatgatatctgcgaagacacctttgcagatatcgaattgggagtgggctccaagcagtagttcctcttcgctggtacccaaattcagtaacaggtaagggttagtcttgaactttcgggtgctgatgctgttgcggatgctgctaatgttgccacacttgagcgcccatatcctctcaccatatttgagaagaccggcaacaaacatggagagggaggccagcaaaagcaaggtcccactgcaggcgatgtactcgtatatcacataagcagctcctaggacctgcacagcgagagtttgcaggtgacgcagccagagcgtgttgtcttcgagcgcatatgctgtgatattgtctgggccaccaaggtgcagcaggaggaacggtgcccagaaggccaccagctcgtgctcatctgacctactgtcgactgatagatggcccagtgtgtatatcgctgtggagtcagccagcaggtatgccgaccagaggaagaacatcagcacagtagaggagctacgcctgcggatccctccaaagatgaggaggaacacttgcaacgcaaagcttacaaggaccaggatttgtatcccccattcattccacaggttcactagccttccagcttctattacttcgctcctcataatgtatgggagttaaattgtcgagttctgacaaggaaggttcctccagctgcagctgtgatgagggccatggtttcactccatctggctcaaagcatgaaggcaagcttgcctttgaagttccatgtcaaca

SEQ ID NO: 28234 - DNA, 288 bp, Setaria italica
  Peptide Sequence Number=SeqID_94208
gggctgaggcgccggaggctgtgcaggttcaggtgcaagttgacgccggcgccgggcagcgcgagactcaatagcgagaagcaatgaagattaactgtacagtgttggtgaacagcgaacatttttggacgtgctctcatctgtgatgctgcgatcatgatcttttttggtttcttttttattctttttccttttttttcttaacgctgtagaagtggcccggtccgataatggtatgaagtggcacctgcagttgcaaatatatggtggccgacgaagcaactgttg

SEQ ID NO: 28235 - DNA, 458 bp, Setaria italica
  Peptide Sequence Number=SeqID_94209
gacgcgggcgttcgcggggcacctcctccacctgatgcgcgcggcgggggtggacgtcgcggcggccacccggtccctcaccaagatccccgtcccctccccgcagctggccaagcacgcgctggaggcgcacgttacccgctccctcctcggcggcttcgagcacgaatccttttacctcgacggctccctctcgtcgctgctcgaccccgccgcgttccggcgggagcggtacgcgcagttccgcgacatgcgcgggatggagcccgcggagctcctgggcgtgctcccgacctgcgccttcggccgctacgccgccaccaagttcgcgtccctcctcccgccgcgcgtggaggaggccatcctgggcgacggcgagcaccggagggtggttaacagcgggacgcacccgcggacgccgttctacggggagttcctacgcgccgccaaggccgtgt

SEQ ID NO: 28236 - DNA, 343 bp, Setaria italica
  Peptide Sequence Number=SeqID_94210
ccgcgcccgcgcccgagagcgacgacttccgccgccccgcgaagttcatggcgcccgccccgcccgcagctcgatcgctacccagcaatagccccttctcccctctccccggtctccccgcagcacgccgctccgcgcctggcgagctcagctcgcgcgcttggacttggcccgatcgaagcgtgccgcggccgccgcgagcagaaagcagaggagagaggggatcgagctggcgtaaggaagccgcgcgcggggtctttaaggattggcgagcccgggcgagggagtcagcaccgggggctgcggatttggtgaggggacgccatctcctgctaccctgatg

SEQ ID NO: 28237 - DNA, 252 bp, Setaria italica
  Peptide Sequence Number=SeqID_94211
ccacgcacgtcaacgttcaagtcggagaagtactcccggcgcccgatcatgtactcatggggtttgtggcaccactatccaggaaccagccatcgatcttgtcgtcgctggtactgtcgccgagggagacatgtgcgcacggctcgtcgaggtggaggagagccgtcgtggccggtgccgcatgaagaagcttgatggtcccgtgagccaggaacagagccggctcctcctcctcctcctcgtctctgccgg

SEQ ID NO: 28238 - DNA, 516 bp, Setaria italica
  Peptide Sequence Number=SeqID_94212
tttactacaacaatagttaaagtaccgttaaaccttactagggtttagaagaaataaggaccttacaggtaagagtatgatgtggtgcagggagcagatcatgttcatccttttcctagttatcattcttgcccttctcagtggctctgggagcaaggcccactgcatctgagcccttcatgatcctgagcctcctacagctgcccgtagaaacattctccacgggacatcaccaacaagcatccaatctccatccttgtccttatatgtgagcacaagttcagtcccatttttatgatccatcagtcggcaaccagataatccttctcttcctgatttcccattagattcattatcaccaacagtgaaggaactgaacatcttctccagtgctagggagagctctttgtagttgttgtacatcttaaggtctaccttcctgaggtatggcgcaccaataccaatagactaaaccttagaacaataagaaggacaaacccttaggttacaattaca

SEQ ID NO: 28239 - DNA, 1596 bp, Setaria italica
  Peptide Sequence Number=SeqID_94213
agggggggaaggtccccactaaacacaagcactgattgagggccactattgacaatagggtgtgcaccacccttgcagacttccagcgcatgctgcatagagactggaatggaccagacaccaagaggaattcaggactctggagttctggaccagctgacttggtagtgttttggatgcacgcagccagtaactgaagcaagcaactgagaaagtgcaatggcttggaagaggaacagaagattatgacagcctgatgtgatctcctaactgatgaattatcaggacttgacagttctgcgctaacagataaggggccagaatgacccatcaggttagaaaagaatgctcacacagtaatgcagcctttcgagccaccaagagggtttcacgaagaaacagatgctggctcatgagggacgttagcaagcacaaagcagcactccaaaaacagttggcagcttacagcattacaaccatttacaacagaaaacacgacacgcggtcaaatagacagacatagacagacttacacaacacagcttatgtttgcaacctaacatgtctgagtctccaaacccaaaaggaaaaaagaaaaaaaaacaaaaaacaaaaaccgcagtggtacacatggatataagaaatccccttctcacatgttaagtccgttaaccttctgggtttgagaataggaccttacaggtaagagtatgatgtggtgcagggagcagatcatgttcatccttttcctagttatcattcttgcccttctcagtggctctgggagcaaggcccactgcatctgagcccttcatgatcctgagcctcctacagctgcccgtgaacattctccacgggacatcaccaacaagcatccaatctccatccttgtccttatatgtgagcacaagttcagtcccatttttatgatccatcagtcggcaaccagataatccttctcttcctgatttcccattagattcattatcaccaacagtgaaggaactgaacatcttctccagtgctagggagagctctttgtagttgttgtacatcttaaggtctaccttcctgaggtatggcgcaccatccatgctaaccttgacatagaggcaaccctggttcatcgccatggtgttctttctgtaactgcggattggtggccatcctaccacctgtgcctttgccgccggcgcctgcgccttcttcttgtcctcctcgtcgtcctccgccggcgccttgccccttgccgccgactcccgctgtacgatggcgtccgcgaacccgcgcttggcccctcccttgggaagcagctccagtgtaagcggcgtccccgccgctgcctcgccgccctccgcctcctccgtgcccggcagtcccaggcgcagctccgtggccgccgttgccggcgacagcccgatgtagtcccgctcctgtggcggcgccatgtctagccaaactccacgagcatcaccaactccgggaatcttgggttcttggggaaacgagggatcaagaggagagctggagagggaaccagggagggatgggctcgaggtttctcttggctgctgctgctgagctcgtgagtttgcg

SEQ ID NO: 28240 - DNA, 939 bp, Setaria italica
  Peptide Sequence Number=SeqID_94214
acataatccatcagagctgctcccaattactaacaggtttcccttgaagagaggcaagggccaggcggagctcgccgtgcgtcagcaatggcggcggccgcggaggtgggagcaggggacaagtaccggtccttcatccacggcgagagcgagaaggacaccgtgtggaggtacggcgcgccgcccaactacgacgtcgtcaacaagctcttcgaggcggagaggacgcgggtgtggcccgagggatccctggaggagaaggtgcagcggctgctcaagacatgggagatggagctcgtccacaaggtccgccccgaggaccagaagaccgtcaactccgaaaagtactccgccagcaacaacgggatgaaggcccagagccgggcggagctgatggcgatcggcagttacaaccacttcctgcgcaccaagctcccgccggagcaccgcatcttcgacccggaccaggagacgctcgactccgccatggccacgttcctcacggcgttcccgagggggttcgccatcgaggtgctcgacgtctacagcggcccgcccaagatcgccttcaagttccggcactgggggtacatggagggaccattcaagggccacccgccgcacggccagcgcgtcgagttcatcggcgtctgcatcttccacgttgacgaggagatgaaggtggagaagtcggagtacttctacgagcgcggcaacttcctggccagcttcttgagcccgcccgatgctgcgccaggttcaggttcagcaggttcaggatcgggatgccccgtgatgcgtgggaactgaatgtccgcatgagcgtgacagcaacgtacagcgtgtgtatcgcgtctgcttctcattgatagtgataaatccatgtcgcacgaaataagtgttgaatatgaataaagtagtttgtttgttctcgtaaaa

SEQ ID NO: 28241 - DNA, 408 bp, Setaria italica
  Peptide Sequence Number=SeqID_94215
acggagttcgcttggggcctggcgggctgcggcaggccgttcctgtggatcatcaggccggacctcgtctccggcgagaacgccatgctgccggaggagttcgtcacggacaccaaggaaggggtgttcttggcgaggctggtgtccgcaggagctggtcctctcgcacccgtccgtcgggctgttcctgacgcactgcggctggaactcgacgctggagagcatatgctctggtgtaccgatgctctgctggcccttcttcgccgagcagccgacgaactgcaggtacgtgtgcgccaagtgggggatcgggatggagatcgacagcgacgtgaggagggaggaggtggcgcggctcgtgcgagaggccatggacgacgagagcggcaaggcgaggagggtgaaggc

SEQ ID NO: 28242 - DNA, 811 bp, Setaria italica
  Peptide Sequence Number=SeqID_94216
ttttttgtttttttttttttttttttttgtttaattgcagcgtgcagcctttttatttatccaagatcaattgtaactactagctgcaaaatattcattcaagaaaccatgtctttggaaagatcaggataaacatcactcatgatagagagtaaggtacatcgtccagttggttccacaaccaatacacaccttattggaaaaaaactaggaagcaaaaactatgaattccacagaagaggcatcactgttttgtcaagctggtatgctcacatcggcatcatttaatgtggttcagctcttctgacctgagaccttgtcctcccaccagtagatgaacctgaggttggccccctgcttgtccaccttgtagagctggtaccagtgctccgccacctccgctcccagcacggcaccggtgatcgccccgaacccggtcgccagcaagacgccgtgcggcgccttggagtacttgaacgccacgccgccgaggtgggcggcgccgacgagggccccgccgagcgcgaacttcctcgactcccgtaggaccttgagctggggcccgtagacggggtcggaggcgatgaactcctcgacgtcggcgtcggaccacttggggaggggctcggcgcggccgtagaccttcttgaagtagtcgaggaaggcgaggttgcgcgcccagtgctgcttcacgccctcgaagtgctccccgatccccatcgccgccgccggttcgctgatccctttggattcctttcgacggcgaggaggtggaggtggtgtgggtgcccttgctgcggttggtctggtg

SEQ ID NO: 28243 - DNA, 324 bp, Setaria italica
  Peptide Sequence Number=SeqID_94217
ctgcgcgaatgcaccacgtcgcgccggcgttcggcgccgccttcaccgccatgttcgaccgcgtcgaagccggcctcaaggcgtccggctccgacgagttcaacaagcacaacgaccgccagatgctcgacttcacctgcgccaccctgttcggcggcgcgccaccgtccaaagtcatcggcgacggcgccgcggcgaaggcttacaagtggctggtgttccagctccacccgctcgcgagcaaggccatcaagccgtggccgctcgaggacttgctcctccataccttccgcttccctccgttcctcgtgcgccgcgactacg

SEQ ID NO: 28244 - DNA, 543 bp, Setaria italica
  Peptide Sequence Number=SeqID_94218
ttttttttttttttacttttaattaccaacaaagccagcagaatggggcttctgagttcccaattcggtggtatatttgcaacgattgtcatccatcaaacggtcacctcatacaggcaagcatgttcattaggacttaaaataacataaaaatctaagatcttcacctttgagtcgtaacgaaaaggatctctagattttccccagctaaaatcactagactaaatacgtgatccttttccatatcagcaaaatgcaagttttctaagcatgagagggacatggtagatattactctagtagcatttctcagtcctgcttcactactttatggaaagctttggtctgatcttcatcagcaagctccttcagaacttcatcatcgatttcagtcacattgttttgcaatggttcgtcaacataacgtccaaggaagaccatttttggcaatccgagctttcctcctgttgctgttgtatttatcttcctcccatgtcccagatgccacaagaaggtagaacaattaattaacctaatttacta

SEQ ID NO: 28245 - DNA, 451 bp, Setaria italica
  Peptide Sequence Number=SeqID_94219
aatgagctgtcagacataaatatatttgttcttctatagtagtgctccttgggcggtccctgttcagtcctaacgaacagaagagctcactaggaggtggtaaacacaatttttctaaatttccctagcctattagctcatggtttcttgtgaccacgcagtcagataaaacacagattaattacaagggaaagtggacaaaaacataatagagagttgtcttaaaaacagctaggaattaactaccctcacctccgctgcctccgctttaaggttaaggttatgttgtgcgaaccaaactccctgctcatacttcctccatttcaaattataaatcgttttaactttcttgtattatgcatctaaatataggctgtatctaagagcaactccaaccagatcttttcttcgatctctaaagtaggggaccgagaaaagaaaaaaacactcc

SEQ ID NO: 28246 - DNA, 267 bp, Setaria italica
  Peptide Sequence Number=SeqID_94220
gcaacggaggagggcaagggacgcagggctgagaccgcacctacaccagcaccaccgcctgacgggcgagcacgcggcaggaaggatggcggacgggtcggacggcaccgacgtgtcgccggagtcggaggcgacggcggcggcggcggagaagggcggggagatctggggcacgctggaggagctcctcctggcgtgcgccgtgacccggcacggcacggcgagctgggactcggttgccatggaggtgcagacgcggagcccccc

SEQ ID NO: 28247 - DNA, 466 bp, Setaria italica
  Peptide Sequence Number=SeqID_94221
cttggcgtgggggagagaagaaagcagggtagtggtggcttgcttactttgctggttttggatggagccttggagaagagcaggagaacagacagactacagaggtatgctgctagcttgctggtgctcgacttgaatggatgtgtgagcagctggttctgttctgatcgagcaattatctcacgagcaaagcaaacacaagcctcggcagagggaccaccagaacagagcatcagcttccacatgctacaatatgttttgggctgaaatctcccgtgtactgcatgcatttccacttggtaatttagtctcgttcgcaacaagtccatatggcatccacagttgcatgccattctgctccatgaatgacatggccaggaagttgtcttgtgttgtgccatagcatagatgaatataaatgagtttgatgttgaagtcttgcgctgtagtactgaaagtctgaaac

SEQ ID NO: 28248 - DNA, 942 bp, Setaria italica
  misc_feature (922)..(922): n is a, c, g, or t
  Peptide Sequence Number=SeqID_94222
cattccttctttccctcctctagccaagaataaccagcggcgaccggccggagaccaccattccgcctcgctcgatccacagctagctccctcagccagatcggggagacaagaagctaaactaaactgacaccagcagcgagcatggcggcgacgcggtggtgcctggcggcggtgtggtgcgcggtggcggtggtgtcggtggcgcagacgtctccgtcgccgccggcgtcggcggacccgctgcaggccaagtgcgcgggggacttctcgaagctgacggactgcctggactacgcgacggggcacgcggggtcgccgtcgtccacgtgctgcgccgacgccgccgacacgcagaagtcgcggccgcagtgcctctgctacatcatccagcaggtgcacaacggccgcaacgaggtgcagtcgctcggcctcaagttcgaccgcctcatggcgctccccgccgcctgcaagctcgccaacgccaacgtcacgctctgcatcaacctgctgaacctgaagcctggctcgccggactacgccctcttcgccaacgcctcccacatcacgccatcagccggcggcactccggcgagcgacagcaccgccggcagcggcttcagcctccagaccgggatccgcggcagcatcgcggccgccgtagtctccgcggtgctctcatccgtgttctgatccctcggcctcgggcaagcaccggtttttagtttttaccatgtggattcgtcctcagtcatgcttctctagtccttgtctattttgtatccgttcccaccacataaaaatggagttgagctgaacctttttttcccaaaaattctctcgctggatcctgttgcatgatgagagtggatggtttgtgcatcagaattcagaattcacaggcccgttggtcggatgaacngagtgtcagtgcagcaaacg

SEQ ID NO: 28249 - DNA, 322 bp, Setaria italica
  Peptide Sequence Number=SeqID_94223
ctttctattttttatatttattgagcaaatctgtaattctgtacctactgtttcaaacattggtaatgaatcacatagatgtccagatgtccctgccttgttgtcctgcttagcatatgtccaaagtacctgacctcattcttaacttaatttaaagataagccattgattttttttaaaagaaagaggtatctaccaatcatatcagcaacataatataaaggtaccaacaacaagtgcaaggacaatttggtgtaacctggaattagtataacttagtttgaattctttttttttctgaataacttagtttgaaactagg

SEQ ID NO: 28250 - DNA, 455 bp, Setaria italica
  Peptide Sequence Number=SeqID_94224
ggtgctgtaccagaaccgctggctcgaagccggggactggatgttcctgtcttcggttactacttgtacacaactggctatgttgattttggatgggaacaacttacaaggagatttgccaagcttagtaaccgacttatcaagaagtctagagtacttggtccttgggtcaaaccacataacaggtaccataccaacaggtatcggtaatctggttagcctttccatgctatatcttgacgataataagataactgggcctatacctgcttctattggtaaccttcacaatttgtataccctggacctgtcgaagaacaggttctatggaaaaatcccaacatcatttggtaatcttggccaattaagtgaactttatttgcaagaaaataacttgagtggaggcataccagcagaattagcgggatgcaaaaatttgttggcattgaaccttt

SEQ ID NO: 28251 - DNA, 416 bp, Setaria italica
  Peptide Sequence Number=SeqID_94225
tgagaataaagctcagttctccactagaattacagctatacatacactgaagcagaactaatagtgtttacaatttgatacatacactgaagcagaactaatagtgtttacaatttgaaaaagagatcagatttggcatcaagcaaacaagaagtcaagaagacatggttgaccatgaggagcttgtttaccttctgggagagtcgagtcagatcgggtgagccagattggatcttgtgggcaagggaagctcttcgccctcctcctctagctctcccttagggccttaggcctcagctcctacaccgacgaccgtcgtctggcctcgactttttgtcaattggagctaggccgacaagatcatcgagtgatcgacggcgacgtgagctgcgcatggttgccgtgtgcttttttaa

SEQ ID NO: 28252 - DNA, 1233 bp, Setaria italica
  Peptide Sequence Number=SeqID_94226
tttttttttttttggaacatggcacctcgttatttttttctttcttgagggaaaaaaatgacccctcgttatttcacagttcagcagcgtgccaagagcccaagaccaagagagacaccacgggttcataaccaagaaactccgccacccaagttgattcactgatcaccagccagacggaagagatggggaaggcggcaaggatgcccgggcacatcctggagggcgcctgccttctcatagcactcgacgctgtctgcgagcgtctcctccagtgtccttggttcccagcccaggtccatgagcttctggcatgttagcgatgctttctgatcgacatcaaggatgttatttacgcagttgtactgtgggtataacttcttcaacaaggccaccaaatccttggtgcgaatgtgattcggcgagcagatgtatctcccagatgactctttcttctcgtacagcagaagcagagcatcagccacatcacggacatctactatgtgccacagtttgttgttcatcacatcaggaccaccttttataacatagatgaggaatttgctgctggtattcaccacaggctgcaacagagggccaaaaaccaaaggcgggcaaagtgtaacaacattcagtccatttttatctgcatattccaaggctgcctgttcagccataatcttggcaacagagtaccagtccccattttccttgcagaactctttgtctgaccagcaactctcatccttgagtgtatcttgaggccaagtcgggttaaaatccacagcagcattggaggacacgacaacaagtttctgaacctttgcagcagagcagacctttaatacatttaaggtacctttcacagcagggtcgagtacttctgactcaggatcaaccatcttatcttcaggcaccggagtggcaagatggaagaccccctcacatccctccactgctggtgttagcgtgtcgtactctagcacatcgcccttgaacagacgcagattctctggggccttgtccagctccttcaaatgggcgttctttgggttacctgggtcgcggagggtggcgcgcacggcgtagccgcgggagaggagcagcttgacgagccaggaggctataaacccgccgcctccggtcacgcacacacgcggcggcggcgccatgcccctcccctcctccaacctaacaaccgaattcctgaagacgaagaaaccccgacaaaca

SEQ ID NO: 28253 - DNA, 297 bp, Setaria italica
  Peptide Sequence Number=SeqID_94227
gttggttgcgccccgcggcgagggcctcgccgcggggggtggaattgattgaggtgggggtacggcccggacggggactggggaacggggtgggaatggcgggcgggtttctactgcggggggcgtcctcgcttttattggcgccgcggcggcgaggaggagacctcagcgtgatgagatgattcccgcctccgccgcctgccttgcctgctcagggaggagctactcgtgatcgtgttcatcggctgttcatgcgtcggcggaccgaagcctcggggtctggatcgggacggcgca

SEQ ID NO: 28254 - DNA, 1844 bp, Setaria italica
  Peptide Sequence Number=SeqID_94228
gactgattttgtttcagtcaaatcagggggcgcatacctgatggaatgcctcgagttggattcttctgatttcttcttggacggcgatccaatcgacagcccgttggaaatccatcttgagtccaatagcttggcaagcaccaaagctgtgccggatcatcgccggtatgctcagcttcattgcagtaatgcccctgatccacctccgctacccggaacttcttatggcgcgcggagaagttctaggaagacaacggcttgcagccgtgtccctggagggatcctggattcctgggacaagttattcttagagggataccaggcggatctccgtgtttcgacagacgatggcagtgaaattctgtcacactcttgcgttcttggtgtcaaatctcctgttctgagagctatgttggaagacgctgagctgacaaatggttttcggtgcatccgaatttctggcgcaccttctggagcagtccatgtgttcatcagatttctttattcttcacgttttgagcaggaacagataaagaagcatgttctgcacttgctcgtactctcccatgttttctcggtgccatctctgaagacggtctgcatcgaccaacttgagaggaacttccttgctcctgacaacgtggtagacatactgcaacttgccggattgtgtgatgcacctcggctctccctcatctgtacccgtatgatcatcggggatttcaagaccatctctctgacagatgggtggaaagtgatgagacgggttaacccaaacctggaacaggagctgctcgagtctcttgtcgaagctgatacaaaaaggcaggaaagagctaaaaagatggaggaaaagaaggtctatctgcaactgtacgaagcaatggaggctctaattcacatatgccgagagggatgcaggacgataggtccccgagaccaagcgctcaagggcagccgagcaggtgtgtgcaagttccctgcctgcaagggcatcgagctgctcgtgcgccacttctcaggttgcagcgtgcgggtgcctggcggctgtgcgaactgcaagcgcatgtggcagctcctcgagctgcactctcgcatgtgtttctctccagacacctgcaaggttcctctctgcaggcatttcaaggagaagatgcagcatctgggcaggaaggaagagaccaaatggaacctcttggtgtgcaaggtgctggagagcagaggagccatgagttttatctctgaaaggagaaagttctcagccctaaagactgctggtcctgggagtcgccacgtggctccttgccttgtgggacctatttgaaacgttggcaaaggttttgtgcagaggagttcagtttcaacaggaaccagacgaatgcgttcgctttagaaattagaatttgagaatgcgcatcaaagctggtaatggaaccagacgaaatcgtcagatctgaaacatcaaagtaaccctgaaatcctgaatgtctaacaagtaacaagcagtgtcacaacttgatacggcatgtaaacgtgacaatctgaaaactagagaaaacattgaagagagatgaaaactagagaagaaccggttcgaagcagccgtgctcatccattacacacaacagccaagcacagacgactatgacggcaggcagagttagcagcacggcgacggggctcgggaaatcctggaggatcagcatcaggacgagctcagaaaccaggacgagaacgacggtggtgaagaagacctgcaacaacaaaggcagaggtgtcatgcatgctcaccaaaaagcatgtccaacgagggggagcagcagtcgtccccggagccggcgagg

SEQ ID NO: 28255 - DNA, 463 bp, Setaria italica
  Peptide Sequence Number=SeqID_94229
gcactagtaaaaatcaaagaacattgcgtgactttgggggcgagagctcaactcacaaataaaagcctaaaacttgcaatacataaaaggcttgtattgtcagaagatgatgcagggagatgtatggaggtctgaattctagccatggttgtgcatcagatgattttgcaacaatggcagatgggcagatggtagaaataaatagtttcctaaatgtaataatcacaatcgctaaaagtatcttatatttctttgatgttgttaatcgttaacatttgtcggctagtgatccgaagtctggtcttgattttggatgataattttgcaataatcacgagcaccatccggaaacaagtaaattattgattaggacaaccttatttataattctacaatttacagcagattctttattcatgtaatcattaatcaattatcagttaaagaatgtatggcttggaga

SEQ ID NO: 28256 - DNA, 231 bp, Setaria italica
  Peptide Sequence Number=SeqID_94230
gaatgagagggccaccagggatgtcatcacagtgatggtgctgcaggcagaaataaatgcaagtcaactgaatagaagcgatgaattggaaggaagatatgacaggaagaaactaaatgcaagtcaactgagcagtaggcgatgaataggaaggaagatatgccatatgaagcatcttgttgatacttcatgagcctatcacatttaaaagaatcacctagaaagaaaaaa

SEQ ID NO: 28257 - DNA, 460 bp, Setaria italica
  Peptide Sequence Number=SeqID_94231
caatgctgaaacaagaaagctctgcactctacagcagcactgctggagatcctcactggattttctccatcccgtaggtatcttcatctccactggctacctttcttcttctctctgcaatcatcttggtgtatgccttaggataggagtatagaaatatgtaccaccatgcacatattataaaagaaactcctgcagtaattataaccgactggagcacccaactacacgcaaccacagcagttccagtgagcaatattgtccaaggttggcaccaggcaggcttggtgtcccagacggagtcgtactcgagcgacaggtagtcgaggtacccgtccatgtcctccaccaccccgtcctctccaaagaacgccgccgctccggcgtccttggccccctcaccgtcgccccggccgccggcccgcgccacgccggcgcgcccccgactcctgacgccgag

SEQ ID NO: 28258 - DNA, 473 bp, Setaria italica
  Peptide Sequence Number=SeqID_94232
gtcctccatgtcccgctggagatcgtgaacccgacggtcaccggcggcggctgctgcggcggcgctgccgtgatctcgatgaccggcttcttgctggcgttctggtccagctggtagctcgggaggaagcttcctaccacgacctggacagggctagcagccacaaggagaccggctactccgccgccgatgacgcggccgtcggcggccgccaaagagacgctcatcccgccggagcggtttctggtgccgccgctatcggtcggagtgaaagatccagacagggagagcagctcaaaccggccctcataagttactgtaccgcctaaggagtcctgttgacgcagtgtaacatttgcaatcacaccattggcagatagaatgcaaattgcccttggaccttgttgggagaaagatatgaccttcatattgacatcctcaccagcagcaacattaatgatatgaggtgtaaa

SEQ ID NO: 28259 - DNA, 268 bp, Setaria italica
  Peptide Sequence Number=SeqID_94233
tgaaataagaaaggaccaacttacaatctgaactaattacattaactctccaactgcaagaagatatgaaacctttcacgttttcatcaaatctgaatcgttatccctgtctttccaaatagtttgaccgcagagattataaaaagagccttgtttatcatctttacatgtcaagactcagaatcactgaaccattatttgataacaagatcagttcagtggtcattaagagtgcttttcccttaattcatattagctaacttaatta

SEQ ID NO: 28260 - DNA, 274 bp, Setaria italica
  Peptide Sequence Number=SeqID_94234
cgcgccgcctcgcgcggacccgcgactacgtcgtcgccgccaagtgcctcgcgctgctgcaccgcctcgccgccgagggggacccgcaccttcgcggtgagctcctccgcccggccccgagcgggaggcgcgcgggggagcccgtgctgtcgctgctcctcgacttccgcgacgaggcgcacgccgcgtcgtgggaacactcggcgttcgtccgtgcctacgcgctctacctcgacgagcgcctccggttcctcgtctccctcctgcccccgcc

SEQ ID NO: 28261 - DNA, 826 bp, Setaria italica
  Peptide Sequence Number=SeqID_94235
acccaccaggctctacatctccaacctcgactatgccgtctccaacgacgacatcaaggaactattttctgatgttggtgatatcaagcgttactccatcaactatgacaggagtgggagatcaaagggaactgcagaggttgtcttctcaagaaggtctgatgctctagctgctgttaagaggtacaacaatgtgcagcttgatggcaaacctatgaaaattgagatcattgggacaaatattgaggcgccaccaacccctaccttcgccttcaacccaccagctggaaacttcaaggtgcctttcacaagcggtcccagaagaggtggtggtggaggatggcctcagggtagaggtggattcggtgggcgcggacgagggcctgcgagccgtgggcgagggaggggaggagggcgtggcagtgagaaagtttctgctgaagatctggatgcggacttggacaagtaccacgcagcagcaatggagaccagctaaatgattctggcaccgtggcactgattcaacacaggcaataggtctccctatgtctccttctgtaggaatgttgatgcagacatgtattggatcatgagcggtgagtgtgtaaggttaagctggagaagcttcttttttgttccactgagcatgttgggtgatgagatgatggtggggtggtgggggttatttgtgagatgaggtgctgccgatgaccaaatgtgggctcttgttccattgtattttttgtcagcttcttaattatagtttagaagcttgtagcatgtaataaatttttaaacttgtctctattctatcccctcctacaag

SEQ ID NO: 28262 - DNA, 293 bp, Setaria italica
  Peptide Sequence Number=SeqID_94236
tcaattccttcaatttggaataggaaacccatgaatccatggtaattgccattttatcacaagtagaatatggatatgttaatactgtgctcaggcaccctctgcaaccatatgcaccattccgaattcgccatgccaacggcggaggtggcccaagacacaggcgagaggaccctggactaactgatgaggagttcagggaagccatggatcagcttaggaagcaggaatacaggccctcaaaccctcagaagaagagacatcactggaccgggagtgccaggagctggggc

SEQ ID NO: 28263 - DNA, 233 bp, Setaria italica
  Peptide Sequence Number=SeqID_94237
aggcaaactagcaaccgactcttgcttgcctcggggcgcgataaactgcgagtcgaagattgcagccgtgtcttctctggttgcacctgcagtggcaggagagcgcgcgcgctgtgatattgctagcactagcagtcttccatcctgaaacaacacaagcttatgtgcatgcacatgctcacaagaatttcttccaccgaaccgaacaagcccgtaggacgtaggtgcattag

SEQ ID NO: 28264 - DNA, 240 bp, Setaria italica
  Peptide Sequence Number=SeqID_94238
tcttctctggttgcacaagaatttcttccaccgaaccgaacaagcccgtaggacgtaggtgcattagagaccagggaggtaaaccaaacctggagatcaaacaccagaaattgttaagcagccatgaaagtacaatattgttcatcttccatgttggtgggtcttggaaacatcagaaatatttgtaaaacgtttactttcgttggcttattacttctactttactcaattcaacagcat

SEQ ID NO: 28265 - DNA, 921 bp, Setaria italica
  Peptide Sequence Number=SeqID_94239
taaaaaatttaagtaagggtaacgtaaccctaaacgttactaattttgcacctgctatcaagactcaagagactgattagggctgtccaggcctccagggcacggccacatttgcttctcgttccttcttctcttatgcgtgtaattttagcggcttcctcccacccaactgctgctgctcgcatctcccacctgaagcagagcaacatggctaggtcctttttctttccacaaatcccttacaaaatgcctccaaaataaaaatctcttgccaaactgctacagctgatacgcattagaccttttggttctcgtggacaacacatttcttcacgtggagcaacataaaactgccagcaatacggcaggactagataataacactgataccctccaatgaattggcttaaaaactaaggcatcaaagcaatgcaatatcatacacagcatggtggacatatgcctgagccttctttgttacagcttggagttcgtcgaagagagtttagacggcagcctgcaggcctgcagcagatgaagcggcagcgcatgtttcttcaccgccggctcgctcaggctcgccaatcgccatcctgaggtcctgactggtgactcctgatggcattgtcctgtgtacgagacaggcaaactagcaaccgactcttgcttgcctcggggcgcgataaactgcgagtcgaagattgcagccgtgtcttctctggttgcacaagaatttcttccaccgaaccgaacaagcccgtaggacgtaggtgcattagagaccagggaggtaaaccaaaccaattaagttcctccttgatgcaccactgtaacaaggacttatgcgcattggatttttctgtagtactttgtcaagcaatgaataatggatgaatgatggagcatctgcttcaattagtt

SEQ ID NO: 28266 - DNA, 575 bp, Setaria italica
  Peptide Sequence Number=SeqID_94240
aaattcaaatagaagtaaacaatgttcagtaaagtaaagaaacagtggcatacttcagtgctcgcttagtaccagtatgtctatagcattctctgattatcacacgttgtgtcatccaggaatatattgattacctttactgattgaaagtctgagcaaagtgagtcaaactaatcgatgaacttagtgtgtgagattgctaacaggactatataacacacaaatagctcattgaagaaagcaaaataccaattaagttcctccttgatgcaccactgtaacaaggacttatgcgcattggatttttctgtagtactttgtcaagcaatgaataatggatgaatgatggagcatctgcttcaattagttacaaattccagtaccactagtttgcagcttacaaaacaagaacactaaatatttttttcaagaacactaaatattggaacaaagcagaaatgagaaagaaagatactacctccgtccataaatatatgacgtctaggagaagctagttagttcaaaaatgaactaatttgcttgtccttaaacgttctattattattttattgtaa

SEQ ID NO: 28267 - DNA, 407 bp, Setaria italica
  Peptide Sequence Number=SeqID_94241
tgggcgactcgaggtgtggcagagctccctcctggttctctaggcggctcagggatcgcaccacgacgcataggcgccggagggctttgagctccccttgttctatgacgaagtccagctcagttgtgatcagtttgaggtaatgcaaggaacgcacgttgctcagtgcagcaagaacattcccgctcagctgaccagaggacgaaaggcacagttcagtgacactgcctagcttggtgacgaacacaggcaggctgcgtagctcgccctgtagcttcagcgagctgaggtagcaggggttctcttccaggttaaaatccagaaagtcttagcgagcatccctcgaaattcagggagagtgagggagcatcgttcacgtcggtgcctctctggatgaactcctgtat

SEQ ID NO: 28268 - DNA, 1213 bp, Setaria italica
  misc_feature (1)..(4): n is a, c, g, or t
  Peptide Sequence Number=SeqID_94242
nnnnaacaacaaacaggaccacttcaattacgaattcctcataactttgtaaaagatatcttgagcttctcttcattgcagttcaaaatagaggtggtgtgtacggtcgatcctaaaacaacgctcgacccaatcttattgggcagggaaaaacagagaaataatacccaaactcgtgtcaaaacgttccaagttaacaggcaacaacaccaagtgtcccaagagggccaccaggaagcgttcagcgggcaacagccttctgagcattgtgcgggaggatgttgtcggggaggatgagctcaggtgggatctcacggaccaccccaagcatcgagtcgtactcctcgtccttgtgcgcatacttcttcctcagcatcttctcgagctcaatctcgtcaaagctcttggagttctcagctgcgtggacctgggctaagttgatatagttggttgctgattgggcaatgaacgcaatctcctcttctgtaagcttccttaggaattttgcagggttaccaacccagacctctccagaaggaatccttgtattctgcttaacaagagatcctgcgccaaccatgctgtgcttttcaaccaccactccatcaagcagagtggcacccataccaacaaaagcttcatcctcaatggtgcatgcatgtagaacagcactatgacctactgtgacgttgcttccaattatggttgggaggaccttcctgctgatgttagatcttgaaacatgtacaagggaattgtcttgtatatttgttccagatccgatatgaatgctgttgacatcacctctcaaaatggagccataccagattgacgatccatgtccaatctcaacatcaccaatgactgctgcactgggagcaacaaatacatctctatggatccttggctctttctcaaaaatgttcatgattgttcgatgccttgatacctgctcctcgacgcggaggccgccctggagggtggatccgaggcggtccatggcctgccccgtgccgcggatccacttgcccaccgtgaagatcgcgcgccccagggtccccatgcctccccctggcgctgctgcacgcccgcgccctcctccgcgtgcctgggtgggtggggctcgccgccggccgccgcgcgcgcggggtggggtttaatggtgcgaggcgagacgggggaagagagagagaacaggagccaggaaggcaat

SEQ ID NO: 28269 - DNA, 567 bp, Setaria italica
  Peptide Sequence Number=SeqID_94243
tttggcaggatcctgtttgtggtagtgcacactgtgttttagcaccctactgggctcgcaagctggggaaacaaaagctgacggcgtttcaagtatctccacggagcgggacattatacctggagttggaagctgcagcaaggagagtgcggattcagggagaggctgtcactgtgatgactggtaccctcctaacctagtggctcactccccatgtatgctccaaaatctgaagggcaagggaacctgtaggcaattccaattgctgcggcacatatacggcaaactgcaaccgtattagcttatggaatcaaagttcctgaactttctatggagctttaaataaagttgcagtttgtaaaatcgtaccgacataaaagtaccagctccctttgggttatcatttctcaatgtaacatagctgggagttgtgaagtacagtacatacgacctttgttcaagtttcctgtcatgtttggaaacgcgaatgaaacagaatattcagatcctgcggtttaacaccataactatgtactccctgaaacaagagagaatttgaaccaccaa

SEQ ID NO: 28270 - DNA, 480 bp, Setaria italica
  Peptide Sequence Number=SeqID_94244
ctgccgacgccttcatgtacgtgttgcctaccgtgaagctcgcaacgccatctgccatcatggtctgcttggagttatgggcgttcgagctcctggtgctcatagctggtttacttccccatcccaccgtggctacgccgctgatcgccatatgcgttagcactgaggcgattgcgtgcatgatcacagttgggttcagtgccaccgtaagcacacgggtgtcgaacgagatcggtgcggggaatgtggacaaggcgaagaatgcggtatccgtgacgttgaagctctcagtgttcctcgccgtctccttcgtcctgttgctggcgttcggccacaacctatgggccagcctcttcagtaggagctcgaggatcatctcggaattcgcggccatcaccccgctcatgatgatctccattgtgctcgacgctgcacgagggcgtcctgtcaggcgtgtcggaggggctggtgggtggcacg

SEQ ID NO: 28271 - DNA, 349 bp, Setaria italica
  Peptide Sequence Number=SeqID_94245
cacgtcgccgccatggacgccgaggtccggcgccacctcgacgcgcactggcgcggccgcgccgccgtcgctgtgatgccgtcgatgaagtcgctcacgttcgacgtgatgtgcaccgtcctcttcaagctggggagcgacgccgccgtccgggaggagctgtcgacggagttccagaagcttgcgagggggatctgggcggtgccggtcaacgtgcccttcagcaccttcagccggtgcctggcggcgagccggcgcgggcggcgcgccgtcgcggcggtcatcgaggagaggagggacaagctgcggcggggagagagctcgccgaccgacgacgtggtcacccaca

SEQ ID NO: 28272 - DNA, 687 bp, Setaria italica
  misc_feature (369)..(369): n is a, c, g, or t
  Peptide Sequence Number=SeqID_94246
atccgcccgcccaggtacatctcgctcgacctctccaaggggacggaggtccttcgcttccccgtctgcaacaagctggatgacgacaggtctcccctgcaatttgagtacaccgtccgccccgagtttccggtgcccccagcgcccgggccgggcaagcggcagaggggctgccattgcgcaatggactgtgtctccaagtgcagatgcgagaggaagaacgccggaggaccggtgtacaatgaggatggcactctggtgctgggaaggccggtggtgtacgaatgcggtgctctgtgtgggtgccccatgacctgcgtgaaccgggtgacacagcgagggatgaagcaccggctggaggtgttccgntccccctgagacaggctggggtgtcagggcgctggacttgataccgccgggtgccttcgtgtgcgagttcagtggggatgtggtcgtcatggacgatcattcaggcaaagcattgatggaggatcgctgcatcatcgacccgaagcgctttccagagcgatggagggaatggggagatgcctcagccgtcgacccaagcaagagggtaccccagttcgcggagtttggaggaccaggttacgttctggacgtgtcccataagaggaacgtggcctgctacattagccacagctgcactcccaatgtgtttcttttctt

SEQ ID NO: 28273 - DNA, 351 bp, Setaria italica
  misc_feature (1)..(59): n is a, c, g, or t
  Peptide Sequence Number=SeqID_94247
nnnnnnnnnnnnnnnnnnnnnnnnnnnnnnnnnnnnnnnnnnnnnnnnnnnnnnnnnnnccagcaatgaattcgtaaattcctcttagcaataacgaatacaccatcttattcagagatgaatgtcaatataccattgtcattgaagtaaagctaattcagcacatatcctaaataacaaattcaacgacctttgagttttgaaatcagaatggagccaggtgctccatacattagacaaaaacttcacctcttccattgatcttatgctcatcaacatctagaataagttttgcagtgaccttatcctgatccaccggaactgtcagagagggagaaaccttacagtgta

SEQ ID NO: 28274 - DNA, 472 bp, Setaria italica
  Peptide Sequence Number=SeqID_94248
caaaattccagtaaattttagcaaagagactggttcgaacccagaacctctagccactaggccacaagtggagagtctctaccactgcgtcaggtccgcacttcagcatgcacattcaaagtcaaaaatcatatcgattgcagtttatgatatggtccaaacatgtgaggatccattagagatgcatgcaaaaaaagacggcacacctaggagggctcacgtatggtgctagtagtcagaaacagaaagtgctaagttttagagttaattatggttaagaatatctagtattattttcttatatgccaagtcacagtctccatctgcatcatgagctggcttgcccattatatattatatgccaccagaaagttgtgcaatccctgaaataccaccaaatcaaactccaaatggtgtgcttccacaccaaccctcatgctcaattgccaagcacccgactcttccaacccga

SEQ ID NO: 28275 - DNA, 487 bp, Setaria italica
  misc_feature (482)..(482): n is a, c, g, or t
  Peptide Sequence Number=SeqID_94249
tgctggcggtgcccatgcccgagcgggactccatccatcgcgccggtggctcgccctggggcgtcggcctcctcctcctcctgctcctcgtcatggtctcctaccagtccaacttccgggagaagtggttcccgctcgcgagcaggtgattacggtgggtgatccatgattcggtggattccggttagtgccggatcgatcgttgtaaacaaacacctgcggattgtagcggccgcacgcgatgttctggatggttgtgcgtcttctctttctgtaactgtaagtgtgagttggcggtattgccatgtccgattgccaatgcaacgagaatcaactgttccgtattccttggctgtgagctgtgctcgtgctgattttgcttcttccaagaatggacatcgcgagcaaaaagtatttctcctcatctcgcaatgctaccatttgccagcttcggagttcggacaaaggaactacaaaccctnttgcc

SEQ ID NO: 28276 - DNA, 378 bp, Setaria italica
  Peptide Sequence Number=SeqID_94250
ctgtctggctcatgtgattctggtgttcctcctccgccaccacagctacccccgcgtctttccaaaggagaagtggggagaggggctcgtgattctgcagctgttccagatgcggaggaacgcgattaagcagtgagtagtcttgttagattttggataaggtgaagtaggactttggtgtccgctcgtctgatagatttgcattcagtctatatggccaccgtgtctgtggaggctgcgaagcagaatgtgcctgggcaccaggtcaaaccaggggctgatccagttcctgcaaaggagaacaagaaagacgtggatggcacgccggagcttcctggtaaggagattttggaggagcaaaagccctctcatcggcgg

SEQ ID NO: 28277 - DNA, 516 bp, Setaria italica
  Peptide Sequence Number=SeqID_94251
tgcacttgctgtcttgctcccgctcctttcccccaccctcgcgggccggacgcagccagccggccggcacctgcagcagcgccatggccgcctagcagagatgcggaggaacgcgattaagcagtgagtagtcttgttagattttggataaggtgaagtaggactttggtgtccgctcgtctgatagatttgcattcagtctatatggccaccgtgtctgtggaggctgcgaagcagaatgtgcctgggcaccaggtcaaaccaggggctgatccagttcctgcaaaggagaacaagaaagacgtggatggcacgccggagcttcctggtaaggagattttggaggagcaaaagccctctcatcggcggcaagagtcttctgcatctatgctggacaagggtccttccagcgtttgctcggactccggcgtcctggatgagccactaaccccacaaggcgattctggggagctgaaggatattcagatcttggattgcaacgctaaccaggagaag

SEQ ID NO: 28278 - DNA, 395 bp, Setaria italica
  Peptide Sequence Number=SeqID_94252
agatcggtaaaggagcatttggctctgctctgctggtcaggcacaagctggagaagaagaagtatgtgttgaaaaagatccggcttgcacgtcagacagaccgcactcgccggtctgcccaccaggagatgcagctcattgctacagtgaggaatccattcattgtggagtacaaggattcatgggtggataagggttgctacgtttgcattgttatagggtattgcgagggaggagacatggcggaagctattaaaagagctaatgatacccacttttctgaggagaagctttgccagtggctagtgcagcttctcatggctcttgactatttgcacgcacatcacattcttcaccgtgatgtgaagtgctccaatatatttctaaccagggac

SEQ ID NO: 28279 - DNA, 1627 bp, Setaria italica
  Peptide Sequence Number=SeqID_94253
tgggtgccgggtcgaggggaggaaggctcagggtcgcaacctttgccgcgagcggcggcggagacggggagcggccctccgcggtggcctgcggcggcgggggcaaagggggaggaggaggggaggtggtgctggagatggaaagcgaggacgccgcggcgcgttgggggcacgccatcagggatcgcctcgcctcgctcggccgtccaaagagactgttcattatagtgaacccttatggtggaaagagaagtggtcggagtattttccagaatgaagtccgacctctccttgaagctgctggcattctttatacgatgcaagaaaccaagcatcgccttcatgctcaagagattgcacattcactggatattaggaaatatgatgggatcatttgtgtcagtggagatggtgttatggtagaggttgttaatggtttcctgcaaagggaggactgggaaacagcaattaaagtgccacttgggatcatcccagcaggtaccggaaatggaatggcacaatctctattgcatgctgctggcgaaccattctccataccaaatgccgtgtttgccataatcagaggccacaaacgtgcacttgatgttacttctgttgtgcagggaaagacaaggttctttagtgtcctgatgcttacatggggtctggtagctgatgttgatattgaatcagagaagtacaggtggatgggaagcgctcgccttgaattttatttccttctccgcgtgatgaacctgcgacggtacaatgggcgtgtcctcttcgttcccgcaccaggatacgaagaagtcggtgagcccgtggagcaaactgctaccagctgtaaacagaacggggttagcactggtagccaagaagacaaagcagatgacagaaatggtgaaacgagtggttatccgggcccatcgatcgaaggagctgatctcgaatggagatcgctgagcggtccattcgtttcggtttggctcggcaacgttcctttcgccagtgaagatgcaatggcagcaccaaaagcagagtttgcggatgggtacctggacgcagctataatcagggactgcccgcggtgggacgtgcttgggctcatgttccagatgaaggacggcgcgtacgtgaactcgccgtacgtggagtacttcaaggttaaggcgatccagatcgagccgggcctgcgggtgggcagcagcaacaagggcggcatcatcgactcggacggggaggtgatcgcgcggggagacgggtcccgcggcggcggtgagccggagcacctgatggcgtacggcccgcccatccagctgactgtggaccgggggctggccaccatcttctccccgcgatcgagatgacacggttcttcgtgttcttgttcaccatatagtgatttccacttcattagccccgtcattttctctgtctgtaatcgtttgttacatacatgtaaatactctcacaccacaatattgcaagagccaatggatgacccaaggagcgagatgtctgtccgtcgagattctttgttgccacagttactgctttaccgttactttgagaaatgggaagcttgcaataccagttctggatgctaaccaaaaaaaaaaaaaaaaaa

SEQ ID NO: 28280 - DNA, 507 bp, Setaria italica
  Peptide Sequence Number=SeqID_94254
tggttccaaggtatctttctcaccgtctgtaactgtctcgcaatcaatcgtgtgggcgtcggggtcgacgccggtgcagcgggcgaggaagaagtaggagcccggcgacttggacacggcgggctggatgcgcgcgagcggctcggcgacggagcggaactcgagcgtgccgacgcaggtggaggccagcagcggcgtgaacaccatgtggttgcgcggggcgacgcagacgacgtcgtagccgctggtgtcgaggtccttcatgagccgcgaccccgcccacccggtccccagcaccaccacccgcgccttctcccccttcgccgtcggccccagcccagggaaccccttcctcgcctcatcccgcgcgcccgccgccgccgcagtggtggtggagaagggcgaccaaggcaggtggcggtaagcggaagcgccgcgcgcgtgccgggtgagcgagcggagcagggaggaggcggccatggctggcgcgagaggtgtggagcgtga

SEQ ID NO: 28281 - DNA, 528 bp, Setaria italica
  Peptide Sequence Number=SeqID_94255
ggaatgtcaggctggctggaaataagtgtgcaatatttgtatatttcggtagtatgattgtcgtgctagataggtactatcagtggtgtagcctttattactttcttaaatgttgtgattggatgggtatatctaccatttttgtgggtgcttgtgactggcttagtggtgcttaattcatttggcaaatgtcgcaacccttgcacttctcgtcaaataatataatgatgcactaatcttatccagtaccctaaaaagcatgaccaaactcttatataatggtgttacattgtacaggatttaatagcattgacatatgtttcacattcttatctcatgtttcaaaatagtgttgatgttgtgctcaaggatttccagtgaagcatcaggatggatgaatccatgacttttagcatccattttcttctttatttagtaaaactgtttgaaactatttggagtgcttattagtacagttcattctgccgatgctaaaaactagagctataagttcctgatgtcagcata

SEQ ID NO: 28282 - DNA, 609 bp, Setaria italica
  misc_feature (1)..(20): n is a, c, g, or t
  Peptide Sequence Number=SeqID_94256
nnnnnnnnnnnnnnnnnnnnacgcaactacaacttagttataaattacaacataagtaacttaaagagtatgcaattatataccttttctttcaatttcagtgtctacatgtcgtataattggaaaagaaaaagggaaacaataataagtaacaccttacattaggagattatccagacccggaacatcaaatggtaactttataactccaagggcaataaacatgagcaagaaccacgcaggaaatgtcatcatgcatagcactaagaaagacttctgtccttggcaagcgcgcgtctcggtggtgtcgacgacccactcggcggcctcgcggaggcggcgctcgggctcgctctcaggctgcccgatgggggtggaggcgattagctccatgaacgcggagttcttctcctccctggaggaggcggcagacgcggcggcgtcttcgaccccgatggcgcgccgcacctccgcgacggacggctgggcggggggcgcgggggccgaaccctgctgacccggcggcgcacggcggcggatgatgcggcgtgcaggatctccagcggcggacgcggaggcggaggcgagcacggcgaggcggaggggcgc

SEQ ID NO: 28283 - DNA, 211 bp, Setaria italica
  Peptide Sequence Number=SeqID_94257
atcgtatgattcaacacaggtcaagataccgtccagctcagtcatcactgagtgcagagtcatggtcaccgagaagcagcatgcctacctcttcttgaagccgtttgagtgcaggccgaagtcgtgcaggccagagcatgttgccggctcatttgttaatgaagttcttgatcccaaccggcaactcaacatcagcaacatcgtcgtcacg

SEQ ID NO: 28284 - DNA, 357 bp, Setaria italica
  Peptide Sequence Number=SeqID_94258
tcagtaatgcagagtcgagtctgtcaacaatctcctcttttgttatggtgaaaccctcctcaaccttcgccgtgatggctatgatcagagtacaagccgagaagagcataacattggcgtggatgatggcgagttggagctcctccatctcggtaagaaccttcacggccaccccctcgctgttctcgcagtgaaccctcaccatcacgctcttctccgagaaccggacctcgatctccggcagctctttcctcgccgtcggtgtgccaggcgacggagagaacggggagccatcgtcgtccgccgccgccgcggcatggaggcatggcctcttgacgagcaccaggcgagtctcga

SEQ ID NO: 28285 - DNA, 348 bp, Setaria italica
  Peptide Sequence Number=SeqID_94259
ggcggcggaggtcggcgcggtcggcgaggtggcccgcggcgaacatggcgagcgcgtaggcggagaggaaggcgacgtcgagctcgccgaggcggtgcgtgccgcgggcgcccgagaagggcgcccacccccggcggagagcaccgccttgacgatgctcggcggcttgcgggaggcgtggaacgacgcgtaggacgcgaaggtgagcgccagcaccgcgtactcgtgccgcccgaggccccgcgcgggcgcgcccccgtggggcggccgcgcggcttccatcggaggggcggggcggatgctagagaggggagaggcttgagggcatggggcgcagggggaaggtga

SEQ ID NO: 28286 - DNA, 201 bp, Setaria italica
  Peptide Sequence Number=SeqID_94260
ggcgttcttgagctggagcagcgccgatctgtcctgctcctggctgcggtgcaactcggcggaagaagagatggagactgcagccgcgagcaggagtagcaggagcgcggcggtggaggccgtgctccggcgagcggccaccatctagatagccgacggcgacgactcaggaatggacctgaaccgcaggaggaggcgtcg

SEQ ID NO: 28287 - DNA, 347 bp, Setaria italica
  Peptide Sequence Number=SeqID_94261
gacctaccaaccaaccagcagcgcctgaactactggcacttaatttttttttcttctcctgacgccttgattggcctgcaaatactgaacagcagtcgatgagcgtattcaatccgcctgtatctacctgccgatcaattctgactttctggatctagaaggatagaagcctagaacaagtgttgcatgcgagagatttgctcctgtacggtacgggtcatccatcagtggccagatctgcagtcatggacgtacaacgcaactgcacgatcgatcgatcgatcagtactcggcggcagtcatcgatcttgcgtcttgatgatgatagaatgaagaaggatcctgtc

SEQ ID NO: 28288 - DNA, 794 bp, Setaria italica
  Peptide Sequence Number=SeqID_94262
gtcgccagggcctgcggctgctgatgcggcacttcgcggcctgcgcgcgcaaggccgcgccgggcggatgcgcgcggtgcaagcgcttgctgcagctcttccgcctacacgccgccgtctgcgaccggccggcggagcaggagctggaccggccgtgccgcgtcccgctctgcaggtgagatgactggccggcattttttacttccttctgcgaacggtgaatcgatagatctctcccggcagcaggacgccaggacgatcttttgatctgggctccagcttcatggctccacgagggtccagacaaatcagtccgggcgatcgtacgatgcccatcgatcgccaaccaagaatcttgttggccagcgagatgcccgctctgcgaataggactcgttccgctcgtgctcgtactcgtacgggcatagttttccaatcatttccgtgacaacgacgcgaacggcagggcacagcctctctgaggatctctatcaaaatatcggatcgatccatgcgtagcgtagcgcaccagatactcgcagctagattattttctcatcgcgtgctcaggattggggattctgacgtgttctttgttaacttgtgcgcagccatttcgcggcgaggatgcggacggagaaggcggacaagacatggcggctgctggtgaagaaggtggcgagggccagggcgatggccggcctggccgacaggcgggtgccggaggttgtggccatgtcatgggcgaggtacatcggcagcagcaaatgggcgaaattgagatgaaaatcggag

SEQ ID NO: 28289 - DNA, 988 bp, Setaria italica
  Peptide Sequence Number=SeqID_94263
ggcctccgacgggtggcgcttcgcccggcgccacgacccggcgctggagctggagctcctccagctgctggaggacgcgtaccggcgccgggagcggtgggcgcgggagcgggcgtcgcgggaggcttgccggcagctcgccgaggccatggactcgctcgacagcatcttcgccgccgccgacgacgcgtgctcgaccacgggcggcaccggcaagccgtgcgctagggaggacgacgacgccacctgccagggcctgcggctgctgatgcggcacttcgcggcctgcgcgcgcaaggccgcgccgggcggatgcgcgcggtgcaagcgcttgctgcagctcttccgcctacacgccgccgtctgcgaccggccggcggagcaggagctggaccggccgtgccgcgtcccgctctgcagccatttcgcggcgaggatgcggacggagaaggcggacaagacatggcggctgctggtgaagaaggtggcgagggccagggcgatggccggcctggccgacaggcgggtgccggaggttgtggccatgtcatgggcgaggtacatcggcagcagcaaatgggcgaaattgagatgaaaatcggagtcacgcgcggagccgtctccatctggcatgcatgatttcgccgtagcccgaaatcctcctgcaaagttttggccgttggggctacggcaatgcgacgctcgccatgagtctggcatgagccggtctgaacgaaaatttaggcggagccggttcatgcaggataggaaatgtatatttttttttggagatagggagattaggacggtagtattatatagatatttaatatatgtgtattcaacttagacttggtatatattataagtcagaagcagatttgttattataatagtttttatagaaatgttattataatagctttgcatactcttgttattttaatcaatttatgggctagaatctattgggccaacgtaaaaaaaa

SEQ ID NO: 28290 - DNA, 406 bp, Setaria italica
  misc_feature (396)..(396): n is a, c, g, or t
  Peptide Sequence Number=SeqID_94264
ccggtcaacggccacggcggcccgcacgagcagcctgctgggccgtcggtgctggaccaggcggtgttcgtgcgcgaggacatggaggacgtcgagaggccccccgtcgacatggccagcgcccacggcggcgccaagtgaacaaccccaccatgcgcgccgccggcgacgaccgtgtaggctctcaccccggacgatagctgtaggcctgtagcaaataagctttctgatgatggaataaaccgtgtctcctctttctagaacgttccagaagttatcagttcagagctccaagagttcgcatctcagtgtagtctgtgtcacctgtgaaggcactgtatctgtacccggtacccctgttctctgttgacttgttgacacatggatgagcattcncgataaacgt

SEQ ID NO: 28291 - DNA, 709 bp, Setaria italica
  Peptide Sequence Number=SeqID_94265
caatattacaatcttcatgatcatatgttgattgcctctgaaggtggcaagttcggtccgtgtaagctgcagtcactgtgggaagagcatgactctggttctaggctggctatggttaatccctacatatttggctccgacataccaggatctattagcaaaccatgtatcgatgaagaggatgaggtatatggttcaaacaatgatagaattgtgttagtttctgctattcatggcccttgtgaggtactacatgttgacaagtttagagaggagaccaagagaagatgtcaattagacagttcaggttgtgtgttgcatccaattttcttctgcaggtggaactatgatgattccacaagcagtttctataaagattacaatgttgacaattagatgggttcctagcattcttttgtgtaaagaattatacgtctagctgttttcctaatgtcaaacggagggagaagctgatatcaggctatgtaaagtttggaggaagagtgcagagaagagggggtattggaccctgttatgctgtactgtattatatcaatccgttgatgttcctttttaatgtaccatataatatgtgcctctcctccttcctgtaattaggttgggcctagtttgtatctcaggttggttcacatgagaaaactatatcgtacaggggcgttgttgcttgctgaccaatccggctgattgg

SEQ ID NO: 28292 - DNA, 1087 bp, Setaria italica
  Peptide Sequence Number=SeqID_94266
ggtatatggttcaaacaatgatagaattgtgttagtttctgctattcatggagtttgtgaggtactacatgttgacaagtttagagaggagaccaagagaagatgtcaattagacagttcaggttgtgtgttgcatccaattttcttctgcaggtctgtttcttattctttaaaattttcttttaccttatttagtcaacatatgtatttatttgcagaactggttgcccaacctccaaccactttgttattaataaatgtaaccatttatctatgaaaaaaatcatgtgtattactaggatgctgcttctggtttggatgttgctgttgctggtattaggatttttctccatgaatagtatcacatcatattgcaaccgcagatatatgaatggtgtttgaaaactcaacaaagggtatatcactgctaattaatgccttaacccaaatttttctatggttgattttgttttattccttcctctagtacagtacactgacttaatttgtctctatctttctttcgcctttaaagaagagttgaataatatccaaaccttaattatgtgtttttttgtaatgggggagcattgggagctgccagtggtacttttgcacaatgagctagggctggctgagagttcctagctatcagtatgttagctggtggaactatgatgattccacaagcagtttctataaagattacaatgttgacaattagatgggttcctagcattcttttgtgtaaagaattatacgtctagctgttttcctaatgtcaaacggagggagaagctgatatcaggctatgtaaagtttggaggaagagtgcagagaagagggggtattggaccctgttatgctgtactgtattatatcaatccgttgatgttcctttttaatgtaccatataatatgtgcctctcctccttcctgtaattaggttgggcctagtttgtatctcaggttggttcacatgagaaaactatatcgtacaggggcgttgttgcttgctgaccaatccggctgattggtacagggtaagttgtttctggaaacgccggtgagtgttggacgagattcg

SEQ ID NO: 28293 - DNA, 812 bp, Setaria italica
  Peptide Sequence Number=SeqID_94267
tggacagtgggatctagaactttcagcgcctcctagcagctgtttctctctgagcattgaagtagacagcagctacagggaggccaaggtcattttcctcagcaaactgcttggtgttgaaatgatccctgaaggatggcacagttacagtttgcctgcgcttctgcttgaagagcacaaaaatgaacctgtggataccaatgctaggtcttgggctctcgtagcttatgacctctcgccctgcaatttggaagatgcatggttattaattcaaagaacaactggaacatggcatagattaagcatgaatcagtgaaagagcctaccaaacgaggcatctgttgtcccaggtatatcggtcacgatcctgcaaatgtaaaggataacatttagccacaccacaaagtgttcagaaaatgtgctgttttgtgtatatggaagatgtgatgctatcttccttagcaacatatgttatttgatgtccatgaggtaagaaatgctgaatattaccagtgaaggtgctctctttgatatggatcacttggtcctgggacatctgggtctgtcataacctgaaatttgaagagctatggccattagggaaggaatattacatatagaatatttggatttaaccatgaagcatttgactgctaaccaatgtaaagaaagaccgcaagtcacccccttgaacctctactcttggtttagatacaactgctgatgggtatatctcgtggccattgaagacaagtttgtttgagttgtaggtcactgtcatcttcacacatggattaaaggagtcgaggact

SEQ ID NO: 28294 - DNA, 568 bp, Setaria italica
  Peptide Sequence Number=SeqID_94268
ataaacctcaagagttggatgacgctgttcttcgaagactggtaagatttatccaacatatatggagtagtattggttttttggctcagagtttatcctccatggaagctgcacctgtttcctgagacacttttgcctgagtctgttgtggtaacccgagaattcttttgaaactgagagttacagaacagttttaaagttacaatagcgactttctgtgtttgccaataattttagtaaattatatggctactagagaatggtctaattatgttgaaaataagttatgtatatgcatccaaaaaatctactttgaggattggatactttgcctattatattggtgatgcgacatgtaattcatccatactgtagtatcattattctgttactgttactgtattagagtcaggaggagttggtagatgggccttgggaacattgggtggagtgctgtgcacttgttttctcattaatactttactatacttccttaatttgcctatattttcaatgccaccattttgaatcttatcataatagtgagagaatatatgtaccactacct

SEQ ID NO: 28295 - DNA, 418 bp, Setaria italica
  Peptide Sequence Number=SeqID_94269
tcctacttccccttttcatgagagcttaccacatcttatatgattttgattactgcaggtaaaaagaagtaaaacttgcctctgagtactacttctacatggaaacacagactgcactagccattccggatgaggataacaccttggtggtctacagttcgtcacagtgccctgatcttgcacaaagtgtcatagcacggtgtctgggaattccattcagcaaggtgcgtgtcattacaagaagggctggaggtggctttggtggaaaggcatttagatcattccaggcacccagtgaaagctcgttactctgttggattcaagtctgatgggaaaattacagctttgcacctagacctattaattaatgctgggatatctccagatgcaagccctctgatgccaggaacaattatat

SEQ ID NO: 28296 - DNA, 338 bp, Setaria italica
  Peptide Sequence Number=SeqID_94270
cactggatccggaagctcacctctggaattccagatggatgtccctgcgccaatgacactggtgaaagaactatgtggtttcgatattgtggacaagtacttggaaagtctatctacccaggaacgtgcagctggggcgtaatcgataatcatgttatctcattattaaaggagtggtatcattgtcctatcgtatgctgtttacagtaaagtgggtgtaaagctttaggatgtgtgcttctggggtgacatgtttgtgattgcgtttgtaagtgtcctctaaactttttaaatttgagtgtcgatcaattattaaacactctcctgctaacttagtc

SEQ ID NO: 28297 - DNA, 541 bp, Setaria italica
  Peptide Sequence Number=SeqID_94271
gcattatgttttgcaacgtacttattgggatctagcacatttatatgatgacagcatatcttatctgtggcatttattttggaggtgcgacaaaatgttcttttaaaggccaatacaacaatgcattttaatcatgtcttttaggtgatactttctgttcaaaatattctgaagtgcaggtggagattgatcttcttacaggagcaattactttactaaggggcgatcttgtgtatgactgtgggaagagcttgaaccctgcagtggacttaggccagattgaaggttcctttatacagggaatcggcttcttcatatatgaagaatatgttacgaacagtgacggcttgatgattagcaacagcacatgggactacaagatcccaagcgtcgacataatcccaaagcagtttaatgccgaggttctgaacactggatatcataagaaccgtgtgctttcttcaaaagcttctggtgaacctgccttaattgctgcctcatcggttcattgtgcacttgtagggtaagtcttattctagtt

SEQ ID NO: 28298 - DNA, 2531 bp, Setaria italica
  Peptide Sequence Number=SeqID_94272
atcacgtcgagaaaatttccaacaacgattctaaaccagttggtgagccgattaagaagtatgctgttgaacttcaagcttctggcgaggcagtttatgtggatgacattcccgctccaaagaattgcctctatggggaatttatttacagcacacaacctcttgcttatgtcaagagtattaaattcaaatcgtctttagcatcagagaagataattgatgttgtttctgcgaaggatattccaagtggaggagaaaatattggatcaagcttcatatggggggatgagccattgtttggcgatccaattgctgagtatgctggacaagctcttggcgttgtgattgcagaaacacagaggtacgctgacatggcagccaagcaggttattattgaatatgacacaaaaggtttgagtccaccgatcttaactgtggaacaagcagtggaaaacagtagctatttcagtgttcccccagaatattatcctaaagaagttggtgatgtgatgaggcgcatggcagaagctgatcacaagatcccatcaacagaagtaaaatttgcctctgagtactacttctacatggaacacagagcgtgtcattacaagaagagttggaggaggccttggtagtctacagttcgtcacagtgccctgagcttgcgcaaactgtcatagcaaggtgcctgggcattccattcagtaatgtgcgtgtcattacaagaagagttggaggaggctttggaggaaaggcattcagatcattccaagttgcaacggcagcggcactttgtgcatacaagctacgacgtcctgtacggatgtaccttaatcgcaacaccgatatggttatgattggtggtcggcaccctgtgaaagctcgctattctgttggatttaaatctgatgggaaaattacggcattgcatctagatttattaattaatgctgggatatctgaagatgcaagccccagtataccacgcgttattatatctagtgtcaagaaatacaactggggtgctctgtcatttgacttcaagctatgcaagacaaataattcatctaaatctataatgcgtgctccaggagatacacaaggttctctgattgctgatgctataattgaacatgtcgcgtctgtgctttcacttgatgctaacagcgtgagggaaaagaattttcacacctatgatactcttcagttgttctacccagacagtgcaggcgaagcttctacatacacattacattctatttttgataggttggtctccacttcaagctacctcgatcgagctgaatccataaagatgtttaacagtagcaacaagtggcggaaacggggcatctcttgtgtgcccctcatttttagagctgaaccaagggcagctccaggacgggtttctgtgctcaatgatggctccatagtggtggagattggaggaattgaaattggtcgtaggaactggacgaaagtacaacagacgacggctttcgctctgggaaaattatggccagatggggttgaaggttttcttgagagagtgcgtgtcctacaggctgacaccttgaacttaatacaaggcggacttactgctggtagcacttcatctgaatctagctgtgcagcaacccttcaggtgtgcaatatgctggttgacaggttgaagccagtcctggataggctgcagcagcaatccgaagatgtctcatgggatactttgatttctcaggcctcgaaagaaaatgttaatttatctgcgagtgcatactgggtacctggccaagattctaataagtacctgaactatggagctggtataagtgaggtggagattgatcttcttacaggagcaattactttactaaggggcgatcttgtgtatgactgtgggaagagcttgaaccctgcagtggacttaggccagattgaaggttcctttatacagggaatcggcttcttcatatatgaagaatatgttacgaacagtgacggcttgatgattagcaacagcacatgggactacaagatcccaagcgtcgacataatcccaaagcagtttaatgccgaggttctgaacactggatatcataagaaccgtgtgctttcttcaaaagcttctggtgaacctgccttaattgctgcctcatcggttcattgtgcactgagggaagctatcagagcagcgagaagggagtttgcaaacagcactggatccggaagctcacctctggaattccagatggatgtccctgcgccaatgacactggtgaaagaactatgtggtttcgatattgtggataaatacttggaaagtctatctaattatgagcgtgcagctggggcataatctacactcctgttatctcatagaaaggagtgttatcatcctttcgtatgctgcttacaataaaggggttgtcaaataggaacaagtatctgaatgctttaaacaatgtacaaggttctgcgacctagtagccttcatgctatctccaattcaaaccatctatattcatatatcc

SEQ ID NO: 28299 - DNA, 1364 bp, Setaria italica
  Peptide Sequence Number=SeqID_94273
ctgatggtgagcattatttttgtaaaagcagaaactcaagggcaaagcatcttcagttcttctatacgtgccgtgcggacttcttgatctgttaaggctcctgaaatcattcgctgcttacgcgcctgcacggcttccattcgttcttcgacagtgcccttcacaatgaatcttttgatagaaacagtctttgtttgaccaattcgatggatgcgcatgacagcttgttcctcaacagcaggattccaccaagggtccatgacaaacgcattagatgcagcagtaaggttgataccaacaccaccagccttcagagacataagcagaaccaaaatgcctctgtcctcagagaactccttgattactttctctctttgctgaagattcaacgtcccatccagcctagcaaatgagatgttattcctagaaagaggaatttgcaacagatctaaaaatgcagtccactggctaaacacgatactcttggcacctgaactgcgaagaacttccaactcctgcagtagagcagatatcttggaagattcaacccagtttttatcaacatcaacttgaaagcggctatcagttggagcagttataagatcttgcttgctcatcgacttcctacagacagggcaaagacctgctgttgcactctgccaactagataagagacactctcggcacaaacggtgagcacagggagttaatacagcattccctacaaaaggcttccaggcaaataggacactccccttcacctttttgcaattcttggacaacctcttcgatgtaagctctagagggaaggcaagaatccccattaacaggaccattaccaccacgcaggaaacgctttgcaagcttgtttaggtctgcaaactcctgtgtatccccacgactcataacaaggaatggatggtcacagcattgacgaaggcgcaaaagtaactccagaattgaagcatagttgtgcagaacctttccttgctccacaaattgatcaaattttaccttagatctccgaaacagagcttcatagaaatccttctcagcctctgataaatcacaatattttacttcaatatttgcagggggtaaattaaggattggtctgccctccttgtctgtgctatttttagtccttctcaacataattggcttcaaaatggactgcactagctttaatcctctttcatcaccttcttcatatggtttttgtacaagtttattccacaaagcccagttcctccatggttcaactctcagaaaccggaaaaggctgtataaatcctccagattgttctgaattggtgtaccagtgagacaccagcgccgatcagcagtcagagcagccgcagcta

SEQ ID NO: 28300 - DNA, 677 bp, Setaria italica
  misc_feature (57)..(57): n is a, c, g, or t
  Peptide Sequence Number=SeqID_94274
cttaatcagtgcattgtaaggtctgggcatcagcgggcaccccttcctgtgtcatcncctccaacacagcagtcactctgtccatacgctttgcattcccatatccaacaagcaagcatgtataggtagcaacatctggttggcatctggcctcctgcatctcctcaaagcaccgcatcgccatgtccatcttcccccgtttgcaatggtcgcggatcaacattgtataagtccgcgcatttggtggaggccccttcgccttcatcagctcaaacatcttcacggcctcaggtcgcctctgcccacgcagcagcccctcaatcatcgtattgtgcacgacgacatctggcttcatccctttctccagcatctcattccaaacccgcccagcctcaactagattcttcgcattgcaccatgccagcatgagagcagtataagagcgcagatccggagtgtacctgtcatgcattttgtcaaacacctgccttgcctccctgcccaatccctcctgggccaaagcaacgagcaagcaattgaatgactccaccccatcatcaaaaccgttcttcctcatcaactcgaacaccccgactgcattcttgatctcgccagccgcagcgaaggacttaatggcgatcttgaaggcgtccattggacaaggcccctgccttccc

SEQ ID NO: 28301 - DNA, 505 bp, Setaria italica
  Peptide Sequence Number=SeqID_94275
tggaaattaccatattatggcgaggcctgtataaagtgtaaaacgaagaacttctcaagaggaataagtgtcaattatgacagtactcccatttacaataatgaattttgccaacgtatagcttgcccaacagttctactacttgcacacattgtcacattgctgcagaaatcgcacgcatatactccgtagcgcaagctataactccttcaacattgcagtggccattgcttcagtccttcaacattgctgcagaaattgcaagcatatagcacaagctgactgctgcagaaattgctctgcatgtctgcattgcttcagtcttcagcgaagaagacgctccattgatcgataagcttcaattcatttgcccccatttcacagtgtgcgccgcctagctgaagggcttctgcagcagcgcggtgaggtagacctcgtccttgccactgttgccgccgccggcgacgctcttgtcagcgacggcccacttgatggtcttgtagcc

SEQ ID NO: 28302 - DNA, 447 bp, Setaria italica
  Peptide Sequence Number=SeqID_94276
cgggatggagattgatagctgagttgtgagaaggaggtcctattggacctcgcgtcatccatctccgaccacgaatcccgcgtcccaggccactcgtcgaagaagggcctcagcggctggttctcctgcttcacatttccgagcaacccaccagctccactgctgaaagagtggcgctcctgctcttgggacagggaggcgatggtgacctggccaagctcctgcggtgtctcaagttgggaataggagtaggtaccgggcagaagaccagaatctctactcttcgacagtgtaaatggtggcacattggacggcagcgagttccatgagttatctgttggagaatcaatagtgaagcccctggagtttcctgatgctccagagaagaagctcagttcgccagcatcagctttagctccaagagggtacttgctgccatagcgatag

SEQ ID NO: 28303 - DNA, 651 bp, Setaria italica
  Peptide Sequence Number=SeqID_94277
ggtcctgatcccgcaatggcctgaagagtagaacagagcagtatctgctaatgcatatcatcttcaagcagctatttcttataaatgcctactatttcggctaagcagcaaacaagtttacaacagaaattcttttcctttctatttcgttgccaggcactaccacataaaataatttctgtgacacaagccataaattactacatctcaagaaaatcggcatgctcaagttgccagcaaatcaacaaccactttctcacagcaagattatggctacgtctagtcatcaaatgcatggtctctggtgtcacgttggttttggaaatttggataccggtgatttccaaaacttgattttgtgttggaaatctgattcacgttggtttctgaaatttgattcattttggaaccttgaatcgccatggttcctgaaacttgagctgttttggaaacttcgatcagaacggtgtccgaaagtctgaccatgagagccaaaatcgtcactcgcatctgtcggagcaaaatttgaatcatcctggcttctaaatctcagatcatgccgaccaaaattgctctccatgttcatgggagcaaatgctcgttctctcattctcctttctctgtcatattcaaatttgttcacgaatttgt

SEQ ID NO: 28304 - DNA, 577 bp, Setaria italica
  misc_feature (528)..(528): n is a, c, g, or t
  Peptide Sequence Number=SeqID_94278
ggtgcggcagctgaactgcgtcacggggcccctctcgttgtaggcgccggccgccgtcaggatctcggcgtagatccaaacgatgatgatggtcaccagcacggcgcaccggccgaacacgaagctccccttgacgcagaaatgggaggcactctctgcgaagagcacgagaagaacaagggcggggagaccaatttcgatgcatttggcgaccccggggaacgtgaagtagaagagccccagccccgagagcgtgacgaatgggaacgccgcgagggggctcaggaaccttatgaagaccctccatatgccgaagaagccgacgacggcctggaagacgccggcgatgatgagcgcgccctggatcgacctcatcgtgaggacgaacctctcgagagggtcgatgatgagcgcgtgtcgcgggctgaggacgatggcgacgatcgggtagatgtaggtgtaggagccgcccatcacggcggggagccgcgtgccgaagtggacctgcaggagcgtgttgatcccggngaggaagaggatggtctggatcacgatcgccttctcagcagtcggcccg

SEQ ID NO: 28305 - DNA, 728 bp, Setaria italica
  Peptide Sequence Number=SeqID_94279
ttagtaaggatttgaacttctcccaccaatgccagcctctgtccttcctcacactagcttcccagtacaagtgggtgcagtccaggaggtaggcgagtatggctgctactgtcgccggcgaggagaagatgacgttgaccatcacattgaacgcaacggaatgggtgtgaactggcccaaagccaaagaacatctcgtacactcggaagtactgtgggatggacagtccgaggaacaaggagatgctgattatgaactttgatctcaggctgttgagattgcagtactgaagtaggctgaggcctgcaccaactgcgtcaagcagaaagcaagttcagatcaacaaaagaagatgatatcaaaactgccgctgtctaactgatatggattgggaccgtaaagtctaacctgtataagcaaagagaacacagtacagtgcagcgaaaagtgacaacggaatagatgcaagaactgccccaaatttccctgttgatttgtagttcatatcggtcaggtgaagcagcaatcattttaagtgttgacgattgatgctgctaaaagtttcagagaatgggagagcttaccaaacaatgagaagaaaatcatgaacaaggctgagatctttataactcgccggcttccaactcgcgtcaacggcaacaaacctgcattctcactttgaaagcaaccaagacaggttattccaaaattttcagtttgtaacttgt

SEQ ID NO: 28306 - DNA, 847 bp, Setaria italica
  Peptide Sequence Number=SeqID_94280
gccgccgtcaggatctcggcgtagatccaaacgatgatgatggtcaccagcacggcgcaccggccgaacacgaagctccccttgacgaagaaatgggaggcgtactctgcgaagagcacgagaagaacaagggcggggagaccaatttcgatgcatttggcgaccccggggaacgtgaagtagaagagccccagccccgagagcgtgacgaatgggaacgccgcgagggggctcaggaaccttatgaagaccctccatatgccgaagaagccgacgacggcctggaagacgcctgtcgtcccttggtattcgtaccttctattcgtcgtgaggacgaacctctcgagagggtcgatgatgagcgcgtgtcgcgggctgaggacgatggcgacgatcgggtagatgtaggtgtaggagccgcccatcacggcggggagccgcgtgccgaagtggacctgcaggagcgtgttgatcccggcgaggaagaggatggtctggatcacgatcgccttctcagcatggccgccgcccatgagcgggacgatgatggtggggatgatgacggtggtgccgagcatgaccaggtagtgctggaacgccacgaccaccgtcgtgagccatggtggggggctggtgatgcagaagtcgaggccgtcgaactgctccctgacggggtgcggcaccaggtcctcggccttcacgggggccatggcgccggcgcggccggactggctggcgacctcctcgccgccggtcgggggagaaggagaagaggggccggtgaggtttgcagttggagtcggtcggaggaagaaacccaggagcggctccgcttatgtagagcgcg

SEQ ID NO: 28307 - DNA, 1389 bp, Setaria italica
  Peptide Sequence Number=SeqID_94281
ccttcaaatctatttttggtgacagttttcaaatatgagattctgttgttttttttgagactccgaagaaaaactagtgactgaattattgcaaaatctcctagtctctctgaaattaaaattgttcatccaaaatgatttataagcagaatcaaaacatctagctccctcccatctgcttgataggggatatcacattggttctaaagggagctctccctcttcagagtccctcagcatcctaaagcgaggggaagtacctgctcaggccataaggcagagcatagaactcctcgctcctggagtcctgcttgtaggatttgaacttctcccaccaatgccagcctctgtccttcctcacactagcttcccagtacaagtgggtgcagtccaggaggtaggcgagtatggctgctactgtcgccggcgaggagaagatgacgttgaccatcacattgaacgcaacggaatgggtgtgaactggcccaaagccaaagaacatctcgtacactcggaagtactgtgggatggacagtccgaggaacaaggagatgctgattatgaactttgatctcaggctgttgagattgcagtactgaagtaggctgaggcctgcaccaactgtataagcaaagagaacacagtacagtgcagcgaaaagtgacaacggaatagatgcaagaactgccccaaatttcccaaacaatgagaagaaaatcatgaacaaggctgagatctttataactcgccggcttccaactcgcgtcaacggcaacaaacctgcattctcaactgaagctgctgtgcctgtcaatgtaccgcacatcccatccagtatgatggatatgccctcccagccaactccacgcgagaacactgaaggtgggcagaatgttgccccggcgaatcttgacacaacgattaaggtaccggtagactcaataagcgatgcaaaagaagcagccagcatggcgaggcaatcctgccagcagaaaatggggtacccccactggaacgggtagggaaacctgacccaaggtgagccctggatgatcccggcccggtcggtgcggcagctgaactgcgtcacggggcccctctcgttgtaggcgccggccgccgtcaggatctcggcgtagatccaaacgatgatgatggtcaccagcacggcgcaccggccgaacacgaagctccccttgacgaagaaatgggaggcgtactctgcgaagagcacgagaagaacaagggcggggagaccaatttcgatgcatttggcgaccccggggaacgtgaagtagaagagccccagccccgagagcgtgacgaatgggaacgccgcgacgttccgttcgtttagggggtttcttttctttaggtttaaccttttta

SEQ ID NO: 28308 - DNA, 416 bp, Setaria italica
  Peptide Sequence Number=SeqID_94282
tttggttttaaacgttatttcttttattttcttacggttactttttatttcctttgttaggtcttgttagtcctattaatgctggtaaacgatcttattcacggatcctgaggctgtagccattggcgaagatgtcagcggaatgcctacgttttgtattcctgttcaagatggtggtgttggttttggactatcgccttcatatggctgtcccagacaaatggattgaactcctgaagcaaagtgacgagtattggaaaatgggtgatattgtgcacaccttaaccaatataagaaagaataggactaggaaaaaagtaagtaagtaacaaacttaaataagaactaagaaaaagtaacaaataagaaataacaaaagaacttaacttaaagtttaaggtaagaaacaaaagaaa

SEQ ID NO: 28309 - DNA, 1382 bp, Setaria italica
  Peptide Sequence Number=SeqID_94283
ttctttctccgccgcacacgttgctccgctccatcccctcttcctccgcagcactgctcgctcccggggtaatatctcgcccgccactcccccacccacgcacgcactcgcttcccgaggagcgcgcgcgggtggctcggctcggatctgccgcggtcggggcgcggggatggcgtcgttcgcggtgtccggcgcgaggctcggggtcgtgcgccccggcggcggctcggcgcgatccggcgcggagcggaggagtggggtggacttgccgtcgatgctcttcaggaggaaggactccttctcgcgtacagttctgagctgcgcgggtgctcctgggaaggtgctagtgcctggaggtggcagcgatgacttgctttcctccacagagcctgcagtggacactccagtgcagcctgatgaagaactgcaggtacctgatgaagcggagctagttgtggaagagactgcgtcctcatcagcggctgaagcaagctcagcagttgatgttgaagagaagcctgaaccctcagaagtgattgaaggcactggcgaaaccgtgaccgatggtgtagccgtcgaagccaaagcaccactcgtggaggagaaaccacgagtcatcccaccaccaggagatggccagcgaatatatgagattgacccaatgctggaagggtttcggaaccatcttgactatcgatacagtgaatacaagagaatgcgtgcagctattgatcaacatgaagggggtttggatgcattttctcgtggttacgaaaagatgggatttactcgcagtgctcaaggtattacttacagagaatgggcacctggagcacattctgcagcattagtgggtgacttcaacaactggaatccaaacgcagatactatgaccagaaatgagtatggcgtttgggagattttcctgcctaataatgctgatggatcccctgctattcctcatggctcacgtgtaaagatacggatggatacaccatctggtgtgaaggattccattccagcctggatcaagttttctgtgcaggctccaggtgaaataccatacaatggtatatattatgatccacctgaagaggagaaatatgtcttcaaacaccctcaacctaagcggccaaagtcactgcggatatacgaatcacatgttggaatgagtagcccggaaccaaagataaacacgtatgctaacttcagagatgaggtgctgccaagaattaaaaggcttggatacaatgcagtacagataatggcaattcaagaacactcttattatgcaagctttgggtaccatgttacaaacctttttgcaccaagtagccgttttgggactccggaggacctaaatactctgattgataaagcac

SEQ ID NO: 28310 - DNA, 2081 bp, Setaria italica
  misc_feature (2030)..(2081): n is a, c, g, or t
  Peptide Sequence Number=SeqID_94284
agtagaacgaagtaattaaggaaaaaataagggtagaataattagtagacaacaaccttaaacttggaatgagtagcccggaaccaaagataaacacgtatgctaacttcagagatgaggtgctgccaagaattaaaaggcttggatacaatgcagtacagataatggcaattcaagaacactcttattatgcaagctttgggtaccatgttacaaacttttttgcaccaagtagccgttttgggactccggaggacctaaaatctctgattgataaagcacatgagcttggcttgctagtgcttatggatattgttcatagtcattcgtcaaataataccctggatggtttgaatggttttgatggcactgatacacattacttccatggtggtccacgaggccatcattggatgtgggattctcgcctattcaattatgggagttgggaagttttgagatatctactgtcaaatgcaagatggtggcttgaagaatataagttcgacgggtttcggttcgatggggtgacctccatgatgtatactcaccatggattacaagtagcatttactgggaactatggtgaatattttggatttgccactgatgttgatgcggtagtttacctaatgctggtaaacgatcttattcacggactttatcctgaggctgtagccattggcgaagatgtcagcggaatgcctacgttttgtattcctgttcaagatggtggtgttggttttgactatcgccttcatatggctgtcccagacaaatggattgaactcctgaagcaaagtgacgagtattggaaaatgggtgatattgtgcacaccttaacaaatagaagatggctggaaaagtgtgtcacttatgctgaaagtcatgatcaagctctagttggtgacaagacaatcgcattctggttgatggataaggatatgtatgatttcatggctctggacaggccttcaacgcctcggatcgatcgtgggatagcattacataaaatgattaggcttgttacaatgggtttaggaggtgaaggttatctaaatttcatgggaaacgagtttgggcatcctgaatggatagattttccaagaggtcctcaaagtcttccaaatggctccgtcattcctggaaataacaatagctttgataaatgtcgtcgtagatttgaccttggagatgcagattatcttagatatcgtggtatgcaagagtttgatcaggcaatgcagcatcttgaggaaaaatatgaattcatgacggcagaacactcgtatgtatcaaggaaacatgaggaggataaggtgataatcttcgagagaggaaatttggtatttgtgttcaacttccactggagcaatagctattttgactatcgtgtcggttgtttcaagcctgggaagtacaagattgtcttagattctgatgatggcctcttcggtggatttagtcggcttgatcatgacgctgagtacttcactgctgactggccgcatgacaacaggccttgttctttctcggtgtatgcacccagcagaacagccgtcgtgtacgcactcgcagaggacgaatagggtgcaacgacggttattaggaaggaactccaggatgagctggtggcgcgacaccgctgcgcaatgtgactaggcgtgatgctgcccctatggccctatgctgttacccgagatcgcgtggccggtggatcaggtatccaggattgataggttagcttatcagtgagtctctcgctttctgctgagtgactcgtgaaaggaaatggaccgcgcgcaacgcagtttcccgagctacacgatagtcctccaatctgaaaacgttccctgtagttttgtacataatggcttcagctggcatcgcatctcctgaatcaatatgttcaaagtacgtcgttatttgcacggtactgcttagttgtactaataaggcagtgaaagaagcctggtatttttgctacaaaaaaaaaaattacgctgtgcaaaaaaaaactaaacgtaagnnnnnnnnnnnnnnnnnnnnnnnnnnnnnnnnnnnnnnnnnnnnnnnnnnnn

SEQ ID NO: 28311 - DNA, 239 bp, Setaria italica
  Peptide Sequence Number=SeqID_94285
cgccgtgaccgaggcgaggtgccccacctgctcgcgcgcgttctgcctgcagtgcgaggggccgtgggacgagcgccacggcggcgaaggttgcgtgatgtcccggctcgccgatgggcggaattggacgcgctgcccgagctgccgcgccatgatcgacaagaccggcggttgcaggcacatagtgtgcaggtgtggcactgccttctgctacatctgcggctcggctttttcagcgg

SEQ ID NO: 28312 - DNA, 256 bp, Setaria italica
  Peptide Sequence Number=SeqID_94286
tccaacaattgtccattcagtatttggctcagattcttgagacttcttttgttccaagtattcatgtataaataagttcctattgctaataacttggatattcaggaatcatatactttcagatccaaaggagactcaccagacctctaagctgtatggagataggtcggttttccaaagcttcatttacttggctagatattgactggagcacctccgaagccttagctatacgatccttgttccacaacttcaa

SEQ ID NO: 28313 - DNA, 1985 bp, Setaria italica
  misc_feature (1)..(21): n is a, c, g, or t
  Peptide Sequence Number=SeqID_94287
nnnnnnnnnnnnnnnnnnnnntttttttttttttagttttcctagaaacacagccggtgggcttattattgcacatgggatgggccaggtcacaaacaatgtcaacaacaccaacagctgagatccacctccctctacactctacaggtaggacattgccatgctcatacaacatcagcaacagcatccaacgacaggacatcactgaaatcagtgattcaaaacagtaaatccaccgaaactcaggtcctatgggaagagcctcaagcaaagtaaaaaacctgatgagagattccaacactgagtgtgtatgttacaacaagcagaattgcagaccctcacttagcccgcatctctgcgggcaaggggatcgacgagcagcaatggtagtacccgctttcgtcaaacttgaacctctgagagaggtggacctcaggaatgtgatattcaccccattcctctttcccgtatttcctgaatatatcccgggcatcaaatgaatcgttccaccggttccgttgcttgctctttcggtgccgcacgttcattatggtcgcgtgcagcttcaactcttgtctcgcatccctctcgagaactaggcctgacttgacaaaggcatcaattatgactttgcatgcacgtgctaggcgtccttcccaccaacttccaacactggagcatacaccacccgggccttagctggagagcctttcatgcatgtcagacctctaagctgtatggagataggtcggttttccaaagcttcatttacttggctagatattgactggagcacctccgaagccttagctatacgatccttgttccacaacttcaacataacaacagtaaggtgaaatgttttgggttagatgaatattgtcttgtcaatgccaaaatctgatcgggagcctttgctatccattttcacttgaacagactcttcttgaacttgaaggttgatggaaacacttgagccatctgcttgcttgtggtcatgatccatttcatcaatagaaccttcacttcgtctcttgtcttgatcactttcttcattagaagcagaagccccaaggattgagctctggaagtagttgagcttgtgaacaagatccgggtggatagccaatggaagtgatatgaaatgggagtagtccagcattcgactttggacagcctcttcaagaacatttgcaatcatctgtgatgctttcctaatactttcagaacttgttccttcaaggacaacagaagtctcctcccttgatgatgggaagataattttcactccagtatcctcttcaatcttcttctgcatagacccaccctttcctttcacaaagcgcatcaaaggaacatctacctcaatagagaatgaatatgtttcatagacattggactcatcaagatctttattgaagccagatacctcctcattgtcttctataactactttagttgaactggattctagacttatattattttttgacaatgatgcatcgttggtggtaacttcaataacagcattagttgctccatctgatgccaaattctcgctagaagttatgcactcttctacaacttgtccgcttccagaatttgatatctcattagcgtcatctttctggggaactgcttctgttgagattggcctccatctctgcacaggagactttcttttcttgtgttttgccagattacttgaccctccttgcgctccttccatcacaaatgacgccaacttattttgaccaactgatcccttgcgagcagagacctgcaggcgagcatggatgggacgcgtcgagaagtgaaaagatttgggcgagcttgatacgggcggacggacacgcggctgcggctgcggctgcggtgaataggcgatccactgcttactccggtgaaccgttaacggcgaccgccgcccgcagagaggactcgtcagctgctctgctccgacaccggcgccgaatatttgcgaa

SEQ ID NO: 28314 - DNA, 1246 bp, Setaria italica
  Peptide Sequence Number=SeqID_94288
gggggaaggcaggcgcgagcgggagcaggaggaggaggagatggagagggcggcgccggtgaggagctcccacacctccacggccgacctgctcgcgtggccgcagccccagggccaagccaccgcccccgccacgccatcgccgccgcgccgccccggccagccgtcggaggcgatcaggaaggtggtcttcgggggccaggtcaccgaggaggaggccgacagcctcaccaagaggaaaccgtgctccgcgcccaagtggaaggagatgacggggagcggcatattcgctgccgggagcaatggcgactccggggaggccgccgctgccgtgaagcccgcccggactgcctcgcgccaggctatcagtactgtaagccacatctcattcgctgaggatggaactgatcctcccaaaaagccaacttctgtagctgaggtggcaaagcagcgtgaacttagtggtactcttcaaagtgaggcagacagtaagatgaagcagatatcaaatgcaaaatccaaggagctcagcggccacgacatctttgctgatactcaggaatccaggttgaacagagcaaggaactcatcgaatggcagctctgcctctcacatccctgttaaaaatgcaaacgcgagcaccttctcgtttggagaggctaacattgacagcgcaccaaagacagcaaagaagataactggcaagaaggtcaacgacctctctggcaatgacattttcaagggagatgcgccaccagcttctgctgagaagcatctgagcaccgcaaagctgaaggagatcactggaagcaacatttttgcagatgggaaggaaccgacccgcgagcgcgttggtggaaaccgcaagcctcctggcggcgttagcagcattgccctgatttaacatcctgaactggaattgagatggaccttgccttggtccatgtctatccgtgtaggagttcgccgatgcaacaggctgtttggccgtcagtttgatgtgttgttttcggtcgtgatgcagcagtgagcaaccccatttttagtcctgataatggtctagtttaacttttggtgtgtgcatgtttggcttggttgtgagatacccatgctgtcctcccgtcagtgtgtagtgtgtgcacggtggatatgtgttgacaaataataacaggattctgaaccaagctcacatcttgcacatcatctgtgtatgaacgaaatgttgcctagtattttgcaaaaaaaa

SEQ ID NO: 28315 - DNA, 308 bp, Setaria italica
  Peptide Sequence Number=SeqID_94289
aaaacctctattttttgtagcttatcgtccatttaaaagatataactgctgcaagcctgcaagtctatgctgatcacttcaactaaagcaaaatgaataaatccatttcaggactcagtcctatcagagacaaatactgacgagaaagacgtgtcaatgtttctttctgttaagataaggaagcacttatttcctttatcttatgaagcctttgcttccctctatctgttcataattgttgaggttctcttgaatatactaacgtactcgaagagcaataaatactgaaagcacaaatagaattggaa

SEQ ID NO: 28316 - DNA, 1283 bp, Setaria italica
  Peptide Sequence Number=SeqID_94290
agatgtttccatctacagaggaggaggatgacgatgatgatgacggagtccgattaggtgccccagtgtccttgcatgcgcccattggtgccccagcctggcaagcagcaatggtgttgcaaccacataatgtgatgccattgattctgtcttgaacatcaaaaacaccaccaccatcacttcgcatgtagaaattcacagctatgaagttggggattctatttccagctgcagcatagcaagcttgggccatttgtggtagcccagaattctctttacatgcttcattctgtacaggcatcgtggggaagtaattttgcagaaatagagatgcagatcttgagttcagtggctgtgattcctttctgtttggacaagaaccaggcacaatccctggatctccagactcattctctatcaaatagctccattggtaagctattccttcactagcctcctttgaagaatcagaagtaaacaccagcaacctgtggttctttgcaaccatatctgtgacacttggccagtccttaccattagttggcatttccgagatggggtaccaatacttcatcaagtcagcagcagtaaagaccttgctcagtcccatcggtgaacgaacataatcctcgataaatattgttacaatctccgagggattctcagagagaaatgcttccacctcttttagtgtctcaactgctggtacgaaagcagtgaagttgtagcattgcccttgcagggagtggcaaagccatacatcattgttgaagtcatacatatcaagcattagtcccctgacgccattcctcaattggttggtgacggagtcctcctgattgtagaacgtgaccctctccaccccggtgcgcgacggctccccgaggatggagaaggaattgtgggtgacgagccatgagtacctgttgaagggcagccccttcacaatggaggtgggctggatcgcgaggtccctgatgcaggagggcttggtcctgccggaggcggggcagttgccgcagtacaggcccgtgccgcagtcgcgcgcggaggagcacgaatccccaacctgggcggagcaggggacgacgagcagcagcagcgcgatgtggagcaagaggagcacggaggaggggagcagcggcggcgccatcagctgcggccaccaaaccacctcactcccctaccctctccgcctttttcagaggacaggagtgatcagtgtgagagcgagtgatctgctgacggctgttgattatagtacctgtggtttggtggtgagc

SEQ ID NO: 28317 - DNA, 1058 bp, Setaria italica
  misc_feature (1)..(30): n is a, c, g, or t
  Peptide Sequence Number=SeqID_94291
nnnnnnnnnnnnnnnnnnnnnnnnnnnnnntactccctgtgtgtccttggctagtctctctagcaggaacatgacccatcggtttgtttgtaatatttttgggtgaacagagtaagattgctactcattcttctattaacattgatccaaacgtcatctactccccccctctcaactctagactataaagctagtaaggtgctaactgtcatctgaatagagagacaagctcacttcaaacactgatatcaatttcttctataaaaaaaccgtggaaaagtttgaaaaagaaactaatgcatgaaagatgcaaccagctttacagtcaacaccaggcttagcagaagaacaaaactactccgcatggatgtagtgctggcatcagcagtcggatgggtcttgaattctatagttcccgaatagatgtttccatctacagaggaggaggatgacgatgatgatgacggagtccgattaggtgccccagtgtccttgcatgcgcccattggtgccccagcctggcaagcagcaatggtgttgcaaccacataatgtgatgccattgattctgtcttgaacatcaaaaacaccaccaccatcacttcgcatgtagaaattcacagctatgaagttggggattctatttccagctgcagcatagcaagcttgggccatttgtggtagcccagaattctctttacatgcttcattctgtacaggcatcgtggggaagtaattttgcagaaatagagatgcagatcttgagttcagtggctgtgattcctttctgtttggacaagaaccaggcacaatccctggatctccagctgccatgaccacaagaaatgaaatgagaattttggcagaagagaagtctattgcagataccttatagttgagtaatagttaccagggctattaatatttcatttttcagatggcaaattcatagatggtcaccaggtcagtctaaggcataatctagcctcttggttaggaatacaatttctaacctcaaatcttgtggctttatttaccgcaacacaagatttgaggtta

SEQ ID NO: 28318 - DNA, 367 bp, Setaria italica
  misc_feature (332)..(332): n is a, c, g, or t
  Peptide Sequence Number=SeqID_94292
atgactaatgaaggcagcgaaacaaggagctcaagggaatgatgaaaaccgtcaagattgaggacattgataatatgcaagatgaaatgacggatctgatggatgtgagcaatgagatacaagaaactcttggtagaagctataacatacctgatgatgttgatgaggaagaactgatgggggagctggatgctttggagtctgatatggagtttgagtcagctgcagtcccatcatatcttcagccagaaactgatatggagtttgagtcagctgcagctgcatcatatccacagcctgaaactgattttgatgctgatctcaatttaccngccgcaccaacacgtcctgctgggactgctgcagg

SEQ ID NO: 28319 - DNA, 608 bp, Setaria italica
  Peptide Sequence Number=SeqID_94293
ctggcatcattacttcttgaagtatcagtttcaaatgttttaaccgatcgctttgctgcatgaaaccatgcatccgcacacagtgcataaatatcggcaccagtaaagtttggaggacaacgctgagcaactgacaaaagagaaacattcttgtggagtttatacttgcgcgtctgtgctttaaggatcctgcatataccaattacactgagatcacgattgccacgaatcagaaatagaccaattgaaaactgcaagtgacaacctttccctgtatgatgcatcagtattcacaccaacataaagaagcttatcaaaccggccagggcgaagaagagcagaatcaagaaggtcaggcctatttgtagccccaatgatgaaaaggtcctggctgttatcactcaacccatctatctccacaagtaactgggaaacaactctgtccataacaccaccagaatctgccgaggatcctcgagctggagcaagggaatcaagctcatcaaagaaatgacacatgggctgcagatctagccttctcgaaaatgtcccgtacattcttctctgattctccaacatacatgtttatcagttcaggacctttcacg

SEQ ID NO: 28320 - DNA, 619 bp, Setaria italica
  Peptide Sequence Number=SeqID_94294
caacatgcctgaccactgtgcgctttccacatcctgaagggccatatataaaagtggagaacttgatttttggtaaaatatctgaagggcataatgctggggcaattatagaggcaaaatgctccactatttcgccatgcaaaggaactgaatcaccagaagcagaaaagaaggagtaaggggggattgcagcagaagcagctcccccaagaacaagggctgtctgattgcaattaacacgaagaataggttcatctgatggttccatgctggtcaccttaaagtagatcacattatgaggatgcagattatcaacctgcttattgcatgctagacaggagctcgcaccacaattccaattgttctgtatgcaaaagacatcccctcttgctaggaacctatcaaacttaaaatactcgttcaaagcttgatctaccatgtcttggtagtcacttcctccaacagacgaatttatctttaaagaagcaagcacaccacattcaggaatcctcacaacagaaacccgtacatgcaaagcatatttaggaacttgagggcatggaagaagatctaagagaagggaaagatcactcctagcactggaagcagcatgaggctc

SEQ ID NO: 28321 - DNA, 2050 bp, Setaria italica
  Peptide Sequence Number=SeqID_94295
taaaggcagcctctcttacaaaaaaaaaaagaacttggtctgatgtatatacaaattaaccgaatgagcagatgccgctaccaagatgtaactggaaaatctgccatccggcacatggtggtggaaccggaaaatgtccaaattcatcagcggtggcacttattgtcatggcaccaatcttgggggagtctctagtgggacaaattcatcgatgggaaataaaatattactgttagtcatcatctagaaggcccttcaatcttctgcctcaacagctcgtagttctgaagctcctccagcgatagtgatggtgagatatctcccaacaccgtcataaaatcatcaatctcaacaatgacctcttcagcgctggcatcattacttcttgaagtatcagtttcaaatgttttaaccgatcgctttgctgcatgaaaccatgcatccgcacacagtgcataaatatcggcaccagtaaagtttggaggacaacgctgagcaactgacaaaagagaaacattcttgtggagtttatacttgcgcgtctgtgctttaaggatcctttccctgtatgatgcatcagtattcacaccaacataaagaagcttatcaaaccggccagggcgaagaagagcagaatcaagaaggtcaggcctatttgtagccccaatgatgaaaaggtcctggctgttatcactcaacccatctatctccacaagtaactgggaaacaactctgtccataacaccaccagaatctgccgaggatcctcgagctggagcaagggaatcaagctcatcaaagaaaatgacacatgggcgtgcagatctagccttctcgaaaatgtcccgtacattcttctctgattctccaacatacatgtttatcagttcaggacctttcacgctaataaagttcaatgagcattcagttgctactgctttcgccaataaggtcttccctgttcctggaggtccatatagcaggacacctgatcgcttgcgcaatttagaagaaaagaggtgcttgtacatcagaggcaactgaatagtatctagaataacctttttcacttcctctagcccaccaacatcctcccatttgacgttgggaactttgggtgtgcccagtgcagcacgattccttttcttggctcgttccaaggaagacataatatgttctttgcagaaatgtttttcctcattttgagtggcagaagagctttctggaaggatatcctcatgattgctgaattctttgctatctttctctgctgcaattttatgtgcaaaggacacaccagcatcagcaatcagcgcaagtatgtccctgggcatgaatcctgacgtttgtgctgctaaatcttttacaaacttgtcatcaatactctcatcaccaactgttgcaatgccttgaagtgtctcagatatcagtttgtttctatgctcttcattcatagtcttcatgtcaatctcatggcggaaacatcgcctaattgactgttgcattccttccgaactgtctgcagttgcaactagtataatctgaagagagcttacacattcaggctccacgaggtataagctcccatttacatatcttcctggcatcgagtccttagcaacccaacgttgtccagtgtactgcttaataacagattcaatgttcgacgcaatcccagattgctcagattgtgggccttcattggaggatgaattcccaattgcatcaaagtggcgaagaagtattatacaaggggaatacttctgagcttctttgaaggcagttgcaagtgcaacaggtgccccactttctgaagatgtcattagatcatgacagctacactcaaccacatgcagaccaagatggttagcaacatgcctgaccactgtgcgctttccacatcctgaagggccatatataaaagtggagaacttgatttttggtaaaatatctgaagggcataatgctggggcaattatagaggcagaactagacaaccaactaatttacgaccgaactgaatcaccagaagcaagaaaagaaggagtaa

SEQ ID NO: 28322 - DNA, 449 bp, Setaria italica
  Peptide Sequence Number=SeqID_94296
gacgccggtgaggccctgaggtggcgcatgactagggtgagactgctggtgaggttggcgatggcgtccgggatggcggccgtgacgttgccgtccccgatgacggtgaggccggcgacgcggcccgtggcgttgtcgcagtcgacgtcgtaccagtcgcagcagaaggtgtcgggcgtccacgacgtgaagtgttgggggctgcccagcgcgtcgttgatggccagcagcgccgcctggtcctcgtcgtggcattgcatcgtggagcccgaggtggcggcgccgacgaggcagcagaagagcagcaggactagcaggcggccgtgtggttgctgagagaatgcggcggcggcggccatgatcgatcgatcgatcaccttgatctcttgaatcttgatcagctagctctagctgcagtgatacttgtgaagttgtgattaattgcttgg

SEQ ID NO: 28323 - DNA, 213 bp, Setaria italica
  Peptide Sequence Number=SeqID_94297
gttttttccttttcgtttcttttgtttgtccccccgtaatccgatcctttcccgcggttcgcgtgcgccgttgccgcagatctgtgtactggtggcatcgccttcagcggatctagttgcactgtctttgtttctggtgttactgttatctgcagaagcggtgtggatctgtggggctgaggctttcgatttcgtttctatctcagcgcagga

SEQ ID NO: 28324 - DNA, 1061 bp, Setaria italica
  Peptide Sequence Number=SeqID_94298
tttttttaattcccagtatcatgtgttagtttaaatgattgctccatagcttctactgcaattcctaacctgaaaacattcaggtttgtccaggtgaaatagcttatgcttattcaaatgcagaggatacccgttgtccttctacgacatcgaatgggttcccggcttcagttaacacctgcaatttggcaaggttgcaaactaatactgggcataactattctaggcaagctatcaggctgcccttacattctctccagtctagatcttgttgccgaaaacaaccggcaaatcaactatttttcttttggtcctccatctgtcccactgttttcagcagcagccgctgcagcatctgccgcgtcactcaaacccatcttctgtagggcatttgcaaagccatcaacatccgtgggagttattggatatggtgtgtggcttggaccagggaatgtccgagtttccacttctttcttatactctgataacgccctgttgatgacattgcccacattaccaaattgtttgcagaattttggtgtgaccttggcatgatgtgggtgctgcatcatccccagcaagtcatggtagaccaacacctgcccactacagaatggtccagcccctatgccaatggttgggatttgcaatgctgatgttgcagcagcagccactggagcaggcacacactccaatacaacggaaaagcaaccagcctcctgcaaagccagtgctgtctccacaacctttacagcactgtcaactgtcttcccttgaggcctaaatccaccgagcacactaatagcttgcggtgtgaggccaacatgccccatgacagcaatcccagcctccacaatagccttagcggcactgatcctcgatggtgcacccccttcgagcttgattgcatccattccaccttcttttagcagccttacagctgaatcaacagcctgcgcggccgaggactcgtagcacccaaaggggaggtccccgacgagcagcggccgcggcgccgccccgggcgacggcgcggcagtgctcgagcatgaggtcgagcg

SEQ ID NO: 28325 - DNA, 296 bp, Setaria italica
  Peptide Sequence Number=SeqID_94299
ggcacgccgcgcgcgcccgggaagtcggtggagacgtacatcttcgccgtatacgacgaggacctcaagcccggcaaggcgtcggagaggtacttcgggctgttccagaccagcctcaccgagacgtatccgacggggttgctcaggaacggcacggccgggctggggccggcaatggcgccggcgccggcgccgacgtcggtgcagccgccaccggcgctgccaacgccacaggtgaggttattacgttacaatacaagctgccggtgtttctttttgagtttattcactggctt

SEQ ID NO: 28326 - DNA, 307 bp, Setaria italica
  Peptide Sequence Number=SeqID_94300
cccgcatcccgttttggccactagcgtcgcgtgggtcacgtctcggtctcgcccagtcgcccgccgtcgtctccctcggcaaagcgcgccgccggtagctacttcgctagcgccccgcgcccaagctagagctaggaaggcagcagcgcgatggcaacctcttccacaacgcagtactccgccggcaggcggcagcgagggcgagctgcaaggtcgtcccaggaggggggcggcgtcacgaacggcggagaccgagcgcgcgggaggcggatcccggcgaggcgaaccgggcgcgcggcgagcagga

SEQ ID NO: 28327 - DNA, 505 bp, Setaria italica
  Peptide Sequence Number=SeqID_94301
catcagtttctcttgacatgccaccaccttccatctatcctgcaatctgcagccgacggcacagagctctcctcccaggcccctgctacctcagagttgccattgaagcacagagctggatcagcagacaccacagacccaacactgcacgggttctggaaagggaacgcgccgacctcggcgtcgatcttgccccggacatcgaggaggagggtcctgagcctcaccacctccgcctccagcacggcatggtcctgcaccctcctcaggagctgctggttggcggctcggagcttcttgacctcctcctccaagaaggcagcgtgcgccttcttcttctcccggtacttgcgcacggccaccctgttccccagcggcttccgtggcttggccgggggaccgggactggcgtcgtcgtcgtcggcgccgccggcgaggacctgggtgtgcgtgtggaggcacgtgtgggtgtgcatgggggccgacggggccgggagggttgcag

SEQ ID NO: 28328 - DNA, 762 bp, Setaria italica
  Peptide Sequence Number=SeqID_94302
aaacaatatgcagtgcaatttatcagtaaaatagtctagcagagtttcagttgagtacaaagaaattccaaatcagaaatcaagaacacttcattgacatgcctgcagagaattttgcagaatactttaggtatttgcattttcgatatttccagtgctactatacaagtactctgtacaccgttcactctgaacatcaacataagaaacatataacacatcaaaggtagttctacacttctactcatcgtcagttcctcattctcttattccatgagaattgatctctcaattaagatcaaagaagctggcactggcagaggtcacaaaactgccaataaggcaaaagctcattcagccagagaatcagaactcacaaagcttgcaacaacgtccatgggatgatgcaaaccttctggaacatcagtttctcttgacatgccaccaccttcatctatcctgcaatctgcagccgacggcacagagctctcctcccaggcccctgctacctcagagttgccattgaagcacagagctggatcagcagacaccacagacccaacactgcacgggttctggaaagggaacgcgccgacctcggcgtcgatcttgccccggacatcgaggaggagggtcctgagcctcaccacctccgcctccagcacggcatggtcctgcaccctcctcaggagctgtcttggtttggtcggtcttcggtagtctttctttgtaccttccttccttcctaagtaaggtctagta

SEQ ID NO: 28329 - DNA, 327 bp, Setaria italica
  misc_feature (249)..(249): n is a, c, g, or t
  misc_feature (306)..(306): n is a, c, g, or t
  Peptide Sequence Number=SeqID_94303
gccacacgccgcctagagcaagctagctgctgtgctgctgccccgccgcactcgctgccatctcctagctactccggagagctcggccgacctgaccgccgagcagcaaacagagcggagatgggcagggcgccgtgctgcgacaaggcgacggtgaagaaggggccgtgggcgccggaggaggacgccgtgctcaaggcctacatcgacgagcacggcgccggcggcaactggatacagctcccccanaagatcggtaggtgcaagcaccttcatcgatcgtctgccttgccttagctgcagagntcaactcgatcggttatggac

SEQ ID NO: 28330 - DNA, 259 bp, Setaria italica
  Peptide Sequence Number=SeqID_94304
tttttttttttttttttagtttagaacaaaacaatgaaccaatcatcaatagcagagacccaaacatccatctacagttctacacgaacgaaggtgtcgagagacaagagacactagcatcatccaactatccaacagcaaaactgtatacacatggacgtaacaacgaacgaaacaaacagagaccgcctatccaaacagcctcctatccgaagcagagcctagccatatgctagtacccggcgatccccggagccct

SEQ ID NO: 28331 - DNA, 897 bp, Setaria italica
  Peptide Sequence Number=SeqID_94305
aacaagaaggacctggtaaactgaactgccgtttttacatgttaaacgggagctgctcatatgggtcatcatgccacttcaatcatccacagctcaaagcaaaactggaagtttcaaatttcccatctgaacaaagaaatcgtgaagttgaatttctggaactgaatcgtgttggccttcccattcgagaagtatggttttcctgttcccttgtattaatctaagttggttgagaaacttatgctcgcatttaaagctgctcaagctaaatttttattctttgatcagggagcaaggaagtgtacctattacatgcgtaatggtacgtgcagatatggaaagaaatgttgtttcaaccatccagagcaagtccttgatgctcaactccacatgccaacagggtgggatgatactaacttgcaatcgtcaccgcactcaaagaaatcaactgagcatgcaaccataaatgatatatcatctggcttagagattcttcctccaaatggctcagagattcttcctccaaacatacttcgaatgcttttacctcctcagaatgtgcctccttgtacagaagaaaaagaaatgaaggtgaagaaggaagccattgatgatggtactgacaatgagcatgattttgacacaaagtctgagaatgttctgcaacaacaggaaaagacaatatatcctcaaaggcctggtgaacctgagtgttctcactacatgaagcatggctactgtaaatttcagaagagctgcatattccatcatccgacagaccatctttcaaacaaataggaccgtttcaccactaccacttctgtagctgactcaggtgggggatatgactggctgtggctgatgagtggaggaagttctgatgatggaacagaaaat

SEQ ID NO: 28332 - DNA, 2023 bp, Setaria italica
  Peptide Sequence Number=SeqID_94306
atgtggtgcctgcagagcaagtggggttgacatttctgtacgagatgagggtaatgtgatggagcaatgcaccagtgatcaacagagaacaaccacagatgataatgctgcagaatatcaggaagtggtggagcaagaaggtgttgttagcatattgggtgcagccaaggttgacattgctgtggaatctttgcaagaggaggacattgtggtggcagatcaagttgaggatggtgtttctgtacaagatcaagataaggtggtggagcaatgcaccagtgatcaactgagaacaagaacgtatggttatgctgaggaagatcaggaggcaaggagggagaatattggtttctctgcaggatacccacagaggcctggtaaactgaactgccgtttttacatgttaaacgggagctgctcatatgggtcatcatgccacttcaatcatccacagctcaaagcaaaactggaagtttcaaatttcccatctgaacaaagaaatcgtgaagttgaatttctggaactgaatcgtgttggccttcccattcgagaaggagcaaggaagtgtacctattacatgcgtaatggtacgtgcagatatggaaagaaatgttgtttcaaccatccagagcaagtccttgatgctcaactccacatgccaacagggtgggatgatactaacttgcaatcgtcaccgcactcaaagaaatcaactgagcatgcaaccataaatgatatatcatctggcttagagattcttcctccaaatggctcagagattcttcctccaaacatacttcgaatgcttttacctcctcagaatgtgcctccttgtacagaagaaaaagaaatgaaggtgaagaaggatcccgattggtcatctgcttcagatgattctgatggctgctgttcggcagacagttcaggtgggcctttgtgcaagcaggaacacgtggactatcctgagaggcctgaatgccctttccttcagagatttggtaattgtaagtttgaatcagcatgccaatattaccatccaaaagacaaattcccatgtagacaccatccaaaagacaaattcccaagtagataccattcaaaagacaagttccaaagtagataccttccaaaaagagacccgccactggcagaactgaaggtttatcctgacagacctggtgaacctgaatgccccttctatataaaaaactgggtcctgtaaatttagggcagactgtaaatttcaccacccaaaggatttaaccccaagcatgcagggctcagcaagtccaaaaaggtctgttgctgctaacgaacaccatccagcagctagaatcccaagcatgcagggcccagcaagtccaaaaaggttggttgctaacgaacaccatccagcagctagaatcacgctacaggaccatatgtaccagcaacaaaaatgtcctgagaggcctggtgaaccagattgccggtactacatgcaatttgggaaatgtaaatttcaatcagcatgcatattcaatcatccaaaagatatactttcaagtgggtggcgtccggcagcatgcccattctacatgaaaactgggacatgccaatttggatcagcttgtgaattttctcatccgaaagatcggtgtgcaaccacaggggaagccattgatgatggtactgacaatgagcatgattttgacacaaagtctgagaatgttctgcaacaacaggaaaagacaatatatcctcaaaggcctggtgaacctgagtgttctcactacatgaagcatggctactgtaaatttcagaagagctgcatattccatcatccgacagaccatctttcaaacaaataggaccgtttcaccactaccacttctgtagctgactcaggtgggggatatgactggctgtggctgatgagtggaggaagttctgatgatggaacagaaaatgattggagggacgacgtagcttcaaccctagtcttctgtgaagagattgattattctaccacgtttgcgttcga

SEQ ID NO: 28333 - DNA, 565 bp, Setaria italica
  misc_feature (527)..(565): n is a, c, g, or t
  Peptide Sequence Number=SeqID_94307
tggcgccccggggacgcccggcttcgcgacctcacgccagctcccccccgacgactgccgctacgccgtctacgaccacgacttcaccgtcggggaggccacggccgccggccccgggggagaggcgccccgcagcaagatcttcttcgtgtcgtggtccccggcgacggcggacgtcaggagcaagatggtgtacgccagctcctgcgaggggttcaagaaggagctggatggcgtgcagatcgacgtgcaggccaccgaccccagcgagctcaccctcgacgtcctcaacgaccacgtctcctaataaaaaagcgatcgggatgtacacgtacgcatacgtatgtcgtacggcgtacaatacaagtttgtgtgtgtgtgcgcgcatggacgtacggtactgttgcctgagtccatgcattgtcgtgtttggattgtttcctgtggattgtaatgttgttgctgttacgtgcacgaataattgatggttgggcttggctttactcgataacattctctaaaaaaannnnnnnnnnnnnnnnnnnnnnnnnnnnnnnnnnnnnnn

SEQ ID NO: 28334 - DNA, 408 bp, Setaria italica
  Peptide Sequence Number=SeqID_94308
tagttacgtacctaaggacttacaaaggaacttcctggaccacaccgccatgctcgcgctcccgggccagaggagcatcgacgtcgccgccgccgcggtgggcgtcgtgcattgacgcgctttgatttgcagctgtggcgttgttacgatttacgaactgtgaatagaatccttctgttgcttctctagttttcttcttctcggtgtgtgcactgatttctgaatgtggccatttctttcttggattgagatcgatgtgcaattccttgattccccgatgtgaaattgttcacggcattgactagaagatgccacgaaaatttcactgctaagatgttgatagaaaccaagttggagttagcatttttctcttcaggatggagtgcgaggttgatccttggtcttgtg

SEQ ID NO: 28335 - DNA, 1002 bp, Setaria italica
  Peptide Sequence Number=SeqID_94309
atgttatgtttcttgtgatttccatacttctgtccatgtccatgttggactgagtgctgatagcctgatatgctgcttttgctgtctttattttgatatgtatacttttccatcccagaacatgaaattctacttggccagtacataagttggctccatgaatgggtggtttaccaccgtagttaattcttctgtgttggaaagaggcatatttccccttacaacacgatccagtgcacaactagtagattagagatatgattctcaatgtataacaaaaaatgtgctgcaccttatacaaattctaaagatgatgttacgcttttttattaagcagacggataacaaaaggttctttgtggtgtatttcttgatctttaggtcagaaatagtgtatgtgttatgacaattaaagttatcacaaatagaaatttgtagcctgctgtagtctccttgctccctccctgcacagtctaaaggtttttgagtttggggatctttgactacaaactacatatttagtatccttctgctagttacatatttgtttctgggtattacctacttcacgactttgttcatcttctagagtgacataagtttgctgtgttattcttgattgatatgatataactttaatgaactaagcaagtaaagtcaacaaaatacatgacaatgaggatattggattgatcaatgcatcttgaacttgtatagtggcaatcattctgtctgttctgtttttgcctttgttctactcttttcagtgtttacttttctcttgggtataagctgattataatttaggctagcttttctcccttttcacttttgagcaaattataatttaaatttccctgctgcactcctaccatccaccatttattgccgctaaacttacgcctatcatacttttctccgttcctttttcatttgcaaattgttctacttaaacttctaatggtaactgggagaattattgaagtaaggttattcacttga

SEQ ID NO: 28336 - DNA, 312 bp, Setaria italica
  Peptide Sequence Number=SeqID_94310
gggaacggagagcgcgggagataagggaggtgggatatgttttcttcctgagcagtaaaacttcatttggatctttggtgtccttgctttcaggagttttcttatccccagtcttcatcttctgagagttaagagaaggttcaaaagctaatgatctccctgctttccttgcttgtttcaggacacttcggaatttctgtgtcctgttccttttcctcttcaaagtcttgcgagggagaaaggtcagctttgaatgagcagctagaaggtcagcttacttggttacatacaggagacatgtttgtggctcgg

SEQ ID NO: 28337 - DNA, 420 bp, Setaria italica
  Peptide Sequence Number=SeqID_94311
gagtcgccgacgttgccgccgcacgtaggtggaaggacatgacggcctgcaccttgagcccgttcttcctggccatctccatgagactccatgtagccgttggaagttgtactgtccggggccctcggcctcggcgataccccaccacacgtccaccatgatgccctcgacgccggcgctcttgagcgccgccaggctggcctccaccgccctccgccggttgaggctgttgccgtccttgcgcaccgtgtcgagcggcatcatcacgaacaccggcacgccggccttgctcttcagctcggcggccacgtccgcgtgctccgcctccggcgcggcctccaccagcgcctggcacgccatggcgaggtccgacttcaccgagtccgtcgcctgcaccggggccgggtccagtcgctagaa

SEQ ID NO: 28338 - DNA, 395 bp, Setaria italica
  Peptide Sequence Number=SeqID_94312
cgggctcacgccgcggtccaacgcggccaccgcactcatttccgcgcttggcactgcggggcgcgtcgccgaggcggaggcgctcttcctcgagttcttccttgctggggagatcaagccgcggacgcgcgcttacaacgcgctgctcaaagggtatgtgaggattgggtcgctcaagaatgcagagcaggtgctcgacgaaatgtcacaatgtggtgtcgcgccagatgaagccacctatagcttacttgtggacgcttacacaagggctgggaggtgggagagtgcgaggatactgctcaaggagatggaagctgatggggtgaaaccaagctcttatgtgttcagccggatccttgcagggttccgtgacaggggagattggcaaaaggtcg

SEQ ID NO: 28339 - DNA, 4076 bp, Setaria italica
  Peptide Sequence Number=SeqID_94313
atacaacagtccaacaaagcagcggctgtaccaacgtcctttcaccgaacacaggttatatatatacaggaattttgaccaatctggtgcctagtcacaaacagggcaccgcattatgagtttttcttatgctccagctgcatcatcattcgcacattctgatagtatcctggcaccaattttggcaaccaacgggtcagaaatggccttaagctgtgaaggttaatcaaccctcagctgcgaccatctcaaactgccaaggtcaagcaagtttgtttggagaaaccctcagttgagtgcataatggacacgctccaatgttcgcaaaacctggaaaaccgagacaggcgaacgtggccccttcccaggcaaagcatgtgaaaggatggcttgctgctgctcaccagtgagctccaagaatagcactagcatatcgccatcaagaatgggaggtactcctgatgggatactgcgctgacgaaattctgcatgatcatttcccaagactggtgcagtcaacgggtgcaccgcgagcctttcttggacatcttgcaacagctgatgttcctcacttgtaagcggaatcataacaaagagactccccagcaaggtacttgccacgatacagtcataagccgtctcaagaaccgggtcagtatcatcatcaattggaagccgatacctgaatgcagccttctgaatgctcatagctgtttcgcccatataaaatgaacaatttacagctaagttcttctgtggactttctgaaacttccaatcttgcgctagataatacagatatactcccacgccggtctgatacgacagcagtttcacaatttaaaagagcaatatcacccaccaatctttgagcaggatcagaatagatcaactccagtttcctaagactctcattataagaatagaatagaacaccatcacgacaatcaccaactgcaatccgtgatgcaaatgtcttcaaacaggttattgtaaaccgtgttctaccaacagcacactttttcatcctatggggattttcatttgcgaaaccaaatacataaatcgtattaccagcagctgccaacacataacgatctagatatgggtacacggcaaggactgcaccactcaaggaagcatgagttaacgatctcaaatgtcctgccatttgttcagcttgaatctggttgcagcaaaactcatcaggactgctgcacaggctgttactagaaaattcttctgttgtatatccaataatctcatggaaaggagagccagaatgtgaagagggattaaaactggaagttggaataaatgaactgctctcacgaggactttcaacagcctccaagcttaaaataatcaggcgtcccttggtactgctttctgcttcaccgtttgacatcattggccgtccagcagatctactggtcccgactttaaaacttgatcacttccatttttgtaatttgcatgcactttgctgtttcaccaggttcacatttatatctggaaagcaataccccattttgtggatctacttgaacaatatctgaagaacatgatgcaccacttagcccagttcttagtaccaacagtgttctgctttcattatggtatagcactttccttggagtccccccaattgaaaacttttgtgcattcaatcgcttcccatgaaccatttcaaccaaatgcaaacagctctcagcaacaaacagtagaccattggggcaatcagcagatgatactggcgtcacatgagaagcaggaagaaaagaaatggatgaatatgccagactatgtcttgccgcatgtaatagccaaggcctatcactgagaacaatgatatcagcattggctgaatcatgtattggtaccaagaatacaggagtaattccaatacgccgtatagaaatcaactgaagaaatgtatcaacagatgggatagaagagtccttgtagaaggaaccaggaaaataatgctcgcttgcttccgactcaaatcttagtagcattccatttcgcaagcctgcaaggatgtaaaacctctcagccgcaacaaatctcacattttcaggtatacaaccactaattggagcaccaagtgcattgctcactgatatagtcccaatagtcaataaccttaatgcttctccaggttccacggagatgatttccacagaaggtttatgagttccaataacagcaaacttgcggatattaactttagccaagggattgttacaaaaatcatcacgctctccaccacttaaagttacattatcaggtctccaatcctcttgcgggatggatatgcacgatacttcaaattgcaattgaacgtgctgtgtctcatacaactcgtactggtaagacgaagatgatctaactccaaggacataaaggcaacaaggatttgatgtagcaacaacaacaacattatgtcctacagcaccaacactgatagtaacatcaggataccagttggtgcaaattggagaagtgaaatgggcaccttcagggtgagcgtatactgtaggcaaacagagcttcacacctttactgtgaatttgcacgagcaaaccatcagccaccaaaccacatgccaaagtgcaaacatcaggctggaatcccacggcatcactgatgtcgttaaaacttatccctactgatagtattctggtttcctccacaaatgataacacaagaaaagagtgataagcatcagttatcttcattctcaaagtccacaatccagtaacaccctgataaatagcttcagtcctcagaagtttctccacattgacaccattccgtagaactcgcaaagagccctcagggcacataccacaacatgcaaacatctgatcctgtttctcaccatggtaatcagcaattgctagatccaatattggtgctacattctgaattgtgcttttgtgaaacaatctacgatgtccaagtttaaatattataccatcccccatctctacaaatcctattatcattctatttttcatccacaaaagaggtttgcagggcaaactcctatcaatatactcaaaggtgcacaacttcactccttcaacatcggaagtaaattccaaaatatgaaactctccatcatctaagcaaaatagaagccttgcccatccttgtttgataggatcaggtggctcccagctccatgagcaaacgatccttgatttcacgctacctctgctgtcaacaccatcaatgtccatataaccgtcatccttcagtatgttatttgcagaatctctcaattctagcaaagcacaagcagccacatcgtcatcaacatctaatactgaacaggaatcttcaacggtgactggctctccaatcaggctagtcgtcaagctaatccttcggacacaacagacgttccttgggtttctaagatccaacaataaagcatcaccaacacgaaacagaagtgcaaagccaaacatttcaggaatttctgatatgtcaagtgccaatggtccgatttctgaataactagagatgtggttgattacaccactgctggagtcatgtccaaataatgacaagtcattcacatcagagcccttcctattaattatcattgccagaactggatagtactcttcatcttgggatgtagatatgaagcgcatgttccaaatcgtaccgcggacgctggtcctagatgcaccacttacagttctttcatcctcttcattttctggtggataaaaatatttcttatcagaaatggtacctctgccagaaccatgaagactctgacacactgaaacttgtataagagcaaacttatcctcatatgcactgacagcaacaaaactagattctcgatctatagctaaaactcttcccagctgatgcctcagatttcctggtttggataactcaatattggcaattgcaaagaacctatgcatctcagggcaaaagtaaagaagggaaagcttccagaatctgaaagcactactaaaagatccttgtgttctatctgtggaattattactagtattattacttccctacgttccggttcttgtt

SEQ ID NO: 28340 - DNA, 495 bp, Setaria italica
  Peptide Sequence Number=SeqID_94314
acaagcgtatactgctgagctcctgcactactgttgctctcattccactggccccacgttggcactgagccagagccaccttgtccagctttggcttggtttcgtgagcggttggcgcggtcctgaggtttcactggcttggcatcagctgttcgtggaggggttctatggccagctggggcagagaccatgtgagctggagatgccccagggggaggtgtgatgccactgttgttccttctcttccttgcattctcaaaatacatggtgtaaggggaaccaccgtcactggccttccactcgccaaattttgggatgctcccagcagttcccgacatgatcctgctattaattctttaaccggcgaatcccgaggaagtatggaggactcaggccttctaagcagagttagaagaggatgaagaagagataatgaagtagagaggaccaagggagcatgaagaacttgtataggggagggaagactaggaaaac

SEQ ID NO: 28341 - DNA, 293 bp, Setaria italica
  Peptide Sequence Number=SeqID_94315
tgttacctcagtggtgagtatgctcaaggacacgctggagcgcaagaagcttggtagccatgctaacaaagatgcctcagtaggcaattcttttggattctatgaccctcagcagtttcaacaaaacattcttggaggaacagatatattttccctagtgacaactgcacaagttcaggattccccaatgcttcccaaagctgagaggcccatggaaccaaatagtggtaacttcgttgctcctgcaaaccaggtttggttcggtgcagcatctcgagagccttcgcacagcg

SEQ ID NO: 28342 - DNA, 714 bp, Setaria italica
  Peptide Sequence Number=SeqID_94316
cttattgcagtaaacaacaattccattccatttttcaattcaaatgggcaatttcctgtatgaactatcaccaaactcactccaataacacatggaaccatgtggaaaaccacttctgaagactttagaagaaattggttaaacatccgcctactgttacatactcatatttgcaactaccaataagaacaacaaaaatggaataaacttggagtaaccgctgattctcacaagccttcccgtggggtaccagcagctaacataagttcatgtacaatgacaccggagcgggatcaatgcgccataaggtttccgcttctcccgaatgattgcctcctgaatcgctggtagtttctgatgaatcttcttccatatgtaattcacagcaccatcaggggttctgctactagagtaactagtgtcatactcgaagataggttggacatgagccaggtttcttcggaactcatccttctgctgcttggaaatattcctcaagtagtttgttagccatttcggtctcattgcgttactaactgacacaaaaatggagaattctgtgtagtctaccaacccttcaaaagggagctcaacctcatcgctaacaatgacaggaatgcaaagactggcaatagcatcaaagaggcgacatgaagttggtgtgtcaccagctgggtgcaagcaaaattccgatgcccgcatccctttttatcg

SEQ ID NO: 28343 - DNA, 752 bp, Setaria italica
  Peptide Sequence Number=SeqID_94317
gcttggatagtttgtcacagaccttcgtatacatctcaagagtatgttttctcctggactttatgcatcgccatcttctccaaggcttaattcatcacggactcctttcttctcctcaacggttttcagggtcttttcaggggactgaacaattttggataatagctttgaattttcttgcgaatgtttgatcagctcaaaatcagcttgggagatcttgctaaggagcccttctttcttttcgtctacagcttttgctctacttctcagcgccaactgatgcgtgttgtactcttgaatcttctgcctgagggtgttgacctccgcctggagctgctggaccacgggctcctccatctgctcgttgtaggcatgctccgttttcgccttctgaagctcggcgaccctagccctgagctccgtgagctggtcctcacgctcgaagtactcttgcgagatgggtttgaggacgtcgagcttctcctgcctgaagtgcaggtagttgaccaaggcgctgaggatgtcgatgatgcggcgtgggtgggggcggaggaagtcgcggagcgtgaggcccccgaagtagatggagtcgaggaagtcccgggccttccggtagatgcgcctgagcgccatggcttgcaagtggtgctccgggttttcgagcaacctagtctagtcttctattcgtaattcgtcgggggggttgtcgccgacgacgttggtgaagaagagggagaagacgttggggagga

SEQ ID NO: 28344 - DNA, 455 bp, Setaria italica
  misc_feature (1)..(50): n is a, c, g, or t
  Peptide Sequence Number=SeqID_94318
nnnnnnnnnnnnnnnnnnnnnnnnnnnnnnnnnnnnnnnnnnnnnnnnnngttttcgtatggtaaatcgtacaagttattgctatagttgtcaagcatttatacatattttcagttaacacggatgaaatgatggttgctcatgaaaatcaaatgttatcttacagggactgcctgcacatactatccaagaggtaaccaacactgggatcgcattgtagggtcagaagcacaattaacgctcatcatgagcttgcgttagcttgacgacaatctttgttttatcattaacaccaatatagtcgcatagcttgtggtccatggctaactcttttccagcccaccaaagctgtatcctctcatgcttgttgtctgatgatgattcttgcagactcaatgcctctggaggttcttgtagagcagaagcacatttcttctcaatattcttgatatgtt

SEQ ID NO: 28345 - DNA, 508 bp, Setaria italica
  Peptide Sequence Number=SeqID_94319
cggtcccaggctggcggctggcgttctacgtcctcgcgctcgtcagcgcctcgctcgccgccctgacatggctcctcggcgccgacccccgcccacgcaccgggaaggcgacggccacggccgcgctggcccagctcgtccgggaagccagggacgtggtgcgggtgccgacgttccagatcatcgtggcgcagggcgtggccgggaccatcccgtggtcggcgctcagcttcgccgccatgtggctggagctcgtggggttcacgcactggcagaccacgctgatcaccaacctcaacagcctcgccaacgcgctcggcgcgctgttcgcagggttcgtcggggacccgctggcgctgcggttccccaacacggggaggatcgcgctggcacaggtgtgcaccgcgtccaccgtcccgctctccgccgtcctgctgctcgggctccccgacgacccaacggccggggctgcgtacgccgccgcatttcttcatcttgggcttcgcca

SEQ ID NO: 28346 - DNA, 503 bp, Setaria italica
  Peptide Sequence Number=SeqID_94320
tgccgctaggtttctactatgggcagctagggttcttccctggtcctccgtagaatatgtaagtgccccagttgatgctattggtgccgctctgcacgttgtagcagttgggctgcttattccccaatcccacaacatttggtgaattgagtttgttgaacgaatcgaccacttgtatgttcctgatgtagctggccttgctgtacccttccccagggaagtgcccactgcccatgtctgtcgaagtttggccggcgtaaggcgagtacacctctccgccccacatgacataggatgcactaatttgcaagtacgagaaaatggttgatggccaataacccaaaatatggtttcctacttgcaaccaccagttgcccccctttggatccttccagattaaaatagttatttcatattgtgagccaccgtatctggatacaggggagaagctaccaccgatggcgatctgattgtttgtttggatgaaccctgagcactgtagg

SEQ ID NO: 28347 - DNA, 189 bp, Setaria italica
  Peptide Sequence Number=SeqID_94321
ctcctaggatttggtgagttcattggcttttgggactcagatcattgcaagctagtagataaaataagctcaacttcacgtggattctgcttgcaaaacagtgcttggttgacccctgcgaatggcagccgaaccatcgcaagcagctgtgcttgtgtttggatttctgtcatacacctgttctgaacc

SEQ ID NO: 28348 - DNA, 325 bp, Setaria italica
  Peptide Sequence Number=SeqID_94322
gcgaactcgaggccgcagatggagcagccgtgcagcttcggcttggcgagcgaggggtcgccgtcgccgtccagccgcggcttcttgtggctggcgcggtggccgcccagcgcctgaaacgacgggaacgcgcggttgcacgtcttgcagacgaacacccgctccggcgcgcggtcgccgcggccggcggcgaccggcagcagcggcagcgccggctcctggccgtgcgacatgagcatcagcacgcgagccatctcgctctcctggactgcaaacctcttcatcaacggttacacttgtcagctagttcttgccgatggattag

SEQ ID NO: 28349 - DNA, 254 bp, Setaria italica
  Peptide Sequence Number=SeqID_94323
ttttttttttttctaacaacagaaaaaccatatttaaattatgctaaatgtcttctcatgcacataaataattcaaagttgagaaaagttgatcaacaacatatgtttcattacagaaatccataataagcactccaagagtcaaacaagttcatgtcgatatttatttaagcgacaaagtcacagcataatgagcactccatgattcaaacaaaggaacaaattcatgaaagctgctacaaatgttgcaaatt

SEQ ID NO: 28350 - DNA, 248 bp, Setaria italica
  Peptide Sequence Number=SeqID_94324
acggcgttcttggcctccggccgctccagccacagctccacgatcccagagtcgggcgccgagagcttctggaggcggacgggcccctgctgggtgaggatctggagggcgcggacgaagaaggcgctgtgggaggaggccacagaggcggaggcgaacgccggcgcgtggcggccggagacggcgaggaggcgccggaggccgagcatgctggagtggagcggagcggcgggcgaggaagagccggg

SEQ ID NO: 28351 - DNA, 253 bp, Setaria italica
  Peptide Sequence Number=SeqID_94325
tgtccttggagtgcttcagcaccaacggtaacttggaaactgcgatgcccacctcagcatccgaccacctgaatgtcttcttcaggaactccacctttgcagcaatcttctcctcgctaaggaacgcgactgcgagcagcgcgtgcctgaacatcccggtgcgacggggcacaccaacagcctcggcgcgctccaccatttcccggacgcgttcagggttggtggtgatcagccttggcacggggagggacag

SEQ ID NO: 28352 - DNA, 253 bp, Setaria italica
  Peptide Sequence Number=SeqID_94326
gcggcgctgtggcgggcgcacccgccgccgcgggagccaggggaagcgcggcgacggccggagcctagcccaaggcatctgcatactcccgattgttgcaattactataaagcggtccttgaaggcaggacagggaagaagcctcttggcaatggcatcgttcatgaggtgggagcctattcttcatcaccccgaattgaaatggaagttgcaacaaaatgggaccgtcgatgcttgaacacatcgggtggtg

SEQ ID NO: 28353 - DNA, 487 bp, Setaria italica
  misc_feature (1)..(19): n is a, c, g, or t
  Peptide Sequence Number=SeqID_94327
nnnnnnnnnnnnnnnnnnnacatcagagaggttcctacatgtgtatacactatacactgtacagtgatcatgacaacaaatgtggtttgggacacaggtaagatccactttatttacattaaccgtgcggtcaatatcttgtgtgtgtgctgcacgaggagtgcctctacctctgctcgtcagataccatggtgagcaaaagtttggggaactgcacaacctggcgggagcccagaaataagacttgtgttgagactctgagagaacagaaatagaagtagcatagacagtcaggtgataaagctgctaatttagctgcaacgtccatccgatgctgtcctccacaagacctttctggatagctgtgaatgctgcatagagttgctgagacaccactccggcctcctggctcttcccatactccacttttctttcacggtaagtgatgctaccgacgggtgacagtacaacagcagttccagtaaca

SEQ ID NO: 28354 - DNA, 227 bp, Setaria italica
  Peptide Sequence Number=SeqID_94328
ggtggaggggacgggcgtggagaggtaccgggagctgacctcccgcgcgcggcggcgcgggcggcgctcggtcgtcggcgggacgggggagggggcggcggcggcggcatcaggtccgcgcgcggagacggagggactgtagcggcggccatggggatcggatcggagcggaggaaggggatctagccgttgaggtggaagggaatggattttcggggggaagacgg

SEQ ID NO: 28355 - DNA, 380 bp, Setaria italica
  Peptide Sequence Number=SeqID_94329
cggggtttaaggggagcagggctttggccgcggcggcggagccggagacggaagcgcgagccatggcgggggaggaggagaggaggcggtggggcaggagcagatggcacatcccacgagccgggcgcgaaaaggagcacgcggcgcgtgggaggcgtgccggtgaggtgaagggcggcgctggcgtgggtggcgacggccgggctggcgtgcgtcgcgttggtttttgttgagccggcggggaggaaaacgagccgcggtgcggttgcctcctgctgttggtgcgtcgttcggatagccggatttcgttgacgtgctgattttcgtcagttcgtgcgataacctaaccaaattcgcattaatttgcaactccttcagtt

SEQ ID NO: 28356 - DNA, 253 bp, Setaria italica
  Peptide Sequence Number=SeqID_94330
tattggtttcctgcagtcacatttcacgacataaatagcatgcgtcccatgtttcccaaggagcaagccatttccattgtcttgtttgcttaagaaagccttgacacactacaagcttatatgcagccagttgcatctgcaagacctgtgtatgtatacggattgcacattgggttttaggttgtagtgtaagcataaaggtgtgagattcatactcacagctacctgccatggtttcattcaagctgaggct

SEQ ID NO: 28357 - DNA, 248 bp, Setaria italica
  Peptide Sequence Number=SeqID_94331
aggcagaatagacccatttgcttcttccgttgctcctgttacagacactggatgacgcatttgttccattgtgactgtcttggtccctgcatcagccaaggcatctggggtctcatcaggaggaagaaccacagctggtggcagcagctgctgtgcggactccacattctcagaccctgaaggcgccatccttagtgaacaggccgtatgctgtgctacatgagaaggcacgaaggggggtttcaggt

SEQ ID NO: 28358 - DNA, 454 bp, Setaria italica
  Peptide Sequence Number=SeqID_94332
tagtcgcagcaggcaaaactgcttcttgaacatttccatttcatgttttgactggttcatgcacaaatggtctgatatgatacgggttgagccttctgaattgtgattggatatctcacttcagggaacgggctaaatgcattgatgtgtgaggctgtgagctgatattaagttataaggggtcttggtgacggtttttagttgaagaattatatctgccatattggcttcttgtgggatttaggtactatgggcttaatagcgccatattggctcctaaactgactttgattaatacaaaacatttgtgatcctgtatgttatcatgccaaataatgtcatgtatgtgttgaccaactaaattgacgaaaagcatcctgtatgtgccctacagatctgtactaacttatagtaagaacatcttcattaatccatgaatatcttgttatgcatg

SEQ ID NO: 28359 - DNA, 537 bp, Setaria italica
  Peptide Sequence Number=SeqID_94333
cggaatcaaaagaagtagcctgtgcccgttccccccgcgccgtgcacctcgcgtcccatggactccgccaccgtggctctcgccagccccgcctccgacgaccggcggttctgggaccgcctccgcaaccgcgtcgacaccatcctcgaggaccgcggcgtgctcccacaacccgccgctgccgccactacgcgcggggtggaatccgagcgggggaagcgcctccgggaggactcgctgatgctcgtccgtggtctggactccgtcgccgcgtcgctggcgcagctctccgacaccctcaccgccgcgcagaagggagtgagtgctctggccacgtgctcttctcaggcgagggaatgcgagcgccgcgccgaattagatgaggaagaagaggagccaaaggcaaagcggctgtgtggcgactcgttggaggccgcgggcctggatggcgattctccagtcgccggaaaggaagcgtctgcggctgcggctgctggttctgatgtagaggaaaccgcgggcgtcaaactgcggcgg

SEQ ID NO: 28360 - DNA, 691 bp, Setaria italica
  Peptide Sequence Number=SeqID_94334
tttccttttgttccttctccagccacttaatgtacaccgtcgactccagaaggacaaaggaggatatcattttggagatgaagaatgcatatgccgtttcaaggttgaggaagaaaactgggtataccaaaaagcaattttatgatcaagcattaaacatatacaaggaggttaacactctgatggcgcatggagacacatcagcgctccggaaaattctgacagagaggatgcattctactataaaaaatgaactaaagagaaggcaatccaagtggaattctgtatactgggaactggtagagcctgctgtgagcatcagaactttgagggctcgcatgattggcctcgataagaaggaccttgataaagcttttatacaacttacgcttgagtttgtcactaaacagaaatttgaagcctacaattcaaagggtgaggttgtgtctggagacaagtcaaaggaggtacttgtgaaagacatatgggtgtttgagagatccctttttcaccctggagcatattggcgtgtatgcggaaggattaatctgtaataatatccgtttggcaagcacatttcggtcctgaatgaagttagcggagccttctggttgcacaaagtgttctcaataaatttttgccctgccctcctgtttttctccagtctgactgatgtctaacaggatcttca

SEQ ID NO: 28361 - DNA, 331 bp, Setaria italica
  Peptide Sequence Number=SeqID_94335
tcatctgctgaagctgtctttcgtgggagcattgtcgtctggtgttaatgctcccacgtggtttgtgctgaagatcacatttttgctcctggccttctgttttactgcgatgcttgctctagcattttcatcgaaaaactttgtgattgttgggcatgttcttctgctcgtgactattggcacagtgctatttgttctgcttaacaggtttctagcagaagttgggtttgtgcctgttgaacaacagatgcaggagatgggcatccacaaaacagaagccacagatagggacaaaagaaagttaaactgtgacagacttttattgatatga

SEQ ID NO: 28362 - DNA, 259 bp, Setaria italica
  Peptide Sequence Number=SeqID_94336
tagttcaaagatgagtcgaagggcttcaacggcctgggcggatatggaaatgaggggacagtcattggggtcctaccaacaggcgatggagccaaccctaacgtccaatggaagatagttggcttcttctcccgtccctgatggattatattcatgtaggagactaatggaagctaataaggcctcagtgtggattgcttgtgtcaaaaggaacccgctgtgcttgcattgtgtttgtcgaagattattattttgcgat

SEQ ID NO: 28363 - DNA, 244 bp, Setaria italica
  Peptide Sequence Number=SeqID_94337
cttctgcaccggcattgccgtggagcgcggtttcttctttgggacggtgcacgtggcgctctcgtccttgtgatcctgcagcagcttcctcttgcacgccgccggcacatcgccgccgtcctggtcctcgaagtcgaggttcagatcaagcatgaagctcgggtccgccacctgctcgtccggcacgaagaagtcgccggtcatcgtgaccgtgccgctgccgtagtaaccagcatggccgtcg

SEQ ID NO: 28364 - DNA, 264 bp, Setaria italica
  Peptide Sequence Number=SeqID_94338
atgatagctgaccctgctatttcatcagattgtacacctgcaaaacggcaagggcagagggtccctataattgcgatgacagcaaattcgttttctgagagtgccgatgaatgccttgctgcaggcatggattcatacatatctaagcctgtgaactttcagaatataaaagaatgcctgcagcggtatttgccgtcccaatgactaaccaattattgtaaagtagaaaggtaatttgtagcttaggaaagttttgtgaaatca

SEQ ID NO: 28365 - DNA, 314 bp, Setaria italica
  Peptide Sequence Number=SeqID_94339
tgcagaactcgccgaagccacaggtcagcaagtactacttcaagaagaagaccagtagccacagcagcagaaacggcaaggatgatgccaaccacgactccaggatccaatccaggtcgcccccgagcagacagagcctgaccttctacgacacccccacctaccacactggagccttctacgagattgaccacgagaagttgccccccaaatctccaatccatctgaaatccatacgtgtggtaaaggtgagcgagtgcacacacctggacgtcacggtgaaattcccatccctccaggtgtgtgcactcgct

SEQ ID NO: 28366 - DNA, 814 bp, Setaria italica
  Peptide Sequence Number=SeqID_94340
cgccttcttcgcggcggcggaggcgcgcgccgaggatagcccggagctggggcttatgggttcgtgcgtgctggtgatgctgatgaagggcacggacgtctacgtgatgaacggtcggggacagccgggcggtgctggcgcggcggccggagcccgacctcaagaacgtcctcggcaaggcgtcgcaggacctgcagcagttcaaggccgagatcatgcgcgagctggaggcgcgcgacaaggacggcctgcaggccgtgcagctcaccccggagcacagcacggcggtcgaggaggaggtgaggaagatcagggtccagcatctgaatgatcggaacgccatcgtcaacggccgggtaaagggcaagatcaacgtcaccagagcatttggagtcggctacctgaagcagcccaagtggaacagcaggcttctggaagccttcaagatcaattacgtcggcacggacccatacgtcagctgcacaccggcgctgtgtcaccaccgcatctccgcgcaggacaagttcctggtgctgtcctccgacgggctctaccagtacttcaccaacaaggaggtggtcgaccaggtggaggcgttcaccgccgcgcagcccgacggcgaccccgcgcagcacctcgtcggcgagctcgtggtccgcgccgcgaggaaggccggaatggcgtcgcacgagttgctggacatcccgcgcggcgcgaggaggcactaccatgatgacgtgtccatcatcgtgatctccttcgaggggaggatctggaggtcgtccgtttaggaggcttccggaggtccaaggca

SEQ ID NO: 28367 - DNA, 242 bp, Setaria italica
  Peptide Sequence Number=SeqID_94341
ttatggagctccctgacaaagatgcctaacttgagcaggttgctcatttctgcatgtgatatggatgaggttcttgacttgagaatgctcaagccattaccaaatctgaagttcctctggctttcaggaaagttggcagaaggtgttcttccattgatattttccaagtttgagaaattggcattgttaaagatggactggtctggtctgaagaaggatcctattatctccttctctcacta

SEQ ID NO: 28368 - DNA, 285 bp, Setaria italica
  Peptide Sequence Number=SeqID_94342
ttcttagtcttagtttgttggcgatgcatctctgcatgcatgcatgcacatgcgcgcgtactggtacacgtggagttggattaagtttgtattatagagcaaacttattttgtccatacatgagataattgtaccaggaacccctacaaaaagttactagagtttccagtaatggatggcaatagggtagctctgtttccaaataaaagacgctttggtaaatacataaacatgtttactactccaaaatgtaatattttctaatggtggacacactcattgtta

SEQ ID NO: 28369 - DNA, 522 bp, Setaria italica
  Peptide Sequence Number=SeqID_94343
gttcctcgcgccttcctctggcgtcaggaggccggcgagcttgttcatgtctgtcttcacgaagcctgggtgcgcgcagttgacgcgcagatcgaggtgcctcctcgccaggatccgcgtgtaggcgttcacggccgccttggtcaccttgtacgccgagaaggccaccggccacccgttcgcctccgccgcgccggccgtgaagtccttcatgaacgcgtccagcatctcgtccagcctctcctcggtgagcgtgtcgacgtcgttcagctcgtgcttgagctcctcgctgacgaagtacctcagctggccgatcacggaggagacgttgacaattctgccatcggcggaggcttgcagcaggggaagtaaggcttcggtcccttgcttggtgccgtagtaattcgtccgcagtgtctccttcgcagagttgtgagtctcccgggtgtttcgccgcatccattcagacatctggccttcatccatgccagcaaactgttgcacgatcggcacaccaattca

SEQ ID NO: 28370 - DNA, 596 bp, Setaria italica
  misc_feature (578)..(578): n is a, c, g, or t
  Peptide Sequence Number=SeqID_94344
gctgatgtagaagagctgatgtggaaacaacacttgcttctgaattttggctccaacagtctggcggtgtgtggatgttgaacattctgcaaatctggaacgcaagaaagatttcaattgtctcaaatattcaaggaattaacttctctccacagcacaatataattgtgcaagcaagaatatatgcctttcaggtcccaaactgcgggctccaatattcattcgcccaaaaaaagactcaactgagttgaaatgtgaagtaacacatttcacccaacaaaaaggccctactcagttgaaatgtagtatacattaatcattttacccattaaaaatccacaacaattgtgaccgtgtaagctcccaaaaatatagcaaataggagaaccagagcgtggggttctaactagacacgcacaacccaaacttcaaagaaagagaatccagatggaaggaactccactcagttacttcctgttagcaacggcggaatatctcagcatatacaggggcagatatgagcattctgtgtctccattgtttttttcttgcgttccagatttgcagaatgttcaacntccacacaccgccagact

SEQ ID NO: 28371 - DNA, 1426 bp, Setaria italica
  Peptide Sequence Number=SeqID_94345
ctggcctcggcgaggggggttcgtgggggcgggcaccgccggaagatcctcgtctcgctgggcgtcgcgggagcgggctacgccgcctaccgcctaacggacgcgcaccgcgcccagctcgtgcgggtggagcagctgcgcgccatggaggagcaggccgccgccgacctcgtcaagaaccagctacaggaacactttgagaaggtgcagagcatttgcgacagtaccacattgcctttggccatgcatcagctctgtgaaaagataatgagtgaactggatatttcaaaattgattgacaagctgcggcaagggaaggtagaatcaagcgcactgacaccaaaggagaagtatgatacttgggaggagattaagattaagagtttcacaaagacagtttcttcaatatgggcaatgacattgcttagcttgtacactagagttcaggtcaccatattaggcaggcatctatacttagattttgcccgcggttcacatcgtgcacagatacaggaagaatctgataccttcagtgaaaatggacacaagagcttccttacaacggcggattatcttccaactggcaaaatcaatgcatacataatgcaaatgcaacatgctgcgacagaagtcctaaaagagaagcagctgaaagaccttatgagcacggaccaagtattgcaaacagtattacaaatattggacatgttcatgggtctttgtgaagataactcatggataaattaccttgtacctgatgatgccagtgttcatgcacagttgatggctgtgtctagtactggatttgatgattcatcactcctaaatgatttcagaaagctagaacaactgatggctgagacacgaatagtattggcaagcgatgattttaaaaatatcatggagaggtcactgaggaagatagctgacatggtgattgaggacctggctgcgcagactggaattccaagtcctccgtcaggattgcccttagcgacacttttgcccagagttgcccatctgagttcaccgttgcttgtggagccgaacaagaacaaacacattcagatgatccgaagtatgcctgaagtggagctcttctacacattcctgtatgcaaacatgccaccggaaacatgatctttgtgctgatgtggaaacaacacttgcttctgaattttggctccaacagtctggcggtgtgtggatgttgaacattctgcaaatctggaacgcaagaaaaaaacatggagacacagaatgctcatatctgcccctgtatatgctgagatattccgccgttgctaacaggaagtaactgagtggagttccttccatctggattctctttctttgaagtttgggttgtgcgtgtctagttagaaccccacgctctggttctcctatttgcttattattttttggt

SEQ ID NO: 28372 - DNA, 558 bp, Setaria italica
  Peptide Sequence Number=SeqID_94346
gtgcagtacattatactctgaatattcaaaggatggagttacacgacggccaaagttacaagtgggtccctaaattcctgaggctaaagtaagtcccggtgtagtagtattacgtgtcttcagtcatttgtatggaaacatgaacattctgttgtcagtcaacaaagtcttcagcgatcatgtgttcgcctccgtcttgttcagcacatttatgtggatcgtgtagttgaggtaatacagaagcgcccaaagtattcgagtccacgaatgcacataatgctttccagattgggatcaacatcttcgctggtggattcaagttcttaaaaacaagcatgaggccataatcgtcacgtagaagcagtgccaagctccagtagcaagttacaggggtcacgcactcgttcagcaccggtcttagaatcttgccggtgggtacaaatttgcgatgaactcttccactacagaagtgttgctctaattgaatcccaaaagtcggcatgatcaccaatgactcttcttcacaggatcacatcgcaaccattttgcaattacacc

SEQ ID NO: 28373 - DNA, 208 bp, Setaria italica
  Peptide Sequence Number=SeqID_94347
ttaatgaatatatggatagatggatcatggatgcgtacacggtacatagactgatagacatgcagataaaaagttttcctccaacatatacaactttaggcagcaactccgtcctaaacagttttcctcttcttcttttttttggggacgaggacgagccgagaaggagcatcatcatcatctacttgttacttgttagccgaggcag

SEQ ID NO: 28374 - DNA, 631 bp, Setaria italica
  Peptide Sequence Number=SeqID_94348
caaaggtaacgagtggtgtagttacagatgttctaagggacactgatgaagttgaagaggttgtggtattcattcctttgaatatttctgaagagatgctcttggtcattttttcagtttgacaaggagatcaaaatagtgagatgacatactggcacccccagcaccatgccgttcaaattcgacgaactcaatctcctcatgcagaatgagtgtaggaggctttggcagaaagaagaaacccttttcaagtggatcaacagtccatcttcagctttgagtgaagatttaactgcatatccatcttggcaacttctgaaagaacctggtcttgtgactttagcaccagatagcccacgaaggactttggtaaatacctcatgtattagacccttgtaagattcctcaagcctgtctttgtatttgtcagccagaacctctttactcaatgccagatcctttcaactactacctccgtctcaaactgaataacaatgtgaggatacaatgtttgtcctttacggattggtggatcaagagtgataacaacaaataatcctcatacatttgttgttatcactcttgatccaccaatccgtaaaggacaaacaatgtgaggatacaatgtttg

SEQ ID NO: 28375 - DNA, 1203 bp, Setaria italica
  misc_feature (1)..(25): n is a, c, g, or t
  misc_feature (1195)..(1195): n is a, c, g, or t
  Peptide Sequence Number=SeqID_94349
nnnnnnnnnnnnnnnnnnnnnnnnnttttttttttttttttatttagccataccactgaatctatattatcatatcaattgatagcattttgtttctgaaaaaagatggcaactggtaatttacaattgtatcggatgcccgatgaagatgcttcttactacattgcactttgttgatccaggctatggcaaaagtattcagttttatgtacatggtttgctaaccagtcattggcatacatcatctgaaaactcaatgaatcttcattgccatatatgtgactacatttctttttaccaaaagcagctggaaactgacaattgacaataggatcaactggccttggaagatgcttggtatactgcaacctgtggattctggtaatcggggagtagctcccccatccattactcaccactggcgagagatgggattctcaagcataccattgatctgatataggaatcaccttgcatatgatttttttacactgcagcaccactttacatcattatatgtaggtaacatccagatatgtactgcttctcctatgtatcacaacccgactattttactgacgaaatttagcatgtcaatatctcttcagattggacatggaactgctgtcaggtgccgagcatgtttgtactcctctagtgtgtaggcctgaatgccatgcacaatggtggactgatcttggccaaggcaagcaaggattcaggtaaaatccaaagcccatcaccacatatcaaaccagatgcaactgctggcaccattaatgatgctttacttctatcgatcatgtgccaggtgaatactatcaagctcccaacacacatgtcgatggcaaagctcgcaccaactaggaagggaacccccattgccatgggtagaggaacccatttgccatactttggtggcaagagatccctcatcagattggatgccactgcaaatccaaagaatccatagcacagctgcaaacaatgttggggcaaagctgagaagccctgaacaccaagaattgccatattgcggtagactagagcatatggtgccttccagtacccataagggttgccgatatcaaaggccttgtagaacagaaagaatgtcagcggtccaatgacacagcccatggcagtgccaatagcctgagcaataatcattgatctaggtgatgttaatgtaagntgtccagt

SEQ ID NO: 28376 - DNA, 360 bp, Setaria italica
  Peptide Sequence Number=SeqID_94350
ccgttaaatgcaatgcaggagaatgatgtgctatctgtcatggaatctgatggttttgtgcgtaagattgtaacccattgcctcaaaagatttggcacaaaggttgagcaggaagccggaagtttttggagcctcgatgagaagcgtgtatgcttacaatttgctcggagagtgcttggtgctggaaagatgaagtttgccaactttatggacaaatgggagaaaagcattccttcagaaatgtgtgcagatcttcagatgctagaaggggaggtgttgtgcgaaaaacgtggggctgagacctgggtgcatgcgttcagtgttgctgatctgccactgacacctgctgagagatttgca

SEQ ID NO: 28377 - DNA, 374 bp, Setaria italica
  Peptide Sequence Number=SeqID_94351
tagtaccgtccgacaacctaccaaggtgcccatggcgcccatgttcccgcctgctgagccacctgaggagatcaacgaggttgcagttgatgttgagcgtgatgaagatgaaggtggcactttttggggaaactttcactgattataggcctcccaagctctctctcggtcttcctcatcctgaccctgtagtagaaacatcctccttatcagcggtgcaacctcctgaacctactcacaagttgactattatggaagaattggatgaaaccaatgcattatcttgcttacaaattgaaacgttagtgtatgcttgtcagaggcatcttcatcatctcccgactggtgctagagcaggtttcttcattggtgag

SEQ ID NO: 28378 - DNA, 1016 bp, Setaria italica
  Peptide Sequence Number=SeqID_94352
atgcacgaaccggtgggaaagaattggatgtgttctcatactcatcaatgataaatcgattttgcaaggatggtagaacagatgatgccaataaggtatatgagaatatggtgaaggatggttgcaaaccaaattctcatgtttacaatgcactgataaatggtttctgccgggcacgcaagatcagtgatgctgttaaaatctacattgaaatggcaggcaatggttgttcgccaaccatgatcacatacaacactcttatagatggtttgtgtaaggctgaaaagtatcaagaagcttcaagcttaacaagagaaatgatagagagaggttttacaccagatatcaaaacatatggctctgtgattcgtggcctttgtcgagataagaagattgattctgcacttggtatttggaatgaaattcttgatgcaggtcttcaggtggatgtaatggtgcacaacatcctaatccatggtctttgttctgctggtaaagtagatgaagcttttcgtctttacttggagatgaaagaaaagaagaactgttcccctaatctagtgacctataacacattaatggatggattttatgagatcggttctattgataaagcagcatcgctttggactaccatcttggataatgggttgaaaccagatattgttacatacaatacaagaattaagggtctatgttcttgtaataggacacctgaggggtcctgttattggacgaggtgcttgcaagaggtattataccaacagtcattacctggaacatattagtaagagctgtaatcaaatatggccctattcagatatgacacgttgttattcctcaagttcctcaaagtcgatcctgaaagtttactcaaggccaccatgatcaaagaccgatgatgagctcagaacccagagcgacaatggcttcaacgtccttatattcccacggtagtatgccctacacttcagcgatcagcgctttcggtggtgacatatcctgctcatagatga

SEQ ID NO: 28379 - DNA, 432 bp, Setaria italica
  Peptide Sequence Number=SeqID_94353
ccaagacagcaaggcttcgaattacaagggaaaagtaagaaggtatctggaacttgaatttatacattgttcgtccaagatttcctgacagatctccaaagcttatattctgaactcctctgttaacagcattctcaaatacacctgtcagtgcctttgttacttcacccttctgggcagttggaggaagcaaaccaagagtgataaaatcttttgctaaagcatcaaaatcacggttaacaagatgaagacaggcttcaataaatccatcacgaagttcttgtcggaattctcccatcatcccaaaatctaagtaggctaatttcccatcaactgtacgcaaaagatttccagggtgtggatctgcatgataaaatccatattctaatagctgggaaagcgaacaatatactccaacctcaaccaaatatt

SEQ ID NO: 28380 - DNA, 631 bp, Setaria italica
  Peptide Sequence Number=SeqID_94354
atgggtatgaactgcccagcacttttatagtttggattaaaacttattgcaataccttccaagacagcaaggcttcgaattacaagggaaaagtaagaaggtatctggaacttgaatttatacattgttcgtccaagatttcctgacagatctccaaagcttatattctgaactcctctgttaacagcattctcaaatacacctgtcagtgcctttgttacttcacccttctgggcagttggaggaagcaaactgcaagacatgtaaagatgagttgtatttaatgccctatggtgattcctgatgagtgaaagcctatggaagttaacatacagctggcttgtttcagttcagagtaattttcttacccaagagtgataaaatcttttgctaaagcatcaaaatcacggttaacaagatgaagactagctctttctcattaaatccatcacgaagttcttgtcggaattctcccatcatcccaaaatctaagtaggctaatttcccatcaactgtacgcaaaagatttccagggtgtggatctgcatgataaaatccatattctaatagctgggaaagcgaacaatatactccaacctcaaccaaatattgatctctgacttctgacaac

SEQ ID NO: 28381 - DNA, 448 bp, Setaria italica
  Peptide Sequence Number=SeqID_94355
cagtatctcaaatcaccaccctttcgcttaatctcgtggatggggctctcggcgtcctcgacgtcgggcacgaaggacgccggcacgcggcccgggtcgcgcaacacggcgacggcgtaggtggcgacgcaggcggcggcgagcgcggtgaaggctgcggcgttggcgaccccggcggccgtggtgagccccagccacgcggggatcgcgaggaacaccgtggtgtagtagacgtacccgattgcggcgagcacggagagtatcggcaccgtcacgtaccccggccgccccatccgagccgccgccgccgcctagcgctcctcctccgcccggccgcgggggcagggcattccgaggaaaggaagcccgcgaggcgtcgccggaagcgatccgccggcagctcagcgggcgaattgggtttgcttcgcagttcgctcgcttgctgccg

SEQ ID NO: 28382 - DNA, 2793 bp, Setaria italica
  Peptide Sequence Number=SeqID_94356
gttgctggtggaaaatacagagttaagactagcaataaaatcgtgccccactgaaggaacgcttgcaaaagaaagagaatatacaagcaaaggactctgatgcaaaagatgaagcagatgatacttctgctactgtaaagcataaggagagttccattaaggcagattcagagaaaccacagctgttggcaaaggatgctatggtatcaaaggaagcttccattggtgacagcgataaagtgaaaagttctgaaaagcaaagggttgcaaaacggtgattttggtggtctgccagactttgccatggccagtgaggttttccgtcaagctggagagattggtccggttgtatctgtaaactatccacttcccaaagaggaaatggaactccatggacttgctcgagatggatgcacatcagatgcagcagctgtactctttgcaagtgtcaaatcggcttgggattctgttgtccgcctacatcgtaaggaagtcaagggagcaattgtttgggctcgccaacttggaggagagggttcaaagatcaggaaatggcgagtgattgtcaggaacctgccattcaagattacagaaaaggagataatggatatgttcagttcagcagggtttgtctgggatgtgtctattcctcataagtctgatgaggggttatcaaaaggctttgcttttgtatcattcacacggaagcaggatgcagaaaatgctataaaaaatattaatggaaaagttgtagctaagagaccggtggctgttgattgggctgttccaaaaaaagtatacactgttgcggcaaaatcaggtgccgaggataatgagcttgcgaatgtacctgacgatggcagtgatgatgacacctctgaagagaaccttgttggagaagatgatagctctgaacttgatcaggagatttctaatcgtccatctgaggatgatttcaaaactgaagtagatatttctagaaaagttcttgaaaatttgatcaagtcatcagagaagtctgaaccatctggtgttgacggttcagatattgatactgacactgaaacagaaaatgacacaccagaaaagaagaaacctgagtcacctgtagctggcaagtcggctaagtcgaaacgtgtaacagatgcaaaaatcactgatcctgcttccaaacctgataaaaaggatacagacctggataggactatattcatcagcaaccttccttttgatataagtaacgaggaggtaacaaagcgcttctcagtttttgggaaggttgaatctttcttcccggttcttcataaactcacaaagagacctagaggtactggtttcctgaagttttctactgcagatgcagctgatgcagcagtttctgccgccaatgctgctcctggcttaggtatatttatgaagagtagggcacttaatgttatgaaagcaatggacaaggagtcggctcacaaaaaggcacttgacaaggcaaaaactgaggttgaggatagacggaatctgtacttggccaaggagggtgaaatacttgctggaacaccagctgctgaaggtgtgtcagatgctgacatgaataaacgtaactggttggctagaaggaaagcggagatgcttcagtctccaaagtttcacgtgtccaaaacaaggcttatcatctacaatttgcctaagactatgaccattaatgatgtaaagaagctttgcagagaagcagtcatttctcgtgctaccagacaaaatcctgtcatccggaaggtaaatatcctgaagaatgaaaagaaaggggtacagaaacattcgcgtggtgtagcctttgttgattttcaagagcatgagcacgctcttgtcgctctaagagttctaaacaacaaccctgaaacctttggtgcagaacggcgtccaattgtggagtttgctcttgaggatgttgaaaaggttaggcttcagaagattcgaatggaacgcaatcggaagtcagcagcagaagctgcagaagatcagcagagtccttcaggggatcaacctgcaggcgatggcagtcatgcaggtagcagaaggacattcagaaaaggtaacaagcagagatcacatgatagaccatctaaaccatccgattctggcgaagggcctgccaaggatcctgttgctggagatcaaagtgctgtggaaggtgtaagaaagggaagacctgcaaagagatcaaggaagtcaaatgagggtaccgttttggcggatcgagatcgaaaagatgcaaccccaattgctgctgggaatcaagctgtgtcgagcgagcatgatcaatcagttgctcccaagaaaaggaaaaacagaaaagacggccagacagagcaaaagagaggaaaggctacaaaaaggacaaggaaagaacctaccggggaaggaggcgtcgataagtcactggtggagcagtatcgttccaaattcttgcaacatggcgtgagcaaaaccaaagcgtagttgagtgggattgctgttggagtgcagcacggtgatttgaaccagcgtgtcgaaggctacgtttccaaagagcacgcctccacaaacctttttaaccccttccgggtatgccaaaattttggttgtaatgttgtgatcgtcttggtcgatctgtaccctggatgatattgactgatatttgtcgaggaatctatttacagccgtatgagtcagctttcctattctgggatgctagatccagtgactaacaaaaagctgtgatgcacttcttgattggtaagcttttgtaactaaaggtaa

SEQ ID NO: 28383 - DNA, 249 bp, Setaria italica
  Peptide Sequence Number=SeqID_94357
aattcattactatctttgattttcagctcacgaagggaagggaaatcagtttcagaaacttcataccactccacccattttggcatgtcctcaaactctagtttctccaaagctgggaatcgctccatggagtcctggccatagaactcttgcccaattcgctctacacattccatatgaatgatcacaagttcatggagttgaggcagttggccaagagctggaagaaactggctatttttgcttcca

SEQ ID NO: 28384 - DNA, 1151 bp, Setaria italica
  Peptide Sequence Number=SeqID_94358
ctgaagccttgttctgggtatcaatatcatcgtggcgtctggcaatgccgttgtcttcctccatggtggccgtggttgctgcctctggagggctgtccttctcctcttccgtggtgttcccgttcgcatgggagatttggcttctgttgacgtccatcgagcacgacgcgagagtgaggttgaggtggcacggcaggatcccgacgtcgttcgtggctgctgtgaagctcacaccctgccccttcgaggggcagatggatgtcccggtgtctgagagctccatcatctgtggcaccagcgggaggcactccacacccgtcctctcgcaatctggatgcttgccagcatgagggctcccgttatcctcgtgcgagctgtgcgtgctgagggtgatgaggttgctctcggtcatcgcaggacagagccccagcttcagcttgtcggagaagtgctggttcaaaatgttgcccatttcttgcctggaagtgctgctgtggtcatcataactggtagtttcagcagcctcgttgctgtattccaacccaggtagccttcgcttcttgtgaaatgcgtctgcgaagattggggatgcctctgccatcttagcgagcttgctgacaaactgaggattcttgctagcctgctgcaagaagctaagcatcttgacctgccgttgctccatgtcgagcactcgccgctcaagatcttcgatctggctcatagcccccgactgctgctgattgaacttccagaggtcagtctgaagggtagttttctctcgtgaaagccggtcaatctcatcttcaaataacgcacgctcattgtcaggcagggcaccaggttgatggctgtggctgtggataggctttctcctgtggatattcttcagcagctgcttctgtcccttgacaaagtactcattcgcgaattcccagcgctctgggtcaattttgtgaaaaccgtaggtgttgagctggcggatgaagctggagaagttgctgtgcttgaagtaggtgggcagcatccgggccgcgaactcgggcgggttccagacgacgaagctcccgtcggaggcgtcgctccacgacaccaccgcatcgctcgacgggtcgtccaccatctcgtaggtcttcagcaggaacggcgccgga

SEQ ID NO: 28385 - DNA, 392 bp, Setaria italica
  Peptide Sequence Number=SeqID_94359
cgggggctctttacacagttgcttacttttcagaagggctagactctaggctccactttgttgctagctattcatttagtggtggattaaatagctaaataagtaaatagtatctctctgtccaattactatttatgtatctagaaaagccaaaacgatagtaatttgggacggaggcagtagttacaaccatgatgatgcagtaagattatttatgaacaactcacgctatgaataactctttgatttgtgttagctaatgccactctaaaaaggtctaactgttttttttttgcgaaccacaaaaggtctaactggttgtgaagtgtcttattgtgcgaagcaaaacactaggggccccgtttggtggagcttaggctggctccagctac

SEQ ID NO: 28386 - DNA, 519 bp, Setaria italica
  Peptide Sequence Number=SeqID_94360
acgtgccgatccacgccttcggcttcggcttggaccatgactcgagggcgatgcatgccctctccgagatgtccaggggcacgttctcgttcatcgacgacgccgtgggctcctcgatccaggacgcgttcgcgcagtgcatgggaggcctcctcagcgtggtggtgcaggaggcgcagctgagcatcgagtgcgccggcgaaggcgtgctggtgacgtccatcaagtccggcggctacgccagtggagtggatggcaacgggcgcggcgggttcgtcgacatcgaccacctctacgccgacgaggaaaaggacttcctggtcaccgtgcgcgtcccggccgcgcacggggacaccgagctgatccgggcaagctgcgaataccgcgacgcggtctccggggagaccgtccaggtggtgggcgacctggtgaccgtccctcgcccgccgggccccgtgaccgcggcgatgtcgctgcaggtggagcgcgagtggcaccgcgtccacgcccacgggagga

SEQ ID NO: 28387 - DNA, 400 bp, Setaria italica
  Peptide Sequence Number=SeqID_94361
aacactagcggcagcgttggtggcggggaggctgatggattcgtcgcgtacctgccgcatgacgaggcggtcgcggcggggctcggcggcctcgacgcacacgagtcgcaggccgtcgtcgacctccttaacgacgcgctcgccgcgctcctccgggccaaacctcgagagttctggcgccaggtggcacagaatacatctttgcatgacttcctggatagttacctacaattcaggcaccgttggtatgatttgccacaccgggccccaaagggggcagtagcaggtttggttgttggggagcttgagctttgccgtcgtgtgtttatggtcctctaccgcatatcctcaaacaaggatcctggagcaggtcgtggcgagtcccttagtttgaaggagc

SEQ ID NO: 28388 - DNA, 320 bp, Setaria italica
  misc_feature (286)..(286): n is a, c, g, or t
  Peptide Sequence Number=SeqID_94362
ggggggtggcgggagcggttggcgacggtgaaggcgagggccttgagccaggtggtgccgcacttggggtacgtgacgaggaggacgtcgtccgggcgggggttgaactgggcttgcaccagcttcacgctctcgactcgctgcggtgtcagccagcagccctgcaggcggaagagcggcacgaaccacccttctctcatagggagggtggtgggcgtctgggtgaggccatctcgtgcttctccctcggagccgccgctgtgttctttcttctcgaattggggtncatcagccatggcgaattggcgaggtagtggatg

SEQ ID NO: 28389 - DNA, 284 bp, Setaria italica
  Peptide Sequence Number=SeqID_94363
gcgccacgtactatcatccccagctggtggaggcgaaggccacgactcggagggctagcagaggagatcccgcggcccgcttcgaaatgggggccatggagatggatggcgccgcaccagtacggcctcaccaccgccaagctcggagtagatagggtctgatgccgacgatgtttagcagatgcgtcagcctttgggagatacacgagcttagcgaagctccttgagccagctgacaagctcttccagatccggctagcgcaactgcgcgctggagctgaacc

SEQ ID NO: 28390 - DNA, 269 bp, Setaria italica
  Peptide Sequence Number=SeqID_94364
cccttccatctgatctgagctcgccccgtctctctccaatcttgtgcagctctcccaaaacccctcaaaagtggaggcgtgttcaagtgtgtatgaatctgagcacagagacacggagctcagagacacagagctgtggcagaaggctacaaggcgcgaaacttctttgaccggaacagagcgccccgactgtgccggtgaccatggtgaaggaagaggagatcgtcgcggaggcgggagggcgaggctacatggacttgctcggtctc

SEQ ID NO: 28391 - DNA, 349 bp, Setaria italica
  Peptide Sequence Number=SeqID_94365
agtacctaataaggacggactaaggactctaagccagctagcctgcctgtctgatctacctttcaatcacttcttgttttaccaacgagacgcccgggttggtgcatgcatggtgaggttgatgtaatcagatgctgctggtgtggaagatctcgctagctcgatcgctccagtgcggcctagtgttggagtcctgtgagcaggagagagaggtaagtagccaagcggggacgaagacgagggctagttgcttgctagctcactgtggcgtgcatggaatctttcggtgtttgcttcccattggatcttgttggaaaacattgcccatggaaagctagtgatgatgccc

SEQ ID NO: 28392 - DNA, 468 bp, Setaria italica
  Peptide Sequence Number=SeqID_94366
tttaatggaaagctgtgcattatccgtaacaatatgagcatcactcttattgatttatcagacccaacaacagttattgaggttgacagtgcacgcatgtgggatgcgtttgctcgaaaggggcagcacaggtctttcatggcaaacctgtggtcaaccatcacaggccgtaacctgaagacagatattatgcattgtcaagtgctccaggtttgaggttggccatatgtgaagtggaaacatactcacatttagatacaatcctcaggctcagaggccctgttagaagctgaaatgggtatgaattttagcaaagagaccagcctttgcctcagtaaacatccactgattttgtctttggaactttctaattttggcatggttgcatcctatttatcagataagcttccaagatattggtactgggaccggaggaagaatctgccatggcttatgaggcttccagtg

SEQ ID NO: 28393 - DNA, 254 bp, Setaria italica
  Peptide Sequence Number=SeqID_94367
cgtcgaccccggctccctccgctgccaccccgtcgccccagccctcctcctccgcccctccgccgccacccgccggccccggctccctttgccgccaccatcagtctccgttcgccctgcaccagcaccggggacaaggatggaaatgatgatgaggagccggaataagccactatttttggcttccggcgggtagaggaacgcagagaccgcattttgcggggcttctgctagctttcgcgggtgagccgttt

SEQ ID NO: 28394 - DNA, 373 bp, Setaria italica
  Peptide Sequence Number=SeqID_94368
aacgggtttcaaggcttggaaacttgtacgacgagctcagcttcgactcggggcctagcccttcggcgggtggagcgttgacaagtttcttggagcttaggtttgtatgggtgctgcttgattgctaacgttacggacatgagagcttgcgagacgagcatcacttcgacttgaccttgtcctagaagttagctatccagcgacaggtggagctaggcaagatcaagtggaagccagagatcttgggcgacaaactcactctgaccactaaggtggagttcgggcaagatcaggcggaaggagaatcgaggtcaactcaatagactcactttggccgctgaggtggagcctgggcaaggtgaccatgggaata

SEQ ID NO: 28395 - DNA, 745 bp, Setaria italica
  Peptide Sequence Number=SeqID_94369
ccgccggagctggagaagcagccggtcgacgcccgggtgacggtggagtacgaccggggcgtcggcggcggctacgggaaccacatgccggcgccgcagcacgtcgtgatgagctacaaccaggcgcggccgagcatgagcgcgtcctactacgcccccgcgccggcgccggcgccgatggcgaggccggggccgtcgcagggctacatcgacgagcactacacgccgtcctactacggccggccgtcttcgaacgagccgtactactacaaccctccgccgcctcagccgtcaccgtatcgctaccagtaccagcctaccccgtcgtcggaggactactactactacagcgcgccgccgcagaggagcgccttctcgccgccgcgggacggctacggcgacatgttcaacgacgagaacgccaattcttgcagcgtgatgtgaaggcaggaaagaagaagcttgtagtttcactgctccgtaatcaagcacggctatgtgtaatatgtctttagacgttagaattagtagacgtaaccaatgtagtagcactgctcgggcttcatggcgctacaataagatgagcggagcttgaatgcttgacgcacgagagggagagcgtgaggggctgatggaacagctctggtgtgttgtgctacacatcagagcaattttgaacacagttcccaactggaatttaagagactgaatatctccagtttaaccaagtcaaatgttacaaaat

SEQ ID NO: 28396 - DNA, 425 bp, Setaria italica
  misc_feature (1)..(41): n is a, c, g, or t
  Peptide Sequence Number=SeqID_94370
nnnnnnnnnnnnnnnnnnnnnnnnnnnnnnnnnnnnnnnnntgtcaaattaacgtaagactaatataataaagaatggctatggactatagatatgactgttattttacatgtacaagcaatgaatcatgcacgaatcatcagcggtctaacggaatgcttaaataacaagcggcatggtgatgaaagtcagcaacaaggtacagggccacagggggcgactaggcctgttgaattgaactgaagaaaccaaggggacagacccggcgatgtccctttgcttccctgatcaattcaacagttgacgctgccttcctttcaccagtggcagataaaaatatcaggctgccaggtgccgctattccttcctagtaaagaagttatagcttcttgttcacagaggtggaaacttcagcgctgcacatc

SEQ ID NO: 28397 - DNA, 780 bp, Setaria italica
  Peptide Sequence Number=SeqID_94371
tttttttaagaaaagaaataggactaataggaactaataagaataatagactgttattttacatgtacaagcaatgaatcatgcacgaatcatcagcggtctaacggaatgcttaaataacaagcggcatggtgatgaaagtcagcaacaaggtacagggccacagggggcgactaggcctgttgaattgaactgaagaaaacaaggggacagacccggcgatgtccctttgcttccctgatcaattcaacagttgacgctgccttcctttcaccagtggcagataaaaatatcaggctgccaggtgccgctattccttcctagtaaagaagttatagcttcttgttcacagaggtggaaacttcagcgctgcacatcgggcataccttgtttaattgcagccactggtttatgcactcagaatggtatagatgtttgcaaggaagtgcaaccaatgattcgccttcatcaaactccacacgacaaataacacattgttccatgttgccttcttgcttgtcttgtgcctggtaagttaccgaaggtaacgaaccaatagtatcagcagataggcctttgctttctgtaccgacaacttcacccaatgcaattagctcctcataagagtattcgtctgggtcaacgtcttcccatgcatcctgtggatcttccccatcttcttcgtcctcaacctcctcgtcatcatcctgctccattgctcgccaatcaccgatcccggcgagcgccatgagcctgccggcgacgtcgcgctcctcggcg

SEQ ID NO: 28398 - DNA, 430 bp, Setaria italica
  Peptide Sequence Number=SeqID_94372
ccacgcccgcgcgccccactccctgctctctctccaccccagggttctcgcggcggcggcggagcccgagacccgctccctgagctagggttttggccacctggtgcccgcctccgccctcccgccttttttggcacgacccgccgccgccgccgctgccggcgcgggtggacatggatctgcctagcctcgccgtcgtgctgcgcgccgcgctcagccacgtccccgaggagcgcaaggccgcagaggagagcctcaaccagttccagtacacgccacagcatttggtgagattattacagatcattgtggatggaagctgtgatatggctgtacggcaggtcgcaagcattcatttcaagaactttattgcaaagaactggtctcctaatgatccagacgagtccccaaaagttttagaaagcgacaa

SEQ ID NO: 28399 - DNA, 431 bp, Setaria italica
  Peptide Sequence Number=SeqID_94373
catcttcctcttgaggaacctgtcggtgacagtaacatacacatctcgatccatctcaagccccttgcccctcatcttccgcaggacctcccggaactcctcgatgcaatcctcacggccaagaaccctcgccatcgcattgtaaaccttgtcccaactgattccggccccagctgactgctccacccaccggaagaacaccatggcctgctgcgggaactgcccgaccttctccaccactaatgccaccagctcgtcagtcacctcaacacccgattcactcagcatggctagctttgaggcatcatccttgcccggcgcccggagaaccttgcatacctcggcagccgccgcgttcctttcgtgcgcggcgaatgcctcctgcagcaggtcggcgtccctggccatgtccttggcccggaagctctcgg

SEQ ID NO: 28400 - DNA, 1957 bp, Setaria italica
  Peptide Sequence Number=SeqID_94374
tggagcggggccgtgccccgtggtcaggttcgacatggacaacttcgccatcgcagaccgcgtcagtgtcgggctccacggacggtcggacgagatgatcttcgaggccacggtgcgcgatccgagcagcgagctgtatgggtcaacggtggtgctgcggcagctgaagagctcgcaggcgaagcgcaggggccggcgcgcgattgaggtactgaagaagctggctcgccgccaggtgatgtaccactcgtacgcactgcaggtccatggttacattgctccgggcaatgcggtggagcaggaagatgtcccgttagtattggtgcatgggtatcatgggagttattccctgcgccactggttgcaactctcggattggctcccaaccttagaagcaacattagcattggatgaagaacaagttagaagggtaggagatgactctgttggaggacctgctgtaactcgacagctacgtttgattaggattttgatgagagaccttttgattggtgtaaattatctacatagccatgggctggcacatactgagcttagattggagaatgttcatgtgagcccaatagacaagcatgttaaggttggtattcttggaaatgctgctgattttcatgataatgatcctagcagtagtacagtagcaagtaacgatgaaaggaggaaaatgatgatagcatttgacatgagatgtgttggcttcatcatggcaaagatggttttgagagaactaatggattcttcaactttctttaaattcaaatctttcctgacaaagggaaatgacccatactgtttgcgtgagttccttttaccaattctctgccaaaattctccatctggaaatataggtttgcagattctagataggcaatggggtgctggttggaatcttttggccttattgctggcaacaaaacctgacaaaaggataagttgtgttgatgcattgcggcaccccttcctctgtgggccaaaatggcgtataaatccatcaactagtatcattcgatggggcttgggatcgactgctgttcgcatggctgaagattatatctatggacatcatcagcgtaggcggttagtgtatttcattgaattgatggaggtcctaaaccctaatttaagaactgagaattggcttcagttcctacctggtcgttggcgtctcctgtactgcactggaagacatattggcctcacgcttcgtcagccttcccctagaatcctcatcagtgatgtgtacctcacagttagttcagagtccatcgatccagtcttctctctgacctcagatattggtttcagaattatgccagaatctgattggcctcatgacaaatctggcactgaaggagttttgtctgtcaccacatcagcaaggatagctgctgggaggatttatattcatgaacaggacaataaagagactagggtcacatcttcaagatcttctaggagatatcttggtggtaaatggagaaaagttgcaaagatgaaggagctgccagccagtctccccagtgtaaacattgctacggatgaagtagacgtatcaatgagctgcaactcggctttgaatgtcaattctgcacaaaaggtgctgcaagagatccgtacacagaccccaccggaaatgttcgatttgtcaaagattgtctgtgggacatacattgacgcgaggttgatggttctccgtggtgttaatgggtcggctctgcttttcactagatcaaatccgacgaccgattcgtgaggccatgtaatgctattctttctctgtacattctgtatttctagctgtacattcatttgtaacaagtgtaaataataagatggtgtaggccatagttaggctgttatatattcctttgtaattttgtatgatctttttcggtcatgtgacccaaagaacccaaagcgctggcagcgtgagtat

SEQ ID NO: 28401 - DNA, 325 bp, Setaria italica
  Peptide Sequence Number=SeqID_94375
gaggaggacctggagaggctgttcgggtcaggacggcggggccggccgacgctgcgggagcggaacagggggcgggacgacggcggcggcggttctccctcgccaccgccgccgcgccaggcgtgctgcttcgggttctcccccaggaagcccctgcagaggacgccgacaaagggcaagaaggtccacggatcaggagacggcgacgtcctcggcgtcgacgccggcgagtggggcgacgagaacaggaggatggtcaccgagctcaaggagcagcagcgcaagctcaagaaggcgctcgaggagcaggtgaaggtcagcaggg

SEQ ID NO: 28402 - DNA, 368 bp, Setaria italica
  Peptide Sequence Number=SeqID_94376
tgttgctcatccgccatccatgctggaaagccaactcccatgtaacactgaattttctagctcttcaagattttgaatttggctttaagccagcaagtgtcctcatgcaaacatcagatttggttgttgatgcacccgcttccaacccccattttaatgccaacttctttaagtgtctttttctcgataattcaacatcaccctctatatctgtgcatgttacttcctcgagattactgatacaaagttgtccgcagaggtcattcaagtccttcaattctgttattccgtgcccctttatcctgctcacaggaaactcctcgagcccttggagatttgtcagctgccctatcttgtatatgagaaga

SEQ ID NO: 28403 - DNA, 455 bp, Setaria italica
  Peptide Sequence Number=SeqID_94377
ttctttctaaccaattgattattacatttactggctgctctggccaacgtgacatctgttcttgatatcctgtatgatacacatcaaaaagactagggtctttttggaagtagtcaaatgcatcctgcccactgcaagtgtacagcgtctcgtttagcattctgaaatggccaccatataaccttgcacgcatcttgtcgagttttatcgaggtattgtctcgcttgggcgtgaccgcggcctggccggcgccgtccttgcgccgccgcttcgccggaggggaggacggcggtgggggcgccaccgctggccgaggcgcttgttgcgatgatgacgaaggcttcccgcgattccgggaaccacctcgccggcgccgcttgcggccaccggcggcggactcctgcggaggctccatggggacgcacgcgacgaggctgcgcgagggtttccttggt

SEQ ID NO: 28404 - DNA, 316 bp, Setaria italica
  Peptide Sequence Number=SeqID_94378
gaatagaaaagccaaggagcccgaaagccatggaggcgggatctcgcctcctccctcccctagtcgaccccgacggcccctcccggcacattgtcctagcatgctcgccggaggaatcacgcggaggcatcggcggcggtgaggcatcggcatcggcagcagcgaaagccagcgatggcggcggcggcggcggagtgggacagcgggagcgaggcggcccccaccggcgagtggccgccggccaccgcgtccccggtaaaggggaaggcggcgctgccggaggagtcggatgccggcgcctccgcgtcgggctcgg

SEQ ID NO: 28405 - DNA, 126 bp, Setaria italica
  Peptide Sequence Number=SeqID_94379
gaagcgcctcggcggcagttctttgaagttgcctcgcgtcgtcgtaaggaccaacagatcatactgctgtttggagagcgagatgtctccttctgtgaataccaacgaaactccgacctcctcgag

SEQ ID NO: 28406 - DNA, 581 bp, Setaria italica
  Peptide Sequence Number=SeqID_94380
caggaagcggcggtggagaccatggtggtcgggccgagcagcccggcggccgcgagcgggaggtggtggccgtgggcggcgagcgaggccggggaggaggaggtggtggagcccgaggtgagcatggccgccgcggcggaggtcgtggacgccatggccgtggccgccggcgggagctggtggttgtgctggccctcgtacgtggtgatcaggatcgtcgtgtcctccgcgcaccgctgcacctgcttcctcaccgggcagtggggcgccaccgtgcagcggtagtaggcgcgcgggcaagggttccccttggagatcttctgcccatacttccgccattggcaaccatcgggcatcgtgggagtgtcgcatttgaccctgacggaaaccctagccttcttggcctgctgctgcacctcgtcgtccacgccctccccggcggcgctcgggctcttgcgcgtggcgcaaggcggggacgcggcggcgtcgtcccgggcaggcttggcggcgtcgttagcgctgctgctgtcggagctcaggttcaggacgccaggcgccgccgacgcgccgctcgccttgcg

SEQ ID NO: 28407 - DNA, 369 bp, Setaria italica
  Peptide Sequence Number=SeqID_94381
ccgacctcgatctcgacatcaccgtccccagcgacgaggaggtggagaagatggaggaggtcgtcaggggattcgccacgctcaagggccccacgctcagacccagggacatcgccgaggcggtgctcttcctggccagcgacgagtccagatacatctccggccacaacctcgtcgtggacggcggcgtcaccacctcgagaaatctcatcgggttgtgaacgcgattcattccattgcaacgctaatcagttcttagggggtgaagaaaaaagatgttaatttaggggccggtcagttgaactcgaagtgatttcgtttggttgattgattcatcaacaggtgtcggggcttgaaacaaaaaaaaaa

SEQ ID NO: 28408 - DNA, 293 bp, Setaria italica
  Peptide Sequence Number=SeqID_94382
gcgggcttgcacgcaggcaggcgcgcgcaccccgcacacggcgcgcactccacctcccgcggcttcagcatcttcactggctgcctgcgtccgctcgcaactgcaagtctgcaacgagagggtcagacggaggcgcagaggcgggcggggacggagaccgggagggagagagagaaagaccgtgagaggctgagaggtgaggggaaggaggagaggaggagggcggcggcggtggccggtccggcgcggtggaatgccggccgttcccgcggcggatcgggctgtctcctcgg

SEQ ID NO: 28409 - DNA, 419 bp, Setaria italica
  Peptide Sequence Number=SeqID_94383
ggcgctgtccatggcctcctcccccacctccggcgctcttgctgctgctgctgctgctgagcatctcccacatgacgtgcacgtcgctgtactcgcacgtgcgcacctccttccgcagccgccccagacctgcagcacccacaccgtcagcctcgccgtcggggtccatcgccgtgtagtagctcgacgacgacgatgacgacttaccggtggctcgccggagccggagccgcgcgctgagaccccgccacacccgcttcaccggcaccgccgcgcggcccaggcacgacatcgttcctctgctctgctcccctgacctccgatcctctgctcggccgacctcgccggagctagctgattatctctgctgaccactgggagagaagaggagaggacagaggagggagtcgttgaagctg

SEQ ID NO: 28410 - DNA, 352 bp, Setaria italica
  Peptide Sequence Number=SeqID_94384
agtacagacaagagctcgatcgctctcatcagtcgtcactcgcgagctcgagctcgatcagcagcagcatggcgcgccagtccgtgatcacgagatggagtggcggcggcggcgctggaagagcaccttggcgtcggcggtggccttggcgccgagctgctgcaggccgggctcggcggcggggcgcatgcggaagagcgcgttgagcctgctgaggctgcgcgcgaagccccggagcaggcggttcgcggggccgacgcgcaccagctcccgcttcatgctgacgtggtccttctccaggtccgtgagccgcatccgcatccgcgccacctccagcttcagctcccggttc

SEQ ID NO: 28411 - DNA, 696 bp, Setaria italica
  Peptide Sequence Number=SeqID_94385
tcccgtcatctcaccgccgctcgcttcgtcccgtctcctctccgccgctcgcgcgtgtcacccctgccgccagattctgccccgcgtttttctccagtctttcccccggctcctgctccctgcagaggactggcgccgcgggcggcgacggtgatggcgccggtgagggctcatcggaagcgccggtggccggatggctcgacgcggacctgctcaggcgggtctcaggtgcggcggacgcggaccaggcgctggacattgtcgcggagtcgtcgggaggcgcgggcgccgctctggaagcgcccgagtgcaacgcgatcgtagccgcggcacttgaccgaggcaacgtcgagctcgcgctctcagtgttcgaagccatgcggtccggcttcgcgggagttggaggctggaggtgggcaagaccggacgtccggacatatgccttgcttgtacagcgtttggcagccgccctccgtgtttcagatgcaatcaggataatcgattgtgtatctcgcgctggtgtttcttctacagaggaggttcctttcgggattattgttcgctgtccaacctgcatggtagcagttgctgttgctcaacctcaggatggaactcaggttgtttcctgttcaaagtgtcgatatcaatatgagttattttccggagaaattacatattgatatcgacactttgaac

SEQ ID NO: 28412 - DNA, 319 bp, Setaria italica
  Peptide Sequence Number=SeqID_94386
acggaaatggctggctttaaggctattgcactcactgttgacactccaaggcttggccgcagggaagctgatataaaaaacagattcaccttacctccgcatctggtgttgaaaaactttgaagcgctggatcttggcacgatggacaagacaaatgattctggccttgcttcttatgttgctggtcaagttgatcgcactctttcctggaaggatgtcaagtggctacagacaattacctcgttgccgatcttagtgaaaggagtcgtgactgcagaagatactagacttgcaattgaacatggcgctgctgggatca

SEQ ID NO: 28413 - DNA, 165 bp, Setaria italica
  Peptide Sequence Number=SeqID_94387
gtttggaagaggagaggtatcaagaacggatgaaagctttgagagctaaatcttcgcctaagccacccacccctccacctgctgagccgccaaccccgccccccgcccccgaacctcccgcagcaaggcccacgccagctgctattgacactgctcccaaatcta

SEQ ID NO: 28414 - DNA, 968 bp, Setaria italica
  Peptide Sequence Number=SeqID_94388
ttttttttttttaacaaaagtttttttagtaaaaatgttgaaattgagtcatcatgaggcttctttcaacaagatcggcgagtgcaaatatctaacttgcagcgccttcagatagtcaacatggtattagccagaaagttgattctagtactagctaatctattacttcagtgattcagtctacaacatcaaaaacaccagcctctttagccatatttaatttatgtgcaacaatctccattaagagtgccctgcagagatgatagcgatcactatgttttgcagaatcggctgtggcatctaaccaagcaactcccccaaatacgttgatagcgcgattgttcattgccattatgacaatctctccaagagattttctaccatagctctttgttgtatgccactcaaagattctgacctcataattgcattcgatacaagaatgacagtgtttggtgcaggggcattaacccagactcgaccattaagtccaacagcaatctcaaaagatagttttttcccaagggcctccagaactggacatgttggcgaacttaacaacattcgtgacatgccagttgacgtgtcaaacgtatagccatctttcaactgaccaaattcagcagctttcccagtagcatccatgcatgagagctctggattcatgatgatatttgctttcaccactcgagcatatattaatgtaccaatctcaaactttggtatgtttctccttgtaccaccttcaaatgcaagcactggtaggaaggccaaatgaggaccctttatgtccactacaaagttgtctggtttggtgtcgaccacaacaccaagaactgtatcttcaacggaaggtacatacctcttctgggagctctcaacccaatacttgttgggcttcgacagccgcaggatcccggcacttggttcgccttggtagtcgccctctgacgcaggcccgtgccgag

SEQ ID NO: 28415 - DNA, 272 bp, Setaria italica
  Peptide Sequence Number=SeqID_94389
gggttgtaagcatgcatgacaagtccatgcacatcagcaaagtccctgccacaggcgaggcacgggacacggctgccctcgaggaacctccgtttctgcgaggagctctcgttgagcatcttggcatacttgaggaacgccctcctgagcgcatgccggtccaccgcggcatgtggcggcagctgcggagggtgatgcgcctcgtcgagccgcagctgcttgtggtggctcgggaagccctcgtcctggtccgtggggtgcttgcgctttag

SEQ ID NO: 28416 - DNA, 620 bp, Setaria italica
  Peptide Sequence Number=SeqID_94390
acaacagggagatccatgaggagatggaagggtctgttgatgaggattgcaacaggtctgatgaggagtatgatgacctggcgatgggagacagcatggagaatggctatttaactgatgatgtcagtgacgtatgtggtttaagcaaatcatcgaacggcaggttcttggatggcaatcaacgaagccacagcacgccaaggaaacaccaagcgaaacttgatgcaggtgttccagagactgcacgctctacttcttcagcactccctactggcacaagcagcaagcggcatgccgctaggaagtggaagcgctccctgagcgactcattccgttcacggccacggagtgctcctgacttggtgtcgacgtacaagggatcaccacccgtgcctgtggctcctgatgagaggtagctgattctgatcgcctggcaggctggttgcaaagacgtattgtcttttttttagcataaatcgcaaaggaaaatatgaaactatctgaggcattttgtcggttgagagttgtcttttgaagtacggcatgttgtgattttgtaaatttgtcacgagagaaagtggatcggattggtgcaaattaacgagtgtgattgcttgact

SEQ ID NO: 28417 - DNA, 391 bp, Setaria italica
  misc_feature (44)..(44): n is a, c, g, or t
  Peptide Sequence Number=SeqID_94391
cagcatctgtgttggcagatctgcaaaataaacttacagaaccnggttgaggctgatggtcagagccttcattggaactatgccatcttctggcaacttgcacgcacaaagtctggtgccgttgttcttggctggggtgatggatcctgccgtgaaccccatgatggtgagattggttttgctacttctgttggtgctggtgatgcatcttcagtgactagacagaagatacggaagcgggtgctgcagaggctgcacacagcatttgctggggctgatgaggaggattatgctcctggaattgaccaggtcactgacacagagatattctttctagcatctatgtatttttcatttccacgtcatgttggtggtcctgggaaagtgtttg

SEQ ID NO: 28418 - DNA, 238 bp, Setaria italica
  Peptide Sequence Number=SeqID_94392
gtgttcccacatgagacaatcacaacactactctactcgccgcccgcgccgctccccaccccgcacgcttctcttctctcccttctccctcgcctccgatggcgacgctgcagctcaaccacatcgcgcgggagacctccgacgtgccccgcctcgcggccttctacgaggccgtgctggggttcgagcgtgtgccttcccccaactactcgggcttccaggtcgcctggctccgcct

SEQ ID NO: 28419 - DNA, 464 bp, Setaria italica
  Peptide Sequence Number=SeqID_94393
cgaatttcgacaccccatcactcgaaataatccaggaattttacgagaagaagtgggagccggagaagaacgacgagaggaggaaggaactgttcttcgagttcatgaagaaggaggtcaaggaagcgacggtggacgacagcttcttcatcgcggcggggctggcggcgccggtggccgccgtgatcggcaagagggccagcgggcacatcccctacgtcaagagcctgaggctggacatggtgcccaacgtcgtcttcgttccgatggtcacgctcttgggcatcatgggagccaccgcgtggcagatgagcagcaagagcgccgcggccaaaggagaggaggaggccaaggaagacgagaagcagcgcaaggaccaatcatccaacaaggcgaactgactcttgttcatctcttgtattgtatgcgtcgaaaaaaaaaaagcatggatgagggctcggtca

SEQ ID NO: 28420 - DNA, 286 bp, Setaria italica
  Peptide Sequence Number=SeqID_94394
tactggagaggctctcttggaggatcacgatgaagcaagctggatccgccagccccaaatccctgaaccctaacccggtcttgcctcaattagagggaggtaggagggaatgaggaatagcagcaggaggaggagaaccgacctcatcgccaatcatcgctattagccatcagagctccccgaaacgccatggatttggaagagagcttgcgggagggggaagaacgggaggagcaaggaaacagaagagacacgggtgggagaacggataaggttgatggccaca

SEQ ID NO: 28421 - DNA, 2775 bp, Setaria italica
  Peptide Sequence Number=SeqID_94395
ttttagtacgttaaactaaaaactaattagtactaaatttcttaatttaaaatatgcatatgatcaagtatacaccacatgattcacaactgcaaaatatcataaacctagcaatttggtttttgatagtctatttacacaaacagatttgcctctccttcatcccttcaatcaaaaattgaacattcatgactcgtgattgtgcgggcatctcacaaaaaaagaactaccagcatattatcagagtgcacattactatacttcgtacttgcacaactgatgagctcctttcgtgacctgccatacagcaagaaaaaatgggactacatcagttaacatggacataataaaagggcaaacaaataaaaataagttggatgacctgaagaactagcatgtgtatcctaattatcaacagaggcactccaaatataaaatgtcatcagaaattggatgttttgcttgtttcgtagccaaaaaaaatgcctaactaaaaatattactttgcctaactaataagagtgtattgcctaggcacagtaagtaaatggcatttcaataataaaatgatgcaaaccaatctgcgactatcaaactgctgaattgaataagaaaataaggaccaaagaactgcacaaacaagcttaacagataagccaaaatcaaaattgtttccgatgtggttgagcaaaatcaaccaaacccacatgcagatacaattggaaatcaaccacagatcaaaccgaaagcaaatggctgcaagctgctatgggaacacagatcaaaatgagagcagaggacatgctaaggaaacagatgggctactaatcaaacatcgagccttgtactgctggtgccaaacagtgcaagtataaataactaaactactcccaaaccactccaatagttgtcacaactaaactacttgaaaagataaatcagaaatatttccttacccccaccttttacatccacatcaatatccattatcaaccgtagttactcaagctagtcatctagctatccaactcagtaccgcaaaaaagctaaaattaactagataggcaaaactaagtgatgcttatatgataaaaaatgcaggatctagcgcaaatgctgccatgccaggaaaaaagcctacatataattgagggtgaaaaacatgacatatcattccggttaaatatacgtgcttgaatatcagaatcagaatgacacatcacacatatcacatccagttctgcaagtgactaagaataggacaaaacactagaaacatgttttatctaaatcaggatatgtaaattgcttatcggaagcattaaaatgctagaaggactaagataattgccaatgaaaaacaattagcatactaatttgaacatagaaaatgaaaacctttttggggggcacatatgacactggatgatagcgcacatccatgtgcatctacagtcctataggcattatatcaaatctctgggaaaaaaatctgtagtgaaaattaccagaataaaaattgagtatggtgcttgggttataggtgacattttagttctaggttacattgtaaaaaaatcaagtggttgtctagtggataaaaagccaatagcacaaaagcaccaagcacaaaattaatcagtagaaagcctgaacaaaatagaatatcgtgagaacactgaaaatgctaatatcacaacacaaaaactcagcttaaaaacctaacttgcaaactcataccagagcatgaaattaagcagataaataaatctcaaccaccaagaaaccaatactaagttgttcatcgggatttaacaaagttgacaggcagcgtaaaagaaagctaatagacaaaactctgctgacagattttttttactgcttcaagtttggtgctcaatcttctgtcatccaaacaatcacgttctatgcatgcatattgtatatattcaaaaaaataatttacctgcacattttagcccaccaaaccattgccatatcgagctagtagtactgcagtagtaccagaatttagtaactaatttctcatgttaaaattctaagcatgaatctagatatatttgaaaaaactacaccttttatcccaaaaaaaccattgccatctcaagctagaagtagtatctaccagaagttagtaactatctcatgttaaaacttgttcgagcttagcataaacactgcatcaaacaaccaagacatgcacacacttcagctaacacctctcaaaatggtatatcaacacacctcatgtcttactgctctttggactatttgttaaagatcaatatcagaaatgtcatgataaaaaatagttgagaatcaaagctgctcaccaatattactaccatacaatctcaactacctatttttcccaattatctcagttgatatattgctcagaaaaataaccaaactgtgcggcaactgaattgtgaacctacggacatgacgtctggagcacaaccggcatccgcatgaatacagtggtgatttgcagcacgaactccctccatgtcaaccactgtgtcccagagcagatctcgtagcaccatggcatgctcgtctccacccttggcgcacctaacagcaccaccatcagaagttataaaacctgaaacacgcctcaaaatagaggagaacagacaaggggactccagcagagagtatgcgaggtacggaatcatggagacctcgtcggccatggcttcgtcgacctcctcagcgagccagaggaagctctctcgttagattgcg

SEQ ID NO: 28422 - DNA, 817 bp, Setaria italica
  Peptide Sequence Number=SeqID_94396
atttaaaatatgcatatgatcaagtatacaccacatgattcacaactgcaaaatatcataaacctagcaatttggtttttgatagtctatttacacaaacagatttgcctctccttcatcccttcaatcaaaaattgaacattcatgactcgtgattgtgcgggcatctcacaaaaaaagaactaccagcatattatcagagtgcacattactatacttcgtacttgcacaactgatgagctcctttcgtgacggacatgacgtctggagcacaaccggcatccgcatgaatacagtggtgatttgcagcacgaactccctccatgtcaaccactgtgtcccagagcagatctcgtagcaccatggcatgctcgtctccacccttggcgcacctcgtcggccatggcttcgtcgacctcctcagcgagccagaggaagctctctcgttagattgcgatggagcttcgcattgccgtagtcgtcgccaccgatttctcctctttgcgcggggccgggtatagccagatccggcgaggcggagggcaggggacgcgcaagcctcgtcgccgcgtcagccacggcgtcgtcaaccttgtcagcaagtctggagaggctctcttggaggatcacgatgaagcaagctggatccgccagccccaaatccctcatcgccaatcatcgctattagccatcagagctccccgaaacgccatggatttggaagagagcttgcgggagggggaagaacgggaggagcaaggaaacagaagagacacgggtgggagaacggataaggttgatggccacttagacgata

SEQ ID NO: 28423 - DNA, 351 bp, Setaria italica
  Peptide Sequence Number=SeqID_94397
taaaaatacgaacgcggccgccggacgcgcattgctcttcctccctccccggttcgcctcccctgctcctccgcttctctcccggggccaggtgttcttggagatacagcctctggagctgctgctactgctgctgccgacgccgccgccggtggtctcgtaggtggcgggtccgcaatggggaggggcagccgcgcctgctccgtccttggctccgccctgctcctgctgctggtctcgctcggctccgccgccgcgcagaagggctccacctggaagaccctgagtggcaaggctccagtgatcattgctaagggcgggttctcgggccttttcccagattccagtgat

SEQ ID NO: 28424 - DNA, 673 bp, Setaria italica
  Peptide Sequence Number=SeqID_94398
taagaactaagctgtacgactaggtaggtggtagcagtagcagtctgcaggccgtgcagggtgcgctgctcgtgggcccaggccgcctcgcgggcctccttcccaaagtccttgcggctcgtgaaggccaccttgttgtcgagcaccaggccccaggccttgccgctcagcccataacgcacggcaaacttgatggggtccagcagcaggtacacggcgatgttgtacacccagatggcgcccgtccacccccacccgatgcccttgatgccggcaacctcccagctaaccatggcagcaagcacagaggcgatcagctgcgctacgacgaaggcgcccatcagcagcatccccggcctctccaggaaagaccaccccctggaccgggtcacgaatatcagcgcctggctgatggtgctcacctgaaggtacaccgcggaggccagcctctccgtgttgtcggcgaccgcatttatatccttactgtccagcttgttgatgttcagacttctgacgtggaaaagcctcacgaagaactccgtcttataaactgcccagaagaagagcaccgtcgtcaacaagactaaagtaaagaccccaaatagaatacaactacccgtacgacaaaataatactaccgactaagacttaccaagactagtaccgggtagga

SEQ ID NO: 28425 - DNA, 447 bp, Setaria italica
  Peptide Sequence Number=SeqID_94399
ccccgtgggaggttggacgaaagggaattggtggggcacatttgtggagctttactacaatgaggacaccgacaggacgaaggcctccatcatccgcatatagttttcctgccggagcatatcacctaacatgaaaagaggctgattcatctgctggaaaatttaccaaaggcctggggtcttgtttgccaccagtaaccacccaacaggaaggatttaagtgcatgcaagctgagcaaggaaagccatatcagcgttttaagttttgcttagcttatggcagcatttctgctgtaaccaagtaccgagtagaagattgacattattgtcaactaacaactgatctgatcgtttctccggtttccgtactattgtatatcaggaactagttggtccatcctattgtatatcaggaactacttggtccatcctattgctgtttcctcc

SEQ ID NO: 28426 - DNA, 492 bp, Setaria italica
  Peptide Sequence Number=SeqID_94400
ccgcactccgacactcccacccgcccccggcggccgccgccgccgcctctctcccgctcacggcagcggctccctcggcgcccttgccgtcatcgaggagcccgaaaaatcgagcgatccagagggagagattgagggcaaagcgaaagaaaaactcctcgagccactaaaaccctaaacccctcggcgtcggaggcggcggcgagatgaggaacctgcgcctcgtgacgaggctcccgcagcagctcccgctccagctcgacggcgagaccctcctcgcctccgcggtcgacgccgagcgccgccgcgccttctttgcctcctccgccaacttcatctacaccgtccaactccccgcctcctccacacagggacaggaaccactgccatggagtaaaatttctactcaacactccgacgtggaggaggttgttcttgagcctggagattgcattgttgccatggattatctcatggagagggagtctctac

SEQ ID NO: 28427 - DNA, 315 bp, Setaria italica
  Peptide Sequence Number=SeqID_94401
actttagaagcattccagctgcagatttaatgcagctgtacaataacagcaagggatattagataattagataacaagatcagggaatatggcacagcgctagccgctagcttccctacagttcattaaaatgcactgaaatcaattccagacttccagtcaaatacataattgttaacacataaatttctaaataattcaaaaattgtagaagatgctgactatgatgcatgcaatgaaaggatggtagaagcagtgtagagagcaggtttagttgctgtagactacctatgtgtatgaaaacttcagcaactt

SEQ ID NO: 28428 - DNA, 385 bp, Setaria italica
  Peptide Sequence Number=SeqID_94402
ctcggggcttcatattcctcgccgtcgcgtccgaacacaggcagcgatcacacgcaccaaaacatatggcgatggcgacggtgaagctgagctccccggccacaggcctgctcgctggcggccgcacccgccgatccgcgcccgcccgccgcgccacggtgatccgcgccgccgccggctcctactccgacgagctcgtctccaccgcgaaatctgttgcttcccctgggcgtggtattctggcaattgatgagtcgaatgcaacatgcgggaagagattagcgtccattggtttggacaacacagaagctaaccgccaggcttacaggcagcttttactaacaactgctggccttggcgaatatatttctggtgctattctttt

SEQ ID NO: 28429 - DNA, 328 bp, Setaria italica
  Peptide Sequence Number=SeqID_94403
taaagagatttccatgagaaacacatatatcgttttggtgtcacggtttttgaacactttgagtgaataatcaccaacttgttgccttgttggtgccagggacttctagcaccattagcatttggagaaaccttagagcttctgaagtatcttgagaatgaaacttactgcatgcatactctgagaaagttgatgcattccaagctggttaattcagtcctatttgcagaatggttcatgcctactgccaaagcaagcaagcatctcattggcaggaggccgagctggttgtttttttggaaaaagactggttgcgttttttgctggg

SEQ ID NO: 28430 - DNA, 673 bp, Setaria italica
  Peptide Sequence Number=SeqID_94404
ttatttgttcctttggtttcttatttcttaaggttttgttacttaagggttttggtttcctacttgcctggatccaacaatgaatcgtggtgccaaggtcttgatggtttggcttcaaggtgtgctgagtactacaagcagggggcacgcttcgcaaagtggaggactgttgttagcatcccttgtggtccatctgcattagcagtcaaggaagcagcttggggacttgctcgatatgctggtattgctcaggacaatgggttagtgcctattgtggagccagagatccttcttgatggagaccatggggattggagagaactcttgaggtggcagagaaagtgtggtctgaggtattcttctacctggcccaaaacaacgttttgttgagggtatcctgctgaagcccagcatggtcacccctggagctgagcacaaggagaaggcttctccagaagccattgcgaagaacacgttaacaatgcttaggaggagagtgccacctgctgttcctggaatcatggtattgtcttcactcttggagcaaaagtttccatacggaatcagatcaagaatgttataactctgatttcttctacagttcctttctggtggacagtccgaggttgaggcaactctgaacctgaacgcgatgaaccagtccccgaaccca

SEQ ID NO: 28431 - DNA, 1304 bp, Setaria italica
  misc_feature (1294)..(1294): n is a, c, g, or t
  Peptide Sequence Number=SeqID_94405
taacttaagtaaggtaaccaatactagaacaattaagacaagtacactgttgttcccctgggcgtggtattctggcaattgatgagtcgaatgcaacatgcgggaagagattagcgtccattggtttggacaacacagaagctaaccgccaggcttacaggcagcttttactaacaactgctggccttggcgaatatatttctggtgctattctttttgaggagactctttatcagtcaactatggatggcaagaagtttgttgactgcttgaaggatcagaatatcatgcctggcatcaaggttgacaagggtttggttccactgcctggatccaacaatgaatcgtggtgccaaggtcttgatggtttggcttcaaggtgtgctgagtactacaagcagggggcacgcttcgcaaagtggaggactgttgttagcatcccttgtggtccatctgcattagcagtcaaggaagcagcttggggacttgctcgatatgctggtattgctcaggacaatgggttagtgcctattgtggagccagagatccttcttgatggagaccatgggattgagagaactcttgaggtggcagagaaagtgtggtctgaggtattcttctacctggcccaaaacaacgttttgtttgagggtatcctgctgaagcccagcatggtcacccctggagctgagcacaaggagaaggcttctccagaagccattgcgaagaacacgttaacaatgcttaggaggagagtgccacctgctgttcctggaatcatgttcctttctggtggacagtccgaggttgaggcaactctgaacctgaacgcgatgaaccagtccccgaacccatggcacgtgtctttctcctacgcccgggctctccagaactcggtgttgaagacgtggcaggggcgccctgagaacgtggaggcggcacagaaggccctgctggcgcgcgcgaaggccaactcacaggcgcagctcggtcgctacaccggtgagggtgagagcgatgaggccaagaaaggcatgttccagaagggctacacctactaatatggcagagagatttccatgagaaacacatatatcgttttggtgtcacggttttttgaacactttgagtgaataatcaccaacttgttgccttgttggtgccagggacttctagcaccattagcatttggagaaaccttagagcttctgaagtatcttgagaatgaaacttactgcatgcatactctgaaaaaaaaaaaaaaaaaaaaaaaaaaaaaacacctaaaaaaagngaactagacc

SEQ ID NO: 28432 - DNA, 1776 bp, Setaria italica
  misc_feature (1722)..(1776): n is a, c, g, or t
  Peptide Sequence Number=SeqID_94406
ccggagagtcggaggcgccgcgctcgtcacgccgccggctccgacgagatggaggatggagtatctacttatactgtggatgaggcacttgtgttcatggggtttggaaaattccatgccttcgtgcttgcatactccgggatggctaaaatctctgaagcaatggaaatgatgcttttgtcatttgttgggcaatcggttcaagctgagtgggagctttctgcacaggcagaaagtcttataacaagtgttgtcttcgtggggatgcttgtaggagcatatgcttggggcatagtttcggataactatggaagaagggttgggttcaacttcacagccattgtaactggtggggctggtcttcttagcgcgtttgctccaaattacttatctttgattgtactgagatttatggtcggggtcggactgggtggtgggccagttctaggttcttggttcctagagttcatccctgctcctaaccgaggaacttggatggttatgttctcggcattttggaccgttggcacgataatggaagcttctcttgcttgggctgttatgccagcttttggctggaggtggctgctggcactttcatcgttgccatcatttgctctactactcttctatccagtgacactggagtcaccaagatatctatgcatgaagggtagaatagctgaagcagttcatgttttggaaacaatggcgcgagtgaaccgtgttactcttccctctggtcgacttgtctctggccatcggacagagcttcatgagatgggggattcctcagaaacggcacaattggtaacaactaagaaaaataatactggtgatcttgctagcaaatctgagattggaggtctcaatgccattttgaagcttctatctccgaacttaatcagatcgagtcttctactttggactgtctttcttggccatgcattcttatactatggtcttgttctgctaacatcagaactgaatcatggaaataggatttgtggatcagaaggcggagcagaagtgaccacaacagcccacataaatgatgaaaatctctatagaaatgtattcatcaccagctttggagaggtccctggcctccttctgtctgctgccatcgtggacaagtttgggcgcaaactctcgatgtcttccatgctttacatcagttgcctgtgcatagctccacttatgtttgctcagacagaagctctgacgaccgtctttttattcggtgcacgggtttgcatctcagcaagcttcactgttctgcacatctacgcccctgagatttatccgactgcagtcagggccactggtgtcgggtttgcaagctcaattgctcgctttggtgggatcctatgcccccttgtggccgttggtctggttcacgcatgccaccagacggcagccatcgtgatattcatcacggtgatgctggtctccggtgtcgccgtgtcgtacttccccctggaaacaagtggtcgaaagttaagcgaccacattactgcatagagctgatgagttttgtgactcgggagggatacaccatacagaatcaaggccccagaggccattcattgttttgtccagttctttgatggaggatacaaagggaaaggaagagtaaaggaggcatgagattgttaactggctacattgatttcaatagagatgtacactaatgttttgaaaaaaaaaaaaaaaaaaacnnnnnnnnnnnnnnnnnnnnnnnnnnnnnnnnnnnnnnnnnnnnnnnnnnnnnnn

SEQ ID NO: 28433 - DNA, 580 bp, Setaria italica
  Peptide Sequence Number=SeqID_94407
ttcagcactatcctgcactttcagacaaacacaagagttctgtctccagtgcttttgtaccagccatgaaggccatgtggcctggtttatatggtaattctgggggtagttcgcatgttatttcaaagaagcggaaacttgcagtccaagcttctcgttttatggtgcaaatggtgcaaacccaattactctcaacagaaagtacggaccaagcttctaagagtcctgaaagtgcttcacgttcagctgatgtttcaagcaattttgacgtcggcgaggaagggcttgctatccgtatagcagcagaggtagccagttgcccagataagaagaccgcagctgggaaagcatatgctttggcattgtgcaaggttgctgtgcttctaagatttcggcaatcagaacagaaggccatcaagtgcatgagaggcctggttaattcattggctgcttcagtggcttctgataaggagctcatgaaggagctagctcaaatggcagcacggcttagatcgcttgatgcctccccagatgaagaattgccaaaagatgaagctgaggccatattcaagaaactagg

SEQ ID NO: 28434 - DNA, 312 bp, Setaria italica
  Peptide Sequence Number=SeqID_94408
ctcctcccccgccaccccaccgcgcctcccctcccccagatcccccaatccctaaccctagcgccgcccacggcgtcctccgcctcgccctcgtcctcctccgcgtccggcatgcgcgatgcggcggaggacgactccgactcgccgccctcgcagatgtcggaggacgaccccggcgggggaggcggcgacaggtgggagccggatctgaggggcggcaacggcggcggcgggaggtgggcgccgccggaccaggtgctggagaacgtgctcgagagcgtgctcgagttcctcaccgccgcgagggacccg

SEQ ID NO: 28435 - DNA, 417 bp, Setaria italica
  Peptide Sequence Number=SeqID_94409
cttgactggaccaagagacctgaccaagttattatacataatacgtacacaagttctggttagccataatacatacggagctgtagcgtcgtttttcttggccataaccgataagtccataagttagtctagttagccatagtcagaaaatgttttgcgcaccgtggacaatcctaggctactactaaaagccaatcagaatgacctagaattactgaaataattgattagctcgctaaaaggaaaaattacgtagcagtgtgtacgaacacatgtaaagtcttggaatgcaaatatttaaaacttggtaggatggttgatgaagcatgaaagtggcatacgtaccaatgcaaactagaaaattacattgtcgtgatcataaggaaaagaaggtttccatgcagagcggacacttca

SEQ ID NO: 28436 - DNA, 272 bp, Setaria italica
  misc_feature (264)..(264): n is a, c, g, or t
  Peptide Sequence Number=SeqID_94410
aagtatttgaaagaaaatcatctgcttttttctttgatgtcttccactagacattggtggaacctttttttaatctattattatgcagtcatctgaagcatgaaactttttatttgtggtggcaaagggaatttctgatggtcttttgtagtgctatattgtttactgatcattgctagctatataacatttggctttgttatttttactactgtttgtttctatggatagaagcactgccttttctactcagttagaaaaatntcgaccta

SEQ ID NO: 28437 - DNA, 942 bp, Setaria italica
  Peptide Sequence Number=SeqID_94411
ctatactgaccggtgtatacttcatgccttttaagtgcagcacttgtacattgtggttttactggttctatcttcattttcttctgactccactggttattgctatgtgctattgtaggttaatgttgttcaatcttctcgtggtcttagtgtgaaacaaaattgcattcattgaaataaaggacgagctacaaggtcgtctttcaatgtcttcaaaatatttagcatgctctgttattgatgaaagtgtggaagctacctgttctggtacacccgataaagagggtgacataagcaccttttctgtcgatgaagattctttcatggatgcattgacggattttacttcagaccaaaactgtaatctgcaagacaatgaaattcccaacttggtttctgatgcaaatgattatactgaaacaagttcaaaagatggtatatggtttgatggggatcagcagaaagtgaaaccttctgaaatattttatgaggcacaagacaataacgtgacagattttgttgttcttacattttttgagcaggagtcctgattcttgtctttatgatggtatagattcacagatgagtattcgaatgtccgcactggaattctactgtaacagacccacacttgttgctctcatcgagtttggatttgatcttagtacggttaattctgtgccaaaaaataattctgataaggcacctggaacacagattgtgaaaccctcagggaaggaagacggtgctcccaccattgtaaaaggattgttaggttatgggaaacgtcgaacaattttcaacatgaaaatggatgtggatcgtgtatcaatgtttcttaacaaggaagatggttctcagcttgcaatgtttgtgcaagagaaatttctgtttgatctgaaggttcatccaagttccttttcaattgatggtatgctgggc

SEQ ID NO: 28438 - DNA, 955 bp, Setaria italica
  Peptide Sequence Number=SeqID_94412
cagcatggagttcgccttggaggcttcccacagctacggcgttttccaagaggatgtcccgtattcctgcaatatgaggcagtatccaaaatccgggcccagccacagctctaccccaatcaagaagctgatccatgaggacatttcattcagaacaaatgaaggccagaagaggcccagcgtcatcgccagactgatgggcatggattcacctccactgaacacaagcactgaatccatcagccgttcagaagaaagaagatcagtgccaagaagcagagatccttctgaaatgatctcaaccaagcatgtctccttcgtgccacacgataaggactccatcaagcatgcaccaaagcaagaaatccgagcctacgacgacgagagggatgtgtttgggcatcctagcaagaggaacaatgagtggagtaagccgcagccgcgagagcacccgcaagaggaggagctgcagaagttcaagaaggagttcgaggcgtggcaggcgagcagagcatgggagcaatcaagaagttttgaactggagagcaacctcgatgacgacgacgatgacaagtgcacggatatcgtgccgtacaggcaccagcaccacaaagggaaagatgctagcagtggcaacaagtacattgactccaatgacgatgtgcatcggagaagaagcaaggagagcagcacatcaatctccggcagccgtacgttctctctggcgagcgcagacgcgtgttccacgaggctgccactctccaggttctaccacgaggaggagaggtcgttgtcgccgacgaggatcgtcgtcctgaagccctgcccggagctgagcatggacgacatcgaggagtcgtcgatggggtcgccggagctggtgaagaaggagaacaacatggaggccttcctcgaggaggtgaagaagaggctaaagattgagctcgaggggagc

SEQ ID NO: 28439 - DNA, 853 bp, Setaria italica
  misc_feature (364)..(364): n is a, c, g, or t
  Peptide Sequence Number=SeqID_94413
agaacggacgacggacggtaataagcggcacgtacgcgaccacgccgccgccgccgtcggcttccggcacgaggaacgcggcgccctccaccggctgcggggtgctgtacgtgggcatgaagaggaacggcttcccggtgccgaagtccaggtcgtagaacgggatccccagcacgctgtccacctcgatgttggtcctcgccaccagctccgacgacaccgccgtccgcaccagcccctcgcgctccacagcgccggagctcgcgaagtcgacgaaggaatggaagtagcggccgtcgacgccggacaccgccttggatatgagctgtgccgcgcgccgcagcggcgagtgcagcaggtcccngcggtggttgccggccgcgcccacagaacggcgttgccggtgtaacccttgggcaccggcgggtcggtcatccggaaacggccgttcacggcgatgtgcagcttggtgacctcgtgcgcgctgagcccacgcgccgccgtgacgcaccgccacaggtgcgccgccacgcactgcgccgcgctgtacggccggcgcctccccgccgacgcctccaacttcagccgagcgacgaactcccggctaaagcgcaccgtctgcatcaccacctcgttgccgtcgccgacgacgtcgagggccttcttcttctccgcacgtggcttgaactcggcgccgcggtgctcgaactcgacgagcggcgggtcccgcggcacgaacagggacgcccggtcgtgcacgggcgcggggtcgaacgccgccgcgccgcggacggcctggccccacgccagcagcgacgtgcaggtggcgtagccatcggcgacggagtggtgc

SEQ ID NO: 28440 - DNA, 370 bp, Setaria italica
  Peptide Sequence Number=SeqID_94414
tcaggcagaaagacagccgcatcagacgaatggaagagaaagccacaggttcaaatcctgatcagatggcagctctgatggaaatcctgcagcgtaaggaagccgaactcgaagagatcaagaccaggttccaagattacaagaaaacagatagagtggctgtgaatagtatgagcactcctgtgcaaacgaacaatacaagagcgactcctgacattgtggtagtaaaaaagcctatgaactcaagcagtgtgggcaagtctgaagaaaagagatctgccaatagcacagtagtagaaagtgccaagtctgaagaaaagagagctgccaacaccacagtagtagaaaatgccaagcctgaagaaaaggg

SEQ ID NO: 28441 - DNA, 266 bp, Setaria italica
  Peptide Sequence Number=SeqID_94415
gtttctttccttgcaagcacgctcctggtgtgggttcaggacaactatggatggggatgggggatttgggatccctacactgttctcagcgaccggaatcgctgggtttcttgcatgtgttaagctttacaggtaccagaaaccgggaggaagcgccctcactaggatttgccatgttgtggttgcagccactcgcaagatcaatgtggatgttccagatgacagctctcttctgtatgaaatgccaggcaaagagtcagcaatca

SEQ ID NO: 28442 - DNA, 254 bp, Setaria italica
  Peptide Sequence Number=SeqID_94416
aaacatataagcaaggcatcaccaggacaactaagacataaactggtataagcaagctaacacttgtcctgatcacaaaaaggaaaataaaatataagccaaaagaacagtaggatagttgagaaagactttgtacataaaccaaactatcaaaatgatatgaacacggtcttccaaaataatagacatgcgcaacaagccacaactaaatcatgacagctagtgagcattagtgctattcttactgtaagtgt

SEQ ID NO: 28443 - DNA, 378 bp, Setaria italica
  Peptide Sequence Number=SeqID_94417
cagccgccgccggtgaccgtcgggttcacgatctccagcggggacatggaggactcgtacagcggcagccagcacccgcggtcgggggcggcgaaagggagctcgacgacggcggtgttcaaggtggagaactggacggcgcctgcgcagcagcagcagcagcaggcttcgccggaacaggcgaggaagacgccgccgccgcccccggcgtcggaggccaaagtccccgtgcccggtgggtgaggcttacggatcctgctcgccgatcgatcggcttggctgctcaacaaaatctccatcactttgcaggccggctgaatagtctttgcgtgccttcagggctagctcgccctctgatcggcaatcaggccctgaatt

SEQ ID NO: 28444 - DNA, 264 bp, Setaria italica
  Peptide Sequence Number=SeqID_94418
tctaacttctaccggtattgtaactaaacaaaaggcagagaaaatacaaagagacaaatgaaaatgaagatgacaatggcggtcctgatggtcttgcattgtatagtagtaggttgacatcacaagatgatattgcgaaggattgtcatgatggagtctctatgccatttgttgccgattgtcttgggaagcaatactattgttgctctaagcccagtgatgaacctatctggaggggcctcctcaataccggcaaggagtata

SEQ ID NO: 28445 - DNA, 312 bp, Setaria italica
  Peptide Sequence Number=SeqID_94419
gagaaggccaccacggccatcactcccgccggcgccagggccaagcagtggccagccaccgccaccggcgcggcggcgcgcgcgctgccgctactccgcacacataccactccactacccgtctcgtctcccgaatccaccggagagccgagccgctgcccgcaccacaccacaatcccccgccgcgtccgatcccagctcggcaactcgcctctcctcccgccgcaggcccccgcgctcggggcgacgggtccgtgctggcggcggtctctatcagaagggcgtgctgctcacggcgttccccgacgctta

SEQ ID NO: 28446 - DNA, 565 bp, Setaria italica
  Peptide Sequence Number=SeqID_94420
gtcagcccatccagggtgcatggagtagaaaccaactcccttgctgttgtatttcttcagcccaccactcagtgagtgcgacctgaactcttttgttttcgagcatattgtcgtgtcccgtcaaagttttcttcgctgaactgtaagtccttgttcagtggctcagtgtacatgcctcctgatgcaactgtgatcacacgagcatctggtgctgctttttccaataatggcatcactagctctgttaaagtatatgttgctgccacattgacagcaaaattgagctccaacccttctgctgtagtctcacgcttgtgctctagtaagccagcattgtttacaaggacatggagtggtttatccattgaagtgaactttgttgcaaatgatttgacttcattgatagatgaaaggtcacatatctccagatgaacattttcattgccagttttggatcttatttgattgagagcagcctctcctctctccttgtttcgacagagcatatagacagtagcaccatgtgaagccaaaccctcagctgtagcaaaacctatgccagtaa

SEQ ID NO: 28447 - DNA, 418 bp, Setaria italica
  Peptide Sequence Number=SeqID_94421
cagactagactagaagaacacacgggagaggagggagaagcgcgaccgcgcggagcccagagagcgagagggagagctgccgccgccgagctctcaccgtcccccatctccctccctccctctttctcgccccgtccaaccgccgcgtaatacacggaacccgatgcccttatcggccgccttctgatcgaatccggcgagaaaggccccggttcttcgccgtcggcgtcgccggcgatcttgatggcattggaggccgggaccagcggctgcggcgggagtggatggggcggcgggttccggagcctgatgcggcggaagcaggtggactccgatcgggtccgcgcgagggccagccgcagctcgccaaggagctcaacgtcccggagctggtcgccatcggggtcggttccacagt

SEQ ID NO: 28448 - DNA, 350 bp, Setaria italica
  Peptide Sequence Number=SeqID_94422
cgcgctcgacgctcgggctgagcacctgcgcgtcctccgatgtctccttcaagtaatcgagccccagcgcgcggaggctggctcccacggtatcccctcgcgcgtcggcgtacgcggcggagcagcggtcaagccgcccgttcgcggcgagccggtcaaggattaggctgagcttgtgcacgacggagggagggatccgagaaggcacgatggacgccggggtggagctgtcgccccgctccctcatagcaagcggcgcggagtgctccgcgaggagccgacggaactcggcctcgagcatgccgagggcggccgccaggaggcccgcgtcgaggtcagcggaggcgcgg

SEQ ID NO: 28449 - DNA, 244 bp, Setaria italica
  Peptide Sequence Number=SeqID_94423
gcagacagcggcatcgatcgatcgcaaactccacaccaacaagcacaacagatcaagcgatcaacgatggacggcggcggcaagaagcatttcatcctggtgcacgggctctgccacggcgcgtggtgctggtacaaggtggccacgctgctccgggcggcggggcaccgcgtgacggcgctcgacctcgccgcgtcgggcgcccacccggcgcgcctggacgaggtgcgctccttcgaggtag

SEQ ID NO: 28450 - DNA, 219 bp, Setaria italica
  Peptide Sequence Number=SeqID_94424
tgggaatctagctagttttattctgtgtagtgtttacactgagatgtatagactagtttacacatcttgatatcctgcttgcgattttattccttttttttagatgattgtactgctgggtctagaatatgtagtggttggtctgtttccatttaggtcaaggaaaatatcccacaaccactgcatgagtctcaaattatcaggcacccgtacatccga

SEQ ID NO: 28451 - DNA, 280 bp, Setaria italica
  Peptide Sequence Number=SeqID_94425
ttataactttccagatcttggacacaacacgacagggaaacaaataatgaacataatcccaaatacaatagtagcatcctagactatgcatccacctggggaagtgccattggatcctacctctctagtcccaagcccagccaataaaagttcatgcaggaggaaaacacctaattcccatgtatatgtgaagctgcaaaccaacccacctaggtggcagtacttgcacacagtttgccagcaagagtatcaggtaaaccacctaaacgattcctttcgg

SEQ ID NO: 28452 - DNA, 321 bp, Setaria italica
  Peptide Sequence Number=SeqID_94426
ccatcctcgaggctgcgcagccggtataccagcaagcgatggcgatggtcacgaccgatgccgccgccgcaaccgcggtcgtagagaagccgccggacgccgacaagccggactacgccccccacaacggcacctccaccgcggatggcggcgcggcctcccgcgtccgaggcgggggcgtggtggattcggtggtggcgcggtggcggcgggaggacatgctcgacaagagccccctcgcgctgcacgccgccgcggccgtcttcgccttcgttgcgctcgtgctcgtcgcgtccaaccagcacggcgactggatgcagt

SEQ ID NO: 28453 - DNA, 215 bp, Setaria italica
  Peptide Sequence Number=SeqID_94427
aagccgccgcccccggatcccttggagcctctgaacacggctctggctgttgcaagctgggggtatgatctctctgtaaccctgcctggttgattatctgtgcctctgtggattagaaaccgttggcttctcataatttcgagcgactgcctgatgccattgtaactggaagcatcaaaggagacttagcagtgctatttttatacaattagatg

SEQ ID NO: 28454 - DNA, 304 bp, Setaria italica
  misc_feature (1)..(47): n is a, c, g, or t
  Peptide Sequence Number=SeqID_94428
nnnnnnnnnnnnnnnnnnnnnnnnnnnnnnnnnnnnnnnnnnnnnnnaagtttttattatgtacttcaaattaactgagaaacagaacgtgcaatgatatccatcatttcggtttcacatcatttgccagttccattgcatcacaagcatagcacagtagtcaaagaaacgtctagcgccaaggagtacatctatgctaactcaactaaggactatacacaattcattccgattgcactcatttacattcggtggcctctctctctctactttcaggacgaagcgtgaaagacactaggtgaaa

SEQ ID NO: 28455 - DNA, 280 bp, Setaria italica
  Peptide Sequence Number=SeqID_94429
gtggcccaccacccccgacggccgcggcgccccctgccgcggtcctcgtcgtcatcctcctccgtggacacccagcgccactccagcgacggcgccttccgcatgccgccggccgccgacgaatccgccgacgacgccattacgggctagggttgggtcccgatcggatcgagagcgcgggcgaggacgaggaatttggtatagaaaattcccgcttcgtggttcgtgtggcggtgagggggtggtggtggtggaggagagaggggacacagacacagcg

SEQ ID NO: 28456 - DNA, 335 bp, Setaria italica
  Peptide Sequence Number=SeqID_94430
cgtttcttagaaggttaagccacaggactcgggcacacgattgaaaatttcatcgatctgacctggggagtagaaccatatcccaccacataaacctagtccggcaactgctaccaaacaaaccctaataaatcctaatagcgagttgtcataaaaacactcttaaccctagcttgtgccgacatctcaacaaccacctacgaaattcacttcaggatctggaacctatgagcccggcagcatcgcacccagatccaccgatcaggacggtcagacggcgaacggaatctactagttcctcttctcccgagaaccaacgacgcgggtaccagcta

SEQ ID NO: 28457 - DNA, 506 bp, Setaria italica
  Peptide Sequence Number=SeqID_94431
ccaatccagaagagaagaggaccattattgcaatattgtgcgtctgttgtgctggtacaagtgtccgagttcgtaggccgcatagcgcttatacgatcatcattacatttgatatcatcatggctcttcagaggcttagctgtaatttgaggagaatgttcacctctctgtgcacgataaaccctatccttttcaacaatatctgcaactaactggttacaatgatctggtccagcatcaagaaggtcatatgaatgtttccagaataaggtaggagttagaccacgtgcccaactctcttcatcatctcctgctccggcaatatattgccagctgaattctgaagacatcctttgcatagcaactgcattcgatgctgatgcggaaattagtatgattggagtaaaatcccatgactcaagctctggcacttcatttaaccatatgcgtgtcctttgggatatccatagaggacgtagtggcttttgcaaatttactgcaagtag

SEQ ID NO: 28458 - DNA, 216 bp, Setaria italica
  Peptide Sequence Number=SeqID_94432
tgctctaattttctatattattgtgacaaaatttaagctgattttatcgatgagatatgctgtgctgtgctgaaactactattatccacacttgatgtctcctagtcttaaaatgagtatattacatttttcacattgacatataaggtgacatcagtagacttaccatgtcagttatgacctgataccccatgaaaattggctctctgagccaat

SEQ ID NO: 28459 - DNA, 339 bp, Setaria italica
  Peptide Sequence Number=SeqID_94433
tagactttagactaacaaacctagacaaccaagaagacatatgaactgtttgatgatataattctcctctcagatggccaggttgtctacaatggccctcgtgaacatgtgctcgagttctttgaatcggtaggcttcaaatgcccgcagcggaaaggtgtagctgacttcttgcaagaagttacatcaaggaaagatcagagacaatactggaaacatgatgatgagacctaccgatatgttcctgtgaaggagtttgcagaagcatttcaatctttccacattggtgaggctatacgaaatgagttggcagtcccatttgacaagagcacgagccta

SEQ ID NO: 28460 - DNA, 577 bp, Setaria italica
  Peptide Sequence Number=SeqID_94434
tagaactttttttaggggactgtaatgcacaaatttgatgagcaacaattgaaatgtggtaggttacatcaaggaaagatcagagacaatactggaaacatgatgatgagacctaccgatatgttcctgtgaaggagtttgcagaagcatttcaatctttccacattggtgaggctatacgaaatgagttggcagtcccatttgacaagagcacgagccatcctgttgcactgaaaacatcaaaatatggtgccagcatgaaagaactacttaaagcaaatatcgacagagagatattgttaatgaaaaggaactcctttgtgtacatattcaaggcagtttcaagtcgccgtagtggcgatcattgcaatgaccgtcttcctccgaaccaatatgcatcgtgactcaataacagatggaaggatatacatgggtgctctgttctttgggatcctgatgatcatgttcaatggattggcagaagttggcctgactattgcaaagctcccagttttcttcaagcaaagggatcttctcttctatcctgcatggacgtactctttgccgtcatggatct

SEQ ID NO: 28461 - DNA, 334 bp, Setaria italica
  Peptide Sequence Number=SeqID_94435
atcttttgggtcaagcggggttatgtgcttagccaacaatttattcatcttaaacatgtcagttgtatcagttccaaaaaccacacgaagttcatcattgcaaatgatctttcttttgtcatcgggatcttgaagattattctgcctgatatatgcccacagctgcttgacaatctgagttcttgacatggcagtctcaccgacaatggtctgaagttcaggtgaaattgcacaaactttatttaaaccaccaggtccacctcttttccgcttagaagcactctccttgttgtcgccggcgacctgcgctgcagcggtggggggagcagtgacc

SEQ ID NO: 28462 - DNA, 1140 bp, Setaria italica
  Peptide Sequence Number=SeqID_94436
aactttacatagtcagcatgacattttgacatttaggaactaacactacgaattcagtaaaggttacaccagacaccacagtggttgcctgaatgaataacaagctacaggctaccacaaataatctgatctttgcatgacacaattcataatccataacattgaagaaatacataagctatgctgtccattctgtcaagaacaccatattgtaatgttaggcctatctgccacactgcaatcctagatcagttaatgaggatttgctatgtcttcttgatgaagtggtgaccaagcatttctgataatcctgacataggaatgctctcacagccaaaaagctcttgaagttttgaatcacataatatcgatccattgatgacatcctcgagttggtttgcttttatgtagtcccagaggtatttcagagcatcttcatgaggaaatgttccatcagttccaataaactttgctagcgcatcagaaataaccactgagggttgatttatgggaggtccaggctggggagtaacggtgggagccttcattcttttcacatcacgaatttgatcttttgggtcaagcggggttatgtgcttagccaacaatttattcatcttaaacatgtcagttgtatcagttccaaaaaccacacgaagttcatcattgcaaatgatctttcttttgtcatcgggatcttgaagattattctgcctgatatatgcccacagctgcttgacaatctgaatgaaattttctagcgtcaatcattcaaagagtacctacacggcagataattgatcatttctatcataatgaaatatagagagtacctgagttcttgacatggcagtctcaccgacaatggtctgaagttcaggtgaaattgcacaaactttatttaaaccaccaggtccacctcttttccgcttagaagcactctccttgttgtcgccggcgacctgcgctgcagcggtggggggagcagtgcccccgaccccaggggccgactgctggaaggagacggtcccacccgtggcgaccccacccaggccggtggtgtagcggaaggcgagcggggcggcggtagaacgccatggctggcacggccggcggcgaggagaccgccgggacggtggc

SEQ ID NO: 28463 - DNA, 177 bp, Setaria italica
  Peptide Sequence Number=SeqID_94437
ctaaagtcagaggtgcattagcttatcgatcgacgttttggtttggtgtgatagcaactgtttgccgttagtagagctgcatgtcaccatcgcagttgtatgcttcaactgaaaggttttgttagagaattcccttctgttttgcagaccaaaaaaaaacctcaggaattatttctg

SEQ ID NO: 28464 - DNA, 153 bp, Setaria italica
  Peptide Sequence Number=SeqID_94438
cctccgcactccaagagccccgtcgccacgcgggcccgcttcctcggctgcagcgcgtcgtactcgccgccgccgccgccgttgcaggtgagctcgctgcgcgcggcaccgccgaacacggcgtcgccgatccctgcggccgccgctggagcg

SEQ ID NO: 28465 - DNA, 3373 bp, Setaria italica
  Peptide Sequence Number=SeqID_94439
aggaaacatatgggaaatttttcacaggcgactcgtacataatactgaagacaactgcccttaaaaatggttcctttcggcaagatatccattattggcttggtaaagataccagtcaggatgaagctggtacagctgcaatcaagactgtcgaactggatgctgctcttggcggacgtgctgtccaataccgtgaagtacagggaaatgagaccgagaaatttctttcatattttaaaccttgtattataccagaggaaggtggggttacatctggtttcaggcatgctgaaatcaatgagcgggagcataaaacacgattatttgtctgcagaggaaagcatacagttcatgttaaagaggttccttttgcacgatcatcactcaaccatgatgacatatttattttagatacaaaatctaagatattccaattcaatggatcaaattcaagtattcaggagagggctaaagcccttgaagttgtgcaatatcttaaagataccaaccatgatggtaaatgtgaagtaggagcagttgaggatggaaagttgatggcagacgctgatgctggtgaattctggggtctctttggtggatttgctcctttgccaagaaagacattttctgaacttaacgggaaagattctacttccacttcaaaattgctttgtgtcaataaaggccaagtagcacctattgattgtgaaattctgacaagagagctactagattcaacaaaatgttacctgctagactgtggttctgaaatttatgcctggatgggtagagaaacaactctcgaagagaggaaacgagcaggctctgctgctgaggaattactacgtgaaggaaaccggccaaaatctcatattattcgtctcatggaaggatttgagactgttatattccgatcaaagtttgataaatggcccaagaaagctgatgcagttgtgtcagatgaaagcagaggaaaagtggcagctcttcttaagcgacaaggatttaattttaagagtccagtaaaagctgcacccgtaaagcaggagcctcaacctcagattgattgcactggcaatttacaggtttggcgtgttaatggtagtgaaaaaactttcctttcgttctctgagcaatgcaaattctacagtggagactgctatatctttcaatacacctaccctggagataatggagatgaatgtcttattggtacctggtttggtaagaagagtgtccaggaggaaaggagtgcagccacttcacttgcagacaagatgatcgagtctttaaaattccaggctgttctggttcgcgtttatgaaggaaaggaacccattgagtttttcccaatatttcagaacctagttatatacaagggtggtacgagtactggttacaagaaatttgtctcagaaaacaacattgaggatgatacctattcagaaagcggggttgcacttttccgagttcagggctcagggccagagaatatgcaagctattcaagttgatacggcagcagcatcgctgaactcttcttattgttatatactacatgatggagatacagtttttacgtggattggtaatctaagctcatcaatggaccaagagcttgctgagaggcagctagatgtgatcaagccaaatatgcagtccagattgctcaaagaaggatcggaatatgatcagttttggaagctactaggggtcaagtctgagtactccagccagaagattgtgagagatcaagaaagtgaccctcatttgtttgcttgtacattttcaaagggtgtgcttaaggttagagaaatattcaacttcactcaagatgatttgatgacggaggacatatttgttttggactgccattcatgtgtcttcatatgggttggacaacgtgtggacacaaaaatacgagcacaagctttgaacattggagagaaattcctagaacttgacattctaatggagaatgtatcacgagaaacaccactttatgtcatcactgaaggaagcgaaccccaatatttcaccaggttcttcacttgggattcagcaaaatcagcaatgcatggtaactcatttgaaaggaagctatctatagtgaaggatggagtaaaaccaagagcagataaaccaaaaagaaggacaacaacatcatcacacaccggaaggtctagtgtacctgataaatctcaacgttccagaagcatgtcattcagtcctgatcgtgtcagagtcagaggaaggtcgcctgctttcaacgcattggcggctaactttgagaacccaaatgcccgaaacctgtcaactcctccacccattgttagaaaacaacctccaaagcctgtatcccctgattcttcaaagccacctccgaggactgcttcgatcgctgcaatttcttcttcttttgagcgacctaaggcaactctaataccaaagtcaattaaagcgagccctgatgcaagcaagccccaaactgaagcaagcaaacctaacccagagacgaatgccaaggaaagtaaccctacaaaggatagtcaaattgcaactccagcagtacaagaagatgtaaaggagagtcaggcggagggtgaagaagggcttcctgtgtacccatacgaccgcctgaggacatcttccaccaatcctgctacagacattgatgtaaccaagcgggaggcatatttgtcttcgtcagagttcagagaaaggtttggaatgacgaaggaggcttttgcgaagctaccaaaatggaagcagaataggctcaagattgctcttcagctgttctgaaccctgctactgtgaaatgtccttcgttttcattgcttagtcaaagcacaatgacatgactggtttccaaaggtaaaaccattttcttcggccacaggctctttgtgatctctcgtggtcactgcagcagcagtatgagtcgtcaaaagtgtaccctaccagggtcaaggggccctcggtaggtttggaggggcaagtccagtgagtttttagctgctcatgctcctgagttgtgttgttcactgacaattttcatgtgcaatgactttgtgccggatcgctgcattggcgatcggtcactccaattctttcctacccaacgtcacaggtttgtttgtgagcttgcaaaccttttccccctgtgaagcctcctatttgttctatttttttaaagtagagtcccgatataataagggatatatatatgatgtaatttagacaactgagcatgttgtacaaaagagtttgtaaaatatttccgggcgctgttgttttgtacctgcaatttgtttccgtaagaacgtaacagatcatgcttgttaaatttttccagaataaaaaaaaaaaaa

SEQ ID NO: 28466 - DNA, 367 bp, Setaria italica
  Peptide Sequence Number=SeqID_94440
ggttgtccctaaggtactttcacggatagtctgacttggtgcaccttcactgctactggcatttgatatcattttgattattcgttctattaatgaaaataatatagcgaggtttctctgtttctgacagacggcttcatctgtctgagaagtttttaaagactcgtacttcaaataagcaagctcatttagaaggactgccacttcaattcttgcagactctaggacaagcaatacaaatttgcaacaggcaacacattctgggtatttttggatttttacaatcttctgacaaccaatcctcacctagtatggacatcatgcactccgccaaaagaagagcatgcagcttttcagaggatacaac

SEQ ID NO: 28467 - DNA, 244 bp, Setaria italica
  Peptide Sequence Number=SeqID_94441
gcagcacgctctactgcaaggcgcacggcggtggtaagcggtgcgtcttcgaggggtgcgccaagggcgccgagggcagcacgccgctgtgcaaggcacacggcggcgggaagcggtgcatgtacgagggcggcggcgtgtgcccgaagagcgtccacggcggcacggagttctgcgtggcgcacggcggcgggaagcggtgcgccgtgcccgggtgcggcaaaagcgcgcgcgggcgcacgga

SEQ ID NO: 28468 - DNA, 2083 bp, Setaria italica
  Peptide Sequence Number=SeqID_94442
aaccatccggaatgcagtcaataaacccacaaagttctgttggaaacctagccaatctgcccaaggttttcatgcacaaccatttcagacctgtgttcaactgcgtcatgggaggatctgcaatccatgtgtcaaatcaaactagactactacttgtagcatggtcattgtgctcccatctttgaaaatatcccagagaaattggggagcttatccacatgcttcagtgctcgctctgcaacttgtcttgtcctgtagtcaccatgcctgaaggcttctaccaaggccgtgccaacattttgatttcctgatatctcgtatgctatttcatccatcctcaggatcctctccactgcccacaccgctctctggcgcagtgcctcgtttcggttctcacacaatacatcaagtatcgggttgattccttctgcatcacacaggaccatgacaccttggtcaatgtccactccatcgtccaataaagtggatagtgctgctagagcagcttcaactactttctcattgttgttatccaagcaagcaaccaacttctctactgcctttccctccaagagacagaagctctcccttgcagaacaaatcccacaatgtactctacaaaccccagttgccacagtcttctggctgaggcatggaaatattgaaaaacatacccctgggttgggagctggtagtatctttgtaaggtgctttgactgatgtgagagtttctctagtgcagtagcagagacaatctggacagtatcaagtccattcatctgaagcaaatcagtgaagagtgcagtaagattgtattcacgggcaacagctatgaaatctggatcatcatccaagacataagtgatccgggagactattctaactagaccttcaaggaacgggttgacaaaacgccctccacgaatctccccttgtcggattcttaaaacttttaaattgatcgttgcaaatgccccatcttgatgaagacgtctggtgaggaccgagtcccgcataggaaggtcagctacaaggccagcagcagctgcttgctcttcagaaataccattgttatcagcaatgaccctgaccaagctgctaagttgactaaagtttccacgaaaagcatcagccagttcttgacccatatagggtgatatgttattcaagagcttgatggaattcatgcgtacttccctttgaggtgcttcaacgaattgaattaaactaacaatggcgcctgaacttttgatggcatcaactatgctctgtacagatgtcgaagaatccgttagaccaacaaggacctggagcaacttgcactcaattgcaggtccagtgttgcttatgagatgaagcagattatgaacaatgtcttcagacactaaggtctgcctactatgatcaagtggaatggactcaaaacgtgcacccgatgccacaacatttgcaagaatgtttgctgagacctccttcaatctcattggaagctgattactgccaacagtaaagaggtctgtgatgagaggtggaagaatacccgcttcaattagtatctttgcactggcatcataagatgaaatttggttcaaagccttcaaagctgcttctctggcctctctattcccatttttcatgatattgactagtgtggagccagccgtttgtgccacaagaaccttaacatcattgcttaaaacaagctccccgaggtatgcagccatagataattgcatgtcaggtgaaccttcaagaagaagcctaagaaggggttgcaatctaccattttcagccatctgtctaacattcttttcgcagctctctaaattctccaatgtcttctcagctctgtcaacaatcaacgagttttctactttactgcttgacaaaccaacaagtataagaatagctccagacacactgccaattctttctgaaagatccttattttctgaaagttcatataacagagacacagccttttccttttcctgagtttgtccatgatttaagaactttacaattgtgcgaatattgtctccagcagcgatctcaaccttattgtaattgtcattacttttta

SEQ ID NO: 28469 - DNA, 364 bp, Setaria italica
  Peptide Sequence Number=SeqID_94443
taccaatagacacaacaatagaccagccaccgtggcagcaacaaagcaagtgatcgaaacaagctggcataaatttttttagccgtatcatacatgggttctctagctaatgtgtatgcagatgtgtgtgcaccgctgttgtttttttttgtttcttttcgtcccaacgtacttaaatataaatgctgtacgcactcgagtaattaagtactcttccatttgtaatttgtaacttgtgagccttgagtgtgtgggagagacatataagcgtgtgtcttgtgtgtgtctgtgtgaaaatcaatgtatactatctacatttctaacgacaactttgatcgtcccaggcaaaccaaaactaaaaaaa

SEQ ID NO: 28470 - DNA, 544 bp, Setaria italica
  Peptide Sequence Number=SeqID_94444
tgttcagacaaccaattccaggcattcacaattgcacaaaacatttcacatcatcatcaatattaattgtactaaacatcgcagttcaacatgagcctcttatttcgagaaatatcaggcctcacaaaagtgccatgaaagtatttggagtactcggcaaaagcaaaactgaaaacagcctggtgaagcataacactcttatagtcagatgccactggaataaggctcatcaaaattgtgctgctgaattagcaggtcaggatatggcagttacccctgaaaacctcgagggtccaactgaatccacaaacccacggactgagagttctggcaaggaagcatccctctgttgcagtaatccatgatcaatgtagacgaccactactgtaatatcatcgtggaagaagcggcgcactcccttctcgactttcttcagatcatcatatctcatttccctcttccgcgcagcttgtttcaatgctgttcttactagtctctttgcaattcctcttcgtggattgctctggacaatttcaacagcttg

SEQ ID NO: 28471 - DNA, 529 bp, Setaria italica
  Peptide Sequence Number=SeqID_94445
ccgtcatcgccgagatcatcggcggcatcctcctcggtccgtcggcgcttggccggagcaaggtcttcctcgaccacgtcttcccgccggagagcctcacagtgctcgacacgctcgccaacatcggcctgctcttcttcctcttcctcgtcggcctcgagctcgacccggcctcgctccgccgcacgggccgcagggcgttcgccatcgccgtggcgggcatctccctgcccttcgcgttcggcgtcggctcctccctcgcgctgcgcgccgccattgatcccggcgcgccgcgcggcccgctcgtcgtcttcatgggcgtcgcgctctccatcaccgcgttcccggtgctcgcccgcatcctcgccgagctcaagctcctcaccaccgacctcggccgcatggccatgtccgccgccgccgtcaacgacatcaccgcgtggatactgctcgccctggccatcgcgctctccggctccgggtcgccgttcgtgtccatctacgtcctcctctgcgggatcggcttcgt

SEQ ID NO: 28472 - DNA, 737 bp, Setaria italica
  Peptide Sequence Number=SeqID_94446
ccttgaggcctcttcggattatttttttgttttcttttgttatttgttttttggttattttcttgagatcgatatatggtgctttggtaaggtcgggtgatgagtaccagtgcatagttcagatgatataaccctcgtggttgtgattactttgaacaaatagtctttcgctcctaactgacgaccttatcaattcccaatctctgactgttgttccgtgttcttccaattccaataattttgttgtcttagttgctaactgtgatgttagattgtgacatttaattgttatgaacgttttccagacgatgtttgtatcttcaaatggagaattaaccattttctgcaattcttgcataacaatgtagtactttgcaatctaaaccttatttccgacgtgattttagcatttgtttcatatatgatggttctgcgactacgccattcagatcttaaatgtagacgttccaagctttgttagctggcaagcgacgtcggtctgaaactctgaatgaacagactctctggaattagctggaactcgaatgagaattgcaccattttatgtacgcacaaagcagtttctgattatggattcgaatcggaaagcagtatgagatggatggtggctgtaatttgttttagaatttagctggaatttcagtttccaaaattttaaccaaagtttgtttctgcggttaggatttttagtatgattgaaggcaattgagatgcgt

SEQ ID NO: 28473 - DNA, 810 bp, Setaria italica
  Peptide Sequence Number=SeqID_94447
aggccccaaacggaccggacgctggcgcaggggctcaagggcgacccgacgtacctggtggtggagcaggacaagacgctggccacctacggcatcaacgccgtctgcacccacctggggtgcgtcgtgccgtggaacagcgccgagaacaagttcatctgcccctgccacggctcgcagtacaacaaccagggcagggtcgtccgtggcccggcgcccctggtgagcaatgcatttcattcattttgcttccttgattctagctgaatgatatgatctgccttcatcaactgactgaatctgatcttggttgaattgctcatctgatcggaacaacaacagtcgctggccctggtgcacgccgacgtcgacgacggcaaggtcctcttcgtcccgtgggtggagaccgacttcaggaccggcgaggacccgtggtggaaggcataagggggcttcctcgatcttcctgtctgtcatcagctgctcgtagccttgagttcctgtgttccttctctgagggagggctataaattcacttactccatgcctccaaactattacatatgtacacaacacactgtatgaaacaagaacacctctgtttctcatctctgcatatacaacctttttgattgaagactctaaaatctgctggaatggaatgatgaccatttttgcaatgccagtagcaggtcatccgctgagcttcgcatctacattcatttcaatatgagcgacggcgaatttttctgtgtaatacaatacagttggtggtctgtttctatacatgtacaagttcctggtctttct

SEQ ID NO: 28474 - DNA, 1109 bp, Setaria italica
  misc_feature (1006)..(1109): n is a, c, g, or t
  Peptide Sequence Number=SeqID_94448
gcctcgctcgacacctcccccagcaatccgatcctcccttccctgcagccatggcggcctccacggcgctctccaccgccgccaaccccacccagctctgccggccccgcgctgcttcttcgctgggcaagccggtgaagggcctcggcctcgggatgggccggcggagcatcacgtgccaggcggcgagcagcatccccgccgaccgcgtccccgacatggagaagcggaagctgatgaacctcctcctcctgggcgccatctcgctgcccaccgtcggcatggtcgtcccctacggcgccttcttcatccccgccgggtccggcagcgccggcggcgggacgtacgccaaggacaagctgggcaacgacatcaaggtggacgagtggctcaagacccacggccccaacgaccggacgctggcgcaggggctcaagggcgacccgacgtacctggtggtggagcaggacaagacgctggccacctacggcatcaacgccgtctgcacccacctggggtgcgtcgtgccgtggaacagcgccgagaacaagttcatctgcccctgccacggctcgcagtacaacaaccagggcagggtcgtccgtggcccggcgcccctgtcgctggccctggtgcacgccgacgtcgacgacggcaaggtcctcttcgtcccgtgggtggagaccgacttcaggaccggcgaggacccgtggtggaaggcataagggggcttcctcgatcttcctgtctgtcatcagctgctcgtagccttgagttcctgtgttccttctctgagggagggctataaattcacttactccatgcctccaaactattacatatgtacacaacacactgtatgaaacaagaacacctctgtttctcatctctgcatatacaacctttttgattgaagactctaaaatctgctggaatggaatgatgaccatttttgaaataaaaaaaaaaaaaaaaaaaaaaaaaaaagagatgagaaacagaggtnnnnnnnnnnnnnnnnnnnnnnnnnnnnnnnnnnnnnnnnnnnnnnnnnnnnnnnnnnnnnnnnnnnnnnnnnnnnnnnnnnnnnnnnnnnnnnnnnnnnnnnn

SEQ ID NO: 28475 - DNA, 371 bp, Setaria italica
  Peptide Sequence Number=SeqID_94449
atgggatgagtggtaaaagttttgtctgctatggttagggcactcaactttgtgcaatatgttagggatgatataacacaaggaagaatatatagaacctaaatacgatacaaataactacaaagaaattagatagcagtacaaaagtttgctaatacttactgaacgagtattattaataagtgctgcttcaagttcgataaggttgctccaaaagaatcacaccttcgtccacgattgcaattttaggtgctccaggtaaattgcttagctaaaactcacatccagacccgttacttaagggggcattgctcaactccttggttacagttacaactcacatttctcttttaaagaaaaatacaacatgg

SEQ ID NO: 28476 - DNA, 379 bp, Setaria italica
  Peptide Sequence Number=SeqID_94450
ccccaacccaaaatcaagtctttctgcttcgccaaaacttacctcctggtggattctcttagcagcatcagggtttttccggtacattgtttcatatgccgcaatgaccacatgttttagtaagcaaggtgtgtcttcaatctttgaagcaagaaatatgcaaacggttgcaatagtctgccactcgttctttgcgtgagactggcggaggtagaaccggtggcagaggaggatcgcggtggcgactgtaatctgcggcaattggagcctggtgcagacgtcgcggatgaagcagcagtaggtggcccggagctcggcctccttggccgcgccgacgccgtcccgccgcgacggcgagccgcgctcgatctcctcccgg

SEQ ID NO: 28477 - DNA, 1089 bp, Setaria italica
  misc_feature (1)..(56): n is a, c, g, or t
  misc_feature (67)..(67): n is a, c, g, or t
  Peptide Sequence Number=SeqID_94451
nnnnnnnnnnnnnnnnnnnnnnnnnnnnnnnnnnnnnnnnnnnnnnnnnnnnnnnnttttttttttntttttttttttttttttaaactagataaaaagtggcaacagattgagaatttcacagggtagacaagtctcatctcaaaaagatatgtacagcactaaaacaccgacctcaagctatgaggatacaactatctataatacacacatgaacattgctacaaaatcttatatacaggtagccgaggcatcggtcgtgtttctacaaaatttgttttcgaggccatgcacctcaattaaaaaatgacatgaacgtctccagaaccagttgcatcttttatccatttgcactgacatcgccaataagatacaaatccgtttgttggcatttcggtgcaagctggctgcatttcatttgcactagtaaattaatttacagaacgtccatatcttatgtttcaagacaggatactcagtagcagacaaccaatggttctttaccaaatacaaagtaattctataattcatcttctctctaacttctgtttcttcaaagatccgatcctccaatcatttgtatcagatatataaacaggagctgggaaccggccaacctcttgaatccttcttttctttctggtcaagtccatgattattgttgcacggtaaccacgatcaaccttcagagttccccggtaagatggtttctctatcctctgatccacaggaactaagttatgatttgtgtgtgttcgctgatactgattctcttcattcgtcctgcgatactgattctcttcattcgtctgccgacactgcttctcttcattcacccgccaacactgcttctcttcattcatcctcctatgctgattctcttcataggtctgccgatgctgattctcttcataggtccgccgatgctgattctgttcataggtccgccgatgctgattctcttcgttcgtccgccggcgatactgattctgttcatcagtccgccgatgctgattctgttcatctgtccacctatactgattctgttcattcgtccgcctatactgattctctttgtccgtccgctgg

SEQ ID NO: 28478 - DNA, 910 bp, Setaria italica
  Peptide Sequence Number=SeqID_94452
ccactgcagcaaaccaataggcaattacaggatcaattttaccccaattgaatgtggaaatccattgcagaaaagaccaagcttcttttatgtgttaacaaactaaacttgctccacagattgctccagtcatttaagaatgtgtttatacattatgccaacaatagtttaaggaacccgcaaaaaaacaattagtttaaggatgaacggtcataattcatcagtgataagttatggcttggcacctgaactggtgattcagataagactagtgtcctacctaaacatacgaaatcaggtcctctgcagaaaaaaaaaccaaccccttgtccgctaggttacagcaccattctggttactccagagatgaaatgtgcagtgcaggatgcatataaaacctcagagaaatatctggctgtgccatcaagcgtatgcgtgcaggatgcgtacaattagtggaaggaacgcatatatttacctgccactcgttctttgcgtgagactggcggaggtagaaccggtggcagaggaggatcgcggtggcgactgtaatctgcggcaattggagcctggtgcagacgtcgcggatgaagcagcagtaggtggcccggagctcggcctccttggccgcgccgacgccgtcccgccgcgacggcgagccgcgctcgatctcctcccggctcaggtaccacgaccgggcccgcccgccgccgccctcccacgcgtcgccgtccatcgcgatccccgccgccgccaactcagaaacagagtgagaaaagaccggaattttccttttctagagtaaggggaattcgaaattgcggcgaggagaaggggagcggagggagggcgaagcttaagggccaaggctctccctcgacggcggttctaggcgggggttgttttggtt

SEQ ID NO: 28479 - DNA, 1503 bp, Setaria italica
  Peptide Sequence Number=SeqID_94453
taaaactaaattaactaaaaacttaacgttaaccaaaccaacaactttaaccaattactagtccgccgatgctgattctcttcgttcgtccgccggcgatactgattctgttcatcagtccgccgatgctgattctgttcatctgtccacctatactgattctgttcattcgtccgcctatactgattctctttgtccgtccgctggcgatactgattctcttcatcagtccaccgataccgattttcttcattacttgccgaactgctggtgagcttgtcaaacgaactgccaacagttacacaactagaagctttggtattgctactactaaaacttctcattgaagattgtgtatgcctcagagcaggagccggggttcttattttctgttgtctatctgtcagagttggagttggaatcggcttaatcgtctgtttatccatcagagctggagttggaggcggcttgatctgatgtttatccattggtgttggagttggaattggagttggtactggcttgttagcagaaaccatggaacatgggtctcttttcttaaataataactcggacatttgctgtataacagcttgcaactgctttggagcaacatcaaactcgttccaccacactttaccattctgggaaggaagtacgaagttgtgaaatttagctgcatggaagagcgatccagcagctatgaagtgtggtttgaactgcacaactaaagtagtcggaagcgtatcattaatgaaactcatagcacgctgtctcacttccttctggcagatgcccagattcttcagtgcaagctttagtggttcataaggatgctgtatattaaaatcaaacctaatagttgaaagcagcagtgtctccccaaccaaaatcaagtctttctgcttcgcaaaaacttcctcctggtggattctcttagcagcatcagggtttttccggtacattgtttcatatgccgcaatgaccacatgttttagtaagcaaggtgtgtcttcaatctttgaagcaagaaatatgcaaacggttgcaatagttgaacgagtattattaataagtgctgcttcaagttcgataaggttgctccaaaagaatcacaccttcgtccacgattgcaattttaggtgctccaggtaaattgcttagctaaaactcacatccagacccgttacttaagggggcattgctcaactccttggttacagttacaactcacatttctcttttaaagaaaaatacaacatggcaacttataccactcagcgaagagtacactgcttattgcatacccaggttaaatacgcacgcgtagacatatttgatatttcacatgaagtcaccttgaatctgcacgtgtatttttcttatgacacacactaccctcgattaaacccaacgaaggtacatagtcaggcaatgttagggtctgatagccacaaagaaaaacatttacactctcaaaatatctgccactcgttctttgcg

SEQ ID NO: 28480 - DNA, 235 bp, Setaria italica
  Peptide Sequence Number=SeqID_94454
aagaatgaaaacctcatcaaggtgccagtgttgattcaaatatgactctgagtggtgatcagcttgactcagagactgtccattaaatacgcgggacacagtgcccatgaggcaaaggcatgacattgtcatcagcaagatcgcagagatgagtaaatagaatggtttctgcgaataaaagtatcaaaaggaaacaagtcatccagaagaaaggaagccctagcagaaagcttaa

SEQ ID NO: 28481 - DNA, 1087 bp, Setaria italica
  Peptide Sequence Number=SeqID_94455
aaaaatgagctacactcgagactgttgtaagaaaatgagcaaaagaggaattgcattgatgggttgttgcagaagcaactgcagaagacaccagaacattgtgtatgttattccagtgaggaaaactgaattactgatgccacaagaatctgtatcctttacaggattagaatcagaggatgctggttttgcttctgtagaatatactggaaatatccaaggtgaagcaagaagagtggcagatattgaaacactagcaatggcataaaacaatctagctgttgatgttgtactatggttgattggtaatgtagtattgatctgatcttcccagatatgcagcagaaccaaaggtccgcaagaaatgtggctcaaccatactcctataagaacctttgaccttgctctgagtaacatgagtgaaactgaatacaatgccacaactgcaagaactgagatagtctgaagaaactttacaatagaagagtcagcttgggccagtaacttcgaaatgtcaggaaagtgaacccagttgatcccaccttgatgccaagctcttataactctcccagcaacaagaacaataaggactgtacataatttgtaaccatctcgtttgcctggggttaattccttatttccgtcagagctctctccttctgctctatgaactagtgttgaacttgatccttttagcattgactggactgtcttgatgagaaatattaaatacagagtagaagtgagaaagttccatgtatattgctcttcttccacaaaagaacttgagccaaggctgatgacataaagaaaattccagtaagaatgaaaacctcatcaaggtgccagtgttgattcaaatatgactctgagtggtgatcagcttgactcagagactgtccattaaatacgcgggacacagtgcccatgaggcaaaggcatgacattgtcatcagcaagatcgcagagatgagtaaatagaatggtttctgcgaatgctttgtgagacaaccactcactcgcatatcttaagaagccatagtagttgtccacagcaatcccaatgtaccgagcttcagcagacttg

SEQ ID NO: 28482 - DNA, 277 bp, Setaria italica
  Peptide Sequence Number=SeqID_94456
gtggtgaggagcgacagcgcgtccttggtggaggagatcggggtcgggagcggcggcggtggcgaggacgacgccgagggaaggaaggtggggagcgacccccggtacgccgagatccacgcggccctgttgggcgagagctcgaagaggttggacgcgagcgacgatataagctggagcagcgactgcgcgcgggggagcggcggcaggagcgggagcaacgacggcgaggtggttagggttgggccgcgccggtgcctgcggttgcgctagcggg

SEQ ID NO: 28483 - DNA, 1024 bp, Setaria italica
  Peptide Sequence Number=SeqID_94457
tccgcagcgtccgaggcgatgcaggagaagcgggtggccggggagtacaccgccgccaacgtccaggtcttagaagccctagatggagttcgcacaagacctggtatgtacattgggagcacaggaccacgtggattgcatcatctggtttatgaaatattggataatgctgtggatgaagctcaagcgggtcatgcctcgaagattaatgtagtccttcatgatgacaattcagttagtgtaacagacaatggccgtgggattcctacagacatacacccccagacgaagaaatcttgtgtggagactgtcttaacgttaatgcacgctggtggcaaatttggaggttcaaagagtggttacagtgtctctggagggctgcatggtgttggcctgtcagtggttaatgctttatcagaggcacttgaagttactgtttggcgtgatgggaaggaatacagacaaagctattctcgggggaaaccattgacgacactaaatagtatcacactgtctggtgaaacaagttctatatttaccaccaccatcagttttggcctgataaagatatatttaccaccaccatcagttttgacttcaatacaatctctagtcgcatccgagagcttgcctttctaaatcccgagctgacaataaccttgactaaagaagaaggacacacagaggttcaacataatgaatactgttatgctggtggccttgttgaatatgttaaatggttgaatactgataagaaacccctgcatgacccgattgcgtacagaaaggagttggatggtataacagtggatgtctcccttcaatggtgctctgattcctactctgatacagtgctaggatacgcaaacagtatccgtactattgacggtggtactcatattgaaggtctgaaggcttcattgactagaacaattaataaccttgcaaagaagtcgaagactattaaggataaagatattaccttgagtggggagcatgtaagagaaggaatgacatgtgtcta

SEQ ID NO: 28484 - DNA, 222 bp, Setaria italica
  Peptide Sequence Number=SeqID_94458
gccttggtcgggctcccgccggacccgcccgacgtcggcgggctcgccgccgcggtggcggccgcgaacatgtcgccgggcgagctcgccgcgacgatgtcgtcggcggtgggcagactggggtcgtggtggtagagctcggcccattgcgcgaagctcgagccggtgtcactcatcgccatggccgccggctggtcggagcgcgagctactccctgtgtcg

SEQ ID NO: 28485 - DNA, 1006 bp, Setaria italica
  Peptide Sequence Number=SeqID_94459
aggaagaatacagattaaacaagataatacaacacttgcatagtttaattttcaagtattacgtatcgttaatatcctagctgtcgcggagaacgtaaaccctctcgctgtaaatcctccaagccagctgaatgtccttctgtggcatggatggcgcacagctctgtcttccaacaaagtaagcaggtatgcttacacatagctctgaaaacgcagatcagtccgcactaattaatagaacaggaggttgagagaagtttctaggtagatttcggtatcgtggaattacatgactgagcacaatgacagtacgaagacaaatctcaccttgaaatcctgggcaatctcccctatgaaatgaaagcttcctaacgagcagtggtatagctgtggatcactacaagctaggcataaagtttataatttgctaactcagcatactttatttcaagtatgcgcaatagtaaaaataaaatgtattttgcttcacatattgaagaacaatagtcccagggcggtaatagtaaggcttagtcgtagagagtaacaacaaaaactggcataagaaaaatcaaattattacaaaccttggtggctatagctgctaccatggagccttttctccaatgaacttcggagcagtttacatacacatctgaagagcaggagcgggagggcaagctaaagaggcagcaaggttctctaccgcactctatcaaacagggagattcaactttcacaaaaccatatgctgagaggaaacaaaaagaagtgattccaacatgtgaagaatgacctcacaaagaggcttttataatgacctgacaaagagccaaaaaattatattggctaataaaacataacaaatggttagacaggtttatgagacattgcaattaagcaaacaaaaataattctagaaatcagagctgaatacgatcaataggagatctacaaaataattaaataacagacagtggatagacaagactccaaaaataatagg

SEQ ID NO: 28486 - DNA, 387 bp, Setaria italica
  Peptide Sequence Number=SeqID_94460
gccttgtgcaatctggacaacacaaacagcagcaaaatcgctccgaggtttggcctttggtaacctactcgtgggaagtctgtaacttggactgatgagttttccagagaaagtgcaagggcttggcagtgacttgagactgggcatccagtgcaaccaggctttgtcttgctacataatgttgctcctaattccatcattgcttggttgaagtcccctggtctcaaaggatcaaccagctgacctgcaagctccctatgatgaaaaaaaatgtacattgtgcaagttctgagattggtgtaaagcttcccaattcaaaattggattcacagcaaaaaaatgtaggttataggagaatcaggatcactgtatcattacctgtcctac

SEQ ID NO: 28487 - DNA, 754 bp, Setaria italica
  Peptide Sequence Number=SeqID_94461
ggcatctttggttgattacttgaggtcattttctcagatttcaatattgccaatccatgttgaattgcatctactagctctttcctatgcaaaagaagatcctgaactatttcaaaggcggtgtcaccagccaggtccaacagctcaccagctatctcgtcgcctgctttatttgatatgagcactctgcacaaggtcattgcaagttcatctcctgagagtgagccaccacttctagttatcaaatcgcattgatctttcagccacctcaaactcacagaacccctaacagcagttgaattacgagttgcagatgtgctccaaccatcatactgcccttttagaaatgtttcgctgcccaattcagcactttctaagggtatgtcaagagaaacatcaataaagaaacgagcaggtggcttgaaatcaaagtctgctccaaattcacgtctctcattttcatctacatcatctgctattctgtggataaattcatgggagcttgcccgtaggagggaaccaagcttctgagctaattgagctagcttccttaaaactgagtcttgtacagtgtagcccacaagcctctccaattcattccttttgacaaaggctctttgggcggcatcatactctgtgtcatcgccaccaaacagggcgaacacggtctgagcaacttcatggagttcttcagacactacttctccattcaacaactccaccaccgcccctataaactgcttatatgcttggc

SEQ ID NO: 28488 - DNA, 263 bp, Setaria italica
  Peptide Sequence Number=SeqID_94462
cctcatcgactccatcgccatcaagaacctcagccctccacgccgcgaaaagggtaacatgctgaggaacggagacttcgaggagggcccgttcatcttcccggacacggcgtggggcgcgctggtgccgccgatggacgaggacgacgtgtgcccgctgccggggtggatggtcatgtcggacacgaaggtggtcaagtacgtggacgcggcgcaccacgcggttccgcgcggcgcgcgcggcgtggagctggtggccggcg

SEQ ID NO: 28489 - DNA, 283 bp, Setaria italica
  Peptide Sequence Number=SeqID_94463
ttcccgccgacgaacaccggcccgctggcgcgcccacttcgccgcggcttcccttcgcccccggcggccgccgcgaagatgatcatggagaggagcgacaggagcgcgatggcgacgcagaacacgacgtcgccgccaccgacggccgcgccggcgtggggctcgaacaccatgccgccgccgcccatgtagaacgctctgccgctcactctctctttctctcgctgccttgccttggtctctctgagaatttttgctggtcgctactcggtgcggagcgcac

SEQ ID NO: 28490 - DNA, 209 bp, Setaria italica
  Peptide Sequence Number=SeqID_94464
gatggattatgcagcctgctttatcgctttgcgtcatggcttagcctccggcaccggaaagtggaactcgggaacggtgggcatctccggcttgggcggcagctcgacctccgggaacggcggcaggtgcacgtccgggaacgtgggcacctccggcttgggcggcagctcgaccttgggcagtgggggcagctcgtgctctggcaccg

SEQ ID NO: 28491 - DNA, 1391 bp, Setaria italica
  Peptide Sequence Number=SeqID_94465
ctgaaggatcaagtttttggttttgacactttttttgttgacaagtcaggagccttatgagggtggagtactgttcaaggggaatttgcgtggtaaacctgccaagagttacgagaagattacaaatcggctagagaacaaatttggtgatcaatataagctttttcttctcgtcaacccagaggatgagaagcccgttgcagtcgttatacccagacagacattacaacctgaaactacagctgtcccagaatggtttgctgctgcttcatttggattagttaccatcttcactctgctgcttcgaaatgtacctgttctacaggacaatttgctatcaacatttgacaaccttgaattgttaaaagatggactatctggtgccctggtaactggactaataataggggtccatgaaattgggcatatccttgctgccagggaaagtggaatcaagcttggagtgccatattttgttcctagctggcagataggatcttttggtgccattaccaggattatcaacattgtccgcaaccgtgaggacctattgaagctagcagccgctggaccactggcagggttctcccttggatttgttcttttgctgttgggcttcatcttacctccaagtgatggccttggcctcataatagatccaactgtctttcatgaatcatttcttgtcggtggcctcgcaaagcttcttcttggggatgctctgaaagaaggaacacagctatccataaacccacttgttttatgggcgtgggctggtctcctgatcaatgctatcaatagcatccctgctggagagcttgatggcggccgaatagcatttgccatgtggggaagaaagatatcgtctcggctcagcagcctcaccattggattgcttgggatcgcagcactcttcaatgatgtggccttctactgggtggtgctgatcttcttcctgcagaggggtccaatcgctcctctctccgaggaaatcacagaccctgagaataactacatcggcatcggcatcgctgttttgctctttgggctcctgatatgcctgccctacccattcccctttgacccgtcacaattaaccgatattgattttgacttctgaaaaaaaaaggatgaaaaaatagttgctactcaccggcttctcttcctccaattgtatctctgagatgtaaccctcggctctgaattccgttgtgccatctttgctcagttgctcttgtagtagcaaataaaagcaggagcttttgttgccgtagtttgccagttgtgttttagtaggttgatcagagtagaacagtataaaagtatgttattttggctgtaactgttatctctctagttatggcttatcaataatcgattcctgttcctag

SEQ ID NO: 28492 - DNA, 262 bp, Setaria italica
  Peptide Sequence Number=SeqID_94466
gcggcggtggcgatgggtgagaaggtgctcggatcggatggggtggatcggcgggcgggggtggggaaagcagtgacggggaagagtgaggcgtcacgatggaggtgacggctcaggcaggtgctgtctccgtgacgtcgtgctgccggcgagcggtggccaccgaggcttcctggtctaccgcaagatggttaaatggccctcctgtctaccgcaaggtggttaaatgatggaactacatagcctagcaagctcttcgcgg

SEQ ID NO: 28493 - DNA, 406 bp, Setaria italica
  Peptide Sequence Number=SeqID_94467
gctggaactatacttctataccacgatttgttgggggagatttgctaggtctagaaaactgaatggatcagcgaatcacatcagcccagtaggatcagtagtaagggctgtagctgtaccccaggaacctcctgaaccttggtaccttcccatatgatggatagaaaggatgccttcccctagattgcttcattcctggaatgttggttcttttcggacagaccttcaaaggacgaccatgaagttccgtttcattcaaaagaagagcattctgaacagcctcaacttcatcaaactccacataagcaaatcctttaggttgaccaaaactgtctgtcaagattgtcactctgttgatagttccacaaaactgaaaatgctgctgaacttcctctggcaagaaagc

SEQ ID NO: 28494 - DNA, 282 bp, Setaria italica
  Peptide Sequence Number=SeqID_94468
caaggcttggcgctggcgtggaaggaggagctgcacaccgacatcgtcgtgaaacccggcactggggccccaattccagcccacaaagccatcctggtgagtgggccttttagcatactgatgggcctccactgaagtttaaattaagcccacccaactcgtgctcgcgcaggccgcgaggtccgaggtgttgcgccacgtcctgtccggcgacgagcactgcaaggccgccgccggcgactccatctccctccccgagctctcccacgacgagctctccct

SEQ ID NO: 28495 - DNA, 304 bp, Setaria italica
  Peptide Sequence Number=SeqID_94469
ggaggaatcgagccaattgttctgatcactgatgcatacacaaactgtcacaattttgctgctatagtttctgcaatctgtgcatcctcgtgttaattagtcagcagtgagcacgagtaaggattgtttaggtgatgatacagatgggtaacaagtggtctagacatcacactgttttgctctataaactcgccgtttaccagctgcatcactagctcctgcttggtttgtgcctgtagagtctaaggtgatgctgtctttagattcttctcttgtcaggggatagattgtttgttcaaagtag

SEQ ID NO: 28496 - DNA, 260 bp, Setaria italica
  Peptide Sequence Number=SeqID_94470
ctgtatgcgcaaatcactgctgtctaggcttcctggtggatgatattcagaattttgttgatactggacatccgactggtatatagatggagttggtaaacctgaactggaatgcagcacatcttcccatgatggtgctatattcctgcctaagcctttttgtgttccttctggttgaatttgttttaattggtcgtcaccagcagcctcaatatttgtagcgaagcccaaagagactgagtcttttatttgaagtaaat

SEQ ID NO: 28497 - DNA, 272 bp, Setaria italica
  Peptide Sequence Number=SeqID_94471
cacgacggtgggtctgcacgacgacggcataagctgggggcgatggatggtggcgtttcggcgtggcggcggcgcggatgggcaaggatgcggatacgggatggaggagcacgagggagtgcggttgtggcacgagtggaggacgcgggtgcggcgcggaggagcaggagggcagtacgggtgcgggagggcaagtagtgcgggaggaccacttttagcacgccttgggaggggactaaaggaaagaaggggactaaagtttagcaccatgt

SEQ ID NO: 28498 - DNA, 470 bp, Setaria italica
  Peptide Sequence Number=SeqID_94472
ccgaggtgttgcgccacgtcctgtccggcgacgagcactgcaaggccgccgccggcgactccatctccctccccgagctctcccacgacgagctctccctcctcctcgccttcctctacactggcgccctcgagcaggacctgccggagcgccacctgcacgcgctgctcgtggcggctgacaagtatgacgtcccgttcctgcggcgggcctgcgaggcgcggctggcggcggccgtggagccccggaacgtgctgcggacgctggaggtggcggacctgagctcgagcgccgcgctcagggagcgcgccatggacaccgtggtggagcacgcggagcaggtggtgttctcggcagagtacgaggagttcgccgtcaggaacgcggggctgtgcgtggagatcacccgggcgctgctggccagcatgtcggcgacgacaactaataaagaaccgtgcatagaggatgta

SEQ ID NO: 28499 - DNA, 254 bp, Setaria italica
  Peptide Sequence Number=SeqID_94473
aaaacaagatttgttattgctgctgcaggaagagagattttggattgggtttgaaagcaacggcgaaaaacatcaaagggattcttgacgggctcgccgagcattctaagctggagtgtgcaggtgaagtcctgccctgcttatttctctatttaactgcttcaatcgtcccggctctgctttgttctgaatgatgcaaagcattgtgcttccagtaaaattgattattggctgttacaaaaaaaaaaaaaaaa

SEQ ID NO: 28500 - DNA, 292 bp, Setaria italica
  Peptide Sequence Number=SeqID_94474
tcctcctggcgccggcgcccaagccggagccgagcccaagcgagtgcttaggtggggggaggaacgaggacacgggccccgagccagcagacacgggcggcaagcgcgcctcggcggcgctggcgcggcgcttcttggcgtcgtcctcctcgtcgtcggagctgtcgcccgtgggctgccggatcggctgcgggcggtactggacgacgcgcttaggttttccggtggaggacttcggggccgggattgaggagaaggtcgggacggcggcggggacgggggcgggggtgga

SEQ ID NO: 28501 - DNA, 439 bp, Setaria italica
  Peptide Sequence Number=SeqID_94475
ctgatggttttccaacttcctctagtgatgcctatgaatcgaaggaagtccaagatgattctatcaaaatggaagctttagaagtaaatgtctgtgcagcttcacagtctttgcttgggttaagtgaagggatccaagatgattcttcttgtattgattctggtaaggttacttgtggaacaccacctgctatcctgaaaaaggtgaaagaagataagccactgattgtcaacagatcccataagggccaaatgagcctaggagacacacagcaaaaggtgcctgcaccagtgagcagatcaagcaccagcaagtacttgagaatggaataaaaccattgttgatactacgacccccattgaatcagtaaggttgctgcatcaaagtttggtggtagcatcaactggaaaactcgcagatcacaaacagcacaggatac

SEQ ID NO: 28502 - DNA, 249 bp, Setaria italica
  Peptide Sequence Number=SeqID_94476
gtcttgtagtgggcctatgttgggctagaacgggacaactaagaaggccaccaaataggaggaatggtgctcacagcccaggaacttttcaaagccgtccgtcctctgtttcgcggtcgttttgctctcgaacgtttggttcttctccaaaaaagcgatgaataagcagcacttgatccttctgaaattaccattgcatagagattattaccgttgaaaacatcgttaagttcccatttcttggcaaaa

SEQ ID NO: 28503 - DNA, 365 bp, Setaria italica
  Peptide Sequence Number=SeqID_94477
cccgcgcgacgtcggggggcagcgacgccacgctgccgcccgcggacttcgccgtctccaggaggcctgtgaagtcccgcatggtcgccgccgcgccgtcggcctggctcaccacgtagtccagcgtcgccgtcgtgctgccgtggagcttgccctgcccgtggtacagcacggcgcagccgattatggctgatgctgtgaagacgatcaggagcacgagcgagagcgcgaacacccggcgggagtaggagtagttgctattgccgccgccgcggcagcaacggcagcagcaggagacgagcgcggccgcagcgacggcgacgaaccagagcgcggcgatcacgaacaccggcgcggcgctgaaa

SEQ ID NO: 28504 - DNA, 1168 bp, Setaria italica
  Peptide Sequence Number=SeqID_94478
tggtacgcagcctcggcgtgggctcgcgcgagccggagacggagggctgggagcacgtgatctccaaggggaacgacgatgtctcctacagggtctggtgcgacaagcccacggctggtcctcctaaatatctaagtattacaacatatgagagatgctcaacagagcagttgagggacttctatatggataatgagtacagaatggagtgggataagactgtcacaaagcatgagcagctgcagtatgatgagaacagtggggtggaggtagggcgaacgattaagaagtttccacttctgacaccaagagagtacatattggcatggcgagtctgggaagcaaatgacaagtctttctattgttttatcaaggaatgtgaacatcctcttgctgtacggcagaaaaagtttgttagagtgcgtcttctaagatcaggatggtgtatcaggaaaatccctggcagggatgcatgccaaatcacagtgctgcatcatgaggataatggaatgaacatagagatggcaaagctagccttttccaagggcatctggaactacatatgtaaaatgaacaatgctctacgtcgctatcctcagcatcgtagtccatcagtatcgatcctgaccatgcaaagacttacgaagaagtttccccaggacttggaggctgccatgaatgcaagtcttccagcttcccagactacagcagcaactgttgttccttcaacacggacatcaccatgcaagctaccaggtaagaagtcttctcggcaaatgatcgcgagcgggcttctgctggttggaagcatcgtttgcctatctcgaggccgatccaaccttggtgctcagcttgcgatggccttgttcctaaagaaggccttcaagcaagagagagaatcaggttcatcaacatcaagggggaaaacaaacgtgactagatccaggcggtagcagcagtattggtttaagccatggagactacctattattagtattaacgtgaattagaaaaaatggctacactctgcttgaatggatactgattgtaaagagtttttcctgcacgaaattatgtaaataatcgttttgaaataactacaaatatgcacacggtaaaattttgttatttcatcgagttgatgcgaatatgtttcctggaataaaaa

SEQ ID NO: 28505 - DNA, 316 bp, Setaria italica
  misc_feature (16)..(16): n is a, c, g, or t
  Peptide Sequence Number=SeqID_94479
actccttggtgcaggngccccgcctccccctgccggcgatgggatgggagtggacgccgccaccgcagcggcagatcaggcaacggaacgggaggtggagagcgggcgcctcagtgtattgggcggggtcgggggagcgattgggcgcggcgggggatttggggagcgggagagcgccgcgcggggcgagggagcgccggagccgcggtggtcaggggagtggaaaaggttgtggaggattttgggcacggacccgggagaggatggtggggaaggggacgcgagattttgggcacgacgtcgatgagagccgggg

SEQ ID NO: 28506 - DNA, 443 bp, Setaria italica
  Peptide Sequence Number=SeqID_94480
aaaggtatcaaacagaaacggagaaaacacaggatcttagtcctgggagacttgagtgatcctaaaggctttggagaaggaagtcctactgaaggctacgaatttccagtggtaagcttcagagatatcatagctgcgacagataacttccatgaatcatgtatgattggaaaggaggttttggaaagtttacaaggcaacttagatgggcaagaagtggccatcaaaaggctcagcagggattctgagcaaggaatagtggaattcagaaatgaagtcgttctaattgccaaactacaacatagaaatttggttaaatttctcggttgctccatcgagggagatgagaagctcctgatcttcgagcacatgcctaacaaaagcttagatgctctacttttcagtgctacaagaaaacacgactagattggccaacaacggga

SEQ ID NO: 28507 - DNA, 521 bp, Setaria italica
  Peptide Sequence Number=SeqID_94481
ttagaacttagccgtttttagtatgttctgctgtgctgaaaagttgaaggacggacagtccagccctaagaggcgtacggtccgccactagttttttattcttgtgaccctaggttgcaaaccctcagttttagaaagagtagaaatatgatttctcttgtgttactaattaaatctatttagttttgtgattttagttgaaaccgcctgttcaccccctctactcggtagggttcctagatcctacaaagagccagctaggttgctgattagttccgaaacatagcataaatgggtccgttaataatttgaagtggtaacgcaataggttagtttttttttttggtaagaataggactaatggtaaatgttactttcataagttgattttatatgggcaatcaaatacccttgtatatacatagttacatatgcagcagtgtactaccattgctctgtttcttctcgaatcttctatttctccgtggaactagtgaacgctgtctccatgaattcttctt

SEQ ID NO: 28508 - DNA, 2827 bp, Setaria italica
  Peptide Sequence Number=SeqID_94482
taacctaagtatttcgtacgtaaggtgaaggatggccttcagaaaataggcaaccatttgacaaaaccaaaacaatacagcagaacaaagaactgaagaaatgttgcttctctgtgatcatcttctactggcaaatgctgccaatgcgttcgcatgagctggtggcagagcgctcagtataggctgcatttgctggccatagacagatatcaaatgagaaacagccttgccgatatttgttttcacttcatcgctctcgtctggggataccaccacttgggcaaagacatgtatcacatcgggcacaagaggaaggatctggggatgtgatgataataataaactgcagatgcaactatagacaggcatcgattcttcatgatcttcttttagtggcaaagctttgataaacactggaagaacctgattgagaggtattgactgaggctgcaccattaccatcctagcaatagcaccagcagcattatctcttacggcatcatctgattctgagttactaaatagattatgcagagaacgaagtatatccccatagtactttagtgctgcagcacccccattcttgcatatctcaccaacacaaaaagcagcatttctcctattagtagcatcagatgatgcaagctctttcaacaccaaaggcattatcttatcaacataagcagaaattggagcacccatttcctgagcaacctcagctaaggttgcaacaaccatagtcttatcttggggaggatggggagatttagcaaatttcatcaatggatcaaacaattttgcaaagataggatcaaaataagatcccatcacttttgcaaaagcaggcaatagatctgaaactgcatccatgaggacttcgtcatgatcaatgtcaccatcatcctcaccatctgactctacttgctgacagcttgattcttgacgcaaaagaaccagtgttgcctcagcaaaccttagcatgtaaggttcaattgcagcgaaaccacagtccttcacgatgtccgctacactcatgcaagcttgtgcaactacctctttgtcatcatcctctgtcatggtcttgatgtagatgttcagaacagtatcaaggacatccttctgtttctctagtacatcagcatgtgtaggtggtattgccctaactgcagttagaatatgtttcaaagaaataactgcctggagcctcagatcttcgtggaaatacccactgtgcctgattaaaatcttcagcgactcctccagatacggagcataggcactcttcgtgtgtagtgcaaaaaaaccaatagcctgtgttgcagcagctttctcatctaataccccagtcctcacgctgatatttctaactcttggctcatcgttatcctcatcagaagaaacaccgccaaatccattttcaacactatcagcatcatcaatgtccacagcagaaccatcatccaagttgcacgaagaaaatacgagaggtacaacgtgaggaagatactgtgtaaaattatcacccaaaatctcagcaacattgctaaaaaaaccatgagtatattctctaagttcactgtaatccaatccaaaaccagaaatagcagcctcaataaaaggaggcagtatcgcttcaactcttgctctgccaactgccattgctactatcccaacaacctcagtagccctagctcttgcacacaaatcttcatcattagtgagcaccataaaacctttcatcatttcaaggaccttttctgcatacggggtaaaggcctgctctgcagcagcggccaccgagccaattgcagacatgcatgtctcttgcaggttccggggactgctctgcaaagacataaccaatctgcatatcaagggatctagatatggcaggatatcttcacccatgtcctcacaaaatgctgcaagggcataatatgatttctccttaacttcatctgatgggtcttcaagagcatttaggatgcatggaagtacgtttgcataatgagataaaatttctggctgcaagtgttcagcaaactgaccaagagcaaaagatgcagcacctctaaccatttgctcttgatcctttaaagcttccaagacaattttcagacaatcttccaacttatctttcagatgctcgcaacaaccctctgagataacacccagtgatgtcacagcagcctcgcgatacttcgggttagtgtgatgaaagctcacagaagcaaactcaagaactggtgcaagaacgtgtctcggtaagttgatagccattgtatctataacttcggcagcggaacgatctgctgctagatcagaatcttcatcttcattagctgtttctgtaagcaaagggcacataacttgcaggataggtacaaccaacttgtgcttcttcaagaaagatgctttaaactttgcgagccaagaaactatctggatagcctgctgccttatatttatttccagatcctggtttgcagacacttccagcgagaattgtacaattgacctcacagagtccccaaggagtggtgcaggagattcaattagttcatcaaaaatttcaaacgcgatggaagcaacatcttcctcaccattagcaagacattgccttgatacattcaaaatactgggaacaaagtcccgaaacatttttacaatgtcacctccatcattgacatattctatgaaagatccgacagcctttagtgctgcaattctgactcgagagctagtctcgtcttgcagacatttcagcaaaacaggttgcaaatcattcagatgagactgaaaagtagccccaatggtttcggtaagg

SEQ ID NO: 28509 - DNA, 455 bp, Setaria italica
  Peptide Sequence Number=SeqID_94483
agaaagaaagtaactactgagttcctatatatcgataccacttgtcatatttttcaactgaaagatgggctgctagcaggtatcatactttgcttgatctggaatgtgaggagttaggacatatgtgttcagtaaacttacataaatgtataataatatctatttatgcttttaaatttcttttaaaaaaatacttcaatgttccattttgccggagaaatggtataaacattagagttgttagtgaaaggaacgtttgttcttgaaagaaagggaaaaaaagagtgctggtaatatctgtgagaataagtctaaatttccagggtgtgaaaatcagtgaaaaaaaaatcaaataaaaagggaaagcgttagaggcaaatatctagtgaacaacaatttgacactgatcactaactatttgtatgtccacatatttgaaatgcagttgagtttgg

SEQ ID NO: 28510 - DNA, 1150 bp, Setaria italica
  Peptide Sequence Number=SeqID_94484
cctccgccgcctgtggtgacgatttacttcgggcttggcacagccctgtccatctacggctgcagcaagttcgccgatgagaatgtcgccgctgcgagggcagacatggaacttggcaccacttacattacccatgccgcggctgctaaaccgagctttgacgaacacgatggcactagggagattgctggattctggggttacctgctccagatcatctatcaggcaaatgcgggtgcagtgatgctgacagactgtgtgttctggttcatcattttcccattcctcacagtcaaggactacaatctcaacttcttgttgataggaatgcattcggtgaatgctgttttcctgcttggtgaggcagccctgaacagcttgagcttcccttggttccggatcgcatacttcttcctttggacggcgctttacgtcattttccaatggattgtccatgcagcaactccaatttggtggccttacccattccttgacctgtcatctaatctggcacctttgtggtacctggcggtcgcagtgatgcaacttccatgctacgtggtgttcaggctggtgatcaagctgaaacaccacctgctcgccaagtggtttccaggctcgttcgtaagactaagaggctactagggcacaagctctgccgtcttcgtcttcgtcttcgactccattgctagaaggcagtccattcagggaaaaaccgcaatggtgaaattaagcaaagcttagagaataatggcggatcgggttgtttgggcgattcttatgcaggtgccctctccaaggaaagaatagggagtggcagacgcatgcgttttacagtactttacagcgtataggttgatggtgatgtacatgggatggaagcagcatagtttttaagagtttttgctgtggtgggaagtgaacagagaaccggggatggggggtaaggtaaagaatggttgtgcataggttaactgattggtgaaatggagatgatactgttcgctaacatcttttgtagagctgtctgtctggctgccatgtacacagtgtgtggctgtgcaagtgtgcgtgtgtgtggcgccactacctggctgggctctcgtcgtgtgcatgttgcatgtgtgtaactgtaggaactgtacagcat

SEQ ID NO: 28511 - DNA, 536 bp, Setaria italica
  Peptide Sequence Number=SeqID_94485
ccgctttttcccgtttcgcggaacaggccaccggttctcccgttcgatcgaaagaagatacagagtggaggaggaaggaaagccttcgccccttcaccggagatgctgccgtcggcgactgggtacaccgacggcgacgtctactcggcgcgcgagatgttccatcccttccacatctgacttcttgcggcggtggctcgcagggagtggttggattggatcgagctgcagctgctagatcggcagccttgttgaggtgagcgggcgtgtgggaggcaaatccggaaaaaggatgagctttggctccgcgagagttgatgagcatggaggcgacgtcgaggaggcgcggtgcatgccggcggaggtgagctgggagatgctcgacaagtcgcgctttttcgtactcggcgccgcgctcttctccggcgtctccgcggcgctctacccggccgtcgtcctcaagacgcacctccaggtcgcgccgccgccgcaggccgcggcctcggctgccgcggcggcgattctccggcgcgatg

SEQ ID NO: 28512 - DNA, 341 bp, Setaria italica
  Peptide Sequence Number=SeqID_94486
gcagcggccacccgtccccggccgccgcgcccaagatggagctcggccacagcgccaccgccgacacgcccgccggcgccgcgggcggcagcttcggtagcctgctctgcggcgccgtcgtcgacgagcagccgcccttctggccgtggaccgacggccaccacagcttccagtgatcgcacatcgtcctccgcgaggattaatgagacaatgcatgtgacgaatgatcaacggaaactaagagtaatcgatcagtgtggctctccatttcttggcatcgatcaatgctagtaggaggagagatcaccaatgccacgatgatgagtcgttgaacaatatgc

SEQ ID NO: 28513 - DNA, 655 bp, Setaria italica
  Peptide Sequence Number=SeqID_94487
tgtcgggtcggtctagtctttcggttagtccttgtcttcttgtcggtcgtccgttcgttcgtacgtagtctagtccgtccctttcttggtccgggccgtggaccgacggccaccacagcttccagtgatcgcacatcgtcctccgcgaggattaatgagacaatgcatgtgacgaatgatcaacggaaactaagagtaatcgatcagtgtggctctccatttcttggcatcgatcaatgctagtaggaggagagatcaccaatgccacgatgatgagtcgttgaacaatatgcaaattgatgaaacaaagtgatgggatgatccagtttgagtttaagatgaggaggaatgattggagtacacgtcggatggatcatgtgtcagtctaggtagattttggatttgagtagtaaccttttctttttcctttctcttattatttaatttttccttgatcactatttttctgtttaatatttatatataggtgattacatttgtgaggcagtggtgatattgttgtgtataggattgtggtaccttgtgagtaccaagaagtttcgaacttgaaatcatgcaatttttctctcctttttttttcccccttgtgtggatctactgtgaaatggacattaatacatatttaattgatact

SEQ ID NO: 28514 - DNA, 654 bp, Setaria italica
  Peptide Sequence Number=SeqID_94488
ctcaggtcagctgaatcggcggccagttgcagcgatggggatagtggcttccatgtgcatggaacccatcaagcgccggcgagtggagaaggacctcgacgacaaggtggcggcggcgctccgggagcgggccaggtcccggcagcggacgttccggtcggtgaacagcatcaccatgcgcctgccccgcttcaaggacggcctccgggacatcaaggacgtcttcgaccagtacgacgagaactccgacggcactatcgacaacgaggagctgcggcgctgcctgggcaagctccaggtccagatgtccgacgaggaggccgacgacgtgcaccgctactgcgacatcgaccgccggaacggcatccagttccaggagttcgtcgtcctcctctgcctcatgtacctgctcttcggccccgacgtcacgcgacgcgtctccgagttcgagtcggcgaagctcaactacgtcttcgacgagctcatcgacgctttcctcttcttcgacaaggacggcgacggcaagatgaagaggaaagacgtcacccagaggatgaacgaggagtcgcaccaggagaggacacccagccacatcacggcgcagctattcagtaccactctctactccagctgccattcatttcatccctctct

SEQ ID NO: 28515 - DNA, 414 bp, Setaria italica
  Peptide Sequence Number=SeqID_94489
cttgtagtagcacgtgaacttgaggtagttcatcaggtaccgggtcagcgggtgcaccgcgccgccggggaccggctgctttccggcgtccgcgcggatcgagctctccaggtcgcagaagatggccgccgccgactcgcccaggcgggcgcgcacggaggccagctcgtacttcaggtcggccatcatggcggctgccgcgctgccgccgtcgttgtctccggcggaggcctcggcgacgaacgcgtccacgacgggggccacgtcgcggatggcctcgtacatgtcgagcaccttgaagagcttctccgcggcgcgcttcatcaggacgacggcctccgtgaagctgagcatgtgcagcatggcgccgcgcgcgaggtcggcgaagatgctgcgggcgaggccgtcggcgct

SEQ ID NO: 28516 - DNA, 733 bp, Setaria italica
  Peptide Sequence Number=SeqID_94490
tgccactagagctgaatgtcacacttattctctcaattatgtcaacaaaaatttacctccctcttcttccccccaggctcattagcaacaacagattttgtaacagcagttccaggcatacgctttgtgccttgcatgaacatagcagcaggaccaagtggtggtagtcgtccagcatcaaccatgataggttcattgaatatgtatgacttcagaacctcagtagaggttgtttgtgggtatccaaagtcaatgacttcatcgagcaattcatacaccaaaataaaattcttccgcaatgaatcttcattcagaacaccaagataatcttttgtaacacatgcaatcctttgcaaaagttccaagagaagggatggagaaacattgaccattgtagttactacaaaaaatagtccggcgaccttgacgtgaatatagttaaccccgtcaacattgaagactgggggcgcctcctctgcctcgtcatcgttccagaacttcaccttccggaagaagatctcagcgctgcccttgggaacctcgccgcgatagtcgcggaagacgatgtggtcgccgcgctgcgacaggacgaagaactgcgagatcatccctccccgccgccgcttcccgctaccactcttctcgttggggccgcgtgccctgcggctgtaacgtgacgcgacggcgacgcgaggaacagagggagtagaaggagagcaaggcgaggaggaag

SEQ ID NO: 28517 - DNA, 729 bp, Setaria italica
  Peptide Sequence Number=SeqID_94491
acacatggttatggatatccaatttaaatgttaatagccagactgcatgcatcacagtgaccccccagtggtactcgttttttaaggcatggttactaaacctgttgaataagaagtgaacttgaagactacagtgatacaattaacttgcagttgcattcagtatataatgaaagaatcagagtcaggatttgtgaatgataggttctgtaagctagacacggtgctccatttcaattgttttctgaaaggtgaatacttatctagctttgcatgagttgatgagtattcacaattatattagattattagtcctttcttgacaattctgcaacactccgtgcttattttccttatactatttattaactttgtatgaaagcattataaagtagaaccaatgcactgatacggcaaagtatgctgccttgtggcttgatctagtttactcacaactcttgcagaaagagaagaagaatttgcaggatttggcaggtgtttatgtttacaatgttggagacagagatccacttgataggcccactgcaaaactgattaaagatttttcttgcatagaagattctttcatgagcaacattggaagtcgatatggaataactgctggatctcgggagaacaccctttataatgctctttgggttgcacaagcactgctgcgcaaaggatctgtgaagactgtcagtaaacgaatgcttatattcaccaatg

SEQ ID NO: 28518 - DNA, 308 bp, Setaria italica
  Peptide Sequence Number=SeqID_94492
tagaaagaaagattggagatgaagtcatctacagaactgatctacacatccatgatgaatctctgtagttgatgatcctttgaaatttggaggcatatattgtcttgcaaattgcaaatgattatgaattatgcctgatgaacatcaatatcactgatactataagaaacctatttgtttcattaggtggccatggccactagatcttgttctgatgtttagatctaggaccataaacactacctgcaccgctgctcgtacgatttggttagaaaatgtgatataaatttcatctaatactgcattat

SEQ ID NO: 28519 - DNA, 272 bp, Setaria italica
  Peptide Sequence Number=SeqID_94493
ttttctggcaaactatgtgcatagtccaaggctccaagcagatgagcaaggcaggtcaacctgctcaacctgtcccttgacctgccacaacagttacaccagactgtgctggtggtggcaattcatcagtcacaacgtgttctctgaacctgtactctcttctttcgaaaggaatcatcggagtacgcatagctgggctgtacagataaaatttactcgaacaaatacggtgactttcgaatcgaatcatcggagtacgcatagctgggctg

SEQ ID NO: 28520 - DNA, 363 bp, Setaria italica
  Peptide Sequence Number=SeqID_94494
gggctatatagagtgatcgacagagaggagaggcgggaggggactggacactggacagagttgggtctaggagacgagggctctgttagttttgtccgttggctgcagggcacgagccgagcactacaaaactagccctcccccctgtggcgggtgaccggccactggtttgaggaagctccaaatcgcgagtcccgacgcggcggcggcgccaagacctgcaacctgcccgtggcggctctttgtggccgcgcgtgggaggaggggcgaggacgcccgcacgaggccacgagcgtgtgtgtagtgtagctacgcgaaggcgagaggagcaccggcgcacacacggccgcagctgcatgcacc

SEQ ID NO: 28521 - DNA, 281 bp, Setaria italica
  Peptide Sequence Number=SeqID_94495
ccgcacggcgcggcgcgcaccgctggcgtagggccgcagctcggcgtcgtagaaggacgcgagctcccggagcacggcgcacgcccgcggcaggtggcgcgcgagcggcagcgcgaggttgaacggccacagcaggaacgtgaactggaacgcctgcaggaacccgcccgccacggccggcacggcgaggagcaacacgtgaaccgccatggatcacgatcggcctctctcttcttctttctttttttttctgagctctgtgatcgaccgctccactgctg

SEQ ID NO: 28522 - DNA, 444 bp, Setaria italica
  Peptide Sequence Number=SeqID_94496
tgtatcactcaaccccacaaagtccacacggactggtaattctacaaaggcttcctaggatgcaagttaccatgggtcgaagacatggaaccgcttgatggctcttttgatccatattttattgctgatgcagtttcacttgatatggaagcccatactttctcttcaacgatacatgcagtggaaagatctccggaggctctaagcagatccatcttgacctgatattctctactctggggaagaaccccagaatactgatccccatgacttggaaaaaatgaaagcaattcttcacacagtgttaaacatgaatctttttgtaacacttcctcgcaaagttgaaacaggttacgtccaagtaagccatagttcatgcaagccttggctatgtcagctgcaagatctgactgatgcttccttgcatccatgcaaagctgactg

SEQ ID NO: 28523 - DNA, 414 bp, Setaria italica
  Peptide Sequence Number=SeqID_94497
ggcagtgaaggaggtggtgatagaggcggagaaggaagcgagcgaggtcgccggggagggcctgcagctggtcgccggcgcggaactcgccggggatgggctggtccaggccgcggtggtcgccggcgccgaggcgctcggggtcgtcgtgggcctgtccgtggtcaacggtatcctaaagccggaagcttagaataatgtgtgtgttgggccttgtagtttcggcctatcaagtgtttgggcttagtgtttttcagtgccgctcttgtaattttgttgatgattttacggtgtactataaattattatgatggttattagtgcagatgccagtagatgaaaccttgcacccattattcctgcatttgccccatctccatctagatcttagagcgtttcatctactgccatctt

SEQ ID NO: 28524 - DNA, 508 bp, Setaria italica
  Peptide Sequence Number=SeqID_94498
ctccacaaccagacgtcctgcaggaacaggagcccgatggagaaggcggcggcgatcagcggcgtgggcaccttgtccaccgcgtcgccgaccctcggcacctgcctgccagcgctcttggccgtcacggcgaacagcggcgcggccatgatcgcgaagccggccttgttcacgagcaccagccgcaggtccttctccacccacttgaggatcatctcctggaactccgtgaacgctatcccttccttggcgcggtactcctccactttttcaccgatgatcttcagacagggagggtccttgtgagggctgcctaactgcttgttgatcgaattgtaaaccatcagggtggcgacgtggagggagtcgatgtgcaggagctccgtcttctcgtccgccaggtcgtcgaagaccttcttgcagatcctctccacatccgacttgccgcgtgctctgttccaggcgcggccgaagaagttgggcttcgacgacgatgacattgtttgcg

SEQ ID NO: 28525 - DNA, 373 bp, Setaria italica
  Peptide Sequence Number=SeqID_94499
cgatagcatccagtaaatttgattcccaactaggacgccaggctgatgtagagacaagcgtggaatagctgttgagcagacattaccccattcacgagactccgattcatataggcaggcggtcgcaaccgagccgtggagctcagcatgatgcaccagtaccaatttgaaggggatcaggcggcaatcaccgtgcacgtggccgtcgccggaggagctcagcacggcgcctttgtagacgtgtccttggttgaaccccggcgggaaaggcacgcggcgccgggtgccggtgacggggttccacacgacggcctcgagctgcgcgcggtcgacgaggagggcgagaccgtggcggcatccgaaggaaaagaac

SEQ ID NO: 28526 - DNA, 280 bp, Setaria italica
  Peptide Sequence Number=SeqID_94500
ctattgatggtctattgtaagttgtacaaaagcaaacagatgagaagatagaacactagacttacacggtagtgaactttaaccctgtcacctttgtgagcttgaatgctgcaggtctctggcttgaacttgacgccgatctggagctccgtcacgtccccggatttcttggccacggcgacgagtagcagcgcggcggcggcgactagaaggcagagaaggagctgcggcttcgttatggctagtggtctttgttgcggagggggagagaggaattcgc

SEQ ID NO: 28527 - DNA, 843 bp, Setaria italica
  Peptide Sequence Number=SeqID_94501
tttttaagtgtaaagaaaaagaggatccttttcgattttccaaacaggtcataacagataaggagtttgctccaggacgactagattgttcttatgggatagcaagcgaaattaagtcacagggaacaaatgtttcgtctgtctaagggatctcggtatgcattacattttgccgagctctgggtaaaatggtttatgcattcatctattcgatttgataatcacttgttctggaagccgatcctactctcctggctatctaaagctcactgtcatcagatttgctggctggctccccgttgacagcaacaagctccgtgtcaaatatgagagttgctccaccaggaatagttggcggtgatccttgaggcccatagccaagctttgaagggatcttcagcttccgcttctcaccaacgcacattcccaggagaccctgatcccatcctttgatcacttgaccagagcccaactcaaattcaattgggtcacccctttcatagctagaatcaaaaactgtcccatcagtaagttttccacggtagtgaactttaaccctgtcacctttgtgagcttgaatgctgcaggtctctggcttgaacttgacgccgatctggagctccgtcacgtccccggatttcttggccacggcgacgagtagcagcgcggcggcggcgactagaaggcagagaaggagctgcggcttcgccatggcttgtgcgaggggggagagaggaattcgccgatctcggggagcagacggccagatgggtgctgtgcgttatatcaggggctcagtgcggcagtaccgcaagtcgcaggatcgcaggagtgagtgtctga

SEQ ID NO: 28528 - DNA, 479 bp, Setaria italica
  misc_feature (421)..(421): n is a, c, g, or t
  Peptide Sequence Number=SeqID_94502
ttttttactagttttatttcagcgatcgatcgatcgagcggtgctgctgcttgccaaaagagcggggaagaaacaaaagaaattgtagttaacggacggcggctgggctgcaggcggagctgccggcaccggcgctcgaccgtcggcggtttctacgcacgcgccccaaaaggaagaagactacggatacctcgccggcgaggggctaaccaaacatttttcgccgggatccagcacagtacaccgcatgatcgaacgcttagctagccgtctagctaaatctcagacaaaaaggttcagcagctcgggctccctcccgccgccgccgccgctcgtcgtcgtcacggactcctccgaggtcatcgacggggtgccgggccgcctcggcgccgctccccgggcgccggcggggacccggggntgagacacagcccgaggtcgcacgacggctccggtgcgccgccggccaccgcgacggg

SEQ ID NO: 28529 - DNA, 245 bp, Setaria italica
  Peptide Sequence Number=SeqID_94503
tcgccggtgatcgcccggatgctcgtcaccgggctgggcatccagtgcttccagcagatcaccggcatcgacgcgctggtgtactacagcccgaccatattccgggacgccgggatcaccaccgagagccagctcctagccgccacgatcgccgtcgggttcttcaagacggcgttcatcgcgctcgccatcgtgctcatcgaccgcgtcggccggaaaccgctgctctacgtcagcacggccgg

SEQ ID NO: 28530 - DNA, 903 bp, Setaria italica
  Peptide Sequence Number=SeqID_94504
gccttggccgcacggaccagcgccgcatcgtcgtcgcgggcatcagcatcgccaagatggtgcaggcatcggcgccagggttcgtgttcgccatcccgagggttgtccaagaaggtgcgctgaatattcaaggacagaggagcaaaaaaaggaaatccccttgtgcgatcatgccaccctttccatcgagcagaatgatgttgtcaccaagagcatgtttcaggtccccttcagtgaggcaggagacatcaccatttgctatatttcatactccacttgatcaaggccaaagagtgacgaatgaaattgatttaaacttcgcaccggaagactacagagatgattcaattggtcaagagaatggggatgatccagttggtcaagcgaatggtacttgtgatgatacacttggtcaagagaatggtggtggggatgatccagttggtcaagaggatggtacgggggatgatccacttagtgaggggaatgctcgcaagaatttactggtgcctaatgagaaacggagagctatatttgaagctttgttaggaagggccagaagtggaaatctgaagggaagtgagacaaaagaagtatcagtacaattctcagtacctattcgaacagtacaacgtatttggaaaaaaggcaaaggctgtctagaccaaggtcttggagttgatgttagcactcgaaaaaacagatgtggccgtaagaagaaagtggtggatgtttcaaagcttcgagatattctgttgtcaagccgtacaacaatagatgatgttgctaaacacttgggtgtgagtaaagccaaggttcgaagaatgaaaaatgaaggtgtgataaagcgtgtctcaaacacgataaagccatacttgacagacaacaacaataaggatcgta

SEQ ID NO: 28531 - DNA, 1674 bp, Setaria italica
  Peptide Sequence Number=SeqID_94505
gggggcgggggggtgaacatgtagggctcatggcttgtttcaatatttcaaataatcagctgcaacaccatctgggaccttaagaggcaaaatctgggaaatcaaattgcaaggttcagttttgaataggaaacttgctatggcctcatcctttttgttttctgtggtgtcatttcattaaagaagaaaggagtacccagatgcacaacaccacacatacacacaccaggaacattccagttcataggtaggccttctcgaatggcccaacaaacttatttcttaaattcttattatagtagtttattgttgattttttatggtacagaacaaaaaaaagaacttgttcttatttcagtcacaaactaagctttttatggttgatgccaagattttgacaacaattttaagttgacagcgaaatcatagactttttgctgctgtgcacaaacttcagaactttaatagcaaaatatgttgagattctatacacatgacctaataacacagagcattcttgcacatgctaaaatgcaaatatacaggaaaaaaaatttgtgctcactcatctgtcttttgaggcacagatctgtaaattatttccatatgttcactgaaactcttcttgtcaaaagaatatatcagtttgcttggattgtgccttgagatccttcaacttcttcaatatgttggtaaaataatcttgtaaatacttctctaagctgaggatgtcatttgcatccaccccaagaagctggtatgtctcgctcattggagcagagaaaactgtgtcgctagagagcacctctgaaaatgccaatctgtcagccacatcatttgtccattggaaaaaccgtgtcaattgacgagtaaatctcaagactgcaacaggtaccgtggttacattggcatcttgcccggccaacctctcacacaaagtaatcacctcttgagtggtccaagcacgtggtccagcaaaagtcaagagtttcttagtagccttctcattgcgcatagctataaatgtcagccgagctacatcctgggtatccatgtaagcgatccgagttggagcatcagttccccagacagacttctcttctagtataggcacagcatattgcccaataaggccctgcatgaaaccacacaaacggatgatgatataatccagaccactgtcctgaataaacttctccgtacaatgcttgatttccatcaagggaacctcaggatgcttgtcacagttgtggatggaatagaacacatacttctgaatccccatagcctttgcgcactgtattagagcaacttttccttcccaatctaccgtccggatgggctcttcaggccgtcctgtcgcacagtcaatgacggtatggatgccaacaagcgtcgcagggatggtctccggcttgctgaggtcagcattgacgacggtggcgccccagtcgcggaggaaatcggccggcgcggggcgcggcctgacgaggcacctgacatcgtagccctcgtccagcgccctgcggaccacctgccgccccagcgtccccgtggcgccgaccaccagtatgctcgtcggccggacgggcgtcccctgcgcaatgctggtcggcgccaccgcctgcgcgttgcaggtcaccgccagccggcaccgcgacgatccgcctttcg

SEQ ID NO: 28532 - DNA, 376 bp, Setaria italica
  Peptide Sequence Number=SeqID_94506
cgggcgccgtccttggccgggaggcgggcgaggatgcggcggaggaggatgtcggggaggccgctgatacggtcgatcccttcgcctccctcggtggccgccgcgccggagagggcggcggcggcggagaccggcggcttggggaggaaggcgtagaggaagccgagcaccgtgtcctggtagacgtttagcgtcgccgggtccagcccgtggcgcatcgccgcgggcgtcatgccgtccgtgctgagggtattgccgggggcggccagaagaacttggcggggatggtggccgccatgttcctccgccgcgagtggggccgccgcggagtaggttttcgacgcgtggaaaaggttgctgcagcaggcggccgccg

SEQ ID NO: 28533 - DNA, 701 bp, Setaria italica
  Peptide Sequence Number=SeqID_94507
cgacgccgcacgcactgcttcccggaggccgtcgttggtctgcgcatccacgatgagctcgccatcgacgccgcgcggatgccagccaaccagacaatccaggatttccgacagatgctcgacgacgctcaccgtggccgcatccagacaatcatcgaggaagaggagaaggaagctgctgctgcggcggcgacagtaccgaggaaacagcaactgcgtggcggcaggaggagtcagcgcaccaagacggccgagggtgacaagccacggctcgtgatcgtctcccggaatgggtcgcgtgcgatcgagaatgaggccgagctggtgcgcgccgcggagggcgccgggttccgcgtcgccaaactccagccacgccaggacacggagctcgccaagatttaccgcgccctgaacgcgtcggacgtcatgttgggcgtgcacggcgcagccatgacccactttctgttcatgcgccccggctccgtgtttatccaggtggtgccgctcggcaccgactgggccgccgagacgtactacggcgagccggcgcggcggctgggtctgcgctatatgccgtacaagatcctgccgtccgagagctcgctctgcgggcagtacgccaaggacgacccggtcctgaccgacccggacatcgtgaacgccaaggggtggcaggtcaccaagcaggtttacctggatgg

SEQ ID NO: 28534 - DNA, 259 bp, Setaria italica
  Peptide Sequence Number=SeqID_94508
agagaactgagaaagaacttcgaggacttcttgcgggggatgctatgtttcccaatctactttcctgggacattgtattacaaatgcatgaagggaaggagaaacgtgcataggatattgtctgatatactgaaagagaggctaagcacacctgggaagaaacacggcgaccttgttgacctacttgtagaagaactgcggagtgaaaagccgctaatagacgagaattttgctatagatgcacttgctgccatcttat

SEQ ID NO: 28535 - DNA, 230 bp, Setaria italica
  Peptide Sequence Number=SeqID_94509
gatggacgcagcagctgcactggcactgtccatcactccatctcctccaaacgcaggcagcttttggctgtagctgtccccgaaagctcagtgaagccggtgctggcagccacggcttctgttgctatcgatgtgctgctgttgcggtgaggtgcaggccgagggggataagaagggcttatcacagtctttttagttttatcccatcaatccatccgagggagggagag

SEQ ID NO: 28536 - DNA, 393 bp, Setaria italica
  Peptide Sequence Number=SeqID_94510
ggggaaggtaagcgaccgcgggggcgggggcgggggcgggcggcggttcggccgcctgtgagggaggcatcgacggtgacgttgagggaggcgtcggcggcggccttggcgtcggcgtcggcctcggtggaggcgtcgccggcggcctcggtggaggcgtcgccggcggcctcggtgaaggcgtcggtggaggcctcggtggccttgcgtttcttggagtgtttcttcttggcggacgcggaggcggtggcgggcgtggctggggtttggaggtccgcctctggtggcggctctagggtttttgaggaattggcctcgccgtcggcggccttgcgcttcttggaacgcttcttggtggaggcggaggcggggtcgggcgtggccatggcggcg

SEQ ID NO: 28537 - DNA, 1113 bp, Setaria italica
  Peptide Sequence Number=SeqID_94511
catattgacaccttgctgtgtggaaagctcaagtgatctgagatctcgaaactgtttgtctacaccaaaatctatttatgaagatcttagttcagtaaagaagatgttaatgctggcaccattcagtagcattttgggtgcttcatccacatggagcgatatgcattccatcagtaagattgggggtgcacattatttgcaatatagaaatatatactccatgcaaactgaaaagaaggaaaaatctgggacttctcaaagtagcaaaagaagcatatgtgaggaaacttgtgctgcttcaaccaatatggacattggggatgataactattccagtcaaacaagaagcacaccagctgaactatgtactagctcaaatgaagaagctaaaactgcacatgattgtgaaagttctctgcgtgatactgaatccaatctagagatttttcatgatgatcctaatcgttcagcttcctcagttcatcaaatagaaattgccaaatagggaagcataatgctaggaaatcagatttccagtaaggcatgcattgatgctcatcttgacacattgacacgcatgtctcgtctggttgctgatgatgttgttcttgatccagcaaatgcagatcaatatgcttatggagatgacatgtctctgcagcattctgtcgataagtggtcacatgagcatcaaccaacttttgagcatcgatgtgatggtgctgttaccataaacaggcatgctgtggcaggagccttagctgggactgcagtcagtgtttctttgcatccagttgatacagtgaagaccataattcaggctaacagttctggacaaagttcattctaccatacacttaggcgcactcttgttgagagaggtgttctgggactgtatggaggacttactagcaaacttgcttgttctgcacccatttctgcaattttatacctttaacttatgaaattgtcaagggggctcttctacctgttttgccagaggaacatcattcaatcgcgcattgtgctgctggtggttgttctagtattgcaacatcctttctttttacacctagcgaatgcataaaacaacaaatgcaagtgggttctcaa

SEQ ID NO: 28538 - DNA, 607 bp, Setaria italica
  misc_feature (267)..(267): n is a, c, g, or t
  Peptide Sequence Number=SeqID_94512
tgtagtctgtacacaagccagtttccactcggtatatttcacaaatacttattgcaaccacaagtgctccgcatgtgtgaatcggtgaaagaccacactgttttgcagctttcactgcatttttttagtgcagttgaagcctgcaacatatcaaacataggttcttcattaggattcatacttctaggagtaactcaacctttttggattctagaaaatttagtatttaccccagttctggagcccctgttttgcagtgctcccccncctttttggtgtgattgtctctgcacaagattggaaggaacatctgcatcttgtgcaatactaaagctgtagggagtgctagagcttgtatttgcatcagcaacatctcttggttcactggcctggagctttctatgcagttccattttttgttgcgacatgatatttactcttctacacagttccatgttttcctggtgaatcattctaccctgtatcaccatcaatatatatgtaattaggatgcagcaacttccatgcatgatcatttgtctgaaaaataatagaagggcagattgtcgggcttaaccttcctgtgtaactcttcaatatcactttt

SEQ ID NO: 28539 - DNA, 449 bp, Setaria italica
  Peptide Sequence Number=SeqID_94513
ttggttcaagtgatggaaatgtatacctgtggcaggtggataaacctgaagatgaccctatagttctgaaaggccatgaaggcgaagcaacttcagttgactggtgtgtgtcagaggttggaatgatagcaacatcttctgatgactctacggttcgcgtgtggagtaccaagaaaatggaatgcaccaatgtaagctcgccaacagcattccgtaagcggataactgcgccaaacacagagtaccgaagatctgccagccacgagcgagctaccacatcatgggatgcagttgcctgcaccagcaccgacggcaaatcgccaagcggctcccactctccccttcagcccagagctctggactttggcactatagggtcatcttcaggtttatccacctgccacaggtatacatttccatcacttgaaccaccaagaatgtgatttcca

SEQ ID NO: 28540 - DNA, 223 bp, Setaria italica
  Peptide Sequence Number=SeqID_94514
ctcgcggcaacgttcagtcactagccggcttcgcagcaacactgtaacttgataaacttattatcttaggttgggggaaaaaatttaaaaggcaagtgtaaccggtctatcttgctgcaaattttgaggatttgagacgaactcaagcatgaatgtgaagttttatttgaccatctatctgatttggtagaaatgtagaatcatatatgacgtttgaccaaaa

SEQ ID NO: 28541 - DNA, 875 bp, Setaria italica
  Peptide Sequence Number=SeqID_94515
tttttttttagaaagaaatgctttttgttttgttttgttttgtttcaatgtacccccaagcttctcaagtaattgatatcacaaagccattacattaaagatctccatacattaaccaactaaagaactaatattgcctcataagatatatgcagtgttttagcatgcctctgtcatgctgttttactgtaatgctaaaacactcacaaaaaagattatgcagatatcaacatttatgaaagcatcctcacaaaaaagtaaatcttacgcaagaaatactattaaaagcaagtgtgcaaaaataatctaacttaacaaggatgtaactgtctgttattgcaaccaaaagttgctcataagtgatacccttgcgtaacatttcagtgtgtttgatgtgccttgtgcctaatcagccaacttaacatctttattagatgccaaacaatggttattttcctgtgatagttctgttatattgtttagaagtaactattttgcataaattcatatttttaacttaacaaatgcatggtagttgttaggattaagtaaacaatgattagctaacccttgcacattagcagacatgatataacaaaaaaaaatatcagatggagaagtggacttacctgaagcaacaattagttctcagggctgatttcctgattgacgctgctgtatctgaagtagtaggttttgagctaactggagggtcgcctggtacttcttgcttttatctgcctcgtccggagcttgtgcagtaccaggagcaaaatgctgttgttgtccatgagatgatggctggagctggggcaaatttcccatctgattatttgctggaggtccagggtaaaacttaagaacggaaaaagaaa

SEQ ID NO: 28542 - DNA, 2869 bp, Setaria italica
  misc_feature (1)..(110): n is a, c, g, or t
  Peptide Sequence Number=SeqID_94516
nnnnnnnnnnnnnnnnnnnnnnnnnnnnnnnnnnnnnnnnnnnnnnnnnnnnnnnnnnnnnnnnnnnnnnnnnnnnnnnnnnnnnnnnnnnnnnnnnnnnnnnnnnnnnnttttttttttttggccaaaagagtacacgcatataatgataaaaacaatatgatctgagataagcatacaaaataaacaccaggccagcccaacaagtggccatgcaaacagaaggctagaaagtccagtctgaaacctctacttgtcaaaatagtgcataaaaataaaaaaaggagaaaaacaaattgtttctggtgaagcctgtcttctttaaagaaaaggcagaactggggataactgcgcttattcggtcaccgtccggtaggtaggtacatccgtatcgggaaggtaacgagtagccactgacatcatggccgcttccgttgtgcgcgctggaggagaggagacgaaaccgccgagttggtatttgttttcctgtttgttcgagacaatccgaggtgggattcgagggtacctgaagcaacaattagttctcagggctgatttcctgattgacgctgctgtatctgaagtagtaggttttgagctaactggagggtcgcctggtacttcttgcttttatctgcctcgtccggagcttgtgcagtaccaggagcaaaatgctgttgttgtccatgagatgatggctggagctggggcaaatttcccatctgattatttgctggaggtccagggtaaacttgcggaaggggaggggcagggttgttagcattgctggcttgaatgttagaatggctacccatagctaatggaacatagttgctttggggaacataatactgctctggcagctgttggttcgtctgtgtaggcaaactgtgtccaccttgagatggtaaggtagtagtagaactgtgtgttggtgtaggaattggaggaggtggtggtaggttcaaagcaacttcagggttgtaagcagtatgctgcgttgagtgctcctgagcacccaccatgctcccatagtttgtcaaatgagcagctgaaacttgcctgctgaactgctgtcctggctgctgaagattagcaatcagaggtgaagattgcacacttggcataagctttgctaaagtagccataatatcaggcttgactgaaggttgaacttgcgctgcagctgtttggtttgtaggaaagcctgcaagagctggctggactgcttggccttcatccacccgaggccttccagatagttgccccaaatgatgcattgactcctcacgcaaagatccccgataatcagcatcagaatagccattgtcactgggagaaatgatactatactttctttgtgaagtaggcagagcttccctttcatcatagtaaggttgtagttctggcccagtcaattgtggccttagtgcagcagcagcagacatttgtggaatatgcaatactacaccataaaggcgctctggaccgtcaacttgtaacacatttgtcaagaaatctgatggtggtaccaaaaataaagtagtccctgcatcaacctttacaacccctgcccggcttttcgagcccaggtagcgcaagaactcagtataagaaacaaagtcatcttcgctatctggtaagaaaaagacaacatcaaatccagtagcatccgcatagtgctttgccagcatatccagtcccgtcctagctgaacaattaatgacatcaggtagaggtatgtcactgccctttgttataggcaaacaacgagcatggcaaacaggagatccacctttggaaatactgcctcgccagaaatgctcaaggtatgacgttcgatgcactgtgcctcggactcgaatagcaggacttgaactcccctcagcatgcacggagctgtcccgatggcggatcccagcagaataaagacttgtgctgcctgcccttacttcataagggtcagcaccagcatcgagcctcattcgttttgcttctcttggatcaaatgattcaggtggtggaaggattccacctggagtaggtaaaccaccataatcaaaatgtcttgatcttcctcctcttggaggatcgtacccttgcaaagtaccactgccaagaccatgacgtccatcactggaatacatttctgatctaggaaatccagaaagcgatgttggattatccaatttatttggtgcgagctcactgttcgagaaaagaatctgaatcctgggatcattgaacagatgaccatctagattcgtcttagcattgtaagcttccacaacacttgaaaactcaacaaaagcatactgccttgtctggaaaatttttatctttgtaacgacaccaaatgctgacatagcctgcctaagcatctcctcatcaataactttatatgaagctggaaaagcaacccagagaacattggtaggctgtgcatctcgcatccgtgatccagcagaacccttgggagggccagtgcctctcttgtcagctggtggtcctgataccctaccattgaagccgcttgcttctgaccattccgctcttcccttggacctctggaaatcaacacataattctttgccacctaaagttcttccattcaaagatctgtgagcagaaattgcatcttcgagtttctcgaaatcaacgtacgctgaagtctgatcttgggagaatgcaacaccttcaacttttccaaacttttggaactcctcctctagctcctcctttgaaactgacgggctaatgccaccaacccacaaattcctaacagctctggccggccgcgcgaactcggtgcgcatggcggcgcccttgaccttttcgccccgggtggcctcgacggctgcgcgagccg

SEQ ID NO: 28543 - DNA, 286 bp, Setaria italica
  Peptide Sequence Number=SeqID_94517
ttactattggagcttatgaatgagactccaaaacaaattctgtggcaagaaatgtggtgtgctagcgaaggcttcagaaactttaactccaaagtaaagagattctctagcagtgtagcagccatgagcatggttggccatatgctgggtcttggagatagacatctggacaacattcttatggatttcagcaatggtgatgtagttcatattgattacaacatatgctttgataaagggaaaaggctgaagattccagaaattgttccattccgtctcactcaaa

SEQ ID NO: 28544 - DNA, 475 bp, Setaria italica
  Peptide Sequence Number=SeqID_94518
agtgatacaaagaagccatttctatatggaggccattacctcgttttggctttgcttcagttggtgactgtataactgaagggtttgaaccacctactcttggcattctttttaaatgtgacacggttgtttctgagaggcctgtacagtttactagagtggcacaaattgatagaaaaggccttgatgaaatattcttctggtatccagtgccacctcctggttatgcttccctaggatgtattgtgacaaaaacagatgaaatgccaagcaaggactccatttgctgccctaaattgagtttagtgagccaagcgaatattgcagaggatcctatcaccaggtcttctagctcaaagggtcctaactgctggagcatttggagaattgaaaatcagggatgtactttcctggcaaggcctgatgtgaagaaaccatccgctcgactggcataccgtattgccgaacatgcaaa

SEQ ID NO: 28545 - DNA, 371 bp, Setaria italica
  Peptide Sequence Number=SeqID_94519
gcgcagcggaggaaaccgctggagcgcgccacgccgctgccgccggcgccggcggtagacgaggcgctggacgacctggagcgcgaggtgaccgagggggttcgtcgaggacctcatgcacgcgctcgcgccgccgccgagcagcctgcccctgcccaccttctcactcgtccgggctgccgccgtgaaggctgccgcggcatcctgcgccgtgtagacgctggaagtacagcgcaccgccgcgaccaccggcggcgggaggcgtcctccggcgccaccagtacgtgcgcgtctttcttccaccaagactttttctttggatggaagaaaactgctaccatggctttttaaaaatgggttatttgcttctt

SEQ ID NO: 28546 - DNA, 274 bp, Setaria italica
  Peptide Sequence Number=SeqID_94520
cgacaccgccacggcacagcagcgcccgctcgccgtcgcacgcacgcacgcgccagtagctccgtctctccggcggcgagccccgcctctcgcctctaactgcgtgactatggagcgcgtcctctcctgccgggcggcgaccctggcgcgccgcctcggggtccaggcccagcccctgccccagaccggcgtggttctgagccgccggcacagccacacccgccggcgtgcggaggaagttctagaagcggacgccgcggggccgtcgaccacg

SEQ ID NO: 28547 - DNA, 1172 bp, Setaria italica
  Peptide Sequence Number=SeqID_94521
gctcgacttaagccaacttgcgtggctacccttattgattatgattttttacagggtagcatgtggtcacagtcttactgtagccttgacaacttctggacaagcttaagcatgggtaatgctgtttatggtcagctcggaaatcctcattcagatggaaggattccatgtttagttgaagacaagattgcgagtgaacatgttctccaaattgcttgtggctcctaccatgttgcggttttgacaagcaggagtgaaatttttacatggggaaagggagctaatggcagattgggtcatggagatatagaggatcggaaggtacctacactggttgaagccttgaaagatagagctgtaaggtacatagcatgtggtgcaaacttcactgctgctatttgccagcataaatgggtttctggagctgaccaagcacagtgctcctcatgtcgacagccatttgggtttactcgaaagaggcgtaactgctataactgtggacttgtccattgtaatgcctgcacctcaaggaaggccttgagagcagcactggctcctaattctgggaaacattaccgtgtctgtgattcatgtttcttgaagttggatagtgcctcagatcctaattcagctaacaggaggaaagaccctgttccctaccaatctggtgaaagcaatggagatgctaaagcaactaaagctgctatacccagtaatatggatatgattagaagtttggatatcaaggcagcacggcaagggaagaaaactgatggactgtcatttctccgtaatcctcaagttagttcactcctgcagctgagtgatattgctttgtctggtggcttagacatgaccagatcagctccgagagcagtacgtatatctgcaactcggtcagtaactacttcaagggctgtttcccctttctctcgcaagcccagtccaccacgttctaccacaccagttccaaccgcccatggtctttctctctcaaaagtgctactgataatatcgttaaagcaaatgagctcttaaaccaggaagttgagaggctgcgtgcacaggttgataacctgagaaaccggtgtgagcttcaagaccttgacctgcaaaaatcagccaagaaagtacaagaggctatgacactggtggcagaagaatctgcaaaa

SEQ ID NO: 28548 - DNA, 352 bp, Setaria italica
  Peptide Sequence Number=SeqID_94522
cggtgagcagccggagcgtgctctgccacggtcatcgtacagcgagtgccggctcgaggcgagccccatggctgcctctggcccggatgccaagagggccaagacgaagctgcacacggcgacggggaactactctgcttccgagttgttgcatgacaaggttctggtggagaacacaaagaaggagctctcaaggattcaggctgagctatcatctacaaatcggaacttgaacttctcggatcagcaaattgaggccatctctacaaagcttccagtggacaagtcagagctcaagcccttttccaaaggcatggtgtgatcagcatggggacggcgtgatcactgctgc

SEQ ID NO: 28549 - DNA, 402 bp, Setaria italica
  Peptide Sequence Number=SeqID_94523
gcacgatcgccatggttatcaggaggagccccgtgacgtgctgctccgtcagaggcttggtgaagatcaggtacgacagcagcagcgtcaccgccttcctcgccgtcgtcaccatggcggtggtcgcggcaccgaaaagcgcgatgagggagagcacggagacctgaccgacgaacgtggccatcgcctcgaacaccagcaccgcgtacacgtacaggtgctgggaacatgaagtccatgccgtcatgagctccccagttaacaccattggcaccgctaggaatgggaggccaacaacagtggagcagaatagcatctccatctgggtcgtgtctggattcatcttgaagattgcttcttgcaggttgccaaggaaggcatccatgacgagcgccccagaca

SEQ ID NO: 28550 - DNA, 283 bp, Setaria italica
  Peptide Sequence Number=SeqID_94524
gtacaatccggatcggtattcccccgatgttgaaatcttccttgagagacttcgtcaagaacctgatatctgtatcagatagctgagccttcccactcatgaaggcaacaaacgttggtggccgtgctttcacttgagtgaagtacttgacttttggctgtgtggctgaatctttccaggagtgtcggctcataaccttacgcaaccaacggttgagccgtgaggttgacaatcttaaacaccaggtctcataagtatctataacctggcgcatcacagcaat

SEQ ID NO: 28551 - DNA, 644 bp, Setaria italica
  Peptide Sequence Number=SeqID_94525
cagcgccgcaccgttttcagttcagttcagttcaggggagtcgttccgcagagcagcagggtgcttcaagatgttcttcagggcagcgcaggagatccttaggcatgggaagagcaaagctctgccagctttgccgggcgtcgccaaccgcttctccacgtccgcagactcacagaggctggcggggaaggtggccgtcatcaccggcggcgccagcggcatcggcgaggcgacggccagggagtttgtcaaaaacggcgccagggtcgtcctcgccgacgtccaggacgacctgggccgcgcgctggccacggacctcggcgcggacgcggcgtcctacacccgctgcgacgtcaccgacgaggcgcaggtcgccgcggccgtggacctggccgtcgcgcgccacggcaagctcgacatcatcttcaacaacgccggggtcgtggggtccctggcgcggccgccgctgggcgcgctggacctcgacgacttcgaccgcgtcatggcggtcaacacccggggcgtcatggccggggtcaagcacgcggcgcgggtcatggtgccgcgccgcagcgggagcatcatctgcacggcgagcatcgccggcgtgctcggcatgatcacgccacacccctacagcgtct

SEQ ID NO: 28552 - DNA, 423 bp, Setaria italica
  Peptide Sequence Number=SeqID_94526
atggtactgttgcagcagatccatgccacttagaatttcctatcctcgcttctccacaaaacctcatgaccttgcagaatccacctgcggaagcagatccaactgatacattgcttgcaatggcagctcgggatctgcaaactgagatgcaaacaccatgcccaacattggatgttcaacatcggagggtgtgccctgatgattcgagtaaaatgaaccttgaactagatacagcagctgaaatgttgcatgaagggacaacttccgaccacttaggtgattccagtacgggagttaaagataaaaatgctgacactgtcgcttcagatccattgaattcagaaagtcaatattataatgctccacaaaacccagttgtcttgccagatggtcatgaagttgaaactcagactgatcagtcaa

SEQ ID NO: 28553 - DNA, 289 bp, Setaria italica
  Peptide Sequence Number=SeqID_94527
ctctctcctcctccctctctctaaaagactggatacagaacaataggaaaacaaatagggagaggaagaaagaagaacacctaccaagcaagacttggtttttgagcacctcatgggctgtggaattgtccccaggaatcccctttgggtttgacgagattcatacagagaaatagttcttgatttttcccctttttttgctcaaaaatttacctgtacaggagaactgcttgtttctgctttgtttttccgtgtttgttttgtttggattttcctccggtccgttctt

SEQ ID NO: 28554 - DNA, 459 bp, Setaria italica
  Peptide Sequence Number=SeqID_94528
cttgggcggagggtgagcacgttgacgggcgcgtggcggtagtcgtcggagatggcgaggcggaattgctggagcagcatggcgagcacgaccttggcctcgacgagcgcgtacgcctggccgacgcagttgcgcgggcccgccgcgaacggcaggaacgccgggcgccgccccgacgcgaaccgctccggcctgaactcgtgcgcgtcggggccccagatggactcgtcgtggtggatggctagcaccgggatccacaccgataggccggccggcaggtggaggctttcgccgcctccgatgccaccgccgagccggatgtcctcgaacaccatccgcggcagcagcgtcgccggcgggtacagccgaagcgtctcgtggatgatcatctgcagcacgttgagcttggagaggtcgtcgtaggacggcggggcgtcgccgcagacgcgggcgacctcg

SEQ ID NO: 28555 - DNA, 655 bp, Setaria italica
  Peptide Sequence Number=SeqID_94529
taaaaatgggctaggtagaaattcagttatgctctttatgatatcatatccattaaggaacactttgcatatgatatttttcaggttatgtttccttttgtggaagcagccagcaggggagcagaaacaagccctattgaaggtggtaggttccaagaggttagcgaatcctctgtttcatatcagctggcctttgctttgagaccaatattcaccgtacagcatggcaagtcggcaactcgcccattgagaacggtgaagaacaacaaggcaccgatccatcaagcttcttcaggccccaagggtcaaaagccgttgttctgcagcgcaagagcaggggtggaaatgctctgctttaagcagagtggatttgcccagtgcccatccggcgatcctggcaaactgattgcagctcgaacgaacaaacaactcccagcaaaacttgccccatccggacatatatgcttggaattgggcttcgtcgtactcttgggccgacctataacttggaccattctttcctcttcactcttccagtaccgaccgggctgactatgcacatcctgccggtcagcgctgccaccataaactttttgttcatcaactcatcagactattgcaatcgcttgttaatcttcaggagttcagggtcgcc

SEQ ID NO: 28556 - DNA, 490 bp, Setaria italica
  Peptide Sequence Number=SeqID_94530
acaaatgaaagatggaacattcacagacatgagcaatctttaggttcaatcttttgaaaccaataccaactatcttgctggtacaatttcttttcataagatccagcccatttcacaaaaatggcacttgactaagcttaatcaaacaactaaccaacaccaggttttggtaatctctaacaaaaagcatcaccaacataaggatatcatcgagcatattgtgcgtgccgccacctttacccaaattgatctgccgtgagcagtcgctgtgccggtacctctcaaccagctccgcgacctcctcctccgacagcggttccccaagaacctcctccctgctcctctcaacgccttctccatccccgcctccgcctcgcccggcggcgacaccgtcccatggccggtcaaggcggccggggccgaagggcgagaaccgggtgggctcgcggaacccgatgggcctccacgccgggtccgtctccgagtacga

SEQ ID NO: 28557 - DNA, 232 bp, Setaria italica
  Peptide Sequence Number=SeqID_94531
ttgatggtaaattctcgagtctcaactctggagaatcatcatccagatcagtaagggtaacttcagattcaatcataaatgattcagatgtcaattccaactcctcatagcatttcaggatgagcctcgcaaattgttcatgagcacatgcccggacaaccaggtgatcctgctcagtgagaaaatccaaacattttctgaagaattgtgcacattttgctttgttactagg

SEQ ID NO: 28558 - DNA, 301 bp, Setaria italica
  Peptide Sequence Number=SeqID_94532
cgaagctgtacgtacgcgcacaggtagcggcaccggcggtggaggcgacgaagatggcggccgggttcacggaggaggagaaggcggtggacgacgcgatggggtaccccaaggcctacgccaggctctgccgcggcggcggaggggcggccgtcggcctgccctacggccacggcccgccgcacgccttcctcccctacgtcctccagccgcacgaggcgctgcgggccaaggacctgaacgagatgttcccggtgaccgacgcggaggcgccgcccaccgccaacccccgcggctaccg

SEQ ID NO: 28559 - DNA, 483 bp, Setaria italica
  Peptide Sequence Number=SeqID_94533
tccttgtgatacaggttttagttgtacaggccagcgatgcgccaagtaactcaaaaggtgtatttcgagctgctgaacctacagggcgatcattgcatgatgcgacaaagaataacgaaaacaatgattcagccatcccaggttccaaagcagcagcaggagtgacctacaaagcacgagaaatagtcgcctacgatgatcttttctagacttctagtgagcagtaagtagtcttctaaggtaggagccagcttggtcatctttgtacaatgttaggagcttgagctgcgcacctgcgcctgtgtaatcttagtctaggtcaaaatgttgcgctgtagtgtgcaactgtttcctgccttcagtgtgtatcattcgtgaaggagctttcatggaaacatggagagttttcatgtgcctttagccttttttggtacatgttatcatgcagaataaaatgtgaaggaacttgtcatcaagttctaa

SEQ ID NO: 28560 - DNA, 537 bp, Setaria italica
  Peptide Sequence Number=SeqID_94534
accatttaaaagcttgattaccaaatctatggtaagtacttgctgttaaatgtgactggtcattcatgaggtattacattaatctgcagggcgtggactataattaaaggacagaagtatcaccattaggctgttatcatcgtcatccaccgctgtttcagcatattaagatttggaaaatggaagaccgcacatgcataaatttgcagtgttgcatggacagcgtgacaagatgaaaatttgctgggtgttttactggttgatacatggttcaagttgtaaggaagaaaggcctcatgctaccttaccaaggaacatatatgctatctgtaagtggagttctgcaacaaagaatggtgcgcatgaacattttgcgaagagaatagcaggcaaaaaactgaggtcaaacatgtcataggaattagtccctcttctattgtgaacatcctccaagtagcacaggatgtaaatagaaatgaacgtaggactagagtattttttatcaatttatggtgttatacttcaaagcaggggaac

SEQ ID NO: 28561 - DNA, 611 bp, Setaria italica
  Peptide Sequence Number=SeqID_94535
ttttttttttcttttctcaaagcaatgcgatgatgcacaaacccaaaagaaatccttgacttgcgctctgtaaggaaaatgaaaatcatgtatctcaatcaagaaagtttacatcacacatgatggtatcaactgataatcttacagctggagctattgattcataaaataaactcagattcttttcaccaaaaatgcctccttactgatcgaaggcagaataaattttcttctgtacgagctccacacttagacggggtgataatctgggaagtatttcctcggtcccgtcgtggagcaccttagccagcactgggatctcgtactggtacagccgctcccactccggattcgtcgtgatgtccctctcctggagctcgagggacgcgagggagtagggcgtgccggcgagcagggaggcggcgtgaagcttctccttgagcccgtcacagaggcagcaccccggcttggtgtacagtactagcctccgcttcgaggcctcgccggccgcagctgcggcgcagagggcgcggaaatcaggctggcggacacacggcgcaaggcgggaagcggcgcgcgggagcgcggatagcgccgccgccaccatcgac

SEQ ID NO: 28562 - DNA, 1018 bp, Setaria italica
  Peptide Sequence Number=SeqID_94536
agaccaaattccagttgaaggtcctcttctgccactggaaccaatatcatagagctgaggcaatatgtcaataacaggttcttgtggtttttcagtcgtcgacctggcatctcctggactggttggttcaccagtcctgtaagatgattgggctggtgtcacaacatatcgtttttcttcttcataatagtgattaaacccaagagtatccttgatctcctcaaatgaaggcaagctgcttggaggaggtacgcgaccaccctttatagcaataagagcatcctccattgcacgcatcgataccccaattagagataatggataggctatgattttataacctatttcttcaagttcaacagggctcaatataggagttttaccaccgccttctaacatgttggccatttttggaactccaggtgcaatagcacaaaacgccttcatctcttctcttgaggcaagggcatcaatgaatagaacatctgccccagcatcagcaaaggctcgtactctccataatgcttcatcaagagacaaagcttgacgcgaatctgtccttgccacaataacaatatcagagccactctcattcctagcatctacagcagcttttattcgcataattgcttcctcccttgagacaaccttccttccttgtgtatggccacatgcttttggcgacacctgatcttcaagaatcattccagctaaaccagcattaataaatccttttactgttctcttaacattcatagagtttccataaccattatcagcatcaccaatcacagggattgatactgcttcagtgattagacgtccttgatcaatcatttccccataggagatgagaccaacatctggcaatccaagccgtgcagcagatattgaaaaaccgctcgtgaagcaggcgctgaacccggcgcgctcgacgaggcgcgcgctaagcgcgtcgtagcaggcgggcgcctggtgtgcgcccggcgtctccagcacccgccggagtgcagccgcg

SEQ ID NO: 28563 - DNA, 606 bp, Setaria italica
  Peptide Sequence Number=SeqID_94537
atcgcaagagcacaaagtcggcattgtccccgactgcagccacacgaataacatcaggcagcaaatcccatgtgagctctgcaaggtgacgaaatgcctgctgcagacaaatcgtatcaattagcttccaagtgccaatactgctgcaatccgttctgtagagccaaacagaaatctgaaatcccttcaagtggatgaggaaaattcctgatccctcggcacaggacagcccaatgttttcaagatactcatactgcactgcgtctgggagttcaatacagaaagagctcatagagggcaaatcgaacccaacaatgtgatgcggcagacacatcatgtagagtttcccattggaaaacaactcatggtgatcgcatcccctcaatgttcctggtactggtagatctatcatgcctgagtagcgtccttcaccccagactccggcttgtaagtcggacaggtgcacccatgcttgccgcggagagcacatcaccgtcaccgaagtgcacgacacgctgtcatcagtgttctcatagaacaagaagtcattcaagtaataaaggaagggtgtaagcttcgggcgggaacgggggctctgggaaggta

SEQ ID NO: 28564 - DNA, 253 bp, Setaria italica
  Peptide Sequence Number=SeqID_94538
atctcatcactgctacatactgtgctacattacactcgaagagcaagagcttaacgtataatggcggcgagtagcaggaagctgctgtttgtcgccttggtggtggtggtggtggcggtgctgctgtccccggcggcggcgtgcggcgggcacccgtgcccgagcccggcgggcaagtgcccggtgaacgcggtgaagctgggggtgtgcgccgacgtgctggacgggctcatccacgcggtggtggggaacg

SEQ ID NO: 28565 - DNA, 308 bp, Setaria italica
  Peptide Sequence Number=SeqID_94539
ttgtcccgcggcgacatggcgccgctccccaccgccgctgccggaccgcatgttcgtgacgccgccgcagccctgcgccgacgccgccgcagccgcgcacccgaagaagagcgccgcgtcgtgcccgcccatgctcatgccgccgccaccgcccccggcctggatcgcgctccgcagccgcagctgctcgaagtagagcacctgcaccgccatctgcaccggcagccgctcgttctgcgccgcgtggctgcacgcgtccggcgtcagccgctggcagtcgatcgccttgcacagccggtaccgctccg

SEQ ID NO: 28566 - DNA, 846 bp, Setaria italica
  Peptide Sequence Number=SeqID_94540
gaggtcaccgacactgctgcagcgaagatgaaccctgagcttaggccaattagtgctgttcctactgccagagtgcttccatcctgttgtttccgcataaggaaaaaggccattggcatgggcaccaacgcggcagcaagccaccctgtccgagcaagtgacaccttcctgtgaaggaagtcggggagcgcagagagaagacgaccaaagaaggagaaggatgagtagacagcaagtagcatggtgagctgtgactgctggtgcaatgactgcgcaatctggcccaagttgttgctgtataccaggccaacagtggctccacagaagtaggctgtgtagtagagccagaagtccacacacccaatgagcctctttgcactatgttcttcaccgagtaccaccaggcggcccttatccagtattgttccgcaattactgccctgcaactgctgctccattgatttttccatgacggcattggattcattctgaagatggttaccgactaggagtggcttatgtgggtcatcattgtgagatgcagagtcaatgctgtgcgtatccacatatgagcaactggagcaggcagggatgatgagaggaagggcaaggaggaccatggcgcctgtgaggatgacccacgcagcagctctggttgtgtttaaagatccaaagaccacgagatatatgccggtgatgaatgcaaggatgtagaggccgaggaagacgcgcctgtcatacctgggcacgctttggaggtggttgtcgtgtgtgtggcagaggagtattgccgggagcgcaagaatagaggcggcaagagggaggatggcattgaggaggaggtag

SEQ ID NO: 28567 - DNA, 150 bp, Setaria italica
  Peptide Sequence Number=SeqID_94541
aagaagccaccttgatttctttcgacaggcgaggaaggcttatgttcagtggtattttcatgttctcgtggagctggtgaaatagaggttatgatggtaccagtgctgggaggcgcaaccagcaccgtctgtgactttgtgccctcctgc

SEQ ID NO: 28568 - DNA, 599 bp, Setaria italica
  Peptide Sequence Number=SeqID_94542
gggaagctgggcgcggcggcgttcctggaccacgggagggtgctcccgggccgccgggaccggatgttcgcgtcgctgagcaacctcgcagagctcaagtcggcggcggccgcggcggccatggacgactacgactacgagttcgaccacctgtacgtgggccaccagtacgccggcggcggcgccacggagcacgccatgaagcacaggaagcggcggtcgatcctgcgcaagttcggggacctcttccggaggaggagcctgtacaagcccgaccccgcgccggtgctccacaatcactactagaacagcatagatactactagatcgtagatgctcgcgagatcggtgcttgcagcaaggtagcctcctttgaatgatgatacgcacgcatacagaataagtgagtgaaggagtgtgtcgtcgtcatcaaggttcttcagtaatcagtacgcccatctgctgaaagcctgaagctctaatcgtggcaccgttctgtttcttaaggataggtaggcatggtaggctctgcatctgcagcagatcgatgtagcgggagttggaggagatgatgatgtcagctatgcgtgtccccactt

SEQ ID NO: 28569 - DNA, 454 bp, Setaria italica
  Peptide Sequence Number=SeqID_94543
tggaggacggcggcgacggcggcgagccggcggtgaccacgcccaaggggcaggtggccgtgtacgtgggcggcggggaggcgtcgctgcggtacgtggtgccggtggtgtacttcaaccaccccatgttcggggagctgctgagggaggccgaggaggagttcgggttccaccaccccggcggcatcaccatcccctgccccgccgcgcggttcgagcaggccgccgccctggccgccgccgggaagaagggactcgccaggtggtagtggtagtagcaggggagtcgctgcagcagtcggttagggagggagagatgcccctgaccgccgccggccggccgggcggcggcggcggcggatgggtgtacatatgtgtgtttccatcggaaaggggctagctagctagctgattttgtcgttcgattcttggtcatgtgtgttgactgatgcct

SEQ ID NO: 28570 - DNA, 205 bp, Setaria italica
  Peptide Sequence Number=SeqID_94544
ccgcttgcccgatgtaacatagtgctacagacgggaacaggacacagttgaagctgatctgaacggccctgatgttgaaatgtcccaggtcagcatacatgccctcagtacctgtgacgcacaggactaccccaccaagtgaaatccacccatccttcccgtttcttttgaagtaatgtactatgtacatcggattgaaggcccg

SEQ ID NO: 28571 - DNA, 294 bp, Setaria italica
  Peptide Sequence Number=SeqID_94545
ccggaggtcggcggcgacggcgggcggggagaaggcgagcgcggcgcagacctggatgcaggcgcgctcaaaagtctggcccggcgggacgacgaccgggtccgccatcagcgagcccggagatcgggcagaggaactcctccggcgggtcggccgtgaacgacgacggcggtgaggggaaaggcggggccgagggggtgccgtcaccgtggacggcggcggcgcccaccagggccggcgggtgcccgtcgccatgggctcgggggtgaagtcgtcgagagcgtctcagctgtc

SEQ ID NO: 28572 - DNA, 319 bp, Setaria italica
  misc_feature (314)..(314): n is a, c, g, or t
  Peptide Sequence Number=SeqID_94546
ttaaggttttgcaggtgacactgtggtttgccccgtttcaggacctcaaaaacctgctttatatgagaccaaaacaggaaatgatcggtgcaacccgatgatctgatcgatcagattgcaaattttctgacctccagctctgcacaacacacctaattacgtgcagaggctgaagggcagcattgcaggtcacaaaactattaccaagaaagcgaaaagggaagtcaggatgaacaaaattgcttctccgatcagcttaatctttgcgcgtgctggcgcgatcatgttctcgtgccgccggttagcgaaggggncgcgc

SEQ ID NO: 28573 - DNA, 267 bp, Setaria italica
  Peptide Sequence Number=SeqID_94547
ccggaggcgcgctccggcgccgctgctgtcgctacccgtcgcgacgatgccgacgaagacggcgaccggcaggagcaggacgagagcggggtgctggtactggaggaaggagtggacgagccagtgcacggcaaaggaggcgaccgtggcgacggcgaacctggccgcgaacaccgccattgctgtcgctgtgcgctgcagctgctactgctatcacttgctgtgcaacgcgatgtgagtgtgttgttggttggggatgctctgctg

SEQ ID NO: 28574 - DNA, 466 bp, Setaria italica
  Peptide Sequence Number=SeqID_94548
agtcagcgggagaaggggtgtcaacaggtgacgatcgagctgagcgacgagttcgaggagctgactgcggacgtgatctctcacacggccttcgggagcagctacaaggaagggaagcaggtgttccaggcactcaaggagctgcagttcatcaccttctcgacacttttcagtgtccaaattccagggttcaggtatctcccaactgagaagaaccggagggtgtggaaactcgacagggaggtgagggccacgctcacgaagatcatcaggaacaggctcgccgctaaggacaaggcaggatacggcaacgacctgctcgggctcatgctggaggcctgcgcgccggagcacggcggcgaccagctcctgagcatggacgagatcatcgacgacacgcacccggagtggctcgacaaggtccgggaggaggtgcggagggagtgcggcggcgacaaagaccggg

SEQ ID NO: 28575 - DNA, 709 bp, Setaria italica
  misc_feature (700)..(700): n is a, c, g, or t
  Peptide Sequence Number=SeqID_94549
cgtttttaggacaacatgagaggtgattgcctggcatgtatccccttaaatcaacagcatgatgggactcacggacaagctcgcatttccttgttgttgccaaaaacttatgattgaagaattcctcaaaacttattctcttccttggatcacggagcaagagtcttctgcacaagtcaatgcaatcaggacataaatcagcttcaatttctgaagggaagttaagttcatcagaagccaggatgttttgttgcagctggaaacaagtactcccagtatatggcagcttcccagtgactagctgaaacagaatgaccccaacactccacaagtctgactttgcatcatagtccttcccttgccaaatttctggggccatataatatggtgacccacatattgtggcagctaaattttcatgcttggcaaacccaaagtctccgattttcaatataatggcatcatcattggttgataggagaaggttctgtggcttgaggtccctgtggactatgttcctctccctcagcaccttcagcccttccgcgagctgccgcatcaagtccttggcggtggccaccggcagccggccgtgcttgtgcaaaaacgcatcgaggtctcctccatcgcagtactccagtaccaggtacatcatattcgtcgtgtcgatggtgtcgaggaggcggaggatgttggggtnatcgatgct

SEQ ID NO: 28576 - DNA, 229 bp, Setaria italica
  Peptide Sequence Number=SeqID_94550
ttcttccgtccgttcgttgtacgctattatacgcttgcatggtagtgtgtgcgtcgtccttcatgtgtgagagagaagtcctccgatccttgtgtcgtcgtcatcccttctacgttttgtacgtgtgctcctccgtttccgtttatggaggagaccgagtctgtaccttgtccagtaccttattataatacatactacacctctctttttggtatgctaaaaaaaaaaa

SEQ ID NO: 28577 - DNA, 245 bp, Setaria italica
  Peptide Sequence Number=SeqID_94551
gtacgactgcttgcggcaggtctccttgtggaactcctccttgttgggcgcgaagtggaagtagaggtatccgcccaggactgcgtccggttcgagctcttcccgccggggcacctctactccagcgccgccgccgagttccggcgctggtacaacccgcgctggttcctcgagcaggtgccggcggcgccgtacgacccgctcgtgctcagagcggccttcgagaaggcggctgagacacgcaa

SEQ ID NO: 28578 - DNA, 473 bp, Setaria italica
  Peptide Sequence Number=SeqID_94552
gcagtctcagtctttttatcagcagactgcggtgttcctttcggtcgcgaagaagaagcggccgcaacaatggatgagcctttccagggcgaggaccggaacctgtcggccgtggatcacgtcaagaagcgccatcacgagaagggcttcttctatgcctgcgccttcacgctgtgctgctgcttctgctgctacgaggcctgctagcactgcctggagttcttctgttgctgctgcaagaaggacgattaggatcggtccaggcattattcagccaattccgtcgtcgcgccatgatcagttcgttgtggatacgtttcgtctgtgaagaattgtgatcaatctggaattgttcatcgaaataaagcaatgccgtgattggtgtaaaactctaacgttaaccgtagtgagttcggtgaagcagctgtaaatctgttattggtttgcctatgtcagcacgctggtaatatatt

SEQ ID NO: 28579 - DNA, 523 bp, Setaria italica
  Peptide Sequence Number=SeqID_94553
actttttaatacaagacaagaactagacggtagttacctttacggtacgacgaagaagaagcggccgcaacaatggatgagcctttccagggcgaggaccggaacctgtcggccgtggatcacgtcaagaagcgccatcacgagaagggcttcttctatgcctgcgccttcacgctgtgctgctgcttctgctgctacgaggcctgcgagcactgcctggagttcttctgttgctgctgcaagaaggacgattaggatcggtccaggcattattcagccaattccgtcgtcgcgccatgatcagttcgttgtggatacgtttcgtctgtgaagaattgtgatcaatctggaattgttcatcgaaataaagcatgccgtgattggtgtaaactctacgttaaccgtagtgagttcggtgaagcagctgtaaatctgttattggtttgccatgtcagcacgctggtaatatattacacccttgtgtatagaaaaggttgcttgtgttatcgttctcccaaaaaaa

SEQ ID NO: 28580 - DNA, 558 bp, Setaria italica
  Peptide Sequence Number=SeqID_94554
cctcgcccatcagcggctctccgtcgtctccccgctgtccggcgaccagccgctcttcaacgaggaccgcaccgtggtcgtcgtggccaatggagagatttacaaccacaagaagatcaggaagcagttcaccaagcacacctttaccaccggcagtgactgcgaggtcatcatcgctctgtacgaggagtacggcgagaactttgtcgacatgctggacggcgtgttcgccttcgtgctctacgacacccgcaacaagacgttcatggcggcgcgcgacgccatcggcgtcaaccccctctacatcggctgggcggcgacggtaggcgtctcctccatcctcctctcccccatccctgtttcgcaccatccgttcacgcttctgtttccaacgcctgcatgggcggtcggattcagacaaagcggctcgcacacgacgatgaccgatcggtctttgcctcgtctttccttccttcgcttgcaggttccgtctggttctcctccgagatgaaggcgctgaacgaggactgcgtccggttcgagctcttcccgccgggg

SEQ ID NO: 28581 - DNA, 799 bp, Setaria italica
  Peptide Sequence Number=SeqID_94555
gtttcgtatcaccacaaatccaccatgtgtggcatcttcgccgtgctcgggtgcgccgactgctcccaggcccagagggctcgcgtcctcgcgtgctcccgcaggctgaagacaacaaggggtacctagaactaggtacggggctgtaaccagcacgagggcaacttcctcgcccatcagcggctctccgtcgtctccccgctgtccggcgaccagccgctcttcaacgaggaccgcaccgtggtcgtcgtggccaatggagagatttacaaccacaagaagatcaggaagcagttcaccggcaagcacacctttaccaccggcagtgactgcgaggtcatcatcgctctggtgagagagattttattctttactcagtcgcaacgggcagttttgcattcgccatgctttcttcttttttttctcaacaaaagcgaataaaagaacacaacatgatgacgccgacctcctctgttcttcgtcccgtagtacgaggagtacggcgagaactttgtcgacatgctggacggcgtgttcgccttcgtgctctacgacacccgcaacaagacgttcatggcggcgcgcgacgccatcggcgtcaaccccctctacatcggctggggcggcgacggttccgtctggttctcctccgagatgaaggcgctgaacgaggactgcgtccggttcgagctcttcccgccggcacctgctcgaggaaccagcgcgggttgtaccagcgccggaactcggcggcggcgctggagtagaggtgccccggcgggaagagctcgaaccggac

SEQ ID NO: 28582 - DNA, 313 bp, Setaria italica
  Peptide Sequence Number=SeqID_94556
aagacgtaacaacgacggcggagagagatcttattcatcagtcaactcatacatgtataggtatgtagcgacggtggaggcatgctagctccggcgtcgtgtacgctattatacgcttgcatggtagtgtgtgcgtcgtccttcatgtgtgagagaggagtcctccgatccttgtgtcgtcgtcatccctgctacgttttgtacgtgtgctcctccgtttccgtttatggaggagaccgagtctgtaccttgtccagtaccttattataatacacactacacctctctttttggtaaaaaaaaaaaaaaaaac

SEQ ID NO: 28583 - DNA, 737 bp, Setaria italica
  Peptide Sequence Number=SeqID_94557
acaatttacttacccaaagacaagacaaagactaaaaccaacaatccgatccatcgagcgcagctagcagctaacacaacagcaagacagcatcatggctcgcgctcaggtggtggtgctcgccgtcgtggccgtggtgctgctcgccgcggcggcctccgaggccgccatcagctgcggccaggtcaactccgccatcggccagtgcctcccttacgcccgcggccagggctccaaaccctccgacgcctgctgcagcggcgtcaagagactcaactccgccgccacgaccaccgccgacaggcgcgccgcatgcaactgcctcaagaacgccgccagggggatcagcggcctcaacgccggcaacgccgccagcatcccatccaagtgcggcgtcagcatcccctactccatcagcacctccaccgactgctccagggtgagctaaacgaccgcgccggagctagcatgcctccaccgtcgctacatacctatacatgtatgagttgactgatgaataagatctctctccgccgtcgtgtacgctattatacgcttgcatggtagtgtgtgcgtcgtccttcatgtgtgagagaggagtcctccgatccttgtgtcgtcgtcatccctgctacgttttgtacgtgtgctcctccgtttccgtttatggaggagaccgagtctgtaccttgtccagtaccttattataatacacactacacctctctttttggtat

SEQ ID NO: 28584 - DNA, 773 bp, Setaria italica
  Peptide Sequence Number=SeqID_94558
attcttcccaagcagcttgtagagcacatccgatccatcgaccacagcgcagctagcagctagcacaggaacacgcacatcagcatggctcgcgctcaggtggtggtgctcgccgtcgtggccgcggtgctgctcgccgcggcggcctccgaggccgccatcagctgcggccaggtcaactccgccatcggccagtgcctcccttacgcccgcggccagggctccgccccctccgccggctgctgcaacggcgtcaggagcctcaactccgccgccaggaccaccgccgacaggcgcgccgcctgcaactgcctcaagaacgccgccaggggggatcagcggactcaacgccggcaacgccgccagcatcccatccaaccgtgcggcgtcagcatcccatactccatcagcacctccaccgactgctccagggtgagctaaacgaccgccggatctatgatccattccaccgctccgaatcctgcctgcctccaccgtcgctacatacctatacatgtatgagttgactgatgaataagatctctctctccgccgtcgtgtacgctattatacgcttgcatggtagtgtgtgcgtcgtccttcatgtgtgagagagaagtcctccgatccttgtgtcgtcgtcatcccttctacgttttgtacgtgtgctcctccgtttccgtttatggaggagaccgagtctgtaccttgtccagtaccttattataatacatactacacctctctttttaaaggtaaaaaaaaaaaaaaac

SEQ ID NO: 28585 - DNA, 848 bp, Setaria italica
  Peptide Sequence Number=SeqID_94559
cacatttcttcccaagcagcaagctaaaccacatccgatccatcgagcgcagctagcagctaacacaacagcaagacagcatcatggctcgcgctcaggtggtggtgctcgccgtcgtggccgtggtgctgctcgccgcggcggcctccgaggccgccatcagctgcggccaggtcaactccgccatcggccagtgcctcccttacgcccgcggccagggctccaaaccctccgacgcctgctgcagcggcgtcaagagactcaactccgccgccacgaccaccgccgacaggcgcgccgcatgcaactgcctacaagaacgccgccagggggatcagcggcctcaacgccggcaacgccgccagcatcccatccaagtgcggcgtcagcatcccctactccatcagcacctccaccgactgctccagggtgagctaaacgaccgcgccggagctagcatgcctccaccgtcgctacatacctatacatgtatgagttgactgatgaataagatctctctccgccgtcgtgtacgctattatacgcttgcatggtagtgtgtgcgtcgtccttcatgtgtgagagaggagtcctccgatccttgtgtcgtcgtcatccctgctacgttttgtacgtgtgctcctccgtttccgtttatggaggagaccgagtctgtaccttgtccagtaccttattataatacacactactaccttttttaccaaaagagaggtgtagtgtgtattataataaggtactggacaaggtacagactcggtctcctccataacggaacggaggagcacacgtacaaacgtagcagggatgacgacgacacaaggatcgga

SEQ ID NO: 28586 - DNA, 2416 bp, Setaria italica
  Peptide Sequence Number=SeqID_94560
ccggccggaggggtcgtttgaggccttccactgctccacccactcgatggccgcgggcgtgctgcacgcgatgctcgggccccacggcaccgtctccctcgccgagtcctgagggaagagcctctcaaagatcatccggtagtagtacccctacaacacgcctgtcaacaaggaggcctactactaccggatgatctttgagaggctcttccctcaggactcgtctcttttcttcctcccacacgcacgctcgttcctctctctcccaccaccacctctgctcgcgtttcgtatcaccacaaatccaccatgtggtggcatcttcgccgtgctcgggtgcgccgactgctcccaggcccagagggctcgcgtcctcgcgtgctcccgcaggctgaagcacaggggtcctgactggtcggggctgtaccagcacgagggcaacttcctcgcccatcagcggctctccgtcgtctccccgctgtccggcgaccagccgctcttcaacgaggaccgcaccgtggtcgtcgtggccaatggagagatttacaaccacaagaagatcaggaagcagttcaccggcaagcacacctttaccaccggcagtgactgcgaggtcatcatcgctctgtacgaggagtacggcgagaactttgtcgacatgctggacggcgtgttcgccttcgtgctctacgacacccgcaacaagacgttcatggcggcgcgcgacgccatcggcgtcaaccccctctacatcggctggggcggcgacggttccgtctggttctcctccgagatgaaggcgctgaacgaggactgcgtccggttcgagctcttcccgccgggggcacctctactccagcgccgccgccgagttccggcgctggtacaacccgcgctggttcctcgagcaggtgccggcggcgccgtacgacccgctcgtgctcagagcggccttcgagaaggcggttatcaagaggctcatgaccgacgcgcccttcggagtcctcctctccggcggcctcgactcctctctcgtcgcctcagtgaccaagcgccacctcgtcgagaccgaggctgccaaaaagttcggcaccgagctccactccttcgtcgtcggcctcgagggatccccggacctgaaggccgccagggaggtcgctgactacctcggaaccatccaccacgagttctatttcaccgtacaggacggaatcgacgcgatcgaggaggtgatctaccacgacgagacctacgacgtgacgacgatccgggcgagcacgcccatgttcctgatggcacgcaagatcaagtcgctgggcgtcaagatggtgctgtccggggaaggctccgacgagctcctgggcggatacctctacttccacttcgcgcccaacaagggaggagttccacaaggagacctgccgcaaggtgaaggcactccaccagtacgactgcttgcgtgccaacaaggcgacctcggcatgggggcctggagatccgcgtgccgttcctcgacaaggagttcgtcgacgtcgccatgggcatggaccctgagtggaaaatgtacgacaaggatctgggtcggatcgagaagtgggtcatgaggaaggcgttcgaagacgaggagaacccttacctgccaaagcagtattctctacaggcagaaggagcagttcagtgacggcgttggctacagctggatcgatggcctcaaggccttcactgagcagcaggtcaccgatgaaatgatgatcaacgctgccaaaatgtacccctacaacacgcctgtcaacaaggaggcctactactaccggatgatctttgagaggctcttccctcaggactcggcgagggagacggtgccgtggggcccgagcatcgcgtgcagcaccgcccgcggccatcgagtgggtggagcagtggaaggcctcaaacgacccctccggccggttcatctcctcccacgacgccgccgccaccaccaccgccgaccaaaccgccggtgccgcgcacgccaacggcaacggggttgcgcccgtagcgaacggccacgccgcggcgaacggcgcggtcaacggcacagaggtcgcggtcgcgatcgcggcgtgacaataacaaacgataagctgaaggataaggacgactagtaggtacacggtgtgtggcgtgtcgaccgggcgccgatgccatggcatggtgcggtagcacacgtgctgctattgtttttacgttgctgttgtactgtcgctagcgtacgtgtccttgtatgtgtaatgtgtactgtgtacgtgtacgtgtgtgagcgagcgattcaggcatgcatgtgtgtgccgggattgatgtccttgaactcgatccttttaaagacttgagctacggatcaatctaaaagtaagcattttccttacttaaaaaa

SEQ ID NO: 28587 - DNA, 551 bp, Setaria italica
  misc_feature (510)..(510): n is a, c, g, or t
  Peptide Sequence Number=SeqID_94561
tgtttcctatatctatcagagctttatatattccagctgctaaattgcagtgaactttttaaattggaaaaaggtccttagttttgttgcagccttttgattgcctttcataacatacatgactcctatcttcctctctgcatcaaatctgatgcattgcgactttggtgtttgcagattactttgtgacaaaatgtggtgtacttctaatgtcactctttgtcttttttacaaccaccatgtccgtttcatttactctgagagaaacgcaatcccgcatgcttaggttcacaggtttgtgttcctttatgtaggttgcgacctggattgctttgcgcttaaaatatttttatttaattcacctcttgcgttgttcttccttgaaattttcagtgcagcttcagcaccatgcacgccaccaactccccacttttcagttgatattcgtgcatgtcatcgaatcattggtttttgtgccggtaatgggaaaattcttcggtgttttgaatnttgaagtttgtgattagaaaatgtattcactgcaggattca

SEQ ID NO: 28588 - DNA, 473 bp, Setaria italica
  Peptide Sequence Number=SeqID_94562
cctgtcccagctgctcaccccgcggatccgcctcgcgctcgagtacctctacctcgccggcgccgtcgcgctcttctgcctgctcgtcgtcatgcacaccaacttcgtgcagcagcctggctgctcaagtgagttttctggaattgaattcggagaagcacaacttgtccaaatcaagattatcagtgggggactatgggccagcagaggtgcttcttacatcatggatctccagaacctgggacgttcagctgagaaaattttagaggttaatggtgataagttcaacattttggcatctaagttttggtcaacctgggttggccctggagctagaaggagcgtaccagatttgaaggcagctggagatggttctgtacactaccctttatctgctaaggagtcgtttaaagcagcagtgacgttatttgttcaagaaaatggtattttcgttgtctcgtactctagtacta

SEQ ID NO: 28589 - DNA, 750 bp, Setaria italica
  Peptide Sequence Number=SeqID_94563
ttttttttttgtcttgctctgctgcttcacatttttatagggcaacccaacactcatgcttctttctgtacactcatcaagatacaaaaataaaaatttcacactagcccctaggaatatacagccctcaccgagcatcaaacttcaggaagctagcgcatcaaaagatactaataaacatatgacgcgcttcaaaacgcaacgggcactactagtacataggcacactgctcttagcgtagcttgattcatttcctggcatcactgccatgagctttgccctttgcttggtccaaaccaaatgttttgcatgaaagcttgactctccattccatcgtttgttccatacaagaacaggtgtaggaatgcttggatcagcacaggcgcacagcactcgtgaaaaatataccaggagccaaattgctcagaggaagcagctactcactccagctgtcctcgtcatcgtcatcagcaacagcctggcgaatggcgtgggctctctcgatgatggccaccacttgtaagttcgttcttggaccacccatcacacttggtctctttgcaagaacaggcttcaggttgaaagacttgttctttatctcctccagtattgtgttcttctcatctgaaagcttacttgaaggttgaaccaaagttggagcctttcttagcatgcttctgtcatgagaagtaactggaagtagaggatatctaggtggttttggcactggatgagttggagattttgcc

SEQ ID NO: 28590 - DNA, 397 bp, Setaria italica
  Peptide Sequence Number=SeqID_94564
taaacctgccatcctgcttcaattgtattgaggtcgttgccgctataggaacccccagagatccagagctgggccaagctgaaatctttggccctcccaatagttggttcccacagattgatgctggttttggttccatagtacctagccttcggtgtatacgctatggcgtgctggtggccaatcgtcacattgagcttgttagggtcatcaataacggaaaagaagttcggtatgctccttggcctcttcttcccatacctcttgatagagctagccctcaggacatcctcctccttggtccttcggattggtattgtgtttggagggcagcatttgccattctgatgccatgtttgggtgattgaatgtggtgcgatgttggaatcatcgctca

SEQ ID NO: 28591 - DNA, 566 bp, Setaria italica
  Peptide Sequence Number=SeqID_94565
ggggggagggaggaagaagggggaaggggagaggaggaggagcagtggtggagcaggaacagtaggtttggcactagctcgagttgctagaaggatttttgttacagatagaggcgctgatatcctagataattgcttggccaatgtccgtatcaactctggtaccctaaagtttgatgaagctaaagtctgtgtaagggaactggactggaagttgtcatggcctccaccagtgagtacatgtgatccttctgatccaagtttaaggtacctatggtctgcacatgaaattgatgaggctgagaaagcaacagtcctgtttgctgcagatgttatctacagtgatgatctcactgatttgttcttcgacacagtgaagaaattgatgtcaagtggtgctaagaaggtgctgtatttggccctggagaagagatacaacttcagtctggacgaactagacgttgtggccaatggttatgctcacttccgaggtttcttcgtaactcaagatgaacacggggatgcaatccacggagacaaacctaaggttttacgtttaggtaaaa

SEQ ID NO: 28592 - DNA, 400 bp, Setaria italica
  Peptide Sequence Number=SeqID_94566
acaaaaacgaaagttcgcatccatcccacttgctgctcactaacatcgtttgcatctgagcagctgttagttgagttgcaatgtctgggcaagaacaccgagctcccatcgccctactcctcatcctcatcgtctctgtcagcggtgagctgccgatccatgaaggtgtttcctccagaacattaaccatcacgaaccactgcgggcacactgtgtggccgggaatcctgtccagctcgggctcgccgacgctagaaaccaccggcttcgccctcgagccgggccagtcgcggtcgctaccggcgtcacacgggtggtcgggacgcctctggggtcgcacgcactgctcggtcgactcggccggcaggttctcctgcgtcaccggcaactgcggatccgg

SEQ ID NO: 28593 - DNA, 448 bp, Setaria italica
  misc_feature (431)..(431): n is a, c, g, or t
  Peptide Sequence Number=SeqID_94567
tttttgtagagtagcatgttcatcttgaacgacaattaatcaaactcaactagtacaaaggcgggaagcgtctattcttgtacttaggctcatgctcacaagtcgtcccaaacaacagcgatgcaacagatttgtggagacattcgtgacatcaatcggcattcgtggcttgtctccaaacgtaggcgaccaaacaatcaaactaattccacatagctcacaatttccaacactgtcgtcactgcttggtggtttcggtggccgtgacggacgcgaggaactccttgaggcatcggttgtagacgcagggcctctccaggtgcacgagatgccctgccttccttatgctctgcagcatcgtcttctcgcccagctgctctttcattgccttggcgagctcgatgttgaagatgttgtcgttctctccccanagcagaagtttttttct

SEQ ID NO: 28594 - DNA, 314 bp, Setaria italica
  misc_feature (275)..(275): n is a, c, g, or t
  Peptide Sequence Number=SeqID_94568
caaaaccaccacgcagaggcagaaccccgcagctcccattaatggactgcgcaacagcttaaactccgtcgcccatttcaaacggaaccggccgagccgcagcagcgcagcgggcacgcgcctctgggggtggagggaatggcggaggcggcggcgatcctctcgctctccgcggccgccgtggtggaggacgtgctgcggcagcacgggtgccgcctcagcgatcgcgacctcgcgtcacgcagggccgaggaagccgcgtcgcggcggaacgnggcgggcggggtgctgcgccgcgacgggtgggggctggt

SEQ ID NO: 28595 - DNA, 1250 bp, Setaria italica
  misc_feature (1151)..(1250): n is a, c, g, or t
  Peptide Sequence Number=SeqID_94569
ggcttcgcccctcatctcgagcctttcgtgtaacagcccaatcggaccaaaccctagaagccatagattcgatcggagatttggcatggaaatgtcagatcccacagccgccgtgatccccaagcccgacggcggcgacgacgagtcggtggagatccgggaggtgtgggcggacaacctcgaggaggagttcgcgctcatccgcgacgtcgtcgacgagttccccttcgtcgcgatggacacggagttcccgggcattgtctgccgccccgtcggcgccttccgctccccggcggactacaactacgccaccctcaaggccaacgtcgacatgctccacctcatccagctcggcctcaccttctccggcccgcgtggcgagctgccggcactcggcgccgaccgccgccgctgcgtctggcagttcaacttccgcgagttcgacgacgcgcgcgacatcttcgcatccgactccatcgagctgctccgtcgtagcggcatcgacttccgccgcaatgccgagcgcggcgtcgatgcacggcggttcgcggagctcctcatgtcctccggcgttgtgctcaacgattcggtatactgggttaccttccacgcgggatacgacttcggctatctgctgaagatcctcacctgcaacagtctaccagacacgcaagccggattcttcaagctgatgaagatatatttcccaaccgtgtacgacatcaagcacctcatgaagttctgcaacagcttgcacggtgggctgaataagctcgctgaactgctcgatgtggagcgtgttggggagtcccaccaggctgggtctgatagcctggtcacatcctgcgcgttctggaagctcaaggattcattctttgccggctcaacagagaaatatgcaggcgtgctgtatgggctcaatgcagagaatggtgttagtgcacactgagggatggtactctctttgaattttagcattgtgaatggattgatttagggcagaaaatgtgacaagtgtgcaagggggcgcaattaaaaccaattctgtaggttaagtctgtctcgctcagttccacctcatttggatgtaatgccaatgtggtgttcttcagttactccttgttgaaatagttatttctctttcagctttnnnnnnnnnnnnnnnnnnnnnnnnnnnnnnnnnnnnnnnnnnnnnnnnnnnnnnnnnnnnnnnnnnnnnnnnnnnnnnnnnnnnnnnnnnnnnnnnnnnn

SEQ ID NO: 28596 - DNA, 634 bp, Setaria italica
  Peptide Sequence Number=SeqID_94570
gtatagcagtctgaagcagggtggatttttcatcagtgtccccaacttctctttgaagttcttcaatttttctcgtgcttcagctagttctaccaaacttgcctcgtgctgttgcttctcaaatgttagagaagattccagatttttcatggcttcttcaaatctttgaacagtttcctggaggagatcattttgtttgacagcatcttcaagcttgcttaccaatgctccatttcttgcttgagattcagcaagtgtagcactagctgcttcattttgttgtctttcagttagcaaaagggtctctccttctcttatagtcccttctagtctctgtacagtatcattaaattgcttgatcttttcatctgcatcactgactttcttatttaactcttcattcatttccagagcattggcatgtgctttctttgctacatcattctcctctcgttcagctactagcagtgccttgaggccctcaatttcagtagtcaacaaactgatcttttctctttcttgagctagagcttcctcaacagcctttttagctgattcttgttcctgcattgctttgacttcttcaactcgctgctccatctcatgaagagcaaccttcagtttgaaacttaca

SEQ ID NO: 28597 - DNA, 2010 bp, Setaria italica
  Peptide Sequence Number=SeqID_94571
atgtagcaaagaaagcacatgccaatgctctggaaatgaatgaagagttaaataagaaagtcaacaaactgatcttttctctttcttgagctagagcttcctcaacagcctttttagctgattcttgttcctgcattgctttgacttcttcaactcgctgctccatctcatgaagagcaaccttcagttttgaaacttcttcttctttggacttctccagatcagcccttagtttcttctctaggcccaggcggcttgttagctcttccacacgttcctcaagtttctcttttgccacctttagagcttgtgtatctcttgcagccattttgagcttccgcaactccttcctagcaacccttcttcgccaagcacactgatatgttagtgctgccctcttcaacttcatataattcgagtaatctctgtggcagcgccattgggactggatatggactgaagctttatttctctttctgaagttgaattcattgcgagctgacatggcccttagccctgcctgcaatgtaacggctgacaagcgcagttggcaataagttttccaggcaaaataccatctggtggttttctgaattctcaatgctgctgcttgctgtctcaggaattcatgttgtttacaagccaatcttgctctaacaaaagactgcaaacaaatagatgcgtctcgtagtactaggaactgctcacgagcgacatgggtacggtattgactttgaacgcctcttgctgcattatttcgcatctctgttcttctagcatccagttcagccatttgaccagccctcaggaataccttagttcttcctatctgataaccctgtagtcctattttgtccaaaatcttttggcaggcgaccttttcatcatttttctctttcagaatttcaggagcaagaacacgaaagcgatgtagaaaatcatggaatagtttcctcgtgggataaccagcacagctgatcctaatggcttcaagaacacccgagcatcgaagctgctgaagaacattagtgttctcaaaaatagcaggcttaaggacactatttggctttatacatctgatgtaatgtggctctgtagagctcaaagtctccatgagctcgtgaagttgcatcttaaagcgagatgcgatcgaggactttgatgattttgtgttctcttctgttgccggtggaaataacactgatacaaaagagcacttagaagcattaagtaattcttgatgctctgcaaccacatagtctttgttcttgtccaggaattgatcagattgatatgttacatctccagcataatgttgaattgtgaatgcagtccgagaaagctttggtttggtaaaccttttgtggttcttgaacttttcatacagcttttgagacaatgtctcatgtgtggactttggaaacatgcaggcttcatcaagaagtgcaataatgccacctggtttcttttcaatcaagtcaagtacatcttgattgtcaacaaactctatgtaactccaattaatctgctcccttgtgtattcctcttgttccattttgaagacattctgattaaaatgttgctggagtttttcattggtgaaattgatgcacagttgttcaaaactgttggttttaaaactttcaaaaccatatatatcaagtaccccaatcagtttgttcgagtctgggtcttgtcctattgatgcatttattctgtttacaagccagtcaaataatcgagagtatatctgctttgctaaaccatcccggctaatagtagcagaattcggaccaactgtagtggtaatcactccttctggtgtattaatttccctatttatcaaggcattctccaacttcccacaatcacacatcaagagctctcctgctgtattaagatggaatctagatttgtcatcctttattacagatgaatcaacctctctcccttttgcaaaatttatgtttccaagatgaagcacagcagcaacaacccggaatatagctt

SEQ ID NO: 28598 - DNA, 261 bp, Setaria italica
  Peptide Sequence Number=SeqID_94572
gggtcggcggggacacgaagtcctccgagtggaacgacgggcagctggaggagaacgccatggccgcctcgtcctcttcgtcggcctccgagcccttagcggagccgtcctccacgccggctgtggcgccatggctgctgctcttgccaaggaccggccacttgaagttcctccgggagaaggagaaggaggactcgtgggggctcctcgccatgatggtcctcatggtcgcttgcctcgcctgagcgtggagggagagtg

SEQ ID NO: 28599 - DNA, 360 bp, Setaria italica
  Peptide Sequence Number=SeqID_94573
tatgcaggtacaagtacaattcgaaggcaactttagtcgttctgctgtggccactgaccagaccagaggatcagaataacgccagtgtgcctaacatgcttgtagataaaatgaatgtaacctttgcacaggcgttggcggtagaattgaagatttgccatttgccagtggttgttcctcaggaaattcattttgatttcaacttcgttgtaatgttcatgcaataaatggaagtgttagtatgaggccttttttatgcccatcggcacatatatgattttcaagctttgtacgtgcatattcctagagtaactttttatgatttttatcataatggaaagtaagtggtgttgtataatc

SEQ ID NO: 28600 - DNA, 274 bp, Setaria italica
  Peptide Sequence Number=SeqID_94574
taaggttaatggttgcaatactctgcaatcacttatacataagctctggagtgactttagctgtaggagaacatcgttatcgtgtgcagtgaaggaggtgatttctgagcaatcttggatatctaggctctcaatgagctcaagcctttctcttaaaagaggagaccttagtattgtcatttgatcagtgataatgcttctaagtaacccaaagcttgcagtgatttcactggttgttggtgaggataaacttgcaagtaacaaggggcagttg

SEQ ID NO: 28601 - DNA, 898 bp, Setaria italica
  Peptide Sequence Number=SeqID_94575
tgttgtaggtattaaactttgtctaagttaactaaggggtctagtttgtaattattgtctaaagggtattgtagtactacttgtcatttgatcagtgataatgcttctaagtaacccaaagcttgcagtgatttcactggttgttggtgaggataaacttgcaagtaacaaggggcagttgaatatgcaaagggatgagacactggatctagcagtggttgcatgtgccaactttacatcatggtggtatggcatccagtaccctttttttgcagttgttatctctgtaagattaggaggtactggaggcagtgctttgagctttttgcaatccttaatcacaacattgtgtagattcatcatcgtatggccactccataaccactcattgagttctggcatgtcatcaagcaccagctcctccagcgactggaaaggctcctgttggctgctactgccatatgcctctgggcctatctgcctcagcattttcaaacgctgcaaccagattgttctgacggaagtaagttgaccaagtggtggaagctgctcccatgcattgcagccacttaggaaaatatgctcaagattaccaagccattcgttctcaagccaactaggggatttgactcccatccaacccatgatgtcaagtctctttagattttcgtgtggctggagggcttctagcacatcctcttccctatttgtatttacctcatctcgatcaggcgcccacattagctgcagcacagatagttggcctttcttacacagcatggcttcttttgcgtcatcaggtgtattgatattctcaaggtttctgatctgcagggatccttggagctctagtagatacccaagctgaactatgctttgtgtttgctctctggtaacc

SEQ ID NO: 28602 - DNA, 440 bp, Setaria italica
  Peptide Sequence Number=SeqID_94576
tcttgttggtaagttcactgacaccatcgcttcagcttctttggttatatatacagacaaaccatagcctggtcgacaccattgaagttccatcagtttctctccattctcttgacctccatttctaaagagggggaaaacacagttcgagttccagccatggcttccattctcagatctgcaagatagccttccaggatttgctctaaaggaatcgaagttgaagaggagctgcagacccgtaaggcagccatggatttgctctaaaggaatcgaagttgaagaggagctgcagacccgtaaggcagccctttcttgcctttcactaccagtgagacaatgggtgatgggcttgaaggagtgttacaacaacattgaggacacgatgtgctcccctagcaggccaaggtagcctttgctgcccgcatcagtggaatgca

SEQ ID NO: 28603 - DNA, 429 bp, Setaria italica
  Peptide Sequence Number=SeqID_94577
gaaggctggccgatcaggaaggagccggggaagaaggggaagctggtaatcaagttcaatgtggcctttccaacaaggttatcgttgtcgcagcgggcagccatcaggcaaattatggccagctaaccagagaagggaaagatgaaacagtggctacattggccctggaatctagatagatagttggaattcagacagatccgtggttataattgcccgtcgctaattgtatctattttctatggttaattgaatatgacctagttttttttgggtctctattggatcagtggaaaatggtgaggatattgtaacctgatttcccccttctgaatttttgcttcagttctttttttccccttatgtcatggtttgtttcattgaaatactggaagtcaattgcaaaggaaatgacaagaaagcaagagg

SEQ ID NO: 28604 - DNA, 259 bp, Setaria italica
  Peptide Sequence Number=SeqID_94578
accatgatggccctaattgctccaggatcccacgaagggagaagcttgcagagatggcgtggagtttctcccaatttgcactgggaacagtaagggcaccaaatccacatggggattccatccgtgacagtgctaatatgtatgcaatcttgctcgccaacgagcttctgagcatagagttgcgctggcaagagcagcgtgatcctttggaactgagctgcctggcatgggactcttggctgcaatggtttgcagcgta

SEQ ID NO: 28605 - DNA, 987 bp, Setaria italica
  Peptide Sequence Number=SeqID_94579
aaggcgtggagtttctcccaatttgcactggtataccttccatgccaattcaactgaaacgcatttcgttgggaacagtaagggcaccaaatccacatggggattccatccgtgacagtgctaatatgtatgcaatcttgctcgccaacgagcttctgagcatagagttgcgctggcaagagcagcgtgatcctttggaactgatcctcggggtgtgggtggagttgttgttgtacgctgcaaaccattgcagccaagagtcccatgccaggcagctcagcaatgggtgcgagttcattaccatcgtgtcattactagcgcaccacttcaagtattactctggggtctccaggggcactgaagacattggtggaagtaagcccacaagtgaaagtaacccataagtgaaaaccaggtttagatgaatttgaacattttcacctgaaaatggcccctcgttgttcaggagaaactgatgatttcacccctccaatgaaaccagcatagttatctgtaaataaatataataaatattgggattcattcataatgggaaccacatgctgcaagattaacttcctctttgcattcaaaaatctattacaaggatcatcatcagcgttgattcataacagcgaaaggccctggctggtggcgcaagtatggtgccgcatgtcaggatcacaatctgcctggattgatcttttctttcttttcttttttggtgaacattggtggccggcgtagcagtgaggcaagacgccaatgtgaaatagcaattcttatatttttacatagctgttgtgtgaccatgagaaattataggtatccagccgaggttgttgtagcttcactgttgcctgtccatgctgttgtcttgctgacatgcaatgtcttttcgttcctgtagaaggaaccaaaggaaaaatttttaatttagtaccttttttacctaagtacttttaaccctaaaaaaaaaaaaaaaaa

SEQ ID NO: 28606 - DNA, 865 bp, Setaria italica
  Peptide Sequence Number=SeqID_94580
aactaagaaataagaaagtagtacaagtactagtagtagacaattggccgcatcatgtcgagggtgctgcgccacatggcggtggagctgggcctggatatgaggatggatggctacgtgcgggtcagcgatcttctcagcctcaacctgcggacctatgctgaggtccctctaaagaaccacacggtggatgaagtcagggaggccgttaggcgggacaacaagcagaggtttagtctgttggaggaagatggtgagctattgattcgggcgaaccaggggcacacagtaaccacagttacttcggagagtttgctgacacccattttgtcagctgatgaagtgtcagtctgtgtgcatggaacttaccgtacaaaacttagctcgatcttgcaatctggcctaaagcgtatggcgaggttacacgtacatttctcaagtggattaccatcaagtggagaagtaattagtggtatgcgttcgaatattaacattttaatacatttggacgtcaagaaggcacttaatgatggaatgaagctctacatttcagagaacaaagtgatcttgacagaaggttttgatggtgtcgtccctgtgaaatactttgagaaaatcgaaacatggccaggacgagcacctgtaccgcttcaaagataaagaggccacggtaccactgatgtggtttttacatggcttctttcacatgctgaaagacctaaacatcttgtgttgtatccctttttgaaagaaaaaacaatgttgtatcccttaagagctttattctgctgcaaatcacatatgtgaatctttgtttgtatcagttacattagctggtgatttgttttgcctatacctattttgg

SEQ ID NO: 28607 - DNA, 809 bp, Setaria italica
  Peptide Sequence Number=SeqID_94581
agaattctcacgaaatttttccgaaaagaattgtatcctctttgagttttaactataccaaaattgtacagatatacatacatgatccctaagaagttaggagattaaagacaggagggcctaagctccaaaagacaagaaaaaactaatctacaccatgtggtaattggtatgtacctctcaagaagtaaaagatgggaatctcaccatttccttaaatcaaaaaagaatatgaaccgaaccctcttttatcctgagacgtatatcacccgcttgttatatctataaagaatttgaactaaattcttttttatatgtatactgaaaaaagtgtatcatcctttaagtggctcaagctgtacttccattggctcaggtgatgaattagactccagtttactgactaccctgtccgattgcaaaagatcaactgtatcgtcttcgtcggtgttgccaagcacccattttcctgaaaggccatcagcaccatctcttcttcgcttaatagccatgtactcaaaataagccgttaccaaagcaacgcttaaaaaccataagattagcccacatgtaagccccttgatgttcttactgccatacctgtgcccaagatgctgcaagccagtaaagagagccacgataccagcaagcgcagcagacctcccggtaaaatgatgcagatactcccaaactgtcctatttcctgatgatggttctctatcctccatcttatgcggtcgaagatatgcgtttattggttgcacacatgcgaatgtaaatgctaccgcaccaattctagcatgtctgga

SEQ ID NO: 28608 - DNA, 773 bp, Setaria italica
  Peptide Sequence Number=SeqID_94582
tgggttcctgtacttccaaggctgcctagagcataggaggccagcgaggattacaccagaggacgaagagtccgcagccgttcccgatccatcatgccagaggcaccccagtcacaacagttgagcgattccagaggacgcatgaccggcttctcggtgagtgagattgtccatgtcgagacggcgaaccgtggcaagtcagagcattccaagacattccaccttacgcagatgcagtggcaccacagccagagggacgttgtaggttgcagcaacgaagatgcctggtttgactctgtcagcattcttgaagatgattctgatgacgaattcaagagtgtaaatggaggtaagaacattataaacttaaccactatgaagcaatatgagagcgcttcccgttttgctgacgcactctctcgtattggagagatatgccgtggtgtgcccatgacattatctgttgaacagtacctgaaaagagataacgtgaaaagtgatgatcatggatgtaggagccaaagcatgtccgtgtgtgccacgaagtgcttaccaacctccttcagcttccagggcttgaaggataaaaaatgatacagatgatgataacaaggagagccccaccccatcccgcttacagaagctgctgcactctatcagcttcaatgacaggatgcagcagttgactggtggaagcccagacaaaaaaaagtcaacagtcatccggctctcatacaagacaacagcatgcgatggctgtgaagacagcagcg

SEQ ID NO: 28609 - DNA, 397 bp, Setaria italica
  Peptide Sequence Number=SeqID_94583
ggtatgaataattgcacctcaaaggaataagctttgcaaatattcaacatctacagctttatctgatattcttgcagtgaaaagtgatgatcatggatgtaggagccaaagcatgtccgtgtgtgccacgaagtgcttaccaacctccttcagcttccagggcttgaaggataaaaatgatacagatgatgataacaaggagagccccaccccatcccgcttacagaagctgctgcactctatcagcttcaatgacaggatgcagcagttgactggtggaagcccagcaaaaaaaagtcaacagtcatccggctctcatacaagacaacagcatgcgatggctgtgaagacagcagcgaattgggtaggtccagtgtctccatcgggaggagagccg

SEQ ID NO: 28610 - DNA, 314 bp, Setaria italica
  Peptide Sequence Number=SeqID_94584
ggcgacagccggaactcgcagcgctgcagcacgagcgccagcgcgaccttggcctcgatgagcgccaggttctggccgatgcacacccgcccgccgccgccgaacggcatgaacgccatctgctgccgcggccggtcgccgccgtcggcgaagcgcgccgggttgaactccgctgcgtcggcgccccacaccccgacgtcgtggtgcacggccatgaccggcatcatgatctccgtgcccgccggcaccgcgcaccctccgaggtccacgtcccgcttcgccttccggatcatcgccaccgccggcgggtacag

SEQ ID NO: 28611 - DNA, 827 bp, Setaria italica
  Peptide Sequence Number=SeqID_94585
cgtcctgacggcggcaacttcaccgtcaccttaccaggagccattgccctggctccaaaagcttcaggtggagatgatttctatgaggatctctacaggactgcccgcgtcttcaacgcgtcgtccacctacaagttcagtgtgccccccggaagctacttccttcggctccatttcagtcagctgttcagcaatctcagtgccaaggaatctgttttcgatgtcgcggggaatggcctgaagctgctgtccaagttcagtgtccctggggaggtctaccagaggaactccaagatcaactccaccagcaacgtcattgtgaaggagtaccttctgaatgtcacctccgggaagctggaggttgagtttgctcctgatgatgggtcatttgccttcatcaatgccatggaggtggtgcctgtgcccggcaactcggtcttcgattcggttaacaaggtgggtggtgttgtgtgaaaggccctttcagccttggggacagtggcatcgaaaccatgtatagggtgtgtgtgggaggtggcaagattgagaggaaggaggatcctcgcttatggaggaagtgggattcggatgagcattacatattctctctgaatgctgctcatagcatcaaaaatacatccaacataagctatgtgtcaagtgatgatttgacttctgcgcctctaaggctctatgagaccgccagggtaacggaggagacttttgttgtggataagaagttcaatgtgtcatggaggttcaatgtagaccctggctttgattacttggtccggctgcatttttgtgagcttgagtatgaaaaggcg

SEQ ID NO: 28612 - DNA, 408 bp, Setaria italica
  Peptide Sequence Number=SeqID_94586
gggggatgcggagccgcggcgcagaggacaacggcggcggaggctctgcaggacgaccggccggccgccctccaaggtcgccaccgcaccccgtttcgcatccgcaactggttcgccggcgtgtgattcgcggcccttggccgcggcaaccggaggcgaacggacgaactgagcgaatcattcacggcatccatgttttctagaagcggaagcatcgacgtctcgaggaaatctgtggtccgaattcccttgcaggggacctgctttacatttcacagcacaagaaatagatcaggaggagaaaggttgaagtcagctgaaatgaggtcaggcttagttgctcgtgaagatagcactgtaaatgtactgattgtttacaaacactttcaaacaaaattgcaaagctaa

SEQ ID NO: 28613 - DNA, 287 bp, Setaria italica
  Peptide Sequence Number=SeqID_94587
ctgaaaggtattaatgtaagcatcagtggtggagagaagataggaatcgtgggaaggacaggcagtggcaagtcaactttgatccaagtattgttcaggttgattgagcctacagaggggaagatgatcattgatggaatagatatatccacactgggtctgcatgacctgagatctcgattaggcataattccccaggaaccagttctctttgaaggaacaattcgaaacaacatagatccaattggacagtattcagatgctgaaatatggcaggctctgaagcg

SEQ ID NO: 28614 - DNA, 596 bp, Setaria italica
  Peptide Sequence Number=SeqID_94588
gctgcaagatcaaatgatctcacatcttagcttgaagttcaggacagattcagaaggtcttcaacagcaagaaacccttgatacgctgccaaaggctatcagatccagcatttctcagtatctgttttttaatcttgtccaaaaggtttacttgtttcaaggggtgtccaatgaccttatttttcaactggtttctgagatgaaagctgaatattttccacctagggaagatgtgattctgcagaatgaagcacccactgacttctacattttagttactggcagcgcggagttaatagagttgcaaaatggtgcagaacaggttgctggagtggctaagtctggagatgttgttggagaaattggggttctttgctacaggcctcaactattcacagttcgaacaaagtcgttatgccagcttctccgtatgaatcgcactgcctttctcaatattgttcaatccaatgttggagatggaacgataataatgaacaaccttattcagttattaaaagagcagaaagacaacagtgtaatggtgggcgttctgaaggagattgagaacatgctagcacgggtcatttggatttgcc

SEQ ID NO: 28615 - DNA, 225 bp, Setaria italica
  Peptide Sequence Number=SeqID_94589
aggaggagtcgggggagaggaacttgagggcctcgcggatgacgtacttgcccgtgaagcccgaggccccgaagatgacgacgtcgaacacctccggctccggcggcgccatggctggcgggcgggcgggcggcgggcagctcgagtagagagagcttgccgcggcgggggtttcggggtcggtcgctgagcggtgggccgcccggcaactagcgcctagcggag

SEQ ID NO: 28616 - DNA, 1488 bp, Setaria italica
  Peptide Sequence Number=SeqID_94590
tttttttggttcgttaggttgacgggcaaaaacaaaactgaatgtagaaaccatccttttgtgtacacaagaccacgatccaatctgaaggtttccaaataagacaaccaatctctcgggaaaaccacaagacacaaccattaatctgggcggttggtcctctacttttgtacgtttgatgcttattttttcaaagtcctgtcgacctctggcagcgattgtgtacattctgaggggctataactagctatctttggatggtaaactaataggcatagctaaatacaggacgaatgaaagctgtggtgactacatctaagtctggggaacgaatgttgctgcctaaatatcgacacgaaggcccgtcaagaaagcgagtgtgtaaggggaagtggacttgccaaagggtgtgcaccatcgtggcagcttctcgaggacctttgcgacctgtggtgtaactctattcacatctgttcttagttttaccaagaaaggaacatccgctgcttctttattagcttctcttccagatgtttgggcagcactgttcgaccagtacagtgtcagctggaattttgttggcgattttttgccgccagcaaactggattgtatgccatccatcaacctcactcttaccacccagtagaaccaatttctctgaatccacttgaacagtgaagtcatcaatttgttgtttgttgatcccaagtgaccaacgtgttgatgacttggtatcaaccgatattactgtctgtcgagcaccatcggtaactgaatcactttctacatggagcacaggaacttcagacttgctccatccagtactgctctctttgtaactccaacagccatacttcattgtaaatgttacaaagtcaacagtcatattccttccgcaaaagaactcttcatcaccaaggtccaccaattcctttgttaacttcccaggtgtattggaaaacagagaaatataggataatggttctctatttccaccatctattcctgtagtatccacgacatgtacaacatttacagatcgagccacatcctccgtaaatgctggcacaatgccacctgacaccagcgccagtgaaagaccaaagaataagcataatagcaaaccaagagttcttttatcacctgagatatgaacatatgaaagaagatacacgaacatgaaacagacgacgacagcaatggcaacagcaacaattacatttccaagccagtatggtagcccaccaggattcctgtcaatacgtacaacactcccaacaataacatctgccatgcgaacagccaaaccagcagaggacaccactggtgcaaccaaacccagaaccaatgtgacaactttaagctgtttgggtaaccgaacaggagaaagagtagcttccaaaaaaccatatgcaaaagcaggcgaaacaagccagatgagcgctatatatgatgatccaaccttgaaataggttcccagtgttag

SEQ ID NO: 28617 - DNA, 743 bp, Setaria italica
  Peptide Sequence Number=SeqID_94591
tagttagaaaacttaattttaggacaattgttgacccttgtcagaagacattgcacaatgctccgtgttgaatgttcatattgtttgttgttgtgctgtgcaattacagtatgatactattgttgatccttctctttgttcttatggttgtataacaaacctttcctaggtggtacatatttcaagaaacaatactgtgtatctggactgctgctctctacatcgagtcattacgtttagatgtggacaaggcctggtggaaggactttgttggtgtaatattgctggcagtgttgatatttatccttatattcctactgctattgttggggtttcattcgtaagtttttctccatgtctgatgtgtcttacagtaattaggcttttatttttatttttactaaatgtccaagtgcagcttcaaatttacgttcttttccttgagtcagtaggtcgagaacaactgctcgctctttctactggaaaaaagtttaaaaacttgttaattcaaacttggatgaacattgctgaaactattcaccgcaatacatgtagaagtgacaaacacaggggggaagaaagctacaaacaaaacaaaagaaacaaaatggaaacccatggcacatgaattacaaggcagcaatagaactgatatcccacagatccacttcttcctggcacatttagctagaatcttacatacttttcatatttgtatgacatgttatgtagctcatgaaccc

SEQ ID NO: 28618 - DNA, 1209 bp, Setaria italica
  Peptide Sequence Number=SeqID_94592
cttcctcgatcgactctcgactggcgaatccatgaggtaggttattatttgggggtgttacggagtgcttgttctgctcacgctagttcagtacttctacacagctggctcatctccagggtatgttgttgatgtaatgagagctggttcctcaatgcatgcgaccttcgtcaatactgctgctctttcaaagcagtcaaattcaagaaatggaaacataagttccccgaccagccgtgctcaactacagaaacttagcacaatgacaccttcatcgtcatgggcgcagatggttatggatctatatcctccagggtcaagcagcagggattggacttgcacctactgcagggttgttcagccacctcgtacaaggcactgccatgactgcgataaatgtgtccttcaattcgatcatcactgcatatggcttggaacatgcattggcaaaaagaatcattgccgtttttggtggtacatatttcaagaaacaatactgtgtatctggactgctgctctctacatcgagtcattacgtttagatgtggacaaggcctggtggaaggactttgttggtgtaatattgctggcagtgttgatatttatccttatattcctactgctattgttggggtttcattcgtacattgctctaacaaatcaaacaacctatgaagttgccagaaggaagcgcatattctacttaaggggagtacctgaaagagttcatccattcagtaaaggcatatgcagaaatctctacgacttctgctgttccagccagaaaggatatattctggaagctttgcccccagctgaggatctggaagctagagctgctcgttacacatgccgagatgtcatttgctgccgttgctgctgataggctgtgccataggattctctgcccatctagccagttcctcagttctttgttcaacagttcgctaatggaagcaaattttagtgacctgcagccgttagatgctctcggagttcattatttgtgcatagccatttgtacattttcactcagaaaatgtgtgccctgagatccagttgctcagagttcatctgtaattctctatgccctttctttcacataggttttcaggacagatagaattggactgtacttgtgtcgagatgtacattcgaggtgtggtttgtagtttcagaatttagtctacaaatcctgagcagttaaaa

SEQ ID NO: 28619 - DNA, 287 bp, Setaria italica
  Peptide Sequence Number=SeqID_94593
tgcacctggagcacctgcgcgagcgtcaggccgccgccgccgaggagcgagcccgccgcgccctgccgctccgcgccggagctgcaggggtacgcgaacgagatggtcggagcctgctgcatgggcggggcggccgcaagcgcgcgcacgagctccttgctgtccgccgccatctcgtacagagcggcgttgcggccgtgccagtctatcgtcgtggccatggatcctcgcacgaggaggaggagcagcggctggaagaaacagaagaggaagccgcgagaatctac

SEQ ID NO: 28620 - DNA, 240 bp, Setaria italica
  Peptide Sequence Number=SeqID_94594
tgcttgttttctttcacagcactggaactcactaaaaaagggaaacgagatacaaacccaacaactgcttaattttgataatacttcaaaaatgcatatcacgaaaaattctaagatacacaatactaccccaaacccatggcgtagctacaccatccagattacttaatagaaaactgagaattactgaaggtcataagtaatcatagctgacgatcattactgaagaccactaccgaa

SEQ ID NO: 28621 - DNA, 432 bp, Setaria italica
  Peptide Sequence Number=SeqID_94595
tggagatccttaacaataatcctattcgggtgttcgaggaagcaacgcgcaagtttgaggatgatatggacatggtgaagatgaagatccataggtaccccccaaagcattcaagttatcaacgaatggtataccgtcccaacggttgtggccatcggcccttaccaccatggcaaaaggcagctcaagcaggcagagaaggtgaagcatgcggctgcctaccactgcatcaaaaattctggccgctcggtccaggagatgtatcaagcggtcgtctccgttgtgctggaaatcaatgcgcgtcgcctctacgataacgacgtgatggaaggtatcggcgacgacaaattcctacctatgatgttctttgatgcatgcttctgggtgacgtacatgcttaaaatgtcgcgcaaggcctgcgacacgttgttg

SEQ ID NO: 28622 - DNA, 272 bp, Setaria italica
  Peptide Sequence Number=SeqID_94596
ggtggcggccgtccattattgccgtccgcgtgggtggtggcgtctctgacgctgcctcttcctcctgcgcctgagcgcctctgcctgcacttagcactttagcagtagcagcgacctcggctcgaaggatgaactgatccggccgccacgagcatggaggccaaagggatcaaccgcccagccccgtccccgcgggctcctccacgcgatccgggaactccaccgcccgttccccgctcctcctcctccggccgagcccgtacggcgcgggg

SEQ ID NO: 28623 - DNA, 300 bp, Setaria italica
  Peptide Sequence Number=SeqID_94597
gccggaggcattccgcggcaaccccgggctctgcggctacgtccccggcattgccgcgtgcgagcccaagcgcgcgccccgccgccgccgcccgctgctccctgccgtcgttggaatcgtcgccgcagtgtctctcatgctcagcgcggtcgggtgccggtccatggcgacggcgagggcgaagcggttggggcgccggtcggtgcgcctcgtcgacggcgaggaggaagtggagagggagcacccgaggatatcgtaccgggagctcgccgaggcgaccggcggcttcgtccaggaggg

SEQ ID NO: 28624 - DNA, 650 bp, Setaria italica
  Peptide Sequence Number=SeqID_94598
ttttttgaattttgatcaggggtgaaactgatgataactacataagctgagggaaccaggtgataattacataagcttgcagaaaactggtgcgcccagaacttgcttcaaagcaaataatgaggggggcaacaacaaatctcgcgtcaatcaatcaatcggtgagaaaaaatggggattttatttccgcaaacccgttatttgcacagactacatcttaaccaaagggcacacgaaataccgactactttgcgattctggctgagttcacatgctagtatgtacaacattcttccacgaagagggctcagcgtcagcgagatttgataatgtaataatccacctcagcaccaaataccctatgttttgctaactgattcagcagctgctgacaacggctcacgatcttccaagaatgtttgcgctgaaggaagagaagaaaggctcattctggcagctcccttatcctgacgttcatctgtctctttaccatctgaaatacctgatgtcctcctagaaggtatggaaaaactgcgggctataggcccaggtggtgttggtggcgttggtaaggtgatgctgtacttggtggtgttggtcttgccctaaatggtcttggactttgggtaccaatgaggcagaatttggta

SEQ ID NO: 28625 - DNA, 2376 bp, Setaria italica
  Peptide Sequence Number=SeqID_94599
cagtgaaagttggtcttgtttatttagcttcacatggttcacaaggccaaaagagagaacctgacaaaacttgctggtggtcaagatattaagagctgtggagaagcccaatgtggagccaaactcaagccttcaattttgggccaatgcatcaacaacaaagcccttctctctgttttttttcttttttccagacaactcctacagtgtgggaactaggatttccctacccttacacagagattgtttgaattttgatcaggggtgaaactgatgataactacataagctgagggaaccaggtgataattacataagcttgcagaaaactggtgcgcccagaacttgcttcaaagcaaataatgaggggggcaacaacaaatctcgcgtcaatcaatcaatcggtgagaaaaatggggattttatttccgcaaacccgttatttgcacagactacatcttaaccaaagggcacacgaaataccgactactttgcgattctggctgagttcacatgctagtatgtacaacattcttccacgaagagggctcagcgtcagcgagatttgataatgtaataatccacctcagcaccaaataccctgcacatggaaagtaactatgttttgctaactgattcagcagctgctgacaacggctcacgatcttccaagaatgtttgcgctgaaggaagagaagaaaggctcattctggcagctcccttatcctgacgttcatctgtctctttaccatctgaaatacctgatgtcctcctagaaggtatggaaaaactgcgggctataggcccaggtggtgttggtggcgttggtaaaggtgatgctgtacttggtggtgtttgtcttgccctaaaatggtcttggactttgggtaccaatgaggcagaatttggtaccaacggggcagagtgggcaaccaaactgggaaatgctgtattttttgatgtattaacaggcggtcgaggaagctcatgaagctcctttatttttggtgaggaaataggtggtggtgagttgcctggggatactctaatatgaattggctgatgcgcagagctgtgcctgggcgctgcagaaagaacatcaatgttctctgtggaccgtggtctggaagctattgggccagaaaatgaccctctcttcacctttttattatcagaagccttcaggtcataatagcctggtaaggctatatcacccactgggagtgttttccttgtttctgcagtattggtgttgctctctttcagcacagactgtgcattagataatcttgtaggactaggtagtttattgtctctcaaatctcccatatctgcagatgtgtggggcggagatgggaggggacctctgctgtcgagaggtcccaaagtaggatttcctgaaactatctgagaagtagctcgaacatcatttggagtaggcaaaacgtaagtatttaactttcttgttgcagaacgccgcaaatcttttattttctcttctgtctcaagctttttctcaggaaaaagaggtgctgactgactgacaattctctgtctttcacgtggtacagaagaatactcttctttgcttctattaaaaaagtcctctgtatgactcctggtagcattaccagattcctcagcttctttattttctccataatcaaaagacagctctccatcatggctgtcattgtaatcatcatcattttcatcctcaacaaagtaatcctcctcctcaagtgcactgaactgatgatcaatgtgttgctgctcagccgcaagcctaacgtgtggctctacagcctcaagggacttgagcccctttctgaacaaatttagctgtgcagcatgatgccgagcagcttgtgtgaaaagacttcggaactgtccttgcttcaatgactttaaccggaatagaaaaagagttgcttcctcttggtaatcttcctgagcttgtctcaattgctctgatgctcctgtatcacctttagcactcttagatcttcccttttctttctgcgcatttagcatgaattcgtacaattctctcttttcatcgcactggcgcttcatttcctccacagtttgaagctcattaagaagggactgtgatggagtggtgatggtattaagaacatgcacacgataactatctacaagtttccgaagttcaaattgtgatttcccgagcaacagcaaaaccttatcatttattccatccttgtttggcgtaacccttttaagcaaacaagttcccatttcttgaagtgcttcagagaactcatatgcactatttgcaattgctgcggcaacagaaagtaagttatcataacagctcctcatatctgccatatcctgggcagcccacggagg

SEQ ID NO: 28626 - DNA, 1105 bp, Setaria italica
  Peptide Sequence Number=SeqID_94600
tttttttgaaaacaatgatgtcttgtattatgtatttttcacatgttctgtcacacacatacttggaactgtgtcaatggcctggtgatgatggttatgcatctcaaccctcccgatacaattcgagtgctatggttgatctaggtgcatgccgatctccttatgtgattatagtgccagaggtcttggctagtctttacaagaaaataaacttattggcatctgcaatgtagaccagcaataaacaagatcatctagatgtggctacggagatggtggcgttcaggtatgcaatgcattcggtaggcaggctgagaaatgtgttcatgaagaggtcatcgattgggtcgacgacggccaccccaaccagcttgcatctccctttatcgtccattctttctccagtgccggatcttatagctcccctggattcctcggaggtcagtgttgtgtcgatgaacaaaggcggcgctttgtagatgctccccaccgagaaacagaacctcgacctgaacttgagatcaacctgaccagtggctcggtcgatggttccgccaagggcctcgggcaagatgtcgatcttgaggaacggcggcagcggcaggccgaggaacctggtcgtcgcgccggacatgggcgggatgtacagactcgccacgtcgaagtcgacgagcaccgtgccgttgccgtcctccccgctctcggcgccgcgcgccgcgcccacgccgcggccgccctgcgcgttgtacacgaagtccgggtacctggcgatgccgagccggcatccctcccgcgtccggaactcgacgctaagcgtgccggtgccgggccgcgcttgctgcgtggcgatggcgggggaggatcgctgctcgcttccgggggcgcatgctaccaccgcggccccgcgtcttatcgacggcggccgtgggagtctccggtgcgcaccagcagcggagtaagcgcgcggttgtctcggattcgcgagtctttgcagggttgagaggtctcgcgagaaggttttgatgctgccggctgccatttgggcgtgcgcgcacggtggcacggcagcgacggtgaaaagcagctgacgaagcgacgatgatgc

SEQ ID NO: 28627 - DNA, 555 bp, Setaria italica
  Peptide Sequence Number=SeqID_94601
ttaatggcaaatcagtcattgttcctgtgggatctctagctatagctgcctttgcatttgggactgcctccagttggccaagaaaactgtggaatttgtcatctgtttaatccctatttgtgtctgcaattcgttgatctgttctgtacttttcattacttttaatcggttgaatgaggggcaaatcatatgctgctgttagatgaggggtaaattagtcattgtttgatgaaagtctaaagttaggctatggatccaaacagcccagcaggactaaagtttaggggctaaagtttagctcatggactattgatctaaacaccaccttagtttaggatggagggagtacatcttataacgttttccattgaaaagagcgtagtcattacagtatttccactgtctataataaagaaagtggtggtatcatattatttacgtaataaagatataggtgttaattttatacagaattacatattttgtttttaactacaatacttttttcttggagcttgctgtggacaaacatagtgaaacacaattcagactgag

SEQ ID NO: 28628 - DNA, 362 bp, Setaria italica
  Peptide Sequence Number=SeqID_94602
cttttttattttcagttcgtgagtttattgaacggaccatcaattcatcaacattcttaaattcttaaaggatattttctgcattggttaaagtgaaaacaaagtcaaggaataagctaggtgatagtattttggacgattgtctagtcacattcattgagcgggatattttcttccgagtgaaggaagatgatataatcaagacattcatgtcattcaaaaagtggcgggtaaacaaagcagataagtaatattgtaagtttctttaatactactgatcgaagcgatatctccatggtggatgctccaacgtgaacacttagttgtacatcagataggacaggtctactgttttcctacat

SEQ ID NO: 28629 - DNA, 283 bp, Setaria italica
  Peptide Sequence Number=SeqID_94603
gttcctcggtgtagaaggccgccttgtcctccgcggggaggcggaagaactcctcgcagctggactccatgtcccgcatcgcctgctccggcacgccgtggttgaccacctggaagaagccgagctccttgccggcttcgaggacgtcccggcggacctcgtcgcgggggcgggagaggtcgatgacggggagcgcgacggcggcggcggacgccggcgggcgctggtcgggcgggaacacgaagctgtccgggagcgcctcgtgggacgcggccgacgagag

SEQ ID NO: 28630 - DNA, 214 bp, Setaria italica
  Peptide Sequence Number=SeqID_94604
agcatttgcatccggccgccgtgcagctccacggcagaagctgtggcatgctcaccattgccatgcatacgtgtgctcctcgatcgcattgacaccacagcgcactactaagccacacgcagaacagacctctccataacccaacagacacgcttgtgcacactggcatgtccacacacacgacatatacatatatgtatatatttgtatatct

SEQ ID NO: 28631 - DNA, 389 bp, Setaria italica
  Peptide Sequence Number=SeqID_94605
cccggacattgacttagatgcctcgggagaagcagcattaggatttaagaccgttcctccttttagctgtacagagagacaaaggtgcccaagctaaccagatagaggtcaagagcatgtcatccaagaagaagagggcggcggcgatagatctctccgtggaggcggagaggagggaagaagaagaccgcagcgccggcgatcggcgggacaaggatggcggggtgggcaagaaagaagaacagttcaaagagcaagaagaggcaccacccaaagaggaaaccggcggcgaggagaaggtagttgaagtggttgtagaccaaggaggagacggcaccaaggaggagatcaaatataggactcaacaaggagaggagatggaggaggac

SEQ ID NO: 28632 - DNA, 248 bp, Setaria italica
  Peptide Sequence Number=SeqID_94606
ccggccggggctctcttgtcgcgatggcccagcacctcctgcccctcctcgtcctcctcctgaccgccgccgcctccacctgcatcacggcgctcacgtcggcgagcccgccgctgccggtggcgttcttctccttcttcatgtggggcctggcgtcggccgcgctcggcgtgcacctgccgcgcctggggcgcggcggcgccgagtgagcgagctcgccgatcgacggctgccggcccactcgctca

SEQ ID NO: 28633 - DNA, 987 bp, Setaria italica
  Peptide Sequence Number=SeqID_94607
cgttgcagctagggcctggcttcatggtaaaatcatgctgttgatatgtactgttcttcggttgcttcaccgtctcatcagtcgtagtgttccctgctacaggcagttcaatgtagaaagccgtcagtttcacttgttgtgccacacggccatccttttgggcttccgtaaagaaattgttatagctgtctgccgcatcacaagttgaataccgtatcccctggtcggtggcagtgatactctcaagagtgaagtacccgttactgtcttccagtggcttctggctagatgtggtcacagcaacagcgcagctggacattggaggtacaataccacctagtagtgggctcaagaaatactctgaagtcgtggtgagcagcctaaatgcaactcgggcagcagtattatttgttaaacgcagcacggacgagattgtcaagtcacttggtcctgtgtggaacttgagctcgactgactggacgcttaggaggacgctcttgccgatctcgttttcagtctcatccagctgctgaacgacattttctatatggggccttttatgcttgtcagactccatgcatttcaatgcgacgtcaatgcatgtatttacctgttggcaatatgcttctagtgaggaaccactccaggctttctgcaatctgattctccaattggcttgtatcagaccagtaaattcttgaagaggcatgtcgtcaattttggtgcgggctgtaggccctgctattatctccaggattacaacacccaagctgaatatgtcaaacttcgttgagcgaatactgttgctgacatattctggcggcatgtatcctaatgttccatgtacaccttctgtgctcctagtttcctcgaatatcttggacaagccaaaatctgcaagttttggcaccatgttgctatcaagcaatatattgtcaggtttgagatccaaatgatggaccggattctttaatcccgtgtgaaggt

SEQ ID NO: 28634 - DNA, 261 bp, Setaria italica
  Peptide Sequence Number=SeqID_94608
atctataccaggctatccatgtgtggttcccaacttccggtccccacaaagtcacttggataagctgtgctccaaagatatttatccctccgattttagtcctgcaggaatatgccttcgaagacccttgcttatctctgtaaattcacaatgaaatttgacagtctgtaatgtctctttcactgtgggagaaacatttgccttatctgtttgtttatggttttacaagaatggagagagatacgaattgtgactcaaaaa

SEQ ID NO: 28635 - DNA, 542 bp, Setaria italica
  Peptide Sequence Number=SeqID_94609
aagggagtaaggtttaatgctgagaagaaacaagttggaaattattactctaccaaggtacttgcctgattactgcacaacttttacttacattgctatgtgttgttgctgttcaataatatccatgtaacaaagcttaatatgatttcgcatatctttttttctaattgattggatttgcagattatgatagatgtgctaaatttcctttcgtatatatgcctaatcagcctaagcatttagttatccggcctgttcggtagtgcttgctgcagcagctagctagcagcaactatagcagctgcagcaagctaacaagaagtcaagcatctgcagctgggcttgcagcactttgcagccgagcggcttgctgtgcagctgcagcacaatcgaccccaataaattggtttagcctcagccaggaaccgaactgaagcacacttcgaaattaacctcacattctggctcgactatcatcattttctgtcaagcgtacatcacaaggtgaaacagacaattatttattaattggtttagttaaa

SEQ ID NO: 28636 - DNA, 988 bp, Setaria italica
  Peptide Sequence Number=SeqID_94610
acatatcagtaatgctaacatcatcatctgtaagcaaccagtagtctgcatcactatcaacatctttaggtaaaatcttcctcaatactccttcagaaggacatggagcattcagatcaggagtttttatggatctgctgagcattaagcaccgcctcctttctattcctttgtgctctttttgttctggggcctttcacagaagcagcacattttgcaaaatatgtgtgacttgccagtgtcgcaatgtcatccagctttccctccaatttctcctcaaagttactaaccaagtagagatcaactgggcccattgcgctccgtattattattctatatctcctttgaaagctctcaacagccatcaaatcaggattgggtacttcaacagaagtcccatgaggtgcttttattgcaattagagttttggttctgaaagcatggcaatcccttgatgtcatcttcggtaagaaatagccacctctgtctgttttcatcttcagttaacgtctctagcttctttcgcatttcacttatatgttcatccaatgcttgctcctggagattaagattttcaacttcattcttcagaactgaaagagcattatccaagttagttcctgattcatccaaacccttccaatggattctgttcttcgacttcttttctatcaaaccaattccctcaaggacattcgtaatgtcatacatgcgccttttctgaacatgtaacttctctgcagtgctattcaaatctagaattccatcttgaacctgcttgagcagactgacgaactttctggtcaatagtgctagtgaactgtcatagcggcaaggaacagctggagtaggtggattgccaggtgaaccagcatttgatataggtgtctgaggttcagctttgcagcatttagcctttgacttgtatgtccttgctgattttccagacactggggcccccagtggagtgaccaaactaccttaccta

SEQ ID NO: 28637 - DNA, 332 bp, Setaria italica
  Peptide Sequence Number=SeqID_94611
agcagctcgtgtccacgcagctgctcgagttcgacgtcgagcagcacctgcacccctcgcacacggcgaacggctcgtaccccaccgcctctgtcttcgccgccgccgccggcagcgccaccgacgaccgcgaccggtacaccacgctacgcaccggcaggtactccgacgacgacgacgactgccgtttctccttgccgctgcccaagttgctggctcctgcttgagcttgcagggaggcgaagaggagggcgagggacaggatggtgaagccggtgagggagatcatcgagacacggagatgatgacgaggcatggtttgtgggtttttt

SEQ ID NO: 28638 - DNA, 497 bp, Setaria italica
  Peptide Sequence Number=SeqID_94612
ccgtttgctgttagtgatgtaaggctacttatggatacttccatcgtgaagattttactggaacatgggcaagattgttttcccgagtaaagaaacatattgtatggggagtattgaagtccgttactggcatgcagggcaaaaagtttaaagctaaatctactagccaaaaggagccatctgctgccttaatcagtgccagtgattttaatttaagtgacagtgacggtgatgatgctggcaattctgatcaacttccggcatttctaaaaaagcctagtgatggagctggtgatggatttgcaacgtctgttaagggtttgtttaattcccaaaagaagaaagcgaaggcatttgtcctgaagacgatgaaaggagaggctgagcatgatttccacggtgaacggagtgagaatgaaattgagttctctccatttgcccggcagttgacgataaccaaaacaaagaagcttatacggcggcacacaaagaagttg

SEQ ID NO: 28639 - DNA, 501 bp, Setaria italica
  Peptide Sequence Number=SeqID_94613
acagcaatgaggttcgtaatgacaagtcccaaagttgagagtgacttgttgatgttggtagcttccttcaagcgctctccttcagcacctgagcttttttgcctctctgagcccgcaagatcaacaaggttgagccgagaaaatcgatggtggttgataccttgcgactcccacttactctctataaggcaagtgaaaacactgtgagagcggctacttgctcggttcatattagtggctgctacctttctgtttgctgccccctcaataagttgttgaagcgcttctcgagcattggagatctcatgttccgtcagattctcaacatggacaccctttttggcatcctctcttatctgcaagtttacagaatttgggttgagcagatcaagaatctgctcattatatatctccagaaaagagcatttacatgtaaacctgagcttttcatccctccttatttccttttccttttggattctagcaaagagatgctcgaac

SEQ ID NO: 28640 - DNA, 864 bp, Setaria italica
  Peptide Sequence Number=SeqID_94614
caaacacaccctccacgtcgttgaagtcatcatcaaagtcgctttcctcgtcatcgtccgagccgtcatcctcatcatcatcgtcgtcgtcgtcatcttcttgtgcaaactctgtggcagaggccgctgcaagatccaggtcggcaaagacctgtgtgttgtccagcccaatgatgacatgcgcgatcttgtcctcccccatgatgctctccagcagcgcgtcctcgttgtcgacctcgaagtagatatctccgttctcgtcggtgaggtaggggaactccggcaggatgatccgctcgtggacgccgtcgccgacgagcgtggagatcatcaccgttgccttgttgttcacctcgacgattgtgcgggcagactcggcgtccgtcaggtgggctggctcgccgtcgtccagcgtcgccgcctcggggatctcctcgaaccggtggtacctccccttccccggccgctcgtccatgtggtccggcgccgacgcgacggcccggcaatggcggacgcggctagtgccgccgccccggcgcgcgcgcccattgctccaccaggcgcggtagcggcagcgggaggggaggctctggcactggagcgagaagccgcccgagctgacgccggtggcggtggctctcctccccgagaggacgaagctagaggcgcggcgggaggaggggataggggagcagaaggggtccggcgctgcaacggtggcaggccggcggcgcgtgcggctgcgggcggagcacgacgcggagggacgccgaggagagcggctgcacggcgccccgcggcgggctgacgaggaacttgagcggggaggaggtctggaccttgaaggcgacggggagggacggg

SEQ ID NO: 28641 - DNA, 1061 bp, Setaria italica
  misc_feature (1)..(31): n is a, c, g, or t
  Peptide Sequence Number=SeqID_94615
nnnnnnnnnnnnnnnnnnnnnnnnnnnnnnngtccctttttttttttttttggccaagaatttatttcactagattgatttcctaccaaagggacatggccaagaatttatttcactaaattgatttcctaccaaatgaattatcacatcgaattacatcaagacttatgtcgagcctgtggcgattgcccttcttgatgtgtattcctaggaaacagaagctcatgtatttgtttctccgcactgaactctgaagtggcctttgttgggaaagcaaatctcaatgtctgcacttgagttcctgagcacactctcaagtcaaatccaaggcagtccactccaatcaccgctgcttcctctacttgaatggccttgcacctccagcagagtgatttcagagcctgtgtgatcttatctccaccagctctcaggcgcgatattacgttcggagcagaatgcgcgatgatgtctggcctagctttacggtattcttcgatctttacttttggctcagttccatatgcagtgatcaactcaatgctgaggacctcaaccttgaagaaggtggcaccgctttcctttttatctttctgtggctcatcacttgacaagtgcttggcaaccatggtgctctcttcagcaaaggcgggcctcagctgaccctcaacaacaaggcttgcaggtggccggtccagccaatctatattagacttggttgcagtctctacaatcatccttgcaaagtacaatggatggcaagaattcactgtctcaaggttggaccaacttggtagatcgtcatcttcatcctcctcctcatcgtcgtcgtcatcgtcaacagcaaacacaccctccacgtcgttgaagtcatcatcaaagtcgctttcctcgtcatcgtccgagccgtcatcctcatcatcatcgtcgtcgtcgtcatcttcttgtgcaaactctgtggcagaggccgctgcaagatccaggtcggcaaagacctgtgtgttttgttcccagtcctaattgatgacatgctgcatccatgaagcattgatttcagctaacta

SEQ ID NO: 28642 - DNA, 1080 bp, Setaria italica
  Peptide Sequence Number=SeqID_94616
tagaaagggctaccgtgaaaccgtacgcggcggggctgcgcatgacggcgaggtgggcggcgtagtagtcggcgtaggcgatgacggcgtccgggtgcctccggcggagctggtggagtgccgccaggaggcggcggttgtgcgcgtagctctgccggttgacggaggcgacgcagctgacgttgtcgcggtcgtcggggcgcgccagcgtcatggccagcgtcaggcaccccgtcagcggcagaccctgcaccatcacgtacttggcgcctcgctccagcaacccctgcaagttttttgtttgttttttgcaaacccgggattacataaagcattcgtatttcgtttcatccaggttaattgtattcatcttattttatttcattatttcatttcatttcagctgcgaagacgagcatgtggacggcctgatctgggcgatgtatcttaattcccgttagagtttgatttgttttagatgttgaagactcgagttattcgaattccatgtaatattgcactaaatgtaactttggacttttttcttttaaatgaatgagcagtgctcctgcttcttttaaaaaaaataaaaaaataattgtattcatcttctactgctacttgtattattattctgatataaatacaatcatgtccggctactgcttgagaaatggagcatggattcagaaatccagaggaggtggcactgcactggcagtggctccgtagtccctactgaaggctggaggacaaacaaagggacagcgcagtaaatagcagccatcaaaccgggctggtgccacagtactgaaggtttggatgcagagactgcagggcctcatcaaatcgaccgttctagtactgttcttttttctttttatttttggaaacgaaattctagtactgttcttggtcatggatccaagcacagagcagcagcaaggtccactccagtctacattcatgtttagctactcatatcaggtcagtccagggatagttggattggcatgaagtgagctactgaagtgagctactgaaagtttagatattaattatgagtattaaatatagatt

SEQ ID NO: 28643 - DNA, 1387 bp, Setaria italica
  misc_feature (1)..(12): n is a, c, g, or t
  Peptide Sequence Number=SeqID_94617
nnnnnnnnnnnnttttttgtcaagctttttttttatccgcatgaaccatactatagttattagaaatactttcagttcatagattcaatagaaatggcaattaagggttccaatcaagatggcatgcattttctcacaactgaattgcaattggtctgctgaccctagctacagtggtagcatctagcaagcgtctacactgatcacggcttgccctgggccttcctggcgaggagatcgctgaaggccgggcggcagtaggcgtcgccggcgtggaagaacatgccggcgacgaccttgtacatagcctccgtcatgtggacgccgtcccagttgacgtacctcgccggctgcgcgcaggccgtgttgaccgccggcgagccgcaggtggcgaagaggtcgaagttgtagtcgccgccgcccgagccgcagcaggcccggaagggctccgtgaaaccgtacgcggcggggctgcgcatgacggcgaggtgggcggcgtagtagtcggcgtaggcgatgacggcgtccgggtgcctccggcggagctggtggagtgccgccaggaggcggcggttgtgcgcgtagctctgccggttgacggaggcgacgcagctgacgttgtcgcggtcgtcggggcgcgccagcgtcatggccagcgtcaggcaccccgtcagcggcagaccctgcaccatcacgtacttggcgcctcgctccagcaacccctcgacgaaggtggtgatcctctggacggccatggtgcggacgagcttggtcgggatggtgtcgcgggcgatgacggtgtaggcgtagtcgttggcgccgatctcgcccacccagaagagcgcgtcgccgacgaccttgctgctctcgttggctttccggaggtggtcgtcgaaccaggcgagctgcgtcatgatggactgcggcgtgatgtcgaggctgaggttgttcctggcgaagaagtcgtgctcgatggccgtggacccggccaccgcgaagttgacgccgacgccgccgtccgccgccgccgccgaggcgttggagatggagaggtacggcgggaggaaggaggggaggttgagcgcctcggcgaggaagtcgacgacgaggcggccgtcggagtagcggttggtggagcggtggaagaaggtggcgccgtagggcgggctggacacgtagccgaatgagtatggccccgtcgtcgaccgcgtgttccccgtgtccgtgaacgagtccccgaacgcgtacaccctccggaacgccgacggcggggctgccgccgctggtggggctgcggcagccgccacaacgacgacgatggagagggtcagagcgaggaggagacggttgctggccgtcgtcgccatgctcatcagttgtctctttt

SEQ ID NO: 28644 - DNA, 999 bp, Setaria italica
  Peptide Sequence Number=SeqID_94618
aatgagctaattctgctcttattattcgttatgtacgaagcaaacgtatatccaacaaagaagcaaataaaaggagaaaataaaacgaaagaaagaaaactatagtgcctataccccattgaacaggagcacctctttaatttatgtactccaccggccactgcgccgtattcactcctaatctcatccgctaaatcccatcattttcatactacaagtccttaagaaaaaggaactcaaaaatcaacaaatataactactagcggtaattaactttttaaacttaaaattatataagctcagaaaaacacggagaaatcaccatcttttgatggatctctcctccccacgccatcgccgccgccgctgcccccgtccgcctccggcgaggccttctcgccctcgcccgcctttgcggcctcggggtcattggacgcgaacacctcgcgcacgaccttctcgacgtcgagcgcctcgtcgccgtcctcgtcctgcggcagggtcgggatgaacggcgggcgcgccacgtggaggatgcggtcccagtcgacgccccggaagaaggggtgggccttgacgccgcgcgcgccgatgcgcttctcggggtccttctcgaggaggcgggcgatgaggtcccgcagcggcgtctgctcgccgacgagctccggctgcttggtgaggacgcggtagaaggtctccttgcggttctgcccccggaacggcgtatgcccgtagagcatctcgtagagcaccacgcctaggccccaccagtccacgacgaagtcgtggccgcgcccggcgatgatctccggcgccacgtagtcctccgtccccacgaacgagttcgacttcgcgggtgtccgcgcgccggcggaggcagcggaggaagccgtggtcgccgtcgatgacgaggacgacgaggaggccgtccgcgaggtggacggcggcgacggcgagtccgcggccgggacggcatgcttcgaggagccgccagtgcgg

SEQ ID NO: 28645 - DNA, 246 bp, Setaria italica
  Peptide Sequence Number=SeqID_94619
cgtcgccgtgtccatggtcttctctgtcctggtgagtgcatctaatttcttattatcttcctcctcgtcagacagaatcaccaacgtacgcatggacacacgggaccaggccttggtcatgttcactctcacggcgagcctgcacggcctccgtccggtgccgtgccagccgggcgccggcggcgacgcgtgcgagccggcgtcgacggggcagatggcggcgctgtacgcggcggtgttcatgct

SEQ ID NO: 28646 - DNA, 449 bp, Setaria italica
  Peptide Sequence Number=SeqID_94620
ccgtacagacttgtgacacattagtctcgatctagctgttcctggcacctttcccatctctgcgtttgagctgcatttgtgatccagaaaacagtcccagcttcgaaatcatcaatgccaaaatcctggataattgcatccaagaagagctgggcctcctcgctgaatggtggcatattagagctaccattaatttcgtggaagtgtcagcggccaattgacctgcaggagagcatacgccgagaatgcgggatgtcctgaatgtgaggtaactcgatgaggacacagtatctgataagtccgaactcactgaagaagggcttcaggtgagttcatccagtggcagtaacaccatcatcaggcagaaggtgtcggtatctggcatgccgcacagctcctgcagtgctcgtcactagctccggcgacggaggcgccgaggggccgcggtg

SEQ ID NO: 28647 - DNA, 460 bp, Setaria italica
  Peptide Sequence Number=SeqID_94621
ggccacgcttggctgtttgtataatgcagtgacttttacaccaacaagttcagacgattttacttgaatccaattgaacggtgtggcgaattgccaatgtggagaagtgaatgaactgtgcagtgatgcaccattcatggaagcttattgttgtttacgtacactagtgtttggtaaaatagtgaaaggaaattgtgtttgactgtatcgtatcgtactttgttaaaatagcagcttgaacgtgcaataagatgcacgtgtgttggcttagatgaataaatagttttgcttcagtcttactaacatcacattgtaaaatgcagtcacggggattccttgtcttggtgtatggtcctggtgacactggtttatgcaaacttggactgtttcccttttattgccatctatgcaagttatgactgtttccctattaatgctatctgatgggatcttggcatgg

SEQ ID NO: 28648 - DNA, 559 bp, Setaria italica
  Peptide Sequence Number=SeqID_94622
agaacatagagttacttctaggacctagtacagcaattttgctcaattcatatatgcgctgtgatccagagaaggctacagctgaagagatggatcagtcgcttgctgcttatgatgtagatgtggtgaagctgcttgctgattatgatgatgatgatggtcttgcatcatatgagtctcagtttactgcatatcggacatgggttgatgaggatgctcgagctgcttctattcttgttgctagcatggaggacatgttttcggctgacattgttgagcttgattttgcacatcttatgtgggcctttcttcgtaagcgctacgagcccactggtcagtctacctttcttgcagctattcgtcaggagtagcttgttcgacagggtgatggtacagttgatgacttctatgctcagatttttgctatttggcgccagattgacactcttggttctcagttgtcaactagcactttcagtcttgcctgggtcagcaacagacccttgagcttcgccgacctacgacttcttgacgcgtctccgggatgagtttgagccta

SEQ ID NO: 28649 - DNA, 2150 bp, Setaria italica
  misc_feature (2147)..(2150): n is a, c, g, or t
  Peptide Sequence Number=SeqID_94623
tacgaagggtttacaacttagaaacccaaccaaaaactctgaaacaaaccctcgaaagctaggaagatcccgcggcgcagcaccctcctctcctctccactccccctcccgtcgccgcctcccccgtcgccgccgtcgcgagaccgccatggcgctgcacgcccccgtcctcgtgctgaaggactcgctgaagcgagagtcgggagcgaaggtgcaccaggcgaacatccaggctgccaaggctgtggcagacatcattcgcactacactgggtcccagatctatgttgaagatgcttcttgatgccggtggaggtatcgtggttactaatgacgggaatgctatattgagggaaatagacattgcacatcctgctgctaagtctatgattgaactaagccgtacacaagatgaggaagtgggtgatggcacaacctctgtgattgttctagctggtgagatgctccatgttgctcaagcatttattgacaagaactatcatcctactgttatttgccgagcatacaccaaagcgcttgatgatgctatagctgttcttgacaagatagcaatgcctgtcgatgtgaatgatcgcgtgtcaatgctaggacttgtgaagagctccattggtacaaaattcactggccagtttggtgaccttattgctgaccttgctatcgatgctactacaacagcaggcgttgacctaggtcagggcatgcgtgaagttgatatcaagaagtatattaaagtagaaaaggttcctggtggtcagttagaggattctagggtcctcaaaggagttatgatcaataaggatgttgtggctcctggtaaaatgagaaggaagatagttaacccacgtataatccttctggacagccctattgagtataagaagggagaaaatcagactaatgctgagttgatgaaggaagaagattggcaggttctgctggagatggaggaagagtacataaagaacctctgtgcacaaattcttaaatttaagcctgatttggtcatcacagagaaagggctcagtgatcttgctattcattatttgagcaaggctggtgttagtgcaattcgtagacttcgaaaaactgacaacaacagaattgctaaggcttgtggagcagttatagtgaacaggcctgaggagcttcaagaatctgatgtgggcacaggagctggcctcttcgaggtcaagaagataggcgatgaattctttgccttcatcgttgattgtaaagatccaaaggcatgcactgttctgttgaggggagcaagcaaggatgtcttgaatgaagttgagaggaacctgcaggatgccatgtctgttgcgaggaacattttgaagaacccaaaactcctacctggaggtggtgctactgaattgactgtatcggcagcactgaagcaaaagagttcttcagttgaaggtgttgaaaagtggccctatgaagctgctgctttggcatttgaagcaattccgagaacattggcccaaaattgtggtttgaatattattaggacaatgactcaactccaaggaaagcatgctaatggtgaaaatgcctgggttggccttgatggaagaagtggtgaaattgttgacatgaaagagcgaaagatctgggactcctacagtgtcaaagcacagacgttcaagacagctattgaggctgcttgcatgctgttgagaatcgatgacattgtcagcggtatcaagaagaagcaggctcctggagcctcagctcccaagcagccccagattgaaacggaaggtgatgcggacaatgagcagatgatcccagagtagatgttttagcgaacccacactggcgaagttgtttactcaggccaggatagcacgttgagccaagtttattatttgagtgtttgttggtggctgggcctggcatgcaaatgtacctgatttcatacagttgagagtggttcgtgggttttgggatccaggttttgaagtgtggctgctgttcatcttgttttggacttagctggacgactatcaagcagcgaaactagtagtttttgtggctaactgtgtctgttgtaatgacacatgctttggtttggtaatgctatcgtttcccatgctggtaactctgatcattacagannnn

SEQ ID NO: 28650 - DNA, 291 bp, Setaria italica
  Peptide Sequence Number=SeqID_94624
cgccgaggccaggggcgccgtcgggagggtcgtggtcatgaccagcggcgtcgcggccgcgccaggggagatgcgggagatggcggcgcgggaggagcggaccgtcgaggaggcgctgctccccaagaccgccgaggggctgcgcttcctcgtgcgccgctccatgcaccgcccgccgccgtggatgccggacttcgtgcttgacgacttcatccagctcatgtgcgtggatcaaaggaaggagagggcagagttgctccaggaattgctcaagaacggcgctggcttcga

SEQ ID NO: 28651 - DNA, 339 bp, Setaria italica
  misc_feature (318)..(318): n is a, c, g, or t
  Peptide Sequence Number=SeqID_94625
aataattcactggcatgaaccacagtttagccaagctttccatggtgattgttttcgccaaatagattgcaacaagggagggattgaatacataaaatactatattgttcaaatgttttcttgcttctttgctaagtataccagcaaaatcagttgctaagaaggacccaacaccagttaccagaagcatgttaaagactggcacgcatgctgtgacgaagagctctaagagacccatgttctccttttaggatccaaaagtatgcaatgattcttatcctcaatcctcagccgctccgagatcacatccaatgcggngaaggcgaagcggagctccct

SEQ ID NO: 28652 - DNA, 1464 bp, Setaria italica
  misc_feature (1398)..(1464): n is a, c, g, or t
  Peptide Sequence Number=SeqID_94626
tgatctctcgcaagtccactccaagcctcgccgtcctccgccgccctctccctctcctcgccatggcgccgccgcgccgcgctctcctcgccctcgaggccctcctcctcttctccctctacctcacagccgccgccttccagtccgacgagctcgtcctcaacgacgacgaggagttcgagggcgtcggcgcccgctcgtcctccccctcccagccggcggccccggcggtctcctcctcccgccgccgatccgcggacgcggcgtcggcagcggtcggcgagtccaacgccctgcagttcacgcttgagcacgacctcggcgttggcaaggggttcacccccgccggaaccttctccgctcggctcaagacctccgcccatggcacgcagactctcacaaagcttcgcttcatgaggaatgagttaactgaggatgataaagatgcattcaaaaaattgcttcaggaagatggcttttatacaatcaggctgccatctaatgtgttggaccctacaagaaaagacaatgttgtttcctcaatcaaagctagatgcattccacgtgacagtttggatgaacacattgttatccacatggatggtgtaaatattttggcagttaattatggttctgttggtggatgccaatacccacgacaaatgaaatttccatcaaaatggacattcagctcttatactattttgaagactgctgaacaggcaccaagaaccccatcatttgtggaccagatgttagaagctgacaatggacttggtgaagtgatgaaaccacctgagaaatcattctgggctaaatattggatgtacattattcctcttggtctcattgtcatgaatgctgttacggcagcagcaaacataccggaggagcaagctgcaggccagggccaacctggagcacaacgagcacctgctgctgctgcaaggagaagatgattgttgtttctatgtgttttcggtgtcagatcaatggagaatgaacaggagacagctcgtacaatagcatggtgaccggatcccattctgtactgagaagtttcccattagcatagtggcctttgaagctgcagttgaacactcatttgttggtagcaactttaaccagtgcaacctgtatttgctgatgtaaagtgactttatttgtccattttgaatcctatgtgttgtttatagatcatccttattttgtaccgatcgaagtggtcacttgattagccaatattctcgtgtttctcgagtgccacatggatattgctgtatgaagctgcgcaaactgtggcaagatgttttgtagctaccaaatatatgtacacgtattagacatggcattgtgagagtttgcatttcatatggatcaaggaaaaggctctgaacnnnnnnnnnnnnnnnnnnnnnnnnnnnnnnnnnnnnnnnnnnnnnnnnnnnnnnnnnnnnnnnnnnn

SEQ ID NO: 28653 - DNA, 454 bp, Setaria italica
  Peptide Sequence Number=SeqID_94627
cttaacaccaagtagaagcagaaaatatccattcttcacaatgtcagtggcatcatcaagccacacaggtaacttccgtcatattaacgatcgccaaatcatctgcatggaaatttttgtcttatccctgctaatttcagaatgaccttgctattgggtcctcctggtgcggggaaaacatcgctgcttttagccttggctggaacacttccttcaagtcttaaggtacttgcttcgagtttgcattgtactaatgggcatacaatggacgagtttgaggcccggagatcagctgcatatgtcagccaacatgatctgcacatgggggaattgacggtccgtgagacagtcaatttctcttgggaataagtatgggacgcttacatattactcctctatgatataactcatctacaactgaaattggtcctgcagctgagatgcttgcactccg

SEQ ID NO: 28654 - DNA, 572 bp, Setaria italica
  Peptide Sequence Number=SeqID_94628
gggtcggcgacgaccaccagcgcttcctctccaagttcaaggaccgcgtcgaccgagttgggattgaactgcccaagatcgaagtgcgctaccggaacctgaacgttgaggcagatgcgtatgtcggcagcagggcctgcccaccatcttcaacacctatgccaatgtgctcgagggcatcgccaatgctcttcacttaacaccaagtaggaagcagaaaatatccattcttcacaatgtcagtggcatcatcaagccacacagaatgaccttgctattgggtcctcctggtgcggggaaaacatcgctgcttttagccttggctggaacacttccttcaagtcttaaggtaacagggaatataacttacaatgggcatacaatggacgagtttgaggcccggagatcagctgcatatgtcagccaacatgatctgcacatgggggaattgacggtccgtgagacagtcaatttctctgcaaaatgccaaggaattggtcatcgctatgatttgctagtggaattgtcaaggagagaaaaaggaagcaaagtatcgtcccagatccagaaac

SEQ ID NO: 28655 - DNA, 187 bp, Setaria italica
  Peptide Sequence Number=SeqID_94629
aagtggatggagaaggtgcaaatcgagacggagttctaccctccatggcttctggacggggctggtggacaggtacgagcagatgatggaggagcaccacccggggctcggcgacgaccgctggccgttcatcacgcacttcgtcgggtgcaagacctgcgggaggtacgaggactacccgctggag

SEQ ID NO: 28656 - DNA, 392 bp, Setaria italica
  Peptide Sequence Number=SeqID_94630
agcgcgcgcgccgagaagcaggaggagcgagagattgggggcgaacgcgacgcggcggaggaatccatccatcgatcgaggagaaggaagaggagagcaagatgcggggcgggacggtgcagatcaactggcacgacctgcagccggtgctcagcctcgacttccaccccgcctcccgccgcctcgccaccgcaggcgcggaccacgacgtcaagatctgggtcatatcgtcggatggttccgagagcaagctccccaccgccaccttccagagcggcctcgtcccaaacggcaccgcccacagctccgcggtcaacgtcctccgcttctccccttccggggaatatctcgcctctggtgctgacggtggcggtattatcctttggaaattg

SEQ ID NO: 28657 - DNA, 414 bp, Setaria italica
  Peptide Sequence Number=SeqID_94631
ctcccgcaccatgcccgcgtccgtcacgcacacccggggctcgctcccgtaccagtacacgaacatcctcccgtatatcttggaccagcggacgtaatggggaaggaggcggccgacgatgtcgtggctgagcgagcccatgtcgccggcggtggcgtcggcgacaagggcggacacgtcgcggaggttcccgacgaggaggcgcggcggcgggccgtggacgccctggccggtcaggatcctccggatcctcatcggcgtcaggtagtagcaggtgacggtgacccacgcggcccttgtcagcaagaacaagagtggcaatgcgaggacgaggccggctacgcccaatgccatctcgtaggagccttgtgccagtgccagtgccggtgcctgagacacgcaacagaggatagg

SEQ ID NO: 28658 - DNA, 422 bp, Setaria italica
  Peptide Sequence Number=SeqID_94632
cagccgcagctgccgccgccgcctcctcagccagcctcgccaccgccggctccccagccacggcagaccgtgtcggccacgccgccgtcaaagcgcggccggccgccccgcgctgccgagacgccgccggcggtggaacggaaccaggaaggggtggctccgcaggcgccaccgttctggacagcttgcccctcctgctgccacctgcatcagtacgaccgctcgtacgaggggcaaacgctgctctgccccagctgccaccagccgttcgccggcacggcaatgtccacgccaccgcccattgtgccaggcaccgacatgtactactgctcatgggggttctttccgatggggttccctggtggccctgcgttcgccggaccagtcagttccccagggcagcagcccccttctgctctagg

SEQ ID NO: 28659 - DNA, 615 bp, Setaria italica
  Peptide Sequence Number=SeqID_94633
cggagggcgcgtcgcccggggagaagagcccggaggcggtggcggcggagctaaaggaggtgctcggggcgcggaaggagtcggagaccgccgagggcgggggcgggtggtgggcgggcgtggcgcaggagatgtcggagatcgagtggcccgcgccagggaaggtggtgggcaccaccggcgtcgtgctcggcgtcatcgcgggctccaccgtcgcgctgctctccgtcaacgcgctcctcgccgagctctccgaccgcgtcttcgccggccgcggactccaggacttcttcggctgacgacggcggcgtcaggttttcttgatgatgcggataggcgtatgtggttcgtgtactctgtaactactgttttcttgcgattgggaaatactagaggctgctagggtgatagatcaggtgttgggggctcaaattatgtatgttttttttcaattaacaaggaaaaaatgatgagtttgttgcgaaaattgtgatgttgctaatcggtgaatggcaccaccttgatgctgattcagaaaactagtctgagtctctatacagtggtgaggtaactacatgctaacagattactactagtttatatcttaactctgtt

SEQ ID NO: 28660 - DNA, 654 bp, Setaria italica
  Peptide Sequence Number=SeqID_94634
tacgacctaggacgacgtaccgacggacggtagacttggcgtgggcggccaccgcgacctgcggccgcgagctcggcggtggtccggtagaagcggtcacctccctgtgctggtccctcgtgttccactgggcccgctggccgccgctttactttgttgaccgcttgccggtcaagtgcggcgctagcgtcgtccccagtccgcttgagtgcttctcgagtcagatcgttgggtgaagctgctgcggaaccggcgggaggcgcaggtgcggcagatgcgccgcgacatcgccgcgctcctccgcgacaagcaggaggacaccgcaagaatcagggttgaacatgtaattagagaacagaacttcatggcagccaatgagatcattgaactcttctctctaggtagtcagatcatgaatatgacaatggggacactatgcaattgaaagatgctgcttcagctgctcgagcagctgcagagtctgctgagagagcagcatctgctgccaatgctccagctgattttgccaataagaacaaccacccatttgatgaagtcgaagattgcaaagattcagctcatgaatacactcatccccgcaagaggcagtcaatgagcaactcaagcagaccatccaggaaagaacacacagat

SEQ ID NO: 28661 - DNA, 437 bp, Setaria italica
  Peptide Sequence Number=SeqID_94635
gattgagaagctgtctgttaagaagccttctgggcaaactaagctcaaagttctaaaggatatagcaaaggagcatcagattgattgggataccactgagagtgagcaggagcttctaaaacctcctgaagagttaattaaaggaccgagtacatttgttgaagcttgcaatatgcctgtaaagactactctgacaccacatgttgtgcaaccaatcccaaccaacttcagctctaggtactcagatgatgaatatgataatggggacactatgcaattcaaagatgctgcttcggctgctcgagcagctgcagagtctgctgagagagcagcatctgctgccaaggctgcagctgattttgccaataagaacaaccacccattcgatgaagtcgaagattgcaaagattcagctcatgaatacactcatccccgcg

SEQ ID NO: 28662 - DNA, 959 bp, Setaria italica
  Peptide Sequence Number=SeqID_94636
tggtctagtcctaattgtagtattctatttgtaacttctttcttcttcttaggttagttctagtattctattgtaattattgtacaatcttcatggcagccaatgagatcattgaactcttctctctaggtagtcagatcatgaatatgacaatggggacactatgcaattgaaagatgctgcttcagctgctcgagcagctgcagagtctgctgagagagcagcatctgctgccaatgctccagctgattttgccaataagaacaaccacccatttgatgaagtcgaagattgcaaagattcagctcatgaatacactcatccccgcaagaggcagtcaatgagcaactcaagcagaccatccaggaaagaacacacagatgcctttgatgaactaaaaccccacggaggaaagcatccagcacaggaagcttcagcggaacgaaccacgtggaagacacagttaactatcctgcggatttggacactaggaagacacgcagaaggaacagccgtgctgctcggaaggtgcactcagagattaagtttgatgattctgagggactgtattcagagtcagaggatgaaaatgatgtggagatacagtcggtagaaagaccactacctcctacgagagagcctttttcagaaaaccgtcactctgaagaggaagggccagataatgatttccctgagctgccaaaggcaaaccatcaatctcgtgttcatccaaatatgcctctcgactacgaaactctcactgcacgctttgaggcgctcaagatcggcaagcttccgtagtgcaacacgaagagcaggctcactatgttacattctctcttaatgcttctgtacaacaacatatcacatattagtaggttatagtgcgtctcctagagtatttgattttggcttaggtcaaggatttgccgaatcaaactattgcagcatttgtattt

SEQ ID NO: 28663 - DNA, 305 bp, Setaria italica
  Peptide Sequence Number=SeqID_94637
ccttagatggatcaacaaaggatatctgaacccaataacaaacacttgataggcacaagcaggaaaggatcaaagcttatatcataataaactagctgaatacaaacatgcttcaagaacaatgttgtttacagtagctgatcaaattctatgaccacaataccagaattaggcattttaacaatacttgaagataagttggcaacaaaaactgtttactcatcttcttctacaaccgtcactttgttcttcagtaaccaactttcttcagcactttgtcaaaatagttgggaaaattgggtttg

SEQ ID NO: 28664 - DNA, 595 bp, Setaria italica
  Peptide Sequence Number=SeqID_94638
agctgctatggccagatctcctgcggtctcagccaactcgaagccactcacgacattcaaaaaatagcattatcctagaaagttttaaggacctagactttgcttgcttctaaagaacagagattatgacatcagcccttcttgatggtatgccaactacttgtccagagtgaagagaaccagaaacacacaatgcctgaacttcgatagcaaaggtcctagatccatctaaaataacagctacagcaagcccggccagaatttcagaatcagagtcatgctcagttaagaacatctggctaggattcagcacagcttgcaaaccaattcggccatctcaaatacaccaagctcatctgttgaaccgaaacgattcttaaccgaccgcaacaatcgatgggatgagcacctctctccctccatatacagaacaacatccactatgtgctctaagaggcgaggaccagcgatatcaccgctttttgtaacatgtccaatcaagaaaacagggatattggtcagttttgcaaatcgtaacaaggcagaggtgcattccttgacctgtgaataaattgccagcacttccagcaaatga

SEQ ID NO: 28665 - DNA, 708 bp, Setaria italica
  misc_feature (683)..(683): n is a, c, g, or t
  misc_feature (693)..(693): n is a, c, g, or t
  Peptide Sequence Number=SeqID_94639
cacccgtactctccggtgacgaggcagcacggtgagtcgacgatgcggtcggagacgacgaccttctcgacgcggtcgccgaggatctccttgatcaccttgcacaggtcctcgaactgcttcttgcgctcctcgcggcgcttcttggcctcctcgtcgtcttcgtcgagcttgaggccctccttggtggccgacaccagcttcttgccgtcgtactccttgagctggccgacggcgtactcgtcgatggcgtccaccatgaagagcacctcgtagcccttcctcttgaggcgctcgaggaacggcgagttctcgacggccttcctgctctcgccggtgatgtagtagatgtccttctgcccttccttcatgcgcgtgacgtagtccttgagtgacgtcatctcgtcgccgctcttggtggagtggtagcggaggaggtcggcgagcttggcgcggttctgcgagtcctcgtggatgcccagcactactcacactgagaaggcatcgtagaacttggcgtagtcgtccttgttctcggcgatctcgaagaacatctcgatgcatttcttaactagattcttgcggatgaccttgaggatcttgttctgctgcagcgtctcgcgggagatgttgagggggaggtcgtcggagtcgacgactacgccaagttctacgatgccttntccaagaacntcaagcttggccgcg

SEQ ID NO: 28666 - DNA, 315 bp, Setaria italica
  Peptide Sequence Number=SeqID_94640
cgcgatttgtgatgtattattgcgcatctaagaggcagttaaacaagttacccaatagctgactacatacatatacacaactacatcaaccatgggaccagaatacccatgataggacgagactgacgacagctactctaccctttctacgtcagcatctgccttgtccgtagaagcctcagctggcattgtgagtctgatcatgctcaatgaagtccagcgcctgctccttcgacaccacattaatgtagctcaccctgttcttgtgtgtcacaccatatatcttatcagcgcctgctccttcgacaccacatt

SEQ ID NO: 28667 - DNA, 470 bp, Setaria italica
  Peptide Sequence Number=SeqID_94641
gctgttttaaaggtgagttttgctgactttctgatgtttatgtgctcctttctgttaggatggggatgcaggtgatgatgataatgatgaggatggacctcgtgacccagatcctgaagggagaatagagaagtatatcggtgtgaaagtcaaggtttccttcactggcaagggagaaactcagtctatgaaacaattgtcagggggccagaagacagtggtggcgttgacactgatttttgctatacaacgatgtgatccagcaccattttatctgttcgatgagattgatgctgctctggatccacagtaccgaacagccgtcgggaatatgatccgccgtctagctgacgtggctgacacccagttcattgcaaccacattccgaccagaatacccatgataggacgagactgacgacagctactctaccctttcaaggtcagcatctgcatgccttgcgtgtagaa

SEQ ID NO: 28668 - DNA, 439 bp, Setaria italica
  Peptide Sequence Number=SeqID_94642
tttttttttagacaatcaatcgcaacaaaactctcgttcagaaatgcaatagcaatcaatcagtttgtgcagcagcaacatacaacgcacagctttgactagtttttaccagatgtcagcagcgaaccaaaaggtagccacgtccgcaataatacatcacaaatcgcgcatctaagaggcagttaaacaagttacccaatagctgactacatacatatacacaactacatcaaccatgggaccagaatacccatgataggacgagactgacgacagctactctaccctttctacgtcagcatctgccttgtccgtagaagcctcagctggcattgtgagtctgatcatgctcaatgaagtccagcgcctgctccttcgacaccacattaatgtagctcaccctgttcttgtgtgtcacaccatatatcttatcagcaac

SEQ ID NO: 28669 - DNA, 847 bp, Setaria italica
  Peptide Sequence Number=SeqID_94643
caaggcacttccgtggaagtgttctctgagttagtgcaaggtggtcgattggatattggttatgatggagaaaaaggatggggatgcaggtgatgatgataatgatgaggatggacctcgtgacccagatcctgaagggagaatagagaagtatatcggtgtgaaagtcaaggtttccttcactggcaagggagaaactcagtctatgaaacaattgtcagggggccagaagacagtggtggcgttgacactgatttttgctatacaacgatgtgatccagcaccattttatctgttcgatgagattgatgctgctctggatccacagtaccgaacagccgtcgggaatatgatccgccgtctagctgacgtggctgacacccagttcattgcaaccacattccgaccagagattgccaaagttgctgataagatatatggtgtgacacacaagaacagggtgagctacattaatgtggtgtcgaaggagcaggcgctggacttcattgagcatgatcagactcacaatgccagctgaggcttctacggacaaggcagatgctgacgtagaaagggtagagtagctgtcgtcagtctcgtcctatcatgggtattctggtcccatggttgatgtagttgtgtatatgtatgtagtcagctattgggtaacttgtttaactgcctcttagatgcgcgatttgtgatgtattattgcggacgtggctaccttttggttcgctgctgacatctggtaaaaactagtcaaagctgtgcgttgtatgttgctgctgcacaaactgattgattgctattgcaaaaaaaaactagtgcgactgagtcggagaca

SEQ ID NO: 28670 - DNA, 3678 bp, Setaria italica
  Peptide Sequence Number=SeqID_94644
gcgactcgtttttgtaccctctccctcccatccccggcgcggttgctcagctcgctcgcttgcagcaaatcggcggtggacgcggcctcgccgtcgctcgcctctcccccccccccgcgcggagctcctcccactcggagcgggatttctcgagggttttgatggtggcgtgatcttccccatcctcaaaaatgtatataaagaaggttataattgaagggtttaagagctacagggaggagatctcaacagaacccttcagccccaaagttaacgtagtcgttggtgcaaatggatccggcaaatcaaatttctttcatgctatacgatttgtcctgagtgacatgtttcagaatcttcggagtgaagataggggtgcccttctccatgaaggtgctggacactcggttgtatctgcttttgttgagatagtgtttgataatacagacaaccgtattccagttgataaagaagaggtacgcttgcgcaggactgttgcttcaaagaaggatgaatactacttggatgggaagcatgtcagtaaaactgaagtcatgaatcttctagagagtgctggtttctctcgttctaatccatactatgttgtccagcaaggaaagattgcatcccttaccctgatgaaagattctgaacgactggatcttctcaaagagatcggtggtacacgcgtttacgaggatagacggcgtgagagcttgaaaataatgcaagatacagctaacaaaaggaagcagattgatcaagttgtccgctacttggaagaaagactaagagaacttgatgaagagaaagaagaactgaagaagtaccagcagctggacaaacagagaagatcactcgagtatactatattggaccatgaactaaatgatgcaaggaatgaattagcttcaatggatgataaccgaagaaaaatttccgaaagtatgtcccatgcggataatgaagtggtggatgtacgtgagatgatcaagagttttgataaagaaataaaagtctcaactaaagggataaatgataccaaggcgcaaaaggaaggtgttgagaagaggcgtactgaagcactgaaggtagttgctcagattgaacttgatttgagagatataaaagacaggattgtgaatgagaagagagcaaaggatgaagcagcgagggatttgcatagtgtgaggagggagagtgaaaagtcaaagtctgaattggctgaaattagtaaggtgcatcaggccaaattaaaggaagaggaggagatatcaaagagcattatggatcgtgagaagcggctaagcatattgtaccaaaagcaggggagggcaacccaattcgcaaacaaagctgccagggataattggcttcaaaaggaaattgaagatcttgagcctgtacttttgtcaaatagaaagcaggaaggtttacttcaagaagaaattcagaagcttaaagatgaaattagtaatttgactacctacattgagtctcggaaaagcgaatcaagcaagttagaggccacacttgcaaaaagacataatgattacaatgatttgaggaagcagagagatgtgcttcaggaagaaaggaagtcattttggacggaggaaactgatgtgggagctgaaattcaaaggctaagagacgaacttacaaaggcacagaagagcttggaccatgcaacgcccggggatatcaggagaggcctgaattctgttagcagaatcattagggaccatggtatttctggagtttttggtcctgtattagaactggttgattgtgaagagaagttctttacagctgttgaggtcactgctgcaaatagcttgttccatgtggttgttgagaatgatgacatatcaacaaggatcattcaaatattgactcgagaaaaaggtggaagggtgacatttataccattaaacagagtgaaagttccagacctaaattgtccacaaagtcctgattttgttccgttgttaaaaaaattgaaatatcgtgccgatcatcgtcgcgctttcgaacaggtttttggcagaacagtaatatgtcgagacctggaaactgcgactaaagttgcacgtggcaatagtctagattgcattacactcgatggtgatcaagtgtcaaaaaaaggtggtatgacaggaggtttctatgactctagacggtcaaagctgaagttcgtgaaaataataagggatagtaagatcgcaatcgagaaaaagacggcgcatctagagaatgtcggaaacaagctaaaagatatagataagaaaattacagatttagttaccagacagcaacaaatggatgctgaacgtgatcatgccaagtcggagttggagcaaattaaggttgacatcaccagtgcaatgaagcaaaaggggtcacttgagaaagcccttggcaagaaggaaaaatcacttgaaaacatccgcaaccaaattgagcaaatccaatctagcattgcaatgaagaatgacgaaatggggacagaacttattgatcagctaacatcagaggaaagagatctcctttcacgattgaatcccgaaattactgaattaaaggagaagtttctattgtgtaaaaacagtcggattgagattgaaacaagaaaggaagaattggagaccaatttatcaacaaatctgatcaggcgtcagaaagagctagaagcaataatttcatctgccgattctagaaccttgcctctggaagctgagtcgaaagagcaagaattgaaaagttctaagagaaatcttgatgagttaacttcgttattgaaggctaatgttgatgccataaataacttcaccagaaagatggatgatctgaaaagaaaaagggatgatctgaagactcgtgaagctattctggagcagactgtacaagatggtgccaaagacttggaacagttaatgaacagcaggagcactcatctagccaagcaagaagagtgcatgaagaagatccgagacttgggctcattgcctgctgatgcttttgaagcgtacaaaaggaaaaacaagaaacagctgcagaagatgctttatgagtgcaacgagcagttgaagcagtttagtcacgtcaaccaaaaggctcttgaccagtatgtcaacttcacagaacaacgggaacaactgcagagaaggcgagctgagctggatgctggtgatcagaaaattatggaactaatatcagttttagaccaaaggaaggatgaatcgattgagcgcacatttaaaggggttgcaaggcacttccgtgaagtgttctctgagttagtgcaaggtggtcatggatatttggttatgatgaagaaaaaggatggggatgcaggtgatgatgataatgatgaggatggacctcgtgacccagatcctgaagggagaatagagaagtatatcggtgtgaaagtcaaggtttccttcactggcaagggagaaactcagtctatgaaacaattgtcagggggccagaagacagtggtggcgttgacactgatttttgctatacaacgatgtgatccagcaccattttatctgttcgatgagattgatgctgctctggatccacagtaccgaacagccgtcgggaatatgatccgccgtctagctgacgtggctgacacccagttcattgcaaccacattccgaccag

SEQ ID NO: 28671 - DNA, 316 bp, Setaria italica
  Peptide Sequence Number=SeqID_94645
taatttttcctgtacatagctttcccacgtatttagaagatggtgaggaaacttattttctcatgaaaataataatctagtatatacaggaataagggcaccagcaatgtataggtgcacccctggttctaaggtgggacccagcaatgatttgatgtcacatgttgtattagctccaatgtatagaaccaggttgaatctatgaatatgggatccgcagccctccatctctctcttccctctcccattttccctatattatattgcatgggacctgattttatgtatggaacctggttccatatagaatcagctt

SEQ ID NO: 28672 - DNA, 503 bp, Setaria italica
  Peptide Sequence Number=SeqID_94646
gaagccaagtagctatggaaatagaagtagcatagagaagcagtctgtggcaggcactgtagagattgaagcaggacaatacagctgggaagcccctgacaacatcttgaagaagacaaagttcacactgaagatcgatagaaaggtggacatcattaagggtcaaaaggttgcagtttctgggtcagttggctcaggaaaatcaagtctcctttgtgccatcatgggtgagattccaagggtcagcggtgcagaaacaacagttgttggatcaatggcatatgtcccgcagagtgcatggattcaaaccgggacaattcaggacaatgtgctttttgggaaggccatggacaaggccctatatgatgaggtgctacaagggtgtgctttggataaagatgtggaactatgggctaatggagacatgactctggtaggggaaagaggcatgaacctgagtggaggccagaagcagaggattcagctcgccagagcattgtaca

SEQ ID NO: 28673 - DNA, 261 bp, Setaria italica
  Peptide Sequence Number=SeqID_94647
cttccccacggcaaagctgcagctccaagtctgcaactagctgatgcaagacagtggtgaccagcgaccacgaaccgacgagtgagacctccgtgaccgaccaaccgcgagccagccaacgaccgacactagctagctagcaagcatccagggatggcggcgcatcacctcctcctcctcctgctcgccgtgctgctcccggcggcggccacggcggaccccgacgccgtgcaggactactgcgtgccggacgccggcggg

SEQ ID NO: 28674 - DNA, 202 bp, Setaria italica
  Peptide Sequence Number=SeqID_94648
cgtttccagaatgatatgtcaattaacaatgcacatgtcgatatattgcaaggtcaacattgggaaagtactccatggaaagactgcagatcaagcaagatggttatttccctgctgacttgctcttcctatccagtacaaatcctgatggtgtctgctacatagagacagcaaatcttgatggggaaacaaatctagaaaa

SEQ ID NO: 28675 - DNA, 472 bp, Setaria italica
  Peptide Sequence Number=SeqID_94649
aaaaggtataaagcttggtaaacaatgataccaagcagttcaccattagttcagagacaaatgctattagggaggctgaagacagggtaagatgcacatactactgctctttggaaaacataggtagttttttagttggtttatttctctagttgaagttgtcatccataagatttggaaattaaaataatgggattgcttaagtgcaaaaagttcatgcaaagtgccaaagtaggattctgagttcatttggtacttgacttgtgttactgtggtaattgtgcatttatgtgggtctggtatatatgggatattaacattttgttttgacttgtgtttcttgatatttaatttgaagggccctgctaacttttttttgggaatacatgtaataaagtggtagtatttagttttcttggaccttgttacttattgctttagtgctttggtctctctattatctttctgttac

SEQ ID NO: 28676 - DNA, 3764 bp, Setaria italica
  Peptide Sequence Number=SeqID_94650
tttgagcagttcaggcgggttgcaaatctttactttctcatgatttcaatcttgtcaactacacctattagtccagttcatcctgtcactaatgtcgttcccctaagtcttgtgctactggtgtctctcatcaaggaagcttttgaggattggaaacgtttccagaatgatatgtcaattaacaatgcacatgtcgatatattgcaaggtcaacattgggaaagtactccatggaaaagactgcaggttggagatattgtgaggatcaagcaagatggttatttccctgctgacttgctcttcctatccagtacaaatcctgatggtgtctgctacatagagacagcaaatcttgatggggaaacaaatctgaaaataaggaaggctttggagaaaacttgggactttgttactcctgacaaggcttctgggttcaaaggtgaagtgcagtgtgaacagccaaacaactcactttatacgtttaccggcaaccttattgtggacaagcagactatacctctctcaccaaaccagttactcctacggggatgcagccttcgtaatacagaatacattgttggggctgtcatattcactgggcatgagacaaaagttatgatgaattctatgaatgttccctccaaaagaagtacattggaaaaaaagctagacaagcttatccttgctctttttgcaaccctcttctcaatgtgtgttattggcgccattggaagtggtgtgtttattaatgaaaaatacttctaccttggattgcgtgggcgtgtggaggaccagttcaatcccaaaaacagatttgtggtgaccattttgaccatgtttactctaataactctatactcgacgatcatcccaatttctctttatgtgtccattgagatgatcaaattcatccagtgcacacaattcattaacaatgatcttcatatgtaccatgctgagagcgacacccccgctttggcacggacttctaatcttaatgaggagcttgggcaggttgaatatatattttctgacaaaactggaacgctcacaagaaacctgatggaattctttaaatgttcgattgatggagaaacgtatggaactggcattacagagattgagaaaggaggagcagagcgggctggaatcaaaatcgatgatgagggtaaaagatcagccagtgcagttcatgagaaaggattcaactttgatgacgctagaatcatgcgtggtgcgtggagaaacgaacctaatcctgaggcttgcaaggaattcttcagatgccttgcaatctgtcatacagttcttccagagggtgaggagacaccggaaaagatcagttaccaagccgcctcaccagatgaggctgcacttgtggctgctgctaagaattttggtttcttcttttataggcgtacgccaacaacagttatggtacgtgaatcacatgttgaaaggatggggagtatacaggatgttccatatgaaattctaaatgttctggaattcaacagtacgagaaagcggcaatcggtggtttgtcgtttcccaaatggaagactagttctctattgcaagggtgctgataatgtcgtatatgaacgattggctgatggaaatcatgatatgaaaaagaccagcagagagcacctggagcaatttggttctgctggcttgcgcacgctttgccttgcctatcgggatcttagcagggagcaatatgagagctggaatgagaagtttgttcaagcaaagtcatctttacgagatcgtgacaagaagctcgatgaggtggctgaattgattgaaaaagaccttatattgatagggtgcacagctatagaggacaaactgcaagacggggtgccagcctgcattgaaactctctctgcagctggcataaaaatttgggtgttaactggagataagatggaaacagcaattaacattgcatatgcatgcagcttggtaaacaatgataccaagcagttcaccattagttcagagacaaatgctattagggaggctgaagacaggggtgaccctgtggaaattgcgcgtgttatcaaagattcggtaaaacagagtctgaaaagcttccatgaggaagcccggcattctttaaatagcacccctgaaaggaagttggcactcattattgatggcagatgcctgatgtatgcactggacccaactcttcgtgtggatcttcttggattgagtctaatttgccactcagttgtatgttgcagagtttctccactgcagaaggcacaggttacaagcttagtcaagaagggtgctcggaaaataactctcagcattggagacggtgctaatgatgtgagtatgattcaagctgctcatgttgggattggcatcagtggccaagaaggaatgcaagctgttatggctagtgactttgccatagcacagttccgttttcttactgatttgcttcttgtacatgggcggtggtcttacttgagactctgcaaggttatcacatacttcttctacaagaatctgacatttacactaactcagttctggttcactttccaaactggcttttctggtcaacgattttatgatgactggttccagtctctatataatgttattttcacggcacttcctgtaattatagttggattgtttgataaggatgtgagtgcttcactgtcgaaaagatacccacagctttacaaggaaggaatcaggaattcattcttcaagtggagagtgattgcagtgtggggtttctttgccttctatcagtcaatagtattcttttacttcactgcagctgcgagccggcatggtcatggttcatctggcaagattcttggcctatgggacgttagcactatggccttttcttgtgttgtggtaactgtgaacctccgccttctcatggcatgcaactcgataacgagatggcattatataagtgtggcgggcagtatagtagcctggtttctgtttattttcatatattcagcgataatgacatcgttcgacagacaggaaaatgtgtattttgtgatttatgttctgatgagcacttttttcttctacctgacactattgcttgttccgatcatcgctctgtttggtgacttcctatatctatcgattcaaagatggctgttcccctacgattaccaaataatccaggagcagcacaaggatgaaccccatgagtacagcagggtgcagctgcctgagaccagccatctaagcccagaggaagcaaggagctacatgatctcgatgctccctcgagaatcttccaagcacactggcttcgccttcgattccccgggctacgagtcgttcttcgcctcgcagcaaggtgttggcgtgccacacaaggcgtgggatgtggcccggagagcaagcatgaagcagcaacgagctgggaaatcctaatcgcgtgatgacctcagcattttttgtaaagttttgtacatcttgttttttgagcgcagatcacaggggtgtgtataggtagccttgtagccctttttcgtgtttgtcagtggttcacccatatgttgtgttgggatgaagggtaggcgttgatccatttggatgttaagaaccacgtaggggacggagtacttggtagataaacataggtggtattggaaatgcagttagcaaaaattctttcctacgtttatggcatgttgcacattgtttgtcaagttcattgcgttaccttttcgagttttaacaaaaaaaaaaaaaaaaac

SEQ ID NO: 28677 - DNA, 671 bp, Setaria italica
  Peptide Sequence Number=SeqID_94651
cgtgaaggagcgcaaggagctggcctcgtacgcgcacggcctcgggaagaagctcaagtcgcagcaggtcggcaagggcggcgtcacacccaacctcgtctccgctttcagcgacaacctcgagtcgaacgagctcctcaagctaaagattcacgggaactgccctggggagctacccgatgtgatactacaacttgaggagtcaacaggatccattgctattgaccaaatcggccgctcagttatcctgtatagacctagcactagcaagatgaaaaagaggcaagaggcagctgaaaatgctaggagatttgcaagatctaaagaagaaatcgctaggcgatttgtaaaatctgaagaatcgtttgaagaacgccctagaaacagtgcaggcagaagattcgtgtccacatttgggtctcagcagaagagaagaccaatggcatccaagggttcatcatacggccgagggtagaagcagaataaaatggtatatggcttgtttttcgtgttgtctggactctggagagatcatgtaaattttaatagacaaactaattggtatatggatgctagtgctaattctagtttctgccagtaaagctacggttccagctcccaggtctcatcaaccacacaatgaaataggcaaagattattttctgtcaaaa

SEQ ID NO: 28678 - DNA, 537 bp, Setaria italica
  Peptide Sequence Number=SeqID_94652
gctcgtcctctaccgcccccgaccggtcatccctccgccttcccgccgccgacctcgctccgctccggcctccaccgccgcttcgcctgcgccgccgtcgcctcgaccgcctccgcgctcgccacagcggcgctcctacgggtctggagcctcggcgactttgctgatatgctcgcggtgtttggcattaggaaggatcacttgcttcaggcagtggcaattccacttttccttacatccctagtgtatgctgggtcgttcgtcaataaactctggcctcttgcgagctcgtggggcggagatggtgatgaggcggggatcagctccgcccagaggcttgttcttcggatccaagccgcccttgatgatgtaatggtgtggcggaactatgtagtggtctgttcttccccttcaccactatcgttctgtacttcttataatttttataagattctgtaaaccagtggcctaagattacccagtgcatggccgaagatttgtgtggcaagcaaattagcaataaatgaagaattgatg

SEQ ID NO: 28679 - DNA, 466 bp, Setaria italica
  Peptide Sequence Number=SeqID_94653
taatgttgacgagaattgctgcactgcaaagattctaatgtgacaatttgaaagcaatgcctgaaagggtctagtttcaccagtgaagttgattttttcctctggagattagtcagtgcaggtggaatgtccaaaggtagaaaatgtcatctagcagtgttcaggctcaaagtgaggaaacatgttcttatcgtgctctctgttcaggatggtgccgaacaagctggagtatcattaggcacagtgccttgtgcgcagcagatttccttccgcaaggagtcttgttcaaacagaaccaatggcccctggatgtgatcagtcgatgccaaactggtatttcatacacagttagttgtaacttgtaagtgcttgcaaagagtgtcacataagcttggcttgaacttgacataccatttgatacatgctagttgcaactgaatttcattaccgtacgactttgtggttg

SEQ ID NO: 28680 - DNA, 655 bp, Setaria italica
  misc_feature (610)..(655): n is a, c, g, or t
  Peptide Sequence Number=SeqID_94654
aaggaggaaatcggctgaagataatttgacaacagagggtccggcgaatgctaccctgagttggccttcctagtgcaccttctgaagaaagagttgttgatgctggaaatatggataaagggaaaagaaaagtccaaccccaagacccaagcatataaacatcaaggggatgctgataaacactccccatctgcacgacttgccaattgcctgtcgtttgcccgtatgaaaggaatcaacaggaacaaaagatgattgatgttgagatgtaatgttgacgagaattgctgcactgcaaagatgttaatgtgacaatttgaaagcaatgcctgaaagggtctagtttcaccagtgaagttgattttttcctctggagattagtcagtgcaggtggaatgtccaaaggatggtgccgaacaagctggagtatcattaggcacagtgccttgtgcgcagcagatttccttccgcaaggagtcttgttcaaacagaaccaatggcccctggatgtgatcagtcgatgccaaactggtatttcatacacagttagttgtaacttgtaagtgcttgcaaagagtgtcacataagcttggcttgaacttgaaaaacnnnnnnnnnnnnnnnnnnnnnnnnnnnnnnnnnnnnnnnnnnnnnn

SEQ ID NO: 28681 - DNA, 475 bp, Setaria italica
  Peptide Sequence Number=SeqID_94655
aactctggagattagtgacacaaaatggccaaaagcagctgagcttcctgtcatctgggaacacaatagaatgagtatgcttaatcttcttgcaagcttaataaagtcaggagttcatggaaggatatttgcagcagatactggcaggcctatacctggctcagtgatgataaagggcatcgattccaaggtaatagcaagcagagcttttggagattaccaccgaattattgtgcctggtaagaaatacgaaggtacgtcacttttcctcagaatttatgtatatggttatatcacctgcaattgcaaaagcaattgggaatcctcagactggcatgtctcttgacatggttttctgaaattttcttcgacttgtatgcctatcaatcagaggtaaatcaatttgtgcttggcaggaaccagccaagtttaccacctatacgacgtaaactaactattaattttacccccctta

SEQ ID NO: 28682 - DNA, 1182 bp, Setaria italica
  Peptide Sequence Number=SeqID_94656
tcaaatggagcctttctggtatccaatatatggtggaatgcaagactggaattatatacatggaggctgctttgagttaactctggagattagtgacacaaaatggccaaaagcagctgagcttcctgtcatctgggaacacaatagaatgagtatgcttaatcttcttgcaagcttaataaagtcaggagttcatggaaggatatttgcagcagatactggcaggcctatacctggctcagtgatgataaagggcatcgattccaaggtaagagcaagcagagcttttggagattaccaccgaattattgtgcctggtaagaaatacgaagttatggcatccatggaaggcttccgatcaaagtccacgcacattgtgctggagcaggaagctgtcagccttgatttcatcctggacccggacggagttgatgggcagatgaagctgctccgtagtgactacgactgccgctgcgacaatgacaagatgttccatgttcgagaagctcacctctggctgtatcttcttgtagtgtgcggtatcctggccctctatttggtcttcaagagaaaagcggcatcaaggttgctggcattcagatactcacccagacggcctgttgctgtataagaggagttttacaccctaggacagttttgtaacttagagaatctcaccaaaatggtctgttttataagctgaatgatgtgtaagttttgcatcgatggaaaatttgtactgtgagaatttcacaaatctcaaggcatatcgtgtggtagatgaagttatcagaagttatgtatatggttatatcacctgcaattgcaaaaagcaattgggaatcctcagactggcatgtctcttgacatggttttctgaaattttcttcgacttgtatgcctatcaatcagaggtaaatcaatttgtgcttggcaggaaccagccaagttttaccacctatacgaaacaacatattccccaactttttccatgtttagctactaagatcaagttgaccatccattgtatatatagactgacaaaacctgtagtccgaaaagcaaaacagtcgctttctctatccaactgtgtgacatttgttcatgcttcttgcagttatggcatccatggaaggcttccgatcaaagtccacgcacattgtgctggagcaggaagctgtc

SEQ ID NO: 28683 - DNA, 492 bp, Setaria italica
  misc_feature (482)..(482): n is a, c, g, or t
  Peptide Sequence Number=SeqID_94657
ggggtggcggcgggagccggcagaggagcagcgcctgagggtggcggtgacgacgggctcagcgcaggcgcggcagcaggaggcggcgaggacgggctcggcataggagaaggagacggcggagacatggtgggcggagcccctggcggggtgcgggaccccggcggcgtgcggtcggcgaggacgacgacgatgagcttctcattggcccggcagctggcctcgttgccgctgatgaagaagaaggggcccgagcggtcgagcttcaccaccgtgttgccgtcgtcgaacttctggaggtacgaggaggtgttgcacgagttgtacgccgccggctccaccaggagcaccgagtccgtctccttcgggtacacgaacactgcacgttcatgtacatgatcaagaccggcgcatgacgagatgatgtttcaagcgtcatggcatgtgatctcgcggagaagaagaagaagaatggctacggngctggtcgcc

SEQ ID NO: 28684 - DNA, 635 bp, Setaria italica
  Peptide Sequence Number=SeqID_94658
taccaatggaaaccatacagacataatggtaaggaaactcacgtgcctttgcatttccttgaacttcagtcaggtgtaaatacaatattactaccaagtggtttcgatctgcttaaatgattccttaaattgcttgcattaatattttatagatgctatggaagacaaactacttgaaggaaggtggctgaaccagataaatttgcattaaaatcatataacaaaccaaaattgtaggatatttcagaccaatcaaatgtgttgaaaaacatcagtcaggtttcccgacataatatcaacaactgagataatttaactcgctataatttgttgtgtattccaaaactatttttacaatagtatccacatagacaccctagagttagtcgtgcatttttatttgggtgcacgaatacctgaagcagataatttaactactgggacagaattctattgaacatagaatgagtaaaagtattcaacgcgcactgaaccatttctaattctgaaactatcttttaatggcaataaactgttgattcatacaaatggttgccatggaaggtcaacaaatacctaaccaaaacaatacaaatcatagtaacatgaacaaatgtgtgcttgtaaaatgaagg

SEQ ID NO: 28685 - DNA, 409 bp, Setaria italica
  Peptide Sequence Number=SeqID_94659
ggatggtccaaaaaaaacaagaccaagaattaacaagttttcaaacccttgaaaaattacacacttccattcataagaagtgaactgttagaacaactgaaacaagacattagaagatgcttgatgctgctggtgccttggacttgcaagttgcaacctaggagaagtttcttgcggccaatggccaaccacatgtagttgactttatacaaccactaaatggataagatccaagctaacaatttggtgcgtaaacaaatcgcaactttctgatagtcctctatagtaaaaaaaaagttatctttatcaattttcttcataatttcctactttctgtgttgaggaccttctgtttcccccccaccaaccagaacagaggaaaccccgaaaatgacatcccagcagaagg

SEQ ID NO: 28686 - DNA, 459 bp, Setaria italica
  Peptide Sequence Number=SeqID_94660
gtagaggaacacgccgaaggcccaccagtcgacgccgttgccgtggccgctcccactcacgagctctggcgcgaggtactcgtgcgtgcccacgcagtccttggagctcgccgacgtcggctcggccacgaactcaaaccgctccttggcgtcgatctccagctcgtcaccgtcgtcgccgctgccgccattggcgccagagaagcacgacggcagcagtatgctcttcctgcggcggctctgcttccgcacctggcggcgccggacggcgggctccacggacgccgggagcgcgaggtcgaagtcggagagcacgacgtggccgtcgccccggaggaggatgttctccggcttgaggtcgcggtacacgaagccgagcgcgtggaggtactcgagcgcgagcagcacctcggcggcgtagaacctcgccgcggcgacgggcagacggccgccagggcg

SEQ ID NO: 28687 - DNA, 320 bp, Setaria italica
  Peptide Sequence Number=SeqID_94661
tcctcctcagctccccggcacccgcccagacacatccgcagccgcagccccagacccagacgccgccgcctcctgccgccgcgcaacacgcggcgaatccctacacgtatccccatccctaccagtaccagcagcaggaggccaaaacccatgcctacgcccaccccacgtcggcgccgccgcagcccaacccgtccgccgaccacggccacctcctgctccactcgctcctgcgccgggtggccgtgctcgagtccgccctccccggcggcttccccgcccctcccccgtcgcggcggccgccccaccccaaaccctcg

SEQ ID NO: 28688 - DNA, 620 bp, Setaria italica
  misc_feature (3)..(3): n is a, c, g, or t
  Peptide Sequence Number=SeqID_94662
acncaatgtgctcctggtggatgtacaagtgcactcaaccagcttacctcaacacctgcttccaatgatggacagggtgcatccagaacccaaagaaaaaaaaaggtaccaggaatacctcagtgcattattagtatctcaattctcaaatatcaaatgagtcaccagcatattaaacaggcacgctagcatactttctttcagaatcagttttacacagtttattacagttctttacaaagcatgaatttaattgctctttactgactgcatgcataatgtcatttgcgtaacataagtgcatccacctcaacaagcaaaattaaattgtttgaacaaacagcaatattttatacaacaacccatgttttaatgtgacctgtcttaatggatgcactgaacagataactgatgcacgtgctcaataactataacaggaaggaacagcatcacagttcaaaactactacaagaaaaggcacatatgtcatgtccatacagatagcaataaaacatgcaaactagtcaatacttcaaaaactaatgcccacaagatcatggatgaaacttttttgtggcatacacagctagaacaagagacctcaattgaaggcacacagg

SEQ ID NO: 28689 - DNA, 257 bp, Setaria italica
  Peptide Sequence Number=SeqID_94663
ttcccttaggccatgaagattgtttttggggttcctcaaatgttgaagatcttactgtgccatcagcttctttgttgttatctttatatgaccgagcgttgaattgctcaatttgctgtagcatctttggattttcatcggttgatgccccttctacgttctttagggagtccattcctttggagtctgcactctcagattgcccaactacttgactggttgggagatcgccatttggtagggttttagcttgatca

SEQ ID NO: 28690 - DNA, 436 bp, Setaria italica
  Peptide Sequence Number=SeqID_94664
taaaagagcagaggcagaggggcagagttgaacctctggttttttaaactttttgaggttgcctagcactttaacatgttgcagagttgaaacttggttcataggatgctagtccaccatgtgtccatgttacacaatttttgctctattgagccatttccctgcatacactaatgactccatgttatgaactacctttcacacatttaaaattttggctcattaggaagctcttttgtttctgccaattgcgtcctcatatttgatgcaagatccttctaatgctttcaagatcctatagatccctacagcaccactttttatatgttgctttgcttcagatttgttctatatactgacatactgttcttcactacctctgcagcttgaagaaccgcaacttaatcaacagtccatatgagttcatacataagat

SEQ ID NO: 28691 - DNA, 1012 bp, Setaria italica
  Peptide Sequence Number=SeqID_94665
aaagtaataaccttcatttatcactgtttctacagtgtagatcatacaatgttatttgtaactacttagccatacagacttagcaattgcagcctagtgatcaacctatgagatccggatagcataaatctaacaccgtattttcttttatacggatgaaatgctaaccccagcaaggttttagaggtaggtttcacaataacttctccctagcaattactagggcctacagatgtatgcagggcaggatgcaaactctgttattacctgccgtgccagtttgcaacatttgcttcttccaacagccaatgagggctccttcacaccctgcaaatgaatgtcattgacgaatcaagcaacccccagcttttcctgtctataatgagctcaatggacagcggtaatttgctaacattagggacgatgtgtgatgaggacatgctgggcatcttttgctccaaggacaaaaatttcttctcccaagcttcatttaacccttgcagggcttgattaatcatctcttgcacctgttcttttgtgaacattggctgttgtccctgtttgctcaaacaaactggggaggatttagatgatgactcgtgctgggacttcttgccgataccgatggcaccacagtagctcccacgcttcccacttcccacctgtctctgcacagaatgggagcctagttgagtgcactgtgactccttattaggttgatctctagtatcctcggtttgacatgccctctcgcaacagactccctcgatatctttgtgggtgaatcgatgccaatcgccagctttccaccattatacaagcccttctgtgaacctgcagcatcacaggggcgttttcctgaatatctattcttcctctgttggtaagacaccttcatgatttcgtctttggcccaatggtcacacaacatttcccaccattttggcttcatccatgcgggggaaaatggtttccatttcagcggatcttcatgctcgagtaacaccactga

SEQ ID NO: 28692 - DNA, 906 bp, Setaria italica
  misc_feature (10)..(10): n is a, c, g, or t
  Peptide Sequence Number=SeqID_94666
tttttttttnttttttttagaaaggcactactccgatactttttttttagattaaggataaaatccgacctactatatccacatggtggacatatacaaccaaagattacaaagagttcttagactctagtcctcaacattgaggagcttaaaacacaagaaagaaaactctaagataaagaaaataattagaagactaagcttcattcttcttgttcatccctgcttcgtccttgccttgtcttcatttgtcatcaagccatcacatcttttgttgcttagaaacttgatgctagacttggaatacttatcttctatcgctcgcacaatagactccgtcttaggtaatgaaagtcaggccaaaggacttccaaggcgacaccaccaagaaggacacgacgtcgaagacgccattgtcacccatccagcaagccggattaaggttttcacctagaagaccattgatattgcagagagcatcacagcaaacgcctcaacggagggaaatgacacccaatcgacgttgtcgttggtgacaccgacaccaatcgggtaaagctttcgcccgtagctcctgcacgaccacatcatcaccccaacaagaaatctacggtgttcttgtggacaaacctgctggactgccgtgcatagtggagctgaacaccaccagaaggcaccgaagatgcaaaggttgtcaaccgttgccccccactcaccgacaggaagctagggcgagaggagcgccggcctccagcgaggacccggccgctagggcggagacgacgagcccaagcacgaggtccaccataggtcatagaaccgctcggagaagggcccccaaatccgaccgacaccaccacccccgacaccgatagcccaccgccgccctccagaacaccaatgacc

SEQ ID NO: 28693 - DNA, 798 bp, Setaria italica
  Peptide Sequence Number=SeqID_94667
tgacacagcaggcagactcactttggcttcaactaggcgccgattccatgaccagcgcttcaggtactgatgcacttctgaatggtttggaaatattcaagctcagcaggaatggtaacctcgattatgtgcttggtcatattgacatgggcaaccagagggattcttcaaaagggggggaagaggaaagaattatgggaagaagttggtattggctcagcttctgtagtggcacttacaagtgttgttctggcctcatggtgttatataagaaagaaacgaaaagctatcaagaaggaggcccctcccggttggcatccgctggtccttcacgaggctatgaaaagcactacagatgcccgtgcagccagtaaatcatccttgacacgaaatgcctcttccattggtcataggatgggaagaagattcagcattgcagagattagggctgccacaaagaactttgacgaatccttggtcattggttctggaggatttggcaaggtctacaaaggtgagatcgatgagggcactactgtggcgatcaaacgtgctaacacattatgtggccagggtctgaaagaatttgaaacggagattgcgatgctttccaagcttcggcaccggcaccttgttgcaatgattggctattgtgaagagcagaaggagatgattctggtctacgaatacatggctaaggggacactgagaagccacctctacgggagtggcctccctcctcttacatggaagcaaaggattgatgcatgcatcggtgcagcccgtgggcttcactac

SEQ ID NO: 28694 - DNA, 845 bp, Setaria italica
  misc_feature (8)..(8): n is a, c, g, or t
  misc_feature (776)..(845): n is a, c, g, or t
  Peptide Sequence Number=SeqID_94668
cggcggcncgggagctggaggcggcgggcggcgggcccgtcgacctcaacaaggaccccaccggctgcagggccggtggcggctggtgtacagcagcgccttctcgtcgcggacgctcggcggcagccggcccggcccgcccaccggccgcctcctccccatcacgctcggccaggtgttccagcggatcgacgtcgtcagccgcgacttcgacaacatcgtcgagctcgagctcggcgcgccctggccgctcccgcccgtcgaggccaccgccacgctcgcgcacaagttcgaggtcgtcgggacgtcgggcatcaagatcaatttcgagaagacgacggtgaagacgaaggggagcctgtcgcagctgccgccgctggaggtgccgcggatccccgacaacctccggccgccgtccaacaccgggagcggcgagttcgaggtgacgtacctcgacgacgacacgcgcgtcacccgcggggacaggggcgagctccgggtcttcgtcatcgcgtgagcttggcgtctgatggcaggcacggccacgaagtgagaccgcgatccttgcttgctgtgctgtcggtttgttctagctgcttgccgttgaacgctcttctgcatctctgaatctctgaccgttttgtagcaatctgctgtggcatcccgtgatgtagtacaattggtagtagaattggagcattcatgtagagtgtggaaaataagaaaaaaatgcggccgttttgcagattgcacacaaaaataaaaaaaaaaaaaannnnnnnnnnnnnnnnnnnnnnnnnnnnnnnnnnnnnnnnnnnnnnnnnnnnnnnnnnnnnnnnnnnnnn

SEQ ID NO: 28695 - DNA, 364 bp, Setaria italica
  Peptide Sequence Number=SeqID_94669
tccttcttcaattgtggtgcaggaattgcaatgcagtcaaaacttgcagcctttgtcatggcctacatagatgtggctcttccaccagatggactaggtaataactctagaattgcaggtttgggagtagtcctttctcagggcttctacacattcttgtcagctgcaagttctggcaaaaactaaggtggatgaacttgcgccctccttttatctgcaaggatagcttctgttttgcaggttctctccttttggttaggctctgaccgccttttagcagtctaatcatcttcagaatggaacgatgaaggctccatggaaacttcagtcatggatttcacaagtccaggcccttcgtttacgg

SEQ ID NO: 28696 - DNA, 464 bp, Setaria italica
  Peptide Sequence Number=SeqID_94670
ccgccgagagggcgcccaccatgttcgacaactgcatccccctctcggagacggagacctaccgcctccgctggacgctcaacgcctccgccggcaccgtcgatatcggcctcgaggcggccatcggctccgagtactacatggcattcgggtgggcggatcccaaggccaactccccgcgccatgatccacgccgatgtagttgtcgccggcttcacagaggaaggtacgccatttgccgaggactactacataagcgactacaccgagtgcaccctggggaaggatgactcgccggtgtctggggtttgcccagataaggtatatgaggacgggaagaacgattcaatcctggtgtatgggcaccggcgggatggagtgtccttcgtgaggtatgttaggaagcttgattctgaggatgccaagtatgacgtgccaggtgggtgctgcggaggagagtggac

SEQ ID NO: 28697 - DNA, 209 bp, Setaria italica
  Peptide Sequence Number=SeqID_94671
ttctagatacagtatccccaaactttggatgatttcctctactccaagctgcttaaagccccacattgtgagttcctccatcgatgaccccttgctctgccgatgaattcaaattctgtccagaatttgcatattgaggccgaagcatataaaaactcagcacaatatggcaatcccaggggcacaacaaaatattgaccaatccagtg

SEQ ID NO: 28698 - DNA, 488 bp, Setaria italica
  Peptide Sequence Number=SeqID_94672
ataaaccatcctattattgacagactcattgatgcttagtagtaggcccgttctatccattttacaaattcaagtagcaggcttagcagtgccatacattgtggcaaaactgatgcttcataggcaaatgacaatagactgcaagcagtatactaacttcaatgctcaaagaataccactactctaggaactgaaccatcaacaagaataaatgcaagcatgcagctgattggtcaaacctcataaggccacacgtaaactaataagaaataactgaacagatcacatctgtaaacaaaccatgaaactgaacaagctaaaaatattaaactaatcagaattaagcagattccctgaaaacaaaccattgaagttgcccctatcagaacaatataatttatcagtagtaagcaacaaaggtgtggcactgcgatcagcacaagtaagcaaactaaaaacggaccacctagatggactggagcatctgg

SEQ ID NO: 28699 - DNA, 485 bp, Setaria italica
  Peptide Sequence Number=SeqID_94673
gggccggggccggcggcggggaagcccgggggccgcaccttcggggccgttccgcgcccgcgcttagcgggcggctgtggcagaggctccggcgcctcctcctcgtcggcgcagtcgtcgtcctcgtcgtcagctggtgactccggcgccagcggggccggcggcggaggcggaggcgggggcagcgcgtactttcccccgcgacggcaacgagctccccggcggcggacatgcgggagaggtgcgcggcgacgagggccgggtgcgaggccggcaggtcgccgcgggcctccgcctcgatgcggcgcgcgatggcggcctggctggagccgttctcctccgcgagcgcggcgatcgccgcgacgatcatctcggggtaggaggggggcacgaggtcggaggcgggcggggggcgagccaccgccgccactggaagtgggagtggccatgcctgccacggccgccttggctgctggctgtcgctt

SEQ ID NO: 28700 - DNA, 302 bp, Setaria italica
  Peptide Sequence Number=SeqID_94674
gctgaaactaagtgtatatatataataacaataggggaaaataacagagaaaaatgggatgagactgggaggaaatattaacaaatactgcactttcaccaagaaaaggagagattaatggacgaatgactgaacgaggaagcataacatctttgcacagaggtggcaatagtagttcaagcatagatctttgataggaccttcaaaaaactaaggttttggagcccatgcagttgaacatgaagactctgaaaactgttgctgctttatcattgaaatctatgcagcttgatagcaggtca

SEQ ID NO: 28701 - DNA, 265 bp, Setaria italica
  Peptide Sequence Number=SeqID_94675
cacgcgcggctcaatcgcattcctcagcccgatcaattcgatcgacatggccggcgcccagaactggaggtcgtacctgtgctgcgttggcggcagcgcggcggtcgaggacgacgactcgacgccgcggcggcggcaggtgaggggcaaggacagcccgaggtcgtcgtcgcggatgtcgttcacgagcctcagctcgtcggagatgctgtcccccgaggacctgtcgctcacgctctccggctccaacctgcacgccttcacg

SEQ ID NO: 28702 - DNA, 200 bp, Setaria italica
  Peptide Sequence Number=SeqID_94676
ttttttttagtagcagcgctgccacagtagtggttgcagcagagccaggcgggacaaggaggccccgggcgtccaagccaagccgagcaatgagaatatgagatgaagcaactcgcaacaagaacatggcaagaaccataccagcatttgctacaattgccactaatcttaaaccgccgtcgatcacgacggttaattat

SEQ ID NO: 28703 - DNA, 935 bp, Setaria italica
  misc_feature (887)..(887): n is a, c, g, or t
  Peptide Sequence Number=SeqID_94677
tttttttaacgaagaaataacaataggaactaggtaattttaataacaagaaaataaaacaattacatttaacaagggggctaaaaaaaggagtgatcacgttactattcctataaaacaatgcccagtttactagaatccagatatacttcaatgccttcagtaatgtaccagaacccatatgatgggttactacaatggcatcatctatttaccataacggtgccatcaatttagtaccaaggtctttgataatatggcgtgatcgcgttactataaaatgatgatgtacagtttactagaagttaatataccggaattacaacaatgccttagaatgatgtaacacaaacataggtttagtgtgatgcagaaagcgagtggctgctcggatgacaattatttgtatttacttgtatctcgtgatgcatatgacaaataaaaacaatccaaaatgcaactatcttgttcactttgcttttcctctaagctgaagctctttggagcacatttcattttcccgacctcattcatgtggtggtagtacgagttccagtgcttgctgcttgacgagtacgtgattgcagcacaggccattggccctaccaattctaccaggagctgcatgccacccagcaatcggataactttaagtcaatgtgaagtgtttgtttgctgtcatgctgcacacaatgatttcaagcatcaggcgttgaagaaaaattgaggaataccggaatagtacttaaagttgcaggctaggcacgatgtgcctgaaactcgctttggggtgtgcatggacatcataaggtggctgtgcagcagggttcctgtggatctttttgcactacataaacgtctgacgctgccgcctgcctcaaaaaggntcagatcggagtaaaagatcctcatatcaatttgctcgcaacagaaaa

SEQ ID NO: 28704 - DNA, 265 bp, Setaria italica
  Peptide Sequence Number=SeqID_94678
catgtacgtcaattactcagattgtgtattctagtctacagtggtaaagccacatggttggtctattagataatgctatgcaagttaaatgtagagaactagagaagggttgttctagcctagaaaaaaaaggaggtgaaaaacgcaagtggcatatctagaacattctagtgtttagactagcattttacaaacacaaacgtctttcctagaaccttgaatctggagaagaacaaagtcctcttgctttgaatacagaatctgg

SEQ ID NO: 28705 - DNA, 269 bp, Setaria italica
  Peptide Sequence Number=SeqID_94679
acgtcggcggtggactcggcgccggccggtagcccctccgaccgccgggaggtccagcgtgacgacgcgaacgcgcgcggagagctccagcgggacggcgcgcagcctggcggcgttcctcggcgtggacacgaaggtgacggcgtggccgcgccgcgccagccgcttggagagctccaggaacgggatcatgtggccgaacgccagccatgggaataccacgacgtggagaggagacgaagcttctttgatttcctctgccatggctg

SEQ ID NO: 28706 - DNA, 327 bp, Setaria italica
  Peptide Sequence Number=SeqID_94680
cgccgttggccttgaggacgccgcggccgaagaggggctcctggcccttctgcaggtaggtgggcttgcccaggtccagcgacacgcaccgcccgatctcgcggatcagctccgggtccgacacgtacagcgccgggcgccggcgcagccagtacaggtacgtctcgccgtaggctttcctccacttgtcgaagtaggggaagatcctcttgcagtagtcgtcgaagccttccttctcgaagtcccggccgccggtctccgccaccgccgcggcggccgccctcgcctgcatctccgggaggttccccgacaggaacgacgacggcg

SEQ ID NO: 28707 - DNA, 376 bp, Setaria italica
  Peptide Sequence Number=SeqID_94681
ttaaagtaaagtattgaatgtctctgcgatgaatgatgatgttgcaaatatatgctttgttgtgatggatgcccttgacattgataagtggaagacatcgaaggcaagctttaagacatccatcagtctctttgggatcatcattctgctcgtgttactgggacgagccgcatttgttttccctatatccattttgtcaaacaacatgagtggaagttctgagagagtgccaatcacattcaagcaccagtttgtcatttggtgggctgggctcatgagaggcgctgtttcaattgcactagcatataatcagttcacgttttcggtgtaacatcagaatccagttcaatagaccaccatcattaccagcacaatt

SEQ ID NO: 28708 - DNA, 1081 bp, Setaria italica
  Peptide Sequence Number=SeqID_94682
cgatatttttcttgctcacaagggaagcactcgcatatcatgcggttcgatgagcagctcttcttcatctacgtgcttccgccgataatcttcaatgccgggtttcaggtcaagaagaagcagttcttccacaacttcatgaccatcatgtctttcgggtattcggtgttttcatttcagttgcaatagtttccgcaggctgctactggctcttccgaaagtcggatttggacaacttgatgcatcagattatctagctttgggagctatattttcttcaacagataccgtgtgcacattgcaggtcataaaccaagatgaaacaccaaggttgtacagcttggtgtttggagaaggagtcgtcaatgatgcaacagcagttgttcttttcaatgctataaagaatctcaatatcagtcagctcaagggcagggctgtgctaaaagtgatatctgattttctctatctgtttgcgaccagcactgtccttggaatctcaatcggtctatcgactgcttatgttctcaaagctctgtatttgggtaggcattcaactgaccgagaggtagccctgatggctctcatggcttatttatcatacatgatggcagagttgctagagctgagtggaattttgaccgtgttcttttgtggcattgtcatgtcccattatgcatggcacaatgtgacagcaagctcaagaatcacaacaaagcatatatttgcaacatcatcattcatcgcagagacattcatctttctttatgttggtatggatgcccttgacattgataagtggaagacatcgaaggcaagctttaagacatccatcagtctctttgggatcatcattctgctcgtgttactgggacgagccgcatttgttttccctatatccattttgtcaaacaacatgagtggaagttctgagagagtgccaatcacattcaagcaccagtttgtcatttggtgggctgggctcatgagaggcgctgtttcaattgcactagcatataatcagttcacgttttcgggtgtaacatcagatccagttctattgtccaccattctattacctagt

SEQ ID NO: 28709 - DNA, 490 bp, Setaria italica
  Peptide Sequence Number=SeqID_94683
acgagatgcttaagcacatggttgggagaatcactactaagcctggaggaaaaccagaaatgggtaatgcttccgttgtacagcggtacgacaggccgctcccgaaggtgagaacatcaaaggctgaacctgggcaaagcgggagcaggcagctaccatcaggagcgctgaatgtccagcacatccaggagatcatccaactgtaccaaggcaagtccagcacccaccacggcccgatgagcgtggacgacatcgcctcaaagttcagagtcgaggcctccgtcgtccggaacatcgtgcagtctgtctcgttgccccaggacgaaacccccaagaagaaagaggagtactgagagtccgtgtgaccctgcggctgacactaagccctgttctttgttctcaagttcgtagtgccttttaggtattttgtttgttgttgttgctgctgccccctctccgctggctgctgagatgagacgatggaaatacg

SEQ ID NO: 28710 - DNA, 342 bp, Setaria italica
  Peptide Sequence Number=SeqID_94684
gccgcctccggggccggcccacgcgtaggcgtcgccggggagcgggaggccgttcatgaggctgtgggggagctggtcggcgagggatggcggtgggtgagggtgcccggcgcccattggcagctgcggaggcggcgaggaggaggactgtccgccggccaggccctgcggcgtctgctggtgctgcggcggctcgtcgtcgtcgagggggaggcgctcgtaggcggcgttgccgaagcaggcggcgacgatcacgacgggcccggaggcgaccagcgggccggcgaccgcgccgccgacgatctggccctgcccgccggagaggtagacggtgaggccggt

SEQ ID NO: 28711 - DNA, 241 bp, Setaria italica
  Peptide Sequence Number=SeqID_94685
gcgggcgccggtttggatggacgggggtggcgggcggctttggggtgagagccagagaggatgtggcgagcgcgcgccgcgggccgcagagatgggaccggtcggctcggtccagccgctgcgggcctgccgctgcgccacaggctgggggcgctccggcctgcggctgctccaacttgtggatgggagccgccgcgccgccgatgggactatgggaggaaaaaggacaggcggcgcagcc

SEQ ID NO: 28712 - DNA, 457 bp, Setaria italica
  Peptide Sequence Number=SeqID_94686
ggctccgatgccggtgacgaagcgcgccgccatgagggcggcgtagctgccgcccatcgacatggcgagcgcgccggccatgaggaagacgttggcgagcacgaggacgcaccggcggcccagccggtcggcgacccacccggcgccgaggatggagacgagcatgaacacgttcatggagcccgcgagcacctcgatctgcgcgtcggtgaggcccacgtcctcccggatgaacagctgcgctccgctcatcagcgtgagattgtagctatgtatcatggttgtcatggaggcgagcgtggcgcagacgaaggcgaacctgtcccggcgacccgccgccgacgaggggaggagcggcacctccgtgccatcggcagcctgctgcgccatgacgctcttggcttctcgtcggcaaggacttgtatggtgttggatgcttcatcacaatgccacttaa

SEQ ID NO: 28713 - DNA, 1282 bp, Setaria italica
  Peptide Sequence Number=SeqID_94687
cagcgcgtacccgaccgagaacgtggccacgacggcgagcaccgacgcgaggcacatcgccggcgccgccgccggagccgcgcgcgtgcccacggagagcgtcagggcgagggaggccgtggtcacggcgacgccggcggtgctgacgaggaggagcgggcgccggccgacgcggtcggtgaggagcacgcccacgaggatgaagcacatcttgaccaccccgatggccacggtggcgccgagcgcggcgcccttcgacgccatcccggccgccttgaacaccagcgggctgtagaggaggatggcctcgacgcccgacgccggcacgaagaactccagcccgatgacgcacgccaggacccgccgcacgctcgccgacggccggaacacgagctccttccagactccgcagccgccgccgccgccatggctggcaccctgctgctccggctggtgagcgacgtcttgcttgatctccgagaggcggaggtcggcgtcagctggggtgtccgatgtgcgaaggagcaccgcgcgcgcgtcggcgtggcgaccccgcatcgccagccaccgcggcgactccggcatgaagaagacggcggcggcgacgaacaccggcgggacgacgccgatgccgtacatgaggcgccatccgatgtgcaccggcaggccggagaaggcgtagttggacacgtagctaagcaaggtcccgacgttgatgaatatgttttgtaaggacgacaagacgccgcgcgtcgacgccggcgagatctcggtgttgtacaccggcgcgacgacgcggccgaacccggctccgatgccggtgacgaagcgcgccgccatgagggcggcgtagctgccgcccatcgacatggcgagcgcgccggccatgaggaagacgttggcgagcacgaggacgcaccggcggcccagccggtcggcgacccacccggcgccgaggatggagacgagcatgaacacgttcatggagcccgcgagcacctcgatctgcgcgtcggtgaggcccacgtcctcccggatgaacagctgcgctccgctcatcagcgtgagattgtagctatgtatcatggatggctgtcccggcgacccgccgccgacgaggggaggagcggcacctccgtgccatcggcagcctgctgcgccatgacgctcttggcttctcgtcggcaaggacttgtatggtgttggatgcttcatcacaatgacaaggttggggatcactctctatcatcggtgcgatctgaagtcattggggtaccgtatg

SEQ ID NO: 28714 - DNA, 267 bp, Setaria italica
  Peptide Sequence Number=SeqID_94688
ctcgacctctccttcaacgccttctccggcccgctccccgacgtgttcgacgcgttcgccgatctccaggagctctctgcgccctccaacaagctctccggcgagctccccacgctctcgcggtgccgccgcctccgcgtgctcaacctccggaacaactcgttcgccggcgacatcggcctcgacttccgctcgctcaggagccttgcctacctcgacctcggcgtcaacagcttcacgggccccatcccggcgagcctccctaag

SEQ ID NO: 28715 - DNA, 450 bp, Setaria italica
  Peptide Sequence Number=SeqID_94689
agtaaagtgacttaattgaaagatagcagtaaaggatagttggttcagaagtcatcattactatgctgtatccaaagaacagtcaagaacatgagttcacattaattttgattcagaagatatggaccaactaaacttgatagaatgtaaaattcagccagctattgctatagactgaactggaatgatagtgttacaaatgtcaagtgctttaacatacaaaatcgcatcaaatggatgcacagtaggtgaataactggtttatctcattagctctgttagcattgtgatagaaatacaatggaactcaactgcatagttcgaatgccaaagtgaatgaatgttctggaactattaaatgccaacaactacaacataaagaatataaacagaccgtgaatttacattaattgtgattcagaagatatggatcaactaaacttgatagaa

SEQ ID NO: 28716 - DNA, 547 bp, Setaria italica
  Peptide Sequence Number=SeqID_94690
tgctccgaggtctcctccgccgcgcgcctctccgactcggcgctcatcctagtcgacgccgtcagggggtgcacatccagacgcacgccgcgctgcgccaggccttcgtcgagcgcctccggccttgcctcgtgctcaatagatcgaccgcctcatcaccgagctcctgccctcaccccgccgaggcgtacatgcgtctccaccgcatcgtctccgacgttaactccatctactcagcgctgcgctcgcactcctacttctccctcctctccgccctcgaagacaacccctcctccagctcgtcgtcctccactgaggatcttccagaggactttgaagacgacgatgacaatgaggacgcgttccagcccctcaagggcaatgtcgtcttcgcctgcgcacttgatggctggggcttccgcccccaacaattcgctgagctctacgccaggaaggtcggagtcaacccctccgccttcctcagaggattgtggggcccaagatatctcgataagaagacggggaaggttgtgggtaaagaaagcca

SEQ ID NO: 28717 - DNA, 281 bp, Setaria italica
  Peptide Sequence Number=SeqID_94691
cgccggttcgtcgggcggcgaaggatcgaaggcgacgccgtccctgccatccggcgccgcggcgctccgggggccggcgggtctggtgctcgggctcgccgtgtcagctgcggtctacgccgtgtcagctgctgcgtgaagcgtggtgattcagggtttcaggacgcgttgttgcgtcgtgtgaaacttccgtttcagcagttcggggaggaggattttgagtgttgcgtgtgtgcctctacggatttgtgttatttcttgtgcgatttggttgatttccg

SEQ ID NO: 28718 - DNA, 262 bp, Setaria italica
  Peptide Sequence Number=SeqID_94692
catcccagcaaccccccacgagggaaaccatggcgcggtactccccaccgctgctgcgccgcttcttcagctgcgccgccagctccgcctcaccgggcggaggcagcggcgccgggaagaaaaaccttgtattcttgggctcgccccaggtggccgcctcggtcctggacacgctgctggccgcgtcgggctccccggagtccgggttccaggtagccgccgtcgtgacgcagccgccggccgccaagaacagggggagaag

SEQ ID NO: 28719 - DNA, 873 bp, Setaria italica
  Peptide Sequence Number=SeqID_94693
tttgacctggaaagcccctttcttcatatctggttttgattctgatatagagggcggctccagctttgtgggggacttactcatgggtttagtggcacttgctctaggcggttctgtgtgtgaagtgaaggcaccaaaattaagctcctctaaaggactatgatcacaacttttgacaccttccgttttagtttgacctgaatctgtatttgaaaagaatgcactgaaggagtcagatccatcaagagtcttcactggaattgcagcaaaaggatcaaaatctgcagcgctggaatgatggtgtgtggggttttggatttacttggggtgtcacacactgagaactcagtgtctgaagggaatgatgccacgaaggatggttggaatggatcaaaagcagaggcagaagattgtgtaagggaaggcagattaagttctaaggatttattaggggtatcgcgtactgagaactccgtatctgaattaacagaaccagcaaatgatgatctgcccgcaaatagatcaatattgtcctgcgatgacatctgagcatgagagccagttgttgattctaatggagcattagcagactggaaatctgtattggcaaaataaaatcaacttctggcaaagaagcagctccaacatttggcactgtacttgaagtagatgcagttgtgtcaacaaggtcatccattaaactttgcccaaagagatccacgtgattatagcttgcattagttgttccagatatggagatcctcgtgggttgaagtcgttgttatcttcattgtccactttctgtgaacttgtgccccccagatgtggatgaggatcgaagatttgatgatgatttcaggtgtgatgttgagg

SEQ ID NO: 28720 - DNA, 271 bp, Setaria italica
  Peptide Sequence Number=SeqID_94694
gtcgcggcacgtgacccccggccggcgagctgggcgccagcagctcgtacggcagcacgccggcgccgcaccggttcttccttccctggtccgcgttgcgccgctcgatggtctcctcggcgcggcgcacgtcggccgcgaacatggcgtgcgccgcgacggcggccgcgtcccccgtccacggctcgtcgcggccctcgccgaggtactcctcgtcgggcgagtgcgtcgacagcgtgtccaccaccgccataaacttggtggcctccag

SEQ ID NO: 28721 - DNA, 372 bp, Setaria italica
  Peptide Sequence Number=SeqID_94695
tctccctccctcccccctcccacggcgatacgcgccctaccgtacggccgtccgcctcgtgcccgcccatcccttcccccgcccggtggatgcgtccgggctggccgcgggcccgtccgagccggtggcagcagcagcagcggagcacggcaccaccccggcatcggcggcgggagcggcagcggcagcgggaagccatccagccaccggcgatgtgggaccccagaaggtcgtagcaaggggtttccttgattcgtgaatcttcgatcaagaaggatggagccccgggctttgctcctcggggtggcgttggcctttctgttggcctctggttcccagggcttgaaccatgagggctggcttctcctggcg

SEQ ID NO: 28722 - DNA, 183 bp, Setaria italica
  Peptide Sequence Number=SeqID_94696
ccgcgcctcgcccgccccccgctctagctctcgcggggcgccgtcgtcgcctcgtcgcgacgtgtctgtagagatcggcaccggccgcctccggagcgtggtggacggggcgcgcgggctgcaggcgggatcaccggccgccgggccaggatccatcggcgtacgggccgtggcggctttttg

SEQ ID NO: 28723 - DNA, 279 bp, Setaria italica
  Peptide Sequence Number=SeqID_94697
acactaggaacagatctaatcgactatgcgtaaaaataaatagattaaatgacgaagtacaagaaaagccgaaattgccgattcctagctggataactggtgataaaaccagaacgacaggtaaaacctagaattctagtaaatatcgataattggtgaataaatctaaacgaaacgacagcgatgcgcccgaagttaaagcttagaatttactcgataagcggaacttacaagatcggccggaggtcaagttgatgcagccccgccaacccgtacgaa

SEQ ID NO: 28724 - DNA, 774 bp, Setaria italica
  Peptide Sequence Number=SeqID_94698
ggcacttcccccgtcctcgctctgcttgctgccccaccgcaggccaagaaagaagcgaaagcggcgacgccgtctccaatgccgcagggcgccgcggcggcggcctgagagtgcgagccgctctgtcgactgtcgaggtcgggcgggggaacgcattgcgatggcggagtcggctttggcggacgggaaggcggagaaggcggccagtggaggagggggcgatgcggcgggggaggggaagaagagggccgaccaggccgtggcgttccacgagctgttctcgttcgccgacaagtgggacctcatgctcatggcggcgggcagcctgggcgcgctcgcgcacggcgccgccatgccgctcttcttcctcctcttcggggacctcatcaacggcttcggcaagaaccagacagacctccgcaccatgaccgacgaggtcgccaagtatgcgctctacttcgtctacctggggctggtggtctgcgtctcctcctacgcagagatcgcgtgctggatgtacaccggggagcggcaggtgatcgcgcttcggaaggcctacctggacgccgtgctgcgtcaggacgtggggttcttcgacacggacgcgcgcacgggcgacatcgtgttcggcgtctccaccgacacgctgctcgtgcaggacgccatcggcgagaaggtcggcaactttatccactacatcgccaccttcctggccgggttggtggtcgggttcgtatcagcgtggcggcttgcgctcctctcgtcttccttcta

SEQ ID NO: 28725 - DNA, 395 bp, Setaria italica
  Peptide Sequence Number=SeqID_94699
gggctcttgacaccccaaaactctgttctgatgattacacattaccaacgccttttggatctcattaagcccagctatgttcacatcatggaaaatggcaagataatcaagactggtgacagttctattgccacacaaattaatgaaggtggcttcaagtcgatcgcccttgtatagcttgaaagtcaaatacttgaaatggcttgttgggagcctacttgtaagaatagagtggcagagtggctgctgtgtgctgactgctgcctggggttcgccattttgcattactagaccaactatgcatgctggtgcagcatgtactgacttcaataaaacttttgagtagaaccccattcaaccaggtctgttgtttattaaaaggtgaagggatatgt

SEQ ID NO: 28726 - DNA, 1710 bp, Setaria italica
  Peptide Sequence Number=SeqID_94700
cgtcgtcatccgaagccgcgccgcgacgagcgaagaaggaacaatccggaggcgcaccacctgcctcaccttcttcctcccatggcgcagcccctcgccgccgccgccgctgtatcctcctcatcgcccctcttctccctctcctcatcccgccccctcgtccgccgccacgcgcctccgagctatgtctcgatgcggacgcgtcgctgttcgcagctcgccgcggcgtcggcggcggccgagacatccggcagcccgcttctcgaggtgcgggggctcaccgcatccgtgaaggagaccggacagcagatcctagccggcgtcgacctcaccatccgcgagggcgagattcatgcgatcatggggaagaacggctccggcaagagcaccctcacaaaggttcttgttggccatccgcattatgaggtaactggcggtactatcctcttcaagggtgaggacttggttgacatggagccagaggatagatctcttgcaggcctttttatgagcttccaagcacctattgagattcctggagtgagcaattttgattttctgctcatggcagtcaatgctcgcagagaaaagagtggtctaccagcactaggaccccttgagttttattcggttgtatcgcccaaaattgatgccttgaatatggaccctaagtttcttgatcgaaatgtgaatgaaggttttagtggtggtgaaaggaagcgcaatgagatattgcaactttcagtcatcggagcagatttagctcttcttgatgagatagattccggattagatgttgatgcacttgaagatgtagctaatgcagtgaatgggctcttgacaccccaaaactctgttctgatgattacacattaccaacgccttttggatctcattaagcccagctatgttcacatcatggaaaatggcaagataatcaagactggtgacagttctattgccacacaaattaatgaaggtggcttcaagtcgatcgcccttgtatagcttgaaagtaggttctattttcttccttgcgccttttcttatatattttgtgggaatattctcggtcttctgactgatatgaagttgaactatgcatagacatggtggcagtgccagtgattttcctaataaaagaaataaaatgatcagaaggaatttgtttagattggtctgtgcaaaagtaaatgaggttcttaatcgcccttgtatagcttgaaagtcaaatacttgaaatggcttgttgggagcctacttgtaagaatagagtggcagagtggctgctgtgtgctgactgctgcctggggttcgccattttgcattactagaccaactatgcatgctggtgcagcatgtactgacttcaataaaacttttgagtagaaccccattcaaccaggcatgttatcttttaaaaggtgaagggatatgtcaccttttctctgtaagaattttagtcatacccagggaaagtatcttagtacaagatccacgatttttgtatatttgagtgtaacttgctgcctcaggcatctggtcatcaagattggttttgcatgcatcttttgtatacaattttgagacttgtaactaatatgcatacctacaaggttacttggttgtctccacacgagagaatttggtcctatcatcaatgtacatgtgtgcagcctctctagtctctaggctgccgatttacctaaa

SEQ ID NO: 28727 - DNA, 356 bp, Setaria italica
  Peptide Sequence Number=SeqID_94701
cttcctcttgcccggcctcctcacacgagcagctagctagctgcctcggcttctcgcgctgcatccatcggtagaggcgactgctagagctcgtgaggagggaagaaatgtctgccaacgacggagacatgaagatgagggtgatcctcgtggaagacgaggagatggccgcgccgacgccgctgccgcccaagcaggacaagtgctgcgagtataccctcgacggctccgtcgacatcaagggccgcccggccgtgaaggggaaatcgggaggatggcttgccggcggcctcatcctcgtgaaccagggcctggcgacgctggccttcttcggcgtgaacgtgaacctggtgctg

SEQ ID NO: 28728 - DNA, 443 bp, Setaria italica
  Peptide Sequence Number=SeqID_94702
aaaacatccttgaaaactattcctctctgaggatatgtattttgacggtctctacgagagtgtctcttagggcaagcaccaactggagatccctgaacagcagtaccagttcttgtaccattatcactacacaaagaagtagcatcaaattttactggtgaactggaggtgaaagaaatgatgcctgatttcttgttatcccttgaaatgctgcatgacactgactgtctctggaaatcaatccttgcacagttttgactggcagacttcggcttctcactgaccagtcctgctccttttgcaattatcatgtctttctccatagctttcggtgttacagtctttaacttcagcttgttagaggtatcactatgcaggctgctgctttgacgaccttttgtggccatgttcttgttctctgctctagtatgtgactcaccaat

SEQ ID NO: 28729 - DNA, 1182 bp, Setaria italica
  Peptide Sequence Number=SeqID_94703
ttttttttttttttttttgagatctaagaaatgtcgactctgatcatttgagacttacaaagttaacatgtcccagaaaccaataaatactctcaactgcagagacaattagccgcagcatatgttacaactccggattactcaacaacagccatctcagcgaaattataagacagctcatgctaaacctattttccaagctaagctatggaaaaggtcaaaacttacagtatactggggctcctagagccccatgtcaatcggccaggctatcaaggaagctttgcagctccctcagtccttccgcagatatgctccgctgtacacgaggcctcggagctgttaggacaggaggtggcctagagttgaagcagacgacaaccacagaaaggttatcgccgctcttcctcttgatggcctcatcaactagttctttacagcaagcagctgggtcattatgctcttggagcttccggcgggcaaaatctaccgcattttggctgcggaatacatcccagatcccatcgcaacccatgatcaggaattcatcctcctcagtaagatccattgtcattacctcaggctcggcactaagagggcctagaccaccacacaccttcatgccttccatgtgccagtccccgattgctcgtgcaacattgagctgcccattcaggtagccatcatcaacatatccacccaatgcctcaatacgcatcttctctaagttgcaagatggcttgtggtccctagacatctcaattgcctttccacgacgacaaagtacagctcgacaatcaccagcatttgcaaccagaagtgacctcccaaccacaagtgctgcaagcgcagttgtgccagaatcaagttcgcagttcagagaacaagcgtctgcaaaagcagcatcagtctgcaagaatgcagaggacactgcttttgctatctcccttgggaatccctcatcctcaacaataaaccttggcaaattgctgcacacaaaatcagcggcatgctttccaccatgtccatcaaaaaccccataaaaggcactggggccttcttcataactttcaaatccaaaatcttgcatgaaattatcagagaaaatgatcacatccctccacttgagtgccttgacccaatatcagcccagcctccagaccgtataactggaataaattc

SEQ ID NO: 28730 - DNA, 422 bp, Setaria italica
  Peptide Sequence Number=SeqID_94704
tagacgcttgaaaaagagttaaatgatctgtactaccaactttatcatgaaaggaatgaaaggctacttgctgaaaacaatcaaggatgcttgccatctacatcctcagatgatcaccagtcattgtcaacttgcacgtgtacatgggaagaacacatatcatcgttgagagacttgaagtttggaggatctgagtcaatgaggtcaacgcgacaggacttatttcccgagcttgacgatgaccaggatatgggagaagatcctgaagggcaacagatagtttctttaaacaggctgctagaaaagcaccgagattcttctttgaatagacttcttgaaaagcaccgggatgaagagatgcaagaatctttctccatggaaaaagaggcacggaagatgagaagcttgatgttctatccttg

SEQ ID NO: 28731 - DNA, 416 bp, Setaria italica
  Peptide Sequence Number=SeqID_94705
cccggagcggcggcccgccttgtcggtgcgcgtcgtgcaggtttctagaattattgacgaggatatgggtgattctatcgatcctgacatggagatggttgcttctaatcacttgccgagtcagttggtccacccacctcctgcatttggttcttcctccaatctagaggcgcttgggcttgaaacaagtgagggtgatgtaagaagcaccaacgatactgatcacagtgtacatctcatttccaggcctatgcatgagataacttttgcaacagttgataagccaaaacttcttagtcagctgacatgtttgcttgctgagctcggtcttgacatccaagaagcacatgcattttcaacaattgatggttactcattggatgtatttgttgttactgggtggcatcttgggagta

SEQ ID NO: 28732 - DNA, 2672 bp, Setaria italica
  Peptide Sequence Number=SeqID_94706
tcgacctcagcctcaacaacatcaacggcacactccctgcatccctcgggaagctcggggagctccgggacctcatcctgtggcagaacttcttggagggcgagattccggcgtccctggaaaataatgcgcaagctcgagcatctcatcctcgactacaacgggctcaccggtaccatcccgccggaactggccaagtgcaaggagctcaactggatatccctggcgagcaaccagctgtccgggccgatcccttcttggcttgggcagctcagcaacctggccatcttgaagctgagcaacaattccttctcgggaccaataccggcggagcttggcgactgccagagcttagtctggctggacctgaacagcaaccagctcaatgggtcgatacctgcggagttggcaaaacagtctgggaagatgaacgtcggccttgtcattgggcggccttatgtgtatcttcgcaacgacgagctgagcagcgagtgccgtggtaaggggagcttgctagagttcagcagcatccgacctgaagacctcaaccggatgccgagcaagaaaatgtgcaacttcactcgagtgtacatggggagcacggagtataccttcaacaagaatggatccatgatatttctggatttgtcatttaatcagttggactcagagatcccgaaggagctggggagcatgtactacctcatgatcatgaatcttgggcacaatctactgtctggcctcatcccaccggaactagccagtgccaagaagcttgcggtgctcgacctgtcacacaaccagttgcaagggcctatacccaactctttctcatcactgtctttatcagagatcaacctttcgaataatcagctgaatgggtcaattccagagcttggctcccttgccacattcccaaggatgtcatatgagaacaactctggtctctgtggtttcccactgccaaaatgtgatcacagtgctggcccaagttcctccgacgacaaccaatcgcaccggaggaggcaggcatcactcataggtagtgttactatgggactcttgttgtcactgttctgtatatttggaattgccatcttagctatcgagtgcaagaagcggaagcagaagaatgaagaggcaagtaccgctcgtgacatttacattgatagccagacacattctgggactatgaattccaactggagactctctggtacaaatgccctcagcatcaaccttgctgcatttgacaagccactgcagaaactcaccttggccgatcttattaccgccacgaatggcttccacaatgatagcttagtagggtctggtggttttggggatgtctataaggcccagctcaaggatggaaggattgttgcaatcaagaagcttatacatgtgagcggccagggtgaccgggagtttactgcagaaatggagaccattgggaagattaggcaccgcaaccttgttcctctccttggctactgcaaggccggtgaggagcggctgttggtgtatgaatacatgaagtatggcagcttggaggatgtgttgcacgaccgcaaaaagatcggggttaagctgagttggtcagcaaggcgaaagatcgccattggggctgcaaggggattggcattcctccaccacaactgcattccgcatatcatccaccgagacatgaagtcaagcaacgtgcttattgatgagaacttggaggcaaaggtatcagattttggtatggcgaggacggtgagtgtggtggagacgcacctgagtgtgtccacccttgctggcactccgggttatgtaccaccggagtactatcagagcttcagatgcactacaaagggcgatgtctacagctatggtgttgtgttgctcgagctgctcacagggaaaccgcctacggactcgacagatttcggtgaggacaacaatcttgtaggatgggtcaagcagcactcgaatttgaagatcaccggtgtgtttgatcctgagctgttggaggacgatccagccctggagcttgagctgctgcagcacctaaaagttgctgttgcatgcttggatgacaggccatcaaggcggccgacaatgctgaaggtcatggcaatgttcaaggagatccaggcgggatcgacggtcgactcgaagacctcatcagcttgcacaggctctatcgatgatgcaggttttgccgcccatgagatgacgaccctgaatgaagacaaggaggagaaggattagcaagaaacaccccgataagcgagaaactgcccacggcaagttccccggggcgagtggcagtttcatggccagtcaggcaaaatgcccgtaggaatcagttcgtcaggcgataccatttgcagtctcttcgtgagcttagcattcccttctgggtacaagcagaagttttccctcgtagcttcgtcagttgaaggtgttatgtacctatgggagtaggtcgattttcctttctttttttttctcagctttgttcatctcttctcgtcgcacttcagtaagagctgtgtatgtacatatataaatggtgatttttcttcagtgcaaaatccatttttgtcccccttcctctgccgtcctaaaaacgttccctttgtttaacgaccgtgtaaatagtactcatgaacaatgtacatcaa

SEQ ID NO: 28733 - DNA, 241 bp, Setaria italica
  Peptide Sequence Number=SeqID_94707
attccttgttgtgtctctgcccaaaaaggtggcaccccactaagcaatacatagagtatcactccagctgaccacacatcagcttctggtccataacgtttgtgcagtacttcaggagcaacataatatggacttccaaccaactcagtgaaaacctgactatatggatcagatttgatatcgtacatggtttgaagaacacagatagaccaaaatcaattgcttttattgacaggtcatt

SEQ ID NO: 28734 - DNA, 307 bp, Setaria italica
  Peptide Sequence Number=SeqID_94708
aacaccaaatccaccagcaaatcggcgaaaacaaagccgaaacccacgagaaacgcctagacgggcgcccacaggccaaatctataccaaaaaagacgagatttgtgcgggaagaaacagaatcgagctcagattcgcacccgccaaacgaggagcctcgcagggatcttccaacggccggcgcgctcgatcgaagcgaagcacgcgcagaatcgagccgacggatcggacacaaaatcgcagcttcctgagggactaaaatgacaaaaacaatgggaaggaaaaaaatggagatgaggacagtgtg

SEQ ID NO: 28735 - DNA, 474 bp, Setaria italica
  Peptide Sequence Number=SeqID_94709
cttccaccaccagacttgacacccaagccttgtaaccaaaaaaacacgcaataaacgagattgccagactactcctgaagctaatctctcaaccgcgtccactgaaacccccagaagtggaagagctcctcccaaaggcaaccttgagaagcttcctccgtaggctgcgcccttgtaacccgaaaaccgagaaccgcagctaatccacacaaaatccccaatttgagggttcctaatgctgcaacttgcgcacaagatccgaacttgacaggcctagaacaccaaatccaccagcaaatcggcgaaaacaaagccgaaacccacgagaaacgcctagacgggcgcccacaggccaaatctataccaaaaaagacgagatttgtgcgggaagaaacagaatcgagctcagattcgcacccgaccaaaacgaaggaagacctacgacaatggaacggccggcgcgctcgatcgaag

SEQ ID NO: 28736 - DNA, 2207 bp, Setaria italica
  Peptide Sequence Number=SeqID_94710
ttttttttttaaaccgtaatgcgcctcttttggtattttgaatcgctggacatgattgcaactacatgaacatataccgctgctacatatatgtctctcataacaaactatatactacttgacagcccacacttctttgggataaatactactactaatgaattgatttgctctcttctcgtacatgtcagcccgaattcgggctgtggagaaatgatgaataagaaaagagaacaaaatctgtacatcacgtatgcatcagtgtacttgaggtgcatctctcaaggttacattcaaagtggtttacattggttgccacccaagtccaactttgttgccttgcatcatggctacgaattcggcgtagtcaatttgaccgtcattgttttggtcaacttctaaaattatctcttccaggaaagagtcctccatgttatgttctccacaagctcgttgaagcttgtcaactgtgatataaccacttccatctttgtcgaagtaagtaaaagctgccatcaagtgctcttcacgctctattttgttaagaggcacagttgcagcaataaattcttcataattgatggtcacattattgtctttatcagccgcttccactatatcactaatttctctatcctccaattcagtaccgtatcttcttaacccttctctaagctcaccaagagtaattacacctctatttttaacatccactgctttgaacatttgtcttaacccagcaatctcctcctcggaaagccgttcagcaatcaccctcagagccaacttctttaacttgttcattgcagagaattgtttcagccgagagagaacactggggtcaagagcttgatcagtggccactccattttcacaaatccaaggatggcgtagtacttcatgggctttcagacgctccgaagggcaagggcagagcatctttcttataagattctttgcactttcagatatcttaggccatgggtccgagtcaaaatcaatgtgccccttaaggacagcatcaaatattccttgttgtgtctctgcccaaaaaggtggcaccccactaagcaatacatagagtatcactccagctgaccacacatcagcttctggtccataacgtttgtgcagtacttcaggagcaacataatatggacttccaaccaactcagtgaaaacctgacatggtttgaagaacacagatagaccaaaatcaattgcttttattgacaggtcatcttctttgtccaaaaggaggaagttttctggctttagatcacggtgcatcacccctagtgaatggcacatagccactatgctaacaatgattcttataagctctgcagccttctgctcgctgtaatgccccttctcctgaattcggtcaaaaagctccccaccagcacagagctccatcacaatgtgcaccgcctgcccgtcctcataaacatctttgattgcaacaacattcttgtggccagacaaatggtgcattatctggatctcacggcgcacatcctcaacatcctccttggtgatgagcttgcgctttgggatggtcttgcatgcatactcacaccctgtactgatctcggtgcagaggtatgttgtgccaaactgcccttgaccaagcttccgaccaattatataatgttcccttaggtcggctgtcttcctttcaaggacggtgatagacgtcggatccaatccccgcttaagaataccagcagcagtgggcttaaatgagttcacctcaggccatggcttctcaaacttcttcaagtcggagtagctatcttcctcgaggtatccatcagcgaacctagaagcgggacgattgtagtagtcactcccaagagtcccgtttgggcattgattccccattcctagaacaccttgtcccaatcaattctggagttcccagtctcacacaattgtgaatctcttggatgcaaattgagattaaatagtagtggtgcgcaaacttatggaactggaagagctcctccagaagaaagcccttacttggcttcctgggagggggaaatcagcagcccgccaaacgaggagcctcgcagggatcttccaacggccggcgcgctcgatcgaagcgaagcacgcgcagaatcgagccgacggatcggacacaaaatcgcagcttcctgagggactaaaatgcaaaaacaatgggaggaaaaaaatgg

SEQ ID NO: 28737 - DNA, 962 bp, Setaria italica
  Peptide Sequence Number=SeqID_94711
caaaagctttgtgattgcatacctgaaagacaaagaaatggttgttatgggggtatactggattggaactttaagaaagatcttcagcattaagatttaacaaaacaaaacaactattttagaaaatactcgaaaatggatgagcaaatacgcatgcattatatttttgcatgctgtgctgcatctaaattcacattacatgggtgacactcagaatgacaccctaaaaggaggaaacttgagtacggaaaacatagaaagcagtcaaagtacttcatacgttgcattttttatgcatactacccaatagcatttccaaaataaaaccttgcagatggcaatagtttactcaacacgcacaaaatgaagaaaagaatactcgacactagtgagggtgaactattgatgaaaaattgaaccactcacagataacttctgaaaagcattactataaatttcaaaaactacaattagttcaaaagaaaacataagaatccatctatctgacctcttaccaaagcgagaacacttcaaacttgtctaaaagaaatctaccactagagctcacagaaactataaatgattcaaattacatacgaacttataagttgtcatatttagctatacagtaaatccatcccatgtagatgtagatgtagctagagagatttccacaaaaccatcccacatgcaatgacatcgaggataaagacaaggtataacttaaaacaccgcaccaagcacatgggcaatgcctaattgtctagacagacataatcaccaatctacaaaggctcaggggtagttgagtaactaggcaatgagagagatttcaggttcttgaatgtgcaataatcaggacatcgaaaagctattgtctggctaccttttggaaaaagaaaaatatggattatgcaccaggcagatcagagaccacaagtgatggtgacccagacaaatta

SEQ ID NO: 28738 - DNA, 908 bp, Setaria italica
  Peptide Sequence Number=SeqID_94712
ccacggggaactaagaagcgggacagacgtcagctgtgcttttccagcagccacatcttgtctaaggttcaatgtacgctgcatgctggaattccaatctttattggttgcctgtttgccttgagactgtacagcttgatctgctggatggcttgtctctacatgctcccgagcttcattatgatgaaaaacaccatttacacctgcttgtttctgtacatctgcttgaattggtcgagctggtgccccagggctttgcttttgtttttgcccttgtttgtatttcaaaactgtccagtcgaagacataatcaaactcataaccttcgcgggtaaacaagtcacgaaaaagtcgcttcacaaatgcatagtccggtcgctgatcaaatgtcaatgaatggcagtaatggaagtaagatgcaaattcgactggacaggatttgcataagacctcgataggagttgatatctttttctcacatatcttgtcatacttctgtgtctttgttgcagcttttagtccctgccacgggaggcttccacggataaaatacagaaggacataaccaagagattccaaatcatccctgcggctttgttcaatcccaaggtggtgttgcaacttgcatagcgtgctgtgccagtcaagttcttatttctctgtaaggaatatggcgattcgtagtagaatcccggtatctttggcaagcccaaaatcaattatgtatacctgatttgctttccgaccaagacccatcagaaagttgtcaggttttatatctctgtgtaagtaccctttggaatgcatgaactcgattcttgtaatcatctgatcagccaacattaggacagtcttgagtgtgaatttcctgccgcagtagacaaacaggtcctccaaactccggcccc

SEQ ID NO: 28739 - DNA, 741 bp, Setaria italica
  Peptide Sequence Number=SeqID_94713
ctgcaaatgtaacccaaggcctttccagtgcagatacagcctacgtccttgcttattcagtcataatgcttaacactgatgcgcataacccaatggtcaaaaataagatgtcaccagaagatttcattagaaacaatcgtggtattgatgatgggaaagacctgcctgaagaatttatgaggtccttgtatgaaaggatctggaaaaaggagattaagatgaaagaagatgaatttgttccccagcagcaacaatcaacaagttctaacaaaattcttgggttggataacattcttaacattgttgtacgcaagcgaggttcatctatggagacgagcgatgacctcattaagcatatgcaggagcaatttaaagaaaaggcccgcatgtctgagtcagtattttatccagccacagatgtagttgttttgaagttcatggttgaggtttgctgggctcctatgcttgctgccttcagtgttccacttgaccagagtgatgacgagattgtcatatcccagtgccttgaagggtttcgctctgcaatccatgttactgcagcaatgtcaatgaagactcaaagggatgcatttatcacttcactcgccaagtttacatcacttcactctgctgcagatatcaggcagaaaaatgttgaagccattaaggcaattctattaattgcagatgaagatggaaattacttgcaagaagcatgggagcatatattgacttgtgttt

SEQ ID NO: 28740 - DNA, 3975 bp, Setaria italica
  Peptide Sequence Number=SeqID_94714
taattacaagcaccaaaggattgaaggcagagattggagtcttctttcccatgatcattttgagagttttggagaatattgcacaagccaaattatcaggccaagatgattgttcttcgttttttggtagaagctctgtggtgattctcaaatcttagttgacattttcctcaattacgattgtgatgtccactcatcaaacatatttgagaggatggtgaatggtctactaaagacggctcaagggcctcctgctggtgttgctaccacattggtaccgcctcaggataccacaatgaaaagtgaagcaatgaaatgcttagttgctattctcagatccatgggagattggatgaacaagcagctacgcattccagatcctgcttctcctaatgtagaatcagagaaaaacgacaatgatggtggcaatgagctttccccgacggataacaatggagatgagtctagtgaagcatccgattcacattctgaactatcaaatggaatttcagaggctgcatctttggagcaacgtcgagcttacaagatggagcttcaggagggtatctctttgtttaatcggaagccgaagaaggggatcgagttcttagtaaacgcgagcaaggtgggggagtcaccagaggaaatagctgctttcctaaaaagtgcttctggcttgaacaagactatgattggtgattatttaggggaaagggaagatttgtctctcaaagtcatgcatgcatatgtggactcgtttgattttcaaggaatggagtttgacgaagcgattagagctttccttcaaggcttcagattgcctggagaagctcaaaagatcgatcggattatggaaaagtttgcagagcgttactgcaaatgtaacccaaaggccttttccagtgcagatacagcctacgtccttgcttattcagtcataatgcttaacactgatgcgcataacccaatggtcaaaaataagatgtcaccagaagatttcattagaaacaatcgtggtattgatgatgggaaagacctgcctgaagaatttatgaggtccttgtatgaaaggatctggaaaaaggaaactaagatgaacgacttacctagaatgcatttatcacttcactcgccaagtttacatcacttcactctgctgcagatatcaggcagaaaaatgttgaagccattaaggcaattctattaattgcagatgaagatggaaattacttgcaagaagcatgggagcatatattgacttgtgtttctcgttttgaaaatctacatcttgttggagaaggagcgcctccagatgccacattctttgcactgcagcagccagacgttgataaatcaaaacaggccaagtcatcaattcttcctgttctgaaaaagaaggcccctaatgcttcttcctcttctaaaagaggttcctatgatagtgctggcgtgggtggtaaagcttctggtgtcgatcaaatgaataatgaggtgacaagcctcttggagcaagttggaatggctgaaatgaaccgtgtatttgtaagaagtcaaaagctcaacagtgagggtataattgacttcgtgaaggctctgtgtaaggtttcaatggaggaattacggtctgcatctgatccaagagtcttcagtctgacaaagatagtcgagatagcgcactataacatgaaccgcatcaggcttgtctggtcaagcatatggaatgtcttgtctgatttttttgtcactattggctgctcagaaaatctttccattgcaatatttgctatggactccttgcggcagttgtctatgaaattcctggagcgagaagagcttgctaactacaatttccaaaatgaatttatgaagccttttgttgttgtgatgaggaagagccgagctgttgagattagagaacttatcattaggtgtgtctctcaaatggtattagcccgtgttaatcatgtgaagtcagggtggaagagcatgtttatggtctttgcgacagcttcatatgatgatcacaaaaacattgtactattagcctttgaaattatagaaaagattttgcgggagtactttccctacatcacagagactgagtcaacaactttcaatgactgtgtgaactgtctcatcgcatttactaacagtaggtttaacaaggatataagccttaatgcaattggctttcttcgattctgtgcggcaaagttggccgaaggtgatattggatcctcaaggttgaaggacaatcccacttcaaacagtaacccaccctcacctcatttggccagtgatggaaagcaggaaggtgcagttcttgccgataaggatgaccatatacacttttggtttcctttactagcagggttgtctgaacttacctttgacttaagaccagaaatcagaaaaagtgctttgcaggtgttatttgacacattaagaaatcatggccatcttttctctctgcctttatgggagaaggtgttcgattcagtgcttttcccaatatttgattatgtacgtcatgctattgatccatctggtagttctgcacaaggacaaagtgtggaaaacgatccggcagaacttgatcaagatgcttggttgtacgagacatgcactttggcacttcagctagttgtagatctctttgttaggttctatgacacggttaatccacttctaaagaaggttctctcgctcttgactagtttcataaagcgtcctcatcagagtcttgctggtataggtattgctgcatttgtccgtttgatgagcagtgctggatctatgtttgtggatgaaaaatggctagaggtcgtattgtccttgaaagaagctgccactgagacgcttcctgatttcacttatatttcgtctggagcttaccttgaaaatttaccaacagaaaatggaggttcttctgaacagagagaagatgaatctcaaccattagaggatgacaatgaacaatcgtctagatcaaggaacctatattttgctatcggcgatgccaagtgtcgagctgcggtgcaactcctattgatccaggctgtgatggaggtatataacatgtacagagcacagttgtcagcacagaacacagtaatcctcttcgaggccttgcacactgttgctacccatgcccacaaaataaacagtgataatgacctgcggtccaagttgcaagaattgggctccatgacccaaatgcaggacccgccattgttgcgccttgagaacgagtcataccagctgtgcctcactatcctccagaacatattcctggacagcgcccctgaccatggaagcacagaggtggtggagagtcaccttgttggcttgtgcaaggaggttcttgaggtatacctgaccacagcgagacctgcccagctttcaagtggcaggcaaccgctcggccactggcttatccctgtcggttcatcgaagcggagagagctcgcggctcgagcaccccttgttgttgcaactctgcaagctatcagcggtttgggtgactcttcgttcgagaagaaccttggccagttcttccccctcctcgctggcctcataagctgcgagcatgggtcgagcgaagtgcaggtggccttgagcgacatgttcggcacttgggttggaccgctcgtgctccagtcctgctgatgctgagcagtgaaaaccatgtgatacatagtagtatacatccacatgtaagttattctttgtttcttggaatcccattgtgttcctcctccccccattttgctctgttaatcatttagttgctgggggagtttatattgtcgtgctgaactgatcttgcagatcattttcctttacattctttcttgttcgtcccgggaggagtgtatgttgctatagaggactgaatcatgtatggtagcttagctaaaattgtgcccatcctgttcgcaaaagtttcatttcaattagtttcgttagactatg

SEQ ID NO: 28741 - DNA, 1738 bp, Setaria italica
  Peptide Sequence Number=SeqID_94715
tttgaaaatgaaagacaacttaaaataagtggggaaaccaagacagttattcacagatacggtgataatatgatatatatacagtgaaatgccaagttccgagatgaagtagtttctcacgtaataggtaaatcagcagagatggaaggatcaagctatctggtcttccctccctacaaggcaggccactcggctgtatcctgccattagttagaactgatacactaatagcctgcctgcaacatgaccatggtctttgctcaaacagtgtcggccatgtgaaacaaattatgattatctctggagaccatagagacatcttaatctaaatacttcaactccacatgctgaactgaatgtgttatattaacaactgtaaaagatagagcagttcataggttgaaggacacctgatcaggtccaggcagcgatataacgaggataacagtaaagatactcggagccattgtgataaaacaagagctgctgatgtctgggtttatgttgtttccattgaggtaggctaccttctgagactacatgttcatatcatcctgaacaactgcattaccagcctctgcaccgagccccccctcatgcaaaaggtcctcccagaaatcatcatttaattctccacttggcctgcctttcaaacgctcagagccaccggaagaaacaccttgttgaacctcaaatccctttgcctcaacagatgaactttccagatcagatggaacaccattggcaagtgattccactggctcttgtggttcaaacactgcatgtgacccttgctccaggctagaaccattgcccatgctatcagcttcaggtccctgatcaatgcggcgcctcctcttctttgagatggcatcctcgagccccttcctcatctcgtgctgggagaccagttgatgcataaactcagggttctgcattactcgtgccatgaatgccatcatgtgctgttgcttctgctcggtatcttttaatttctcttccatggcctgtagatctgactttgtattttgctgctcctgcctcagtttcactacttcagccattaacagctgcttgtccctcttcagctgatcaatctcttcatcatatccaaaatgccctacctcaaggtaagagccaagagattgctgatttggagatgagtgtggaggtttccggcgcctaatgtttttgagcaggttccgctgacctctcagaaacccctcattagcaaattcccatctgtcaggatccacctttctgaaaccataagtgttcagctgccgaacgaagctggagaagttgttgtgcttgaagtaccttggcagcagcaccgtcccgaagacatgaggatcccaaactatgaagctattattggtggcactccaagagacaacagcatctgtggttgggtcatcgaccatgtcatatgtcttggttaggaacggcggcgggccaccatcatggagcccatccattggcctaggctggccgttggcagtgacctccgacggtcggctctccaccttgacagaattcaacatcccgtggttcatggcagccccatcaacagatcaaaccaacaatctcacctcagcaaggagcagaactagtatgtaatattggtacacctttgtgccctgggaccagaaatggtttatctaatgttagcacaggctgctacttgccaactgccaagcctcagatactacaagacacggttcaggcgtgacaaaag

SEQ ID NO: 28742 - DNA, 249 bp, Setaria italica
  Peptide Sequence Number=SeqID_94716
cctgcatacgccttccctcttctccttccatgatcttctcgacacaatcttccacgacacttctcttcgtgctcgaaagcctgatccccgtctgccacatcttgacgatgtaagcgcagttgatgaactgatcgccggacacagggtaacacagcaggcgcaccccatgctgtatggcctccagcgtggagttccacccgcagtgcgtcaggtagcacccgagagccctgtgtcggaggacgtcttctt

SEQ ID NO: 28743 - DNA, 487 bp, Setaria italica
  Peptide Sequence Number=SeqID_94717
tagtaccggtaagtaaggtagggtcggttgtagatggcgatggtgtcgaggctcttgagcttgccgaggctcgccgggagcgggccggagatgctggtctcggcgaggccgagcatggtgaggttggagcagtcgccgatctccggcgggagcgcgccctggaggttcttgttgccgccgccgcggatgacctcgaggctggccatctggccgatggacgccggtatggtgccctcgagctggtggtcgtagaagatgagctcccgcagcgccgtgaggttgccgatggcgtccgggatggcgccctcgaggcggttcgagttcacgtacaggctctccagcttgctcccgggccggcacaggctcagaggtagagcatgcgcagcgccgtgagcttgccgatctcggcggggatgccgccggatatctggttgttgtcgagttccaggtcggtgaggttgatgcagcgcgcgagctcgggcgggag

SEQ ID NO: 28744 - DNA, 725 bp, Setaria italica
  Peptide Sequence Number=SeqID_94718
tcagtcgcactagtggcggcattgacacaattatatcccgactttatgcaaaaggatgaggcgatcacctataaatcagataagatccttggaaggctttatcggtcaatccaagaagcctccagcagtgatctggttccagaagaaacttgcactttaaatgatcttccatatgacacagatatggaagttcctggtgcgacagattttctctcaagtgcttggctgtgcaagtgctcatatgaagcgcagctgaatgcactgctcaatcaatacggtgtccgtactgaagcagagcttgtgacggagcacatatggtcgcttcccaaatacagtagcaggaagcagggggatataaaggagaggttgaagaactcatactctgctctccggaaggagctccgtagtacttttgaaagcattgagacagacgaaactgagatatctgaggatgagaaaaatcgggtgtatgagatgaaggcctccgcatggtaccaggttacctaccaccccaaatgggtccagaagtcaagggaaatgcttgggccagactgcgaggaaatgccggcgcggctcagctttgcatggatcgcagtggattacctggcgcggataaagataaggtgccaaggagaagtgaggtccaacagccaaagacctgtcgagagacttgctgcctacatttctgagagcatgtagactgcaaagctgttcgcgttgaagct

SEQ ID NO: 28745 - DNA, 1112 bp, Setaria italica
  Peptide Sequence Number=SeqID_94719
agttttttttttttttgtatgtcaaaaatctcaaagattgtatttgttgaaatgatattttacaactcaagttcctgaattttagcagggctgaaacacacgcactttctgttcagcaaaatcaagatgtgcactttgcgattagtagacggttctctggtgaaatatttgatggaacatagcttacaagatctgcaactagacccttatgtctaagccataacagcctcccggtatcaatgatgtctttacacatgaatcctagagaggccctctccctgttggtatacttcggattattctctcaattccgatgatctctggatcaggcttctctggttctctgacttcagaagacgtgtcttcaacctccgcataggaacctggggagctgtgatcaccatcgacagcccaactgctaaaccatgttatggcatggaattcttcctctgtaatacctagtcctgagaggaaagatttatttgcataatgcttccattgacaaagatggtggcagcaggtagctagagcaaggccctgaagactatgtttgccatggaccctttcttctgtttggtcatattgttcagggagacagcaagtcatggtcatatctgttgcaggtccacaaagatgttttccaattgctagatacttaagtcccctcaatgcctctattccatgtaggttcaaatcctcaatatcaattcttaaacgctccaaggtaacatcttcattttgacgcaagcttcgatcagccttaagcttgtaggaccgtctctcaaccaaaaacacattcctaatcccgtaacagtccacgagcacctgagtcaagtaccctcttccagctccaaattccataaccgcctgagcactcactgccacattctccccacccaccacatcagcgccacccttccgcaacaagccaaatgcctccatgtttccaacaatggatgcctgctgcgcgacatgcttctcttggtatggcaccttcctatcgacctgcccgctcatccatttgtcgcaagcatcggtgatgagataggactcgcgcatcgccacggctgccgcggtcgttgtctaccgtaccggtattcttttaaccttaa

SEQ ID NO: 28746 - DNA, 923 bp, Setaria italica
  Peptide Sequence Number=SeqID_94720
aagaacgactagaacgaagaatgcgcgtgccctttggggatgtcgtagccggccaccgacgtgtcctcgcgtgacacccgtggtacaaggagcggcaccaccgggtgaagccgcatggcctccttcacgacggcgtcaaggtaggggaggctcgggatgtccccctctgcgactaggcggtcgcgcccgaccacgcggtccagctcctcggtagccttggcgaggacgtcgggcttcctgaggagctctgacatggcccactccatcgtcaccgacgaggtgtcggtcccgccggtgatgagctccagaatggatgccttgacgccgttgcggtcgatggggacgtcgaggctggggtcgtcggcgagctgcagcagcaggtcgaccatgtccttggggacgaacgccgggccctctctccggcgccggtcgtcgtgctcgcggagcacgtgctcgacgaacgcgtcgaacatcttggccagcctcttcatcctggcgacgtacccgtgtggatcgaaccagccgagccacgggaccatgtccccgacgtggagcgcgccgttgaggaagaagatctcctcgatcatccacctgaactcatccggcgtcgcggccgccgcgtcggcgccggcaccctcgccgacgtacttcctccccagcaccatgcgcgagacgacgttgagcgtcgccatgagcaggtggtcctttagcaccaccgcgccaccgccgccggcggacgccgcgcggaggtcgcggagcatggcgcgcacctcgtcggcgcggacgctctccgtcagccggagctgcttggcgctgaggagctccgtcagccacagcttgcggagctggcgccagtacgcgccgtagtgggaccagagcatgccggagtagttgtagacggtgtacttgccgcaggccatccg

SEQ ID NO: 28747 - DNA, 437 bp, Setaria italica
  Peptide Sequence Number=SeqID_94721
gggcgccttttataatacatttctgctcttcttgcaaatgagtcagcatcctcatcgataatcttgatcatcactttgattttgctatccatatctgtaagattttctaggagccattttgagttcttcggggatatatgactatcccaccaccaagagtacttgcgcattggattggacggcgacatcgccatcgaagccagctaagcaaaccgaacaacactacctggcctcaaagtaaaccttctgcaacttcaaagcccctgcagtagatcccagcaactagaatgtaatctgctctaaaatctactacaaaccgactacctgcagaacatcagaaacttccaaaattagcaccttgggcaaaaggacattagtagcctggaacttagtggcagaactgaaaacgaaatagtaagggaacaattaataggtaa

SEQ ID NO: 28748 - DNA, 411 bp, Setaria italica
  Peptide Sequence Number=SeqID_94722
gtgtcataaaggtggaatgcatttggggaagcagatcaatatctgcagagtttggggaatctgaaagctgcaaaattgaaactgtagaagttggtaaccaaatagaaaatactgcaaaggcaactaagtgcctagatagagttctggtaatgcaagccattgaatccatactgcaaacagttgaaggagcctggactatgaaaacatcatgcaatatttgtgaagcccagactattttgagaacatgcaacaaagagctaaaagtattggctgaaaattcttctggatcagttggtgcattcttgagttttctatgtgagtatcttgttgcaataaggttgattgttgaaatatggctgttgattcaattggataattctcaggcttttggtctaacatcacatgatatta

SEQ ID NO: 28749 - DNA, 511 bp, Setaria italica
  Peptide Sequence Number=SeqID_94723
ccaagccaagctcgaggagtatgcatgccctcaacatgcagctcgaagctcaggaggaccctgaggaagacgagggagcgtccagcatggacatagaagaagatggcgccccttctccgactcatagtgtccattggtagcttaagggttctcagggaaccttctttctttttgttgtactcctcggcagcctagattttggaaaaaaagctgtaataggttagccttgagttgagtactccctgtgttgcaacatcgttgtgtataaagttaaccctggtgcgtagttttctcctcttcgtatggtgtgaatgctagggttgagtaagttgcgccgtaaccctatgctgttttcggggagcctgttcagttggccgaccctagtttgcgagccagagtgcgccgacccttgagacagtctccgcctcgtctgagcctttttcaagtacggaccgtgtccgaccccttggtctgagtggacctgatcatgggagtctgtatgtggcatgtg

SEQ ID NO: 28750 - DNA, 1514 bp, Setaria italica
  Peptide Sequence Number=SeqID_94724
accgtacaataggacgccaaccactggcccgcgctctccgaggccgccgccaagaacaccaagctcgcgcccgccccggcccccgactcctccaggcctcccgaatcttcgtcccgtcgcccgcgccctcatcggccatggccaactcatccaattcgcacaagcacggctcggggacgcaccatggtcgccacaagccggccaggcgcggcggcggcggcggtggagagcactccccgcgagaccatcctgatcggagcaccggtgggtgggaccatgccactggtggtaccagtagcggtggcggggtaaggggcgctcacagaaaccacaataatggcggcggtaggaggggcaatggcgtcactggctctggcagtggggtttctcaccatggtggtgctgctgctggtggcggaagctttagtggcaggcgaagaggaggatacgagcccttctaccgtggtggtggtcctcctcccatgggcatgggcccatacatgcgaggtgcaccaccccctcctccgccgatgacagttcctccaccgttcatgggccctccgccgccgtcggtctcgcccatgcgtgcatttgctggaccaatgatgttccaagatatgccatctccagtgcctcctgtatccccgatatacttctatgggcctcccccaccaccagaggctctcaggggactggctcttgcacctcctatggttggtccacctgcttacccttacttccagaccctgtctgagccacagcctgagcctgagcctgagcccgagcctgagcccgagcctgatgtggaagaggaacgtgccaagctgctgaaccagatagagttctacttcagcaaggagaacttatgctcagatgtatacctgaggcagcagatggatgggcagggctgggttgatatatctcttatagctggctttaaaaaggtcctagagctgacgaatgacctgcaatatgtaaaagagacagtgaagtcctcgtcgatacttgaaatgcagggcgacaaaattaggaagcaaaacgattgggaaaaatgggtgatccctcgcgagagcaatcctgacataccgtcaagctcagcatctgtaccaaggcctaatgtcaatcatctggcagcacgtcttggaggcatgggtctgcatgaatctgctgctagctcgagtagcacaacccatggtgatgtcgtccagaacggaccaccttctggtgacaatgaggctccagtagttgaagacaactctggccaccagtagtagttacaataaggcggtccgattcacaccatgactgcaggggttttgtccgtgcgcgagtgacagtacaagtgatatgttgttttgcaatttttggaggggaggtatggcggcacgttacgttagactgacaagcgaatgcgttttgtggcgatgaggtaagatttttgcttgaccttgttattgaggtgtagcgtggaaggttttcaggttgcaaccaaaaagtttgaaagagaagacagg

SEQ ID NO: 28751 - DNA, 438 bp, Setaria italica
  Peptide Sequence Number=SeqID_94725
cgcagttgtagggggaggcggcggccttgcccgcggcggcgccggcgccgcgcggctgggggcactcgttgaggaagaggaccctggcgctgttgatgacgtaggtctggacgccggtgatgtcgaggacgtcctccacctcggagacccgcaccacgtcgtggtaggacgaccgccgtatctggatgacccggtgggctgcgtgtcggtgcgccctgcagtagtagcagaaggccggcggcggcgcccccctgcagtcgaggcagaacatgttgcactcgttgcgcggcgacgccgggtgcgcgccgcaggccaggagaagcgcgtcgagagcagcgtctccagccactcgggcaccggcgtcgacgaggccacgcgccgcagcatcatgctattgcaaatgcgggccaatcgtcgtcgggaggcaatgccggcctg

SEQ ID NO: 28752 - DNA, 458 bp, Setaria italica
  Peptide Sequence Number=SeqID_94726
gtgacattggatttccatgtggtaatggtggtggagactcgcgtttccttcgtgtgcttgcatctattatttcttcaagaggtcgattttctttacgaggatgttgatggagacgagtagatatttcatagagagctttccttacaagagaaggtgctccagatatcagtatcacttcgcagttgttgtataatggagccaccttttcctagaaggcagccaacttgattgccttgaaccaaaattcgggcagtaacatcatcagcactttcagatttattgttggcaactccatcatgaacttcatctgccacgatcttatcatgaatcttcaataaggcatcttgggcagaacaatggggcttcatgctctctgagccatcactagttatattttcagctgtttcatcagcttgctcagattgattctggtagttgaagatgataattactctctc

SEQ ID NO: 28753 - DNA, 244 bp, Setaria italica
  Peptide Sequence Number=SeqID_94727
tgattttgggcacccaaaatcaggcaactaaacaaggccctatctggcttccacaagccagacttgggttggaggtgaggaagagtgtcctgaatggattgcacacagcctggcaatggcgtctgccaagaatagtgaacctcaaaacgaggactacaaggatgagttgcctcaagatgactctagcccagacacgcagtaggaatctgacagaagtgatgcaaataaatcttcgaagcaagac

SEQ ID NO: 28754 - DNA, 240 bp, Setaria italica
  Peptide Sequence Number=SeqID_94728
gggccggccgacaaaagacctggcagtggctgatcgccttgtcgtcgccgcgaaataaggccgagagggtggagcggagaaagtaaaaggaaagggaaaattggccgctgggaaacgaaagccggagtccaggcgcggggaggagggggctcagcggcgaggcgcacgcgggcgagggaagggcggctcggccggtcggggttggagaagacggactggggcggtggcggtccagcaacg

SEQ ID NO: 28755 - DNA, 495 bp, Setaria italica
  Peptide Sequence Number=SeqID_94729
cagctctacaacagctataccacacgctaatccaaggttttaacatcacccggggatttctacagcgttacttctgtgacatctagcacaaagtggaagaaagcacagagcacagcggctgatgcaactggaaaaagaagaatctgtagccatccaccatgtcaaatcctatgatacaattttactcggccaaaaatctaataacgtacatgaatacctcctaactgtcggacctatcacgtcaccaccaaattatctgaaaagtcgagaacattgcagcaggaatcagagttggtattctgcaaaaggtaatggcagctgacaagtaaattttccttacatcaagtcagaaagagaagtttctgcttttaatctttgcaccaatttccatttgatttctcatcttcaagttctttaagcttctcctgcaagtattagtaacatctcagatatgcatcacaaagtcaggactttggagcgcaaataattaaacca

SEQ ID NO: 28756 - DNA, 428 bp, Setaria italica
  Peptide Sequence Number=SeqID_94730
caacatcaatcttgttatatacataaacacacttaatgtactttcgatttccttcaatgacatcgatgagatcatccacagtagcatcttcgcggaataacacctcagcattgtgaattttgtactcgtgcaaaatctgatagcagagcttctcatcaatatgagtcaaaggtgctgtggtgttgaaagaaatcccaccagtcttcttccttttgaagtatatctaattaggtcagcgatgaaacaacttatgcagttaaaggtagaaatgttcactgaagtattaagagatttatgcccttttaaagctgcccatagaaatgacacacagttctccagcatgttcgagaaaaaaaagctggggaggccttttgttgagacggagcccaacggcttccagttctcttgttaatatttggcgatgtcct

SEQ ID NO: 28757 - DNA, 476 bp, Setaria italica
  Peptide Sequence Number=SeqID_94731
agtgtatctgatgagaaagccaggcttgaacctttcctcggcctgcaagctactaactccacctcaaaaatgagggttgcgttaggaggtatctccggtggtgagcccgcagttccatatgcatatcctggctttctcatcagatacactgcccacacttgaacctttcctcggcctgcaagctactaactccacctcaaaaatgagggttgcgttaggaggtatctccggtggtgagcccgcagttccatatgcatattctggcttgcatgtaatttttgcaacttcaccaaccttaaaatttttggtatgccaaaccacattacacaatgcttcagagatgatgaagaccataccagaaactagaatatttgcacaccttcatagttcttaaggctatatcccatgctttgatgacagccccctgtccaacttcaaatgagaaaatagagttgtcttcatgggtggtgtcaaaa

SEQ ID NO: 28758 - DNA, 239 bp, Setaria italica
  Peptide Sequence Number=SeqID_94732
ttaatactcccttctattaccatatacaagcaaagagattggcgcaagcacctccttattggtcttgcagccccacctctgcaggggcggacccagtttaggacatgggtgtacatgtgtacacccgataattgctgtcggatgttcgtcgccggcgcccaacgaaggtcagatggtcgggcgacaaaagacctggcagttgctgctcgccttgtcgtcgccgctaggaaataaggccg

SEQ ID NO: 28759 - DNA, 335 bp, Setaria italica
  Peptide Sequence Number=SeqID_94733
tcaaggaatcaataggttggccttgagcatcaactccaggggttatcatatcagggcgctgatacatgttagcaagcacaagagttggtgatatggttggcctgttgtgcagacgggagcagcgatccccatgacgacaagccccaatcttgaaataaaaagggcagttgaccctgtccttctcagtgccaaatatcgaagccaagtgctctgccatgattcagctctctaactgacactaaacctgcaagtgtaagcaagaacagtatcaggaaacatcttcaatataaggagaactagagtgcctatacattattttcttatctaagaaacca

SEQ ID NO: 28760 - DNA, 251 bp, Setaria italica
  Peptide Sequence Number=SeqID_94734
gaggaaacggttaaactccaggcatgatgacgcatctatgcccgaattttggttcaaggcaatcaagttggctgccttctaggaaaaggtggctccattatacaacaactgcgaagtgatactggtgcggggatccgtgtcttgccatctgaaagccttccccaatgtgcacttaaaagtgatggagacgagtagatatttcatagagagctttccttacaagagaaggtgctccagatatctgcacttag

SEQ ID NO: 28761 - DNA, 150 bp, Setaria italica
  Peptide Sequence Number=SeqID_94735
cccagcaactactctgaacatgggagtagattactgggtgctcctgcttctgtacccatgcatggtaaagttgttgcagcaccgacatcagctcatcctgtatagccggatcactgagaacaatatcacgtgaatttgacgaaggagctg

SEQ ID NO: 28762 - DNA, 507 bp, Setaria italica
  Peptide Sequence Number=SeqID_94736
gggggattagtaggtgtactctgctcattctgtattgctgacgatttttgagatttggacctagtggccacatctccctttcccattgtttattcctctcctctagccctatgtcccttttgcctcttaagctcccaaaagaaggacagagctttcactttaaaggaagaggcaacatctttgggttgatggacataccaaacaaaacaaattccatgagaatttatcagttaattagaatctggagggcattgaaatctgcccagcatcatctcctttctttaagtaaggatttaggaacggtggagaatcacaataaccggaaaatgcatgacactgagaatatgaagggtctaaaggtaaacgccattagaaaatgaaaaattccaaactttacataacaataaagtcacatcagtgttggcgcgatacaaataactggcaggaacagaaaagtgtagcctctataacagaatcatgcaatcaactatagaagaacaaacaacg

SEQ ID NO: 28763 - DNA, 324 bp, Setaria italica
  Peptide Sequence Number=SeqID_94737
agaagaaacaagactgcaaccgtggtggttgcttcacggaagtcagtcacaggagaaaactccacaattatcgggcggccagagtaaaagcggccctgaagagcattgtatgccgcagctgccctgtcttccttccctcgaaacgtggacataggacagttccctatcatgtggtcagcaaggttgtcgcagacattcaggttctcaatctcaccaaacttgcccagcccctgatatgataacccctggagttgatgctcaaggccaacccattgatcctgagaagatgcaggagcattttgaggacttctacgaggacatcta

SEQ ID NO: 28764 - DNA, 446 bp, Setaria italica
  Peptide Sequence Number=SeqID_94738
ctcaacagccgcacagctgtaacgagcaacagcaccggaggcagcatgcgttacaccaatcaaaaccctagatcgggcttcgtggggcatggagttcagctgaacccaaaaattttggggaaagcaatttgcaattactcctacaaatagcaaccgaatccgcgacaaaccggatggttggagtattcatccgatcgagaacgttgcgggttcgactgctcagaaaatagccagcaaatttaatctaagaaaactacggtttccttaccaaatcgatacagattcctgatggatctgtgacgaacgggggggcggtgaacgggtgggaatcagggagtaggcgttgatcgatggctgcacccgccgcaacgacgggatggggaagagggagccgcgaggaaaaggggtcgagcgaagtcgcctcgccgccgcgaggtcgcgaggaa

SEQ ID NO: 28765 - DNA, 697 bp, Setaria italica
  Peptide Sequence Number=SeqID_94739
tgattcagatgaatggggaaattgctgggcatctgagagtggttgaagccctggtttccagagtttggagcatgcatttgcatgtggttgtgatgcaagtctaaactaccataatttgttccttgcatcaagcttccagagggtaggttatttccttccattttgaccaaaggaacatgcagtcattaatactcccttctattaccatatacaagcaaagagattggcgcaagcacctccttattggtcttgcagccccacctgagaaaataattgaggtgaagtgttgagcaaaatacacgtacgagatatgactacatgaatactccaacaagaccacaaaggtcacaaataactctatgaacctagagatcattgtaatcaaaatcatctgcttatgcttcaagagttaaatggttcattaatctattagagccacttatttaaggtataagcaatggacacatacagcacaattccatatctgcatcagttaagaaatcatgggctcactcagcagaccattagcaaacacacagccgcctactaattagtgaattactttttgtaccatattgaaatacagcgagacttccttaaaaactttcaagagattcaatagaatcaaattaagcaacacttaacagaggagctaaagctaacttgcactagcaaaagattcaacagaattcagctg

SEQ ID NO: 28766 - DNA, 941 bp, Setaria italica
  Peptide Sequence Number=SeqID_94740
gctagaaaaagatcaaatttcccacagtatctcctaggaattctgctaccccagaatactacatcacagaagtattacccagacttgtaaagtcgaaagttattgggataattgtaaatggtcctcatcatatagataagaaaagcttttgaactttggactgatgccttttgcacgagttgttgcttgtatctcaggaataaccagggtagcatttaagagcctggcaacggcaacaaggtcacagattgaagattgtatcttctcaaagccaccatagatctttgcataaataaaaccattatgcttactgggagcagcatatggtttgataggttttgcaaaaggatgcaagtggtcaagtttgctcaatggaccccacaacctccgtggccggggcctcggtccaaatggaaggacatcatccatacgcatgctgccctttgtaatgcccccagctgaataatttgcaagaaaaaggtgcacaagcagcgatagcattgacagcatgatgccaatggctgtggccaacttaaacttgcttttgagcagcattttatttcattactctaacctccaaatcctgtcggatgttcgtcgccggcgcccgacgaaggccagatggtcggccgacaaaaagacctggcagtggctgctcgccttgtcgtcgccgctaggaaataaggccgagagggtggaacggagaaagggaaaggaaagggaaaattggccgctcggaaacgaaagccggagtccaggcgcggggacggggaggagggggctcaggcgctcagctgcgaggcgcacgcgggcgctagggaggagagggagggcggctcggccggtcggggttggagaaatgaaggaaaattctttaaacaaggaggaagatgaagaggagtaccaagagaaaattgaacagcagttagctatgcaggaag

SEQ ID NO: 28767 - DNA, 574 bp, Setaria italica
  Peptide Sequence Number=SeqID_94741
ggttttacttgaatggctgttgaaattctgcatgaacaatctgaccatgttacagttagagctgtacgtggaaatttacgacaaaataacatcgtagcacgcatatagaattcggagctactacgctacaaatcggccactgcaatatacaaaggataatgcaaggaagaagcaaaatttggatggaaccatcgttataatcataaaatcctttcttttccactgcaacccctagaaaaagcgcatgtgagcggctccacgctatccttgtcaactttcttgcagtattctactctaacatcaatgccataagcaacctgaaagggccaacaggataagaacattagggaaaaactttaacagtgtatgcttgcatttccgaaaataatatggcatcagacgacagtatagcttcatgacaatcgacaagtaaggttgtgtggaccatagcatattctttgctgtcggtagacttcagttgtcctgaatgtggaagtaaggtatttcataacaccattatcaaagtatcagcacatgaagcaacctggctgcctcaggcaaactgaacagagac

SEQ ID NO: 28768 - DNA, 545 bp, Setaria italica
  Peptide Sequence Number=SeqID_94742
tccccagagcaaccacggatcttgtgctctctttctctatgtaaaggtggttgagcaccacagtctggggttgaggtagggggctcgattcatcttggcttggtgggaagctcagtagcgtatgctggagatgaggagggaccaatgggggctcccgaccttcatcttcatttccaggaacagggttgttgtagctagcatccggtgaaggtgggacttcaaatccaacaacattgaccccttcctgcatcatggttagccatcgtgaggaagtaattgggaacctatgcaaggttatattctgatagttcttacatggtcatccctgccatgttggtccatattccaacagcctgttgcctaccctggagaaataatagaagatgctcgtgttactagtaaagaatttaaagaaaaagtaatctgcatagggatattgcaaaataaaattcaaatggcataatcatactaaatacaagatttcaaataacaatatggatccaggaggtattcccagagatcaattttagcctaaagtacttggg

SEQ ID NO: 28769 - DNA, 1220 bp, Setaria italica
  Peptide Sequence Number=SeqID_94743
aacagtggtcacttgctgccattcaccatcaacagcttccttccacaaggtcacattgttattaccatcagaagcagccaaaatgttcccagtaagtgaccatgacagcctccacacaggggttttgaagtcgtgcaaaatcctgcctacccattgctcaccttccttcgcctcggtccagatcacaacagttccatcctgagacgcgctggcaatggtagactttggaagaccaaggtttggagcccaggccacatccctcacccagtccttgtgcatctgaagggcagggaagcaatccatcctccaacttccattttgcagcttccagactttgaccgtgttatcgcagccaccagatgcaagtttctgaacatactcaaactgaccagaaggtccagcagtgatcaaagcaccaggggccattgccggagcccaagaaaccgaagtcacgccaactggatgtgcctgatcaatgcgcgttgtgtcccaaactccatcagcacgagctgtgaatactgatatgttcccgtcagatgagccgcaagccaagcagagcccaagctcatgaggcgcccatgcaatggagctgacggaggacttgtgctcagtgaaagtatgcgcctgaacccactcgtcaggtttgcccccttccttccatatgatcacacgaccgtcgtagccacaggaggccagcattgagccgaacttggggtgagcccatgcggcctgccagactggcccctggtgcccgctcagggtggccagctgctggtgtgaggttccactgacgccgacgatctttatggtgttgtccgaggacgctgttgcgatgcgcttcccatagtaatccatggcgacatcgtgcaccacatcctggtgcccggtttcgatcttgtggggaggcatcttgcaaatgggctgaaacctgacaacccccaaatctctctgataattgtgccaactgcctaccgcaggctcctgcctgtcgggatgttcgtcgccggcgcccgacgaaggcagatggtcggccgacaaaagacctggcagtggctgctcgccttgtcgtcgccgctaggtaataaggccgagagggtggagcagagaaaggaaaaggaaagggaaaaggaaatccggagtccaggcgcggggaggaggggctcagctgcgaggcacacgcgggcgcgagggaggagggggagggcggctcggccggtcgg

SEQ ID NO: 28770 - DNA, 983 bp, Setaria italica
  Peptide Sequence Number=SeqID_94744
tgcatcttctcaggatcaataggttggccttgagcatcaactccaggggttatcatatcagggcgctgatacatgttagcaagcacaagagttggtgatatggttggcctgttgtgcagacgggagcagcgatccccatgacgacaagccccaatcttgaaataaaaagggcagttgaccctgtccttctcagtgccaaatatcgaagccaagtgctctgccatgattcagctctctaactgacactaaacctcaataaaggtcgtcagtgtgcaagactaagtagacaaaaaggtacacaggcagctaaaacaaaccagggttcacaacatatgcatcatttaggatcaccaacaagtagtattcctgtaaatttaaccctgtacagcccactgtgtgattggaaattataaagctcatgcccttgcaagaaatcctaatccaatccattcttaagacctaatctgcacacttactcaaaacgttaaatatcaggagagagtgaatagaaagaccaaaataactctacttcagtacccatcagggctagatcttgctcctggtaaactgatcactttttaacctatataaatctgcacagtgttcaactaggttaatggcccaacaaatcaactaaatgtaagcaaaatgaaattgtttctccactataatgttttgattctccccctgcaactgcaaaaagaataaaccaaataaaaactgcacagagagacagctcttcgtctgcggcacaagggtattccactattccttctggtgtaggccttgtattttccgcccgacaaaatattatttgattttaacctaagctgcacaccattttagattattattaatctctgatcgaaagaaagacccaaaacacagttaaatctatcaccgataaaagcaaaatccattcatattctgaattgactactgttttgttcataaatttcaagcaatctgcatgtcaccatgcc

SEQ ID NO: 28771 - DNA, 844 bp, Setaria italica
  Peptide Sequence Number=SeqID_94745
ttcttatatttctgaagtatactgcgttccagcaagtgaaactagcatgggtgaagccagtctcaagaaaaccagatgtgcagtttcaaatacagcgaccacagagcggcggcacttgttaccaggtgttccatgagcgaggtaaacgatcttatttgtcacaagacataacctatgttatctttgctcgcacaagacaatataacagctatctagccggaaatcaagaaaggcggctaatctgcagcgagcggctaatctgcagccagagatagctccagccacacgtcgaaccatgcggaatctgcctttcctctgccaggagaccagaaactagccccagctggggtaaagtggcatgcgggaagactggggttgttgctgcgtgccccggctgttcgcgctgatgaagccctgcaggagactctgcgcagctttcgcttggtccagcgtgccctggatctccactaccgactctgaagaaccggcatgtgcttcaagtagcctcagttttgcaccggaaatctgacagatctctgctagattgaccccgccaactccaataatagattccaaggaactatttggaatcctcagttcaatagtgcttgagtacctgccagcaacacttgtatgtcctcggtgatccgcacgtccatgcatctgtccagcagcctcagtatagtcgtaagcatttgaatttccatctcttgcaatgcctaattgctgtgttcccctactagagtagctatcagtaggcacatggtcacgataagaacgatgggacatataatctgcaccgggactgaaagaggagggaagttctctagtaggaacacgagca

SEQ ID NO: 28772 - DNA, 1108 bp, Setaria italica
  Peptide Sequence Number=SeqID_94746
cttcctcgcatcatcttttgtcttatctgagagattagccatgctatccagaagttctggattcgccacaattctgcaagtagtaccccgaccaaggagatctgtaagcctcttatacctcttattgaggtcattgaacttatcctcacactgctgtggcgatacaagacaacctcgctgacccatgacttttaatatggccttccacttgcctttcttctgcatcattgcacagttcctcctacctcctgaatcagctcctggatcctccccggtgtaagatgctgcagtaattaaaagcttaaccattgaatcagtccacttcatccgatgccatgccgagcccttcttgcccttgccggtctggctatcagtggcatcctcattgacaccatgttcctcatcatcgctcatgctattctttgtgtgctgctggttgtggtggtggtgatggtggttggccttgccatgttctccaaattgaaattcagaaagctgatcagaatctgtaacctgattcagatgaatggggaaattgctgggcatctgagagtggttgaagccctggtttccagagtttggagcatgcatttgcatgtggttgtgatgcaagtctaaactaccataatttgttccttgcatcaagcttccagagggtaggttatttccttccattttgaccaaaggaacatgcagtcattaatactcccttctattaccatatacaagcaaagagattggcgcaagcacctccttattggtcttgcagccccacctgtcggatgttcgtcgccggcgcccaacgaaggtcagatggtcgggcgacaaaagacctggcagttgctgctcgccttgtcgtcgccgctaggaaataaggccgagagggtggagcggagaaagggaaaggaaagggaaaactggccgctgggaaacgaaagccggagtccaggcgcggggaggagggggctcagctgcgaggcgctagggaggagggggagggcggctcggcaggtcggggttggagaagacggactgcggcggcggcggcgcttttctgcggcacctgagcggagcggagcggactttaggagccgaagggtgcttcggc

SEQ ID NO: 28773 - DNA, 1072 bp, Setaria italica
  Peptide Sequence Number=SeqID_94747
tttttttttttttttctagtcacacacacacacatcaccaggcagattctcactattttgtcaacgtcacaacactgagttaagctgcgcagatcataactacaaccggaacaccattgccaccaccaacagccaattaagtataaggctaatcattcgaaaatgacgggcagcctaggtttcttgcctgtttctgcacgactgactacaacagagggttcttctgtttctgcagaatctgcacaactacaacaggagagggggcggttctaatgggtcgcatcccaagcgtgtttaattaccattcctgcgcagcgaaacagatgcaggagcaaggcacagaatagccacacactaccgcctcagcactggcttgtaaagaacaactgtcacaaacttcgccctgaaccggtgtgtgatccccagagcaaccacggatcttgtgctctctttctctatgtaaaggtggttgagcaccacagtctggggttgaggtagggggctcgattcatcttggcttggtgggaagctcagtagcgtatgctggagatgaggagggaccaatgggggctcccgaccttcatcttcatttccaggaacagggttgttgtagctagcatccggtgaaggtgggacttcaaatccaacaacattgaccccttcatggtcatccctgccatgttggtccatattccaacagcctgttgcctacccttgctgctctggaaggggatggcgaggcctccttgctggcggtgcgacagatccgtcggatgttcgccgccggcgcccgacgaaggccaggtggtcggccgccaaaagacccggcagtggctgctcgccttgtcgtcgccgctaggaaataagtccagagggtggagaggagaaagggaaaattggccgctgggaaacgaaagccggagtccaggcgcggggaggagggggctcagctgcgaggcgtacgcgggcgcgagggaggagggggagggcggctcggctggtcggggttggagaagacggactgggcggcggcggtccagcgaggaggattcagccggctgaaggcgacgtt

SEQ ID NO: 28774 - DNA, 1431 bp, Setaria italica
  Peptide Sequence Number=SeqID_94748
aaagaaagcagttgacctccatcaaggaactacacactgaatacaaggaaaccgggctggactgaatggctgttgaaattctgcatgaacaatctgaccatgttacagttagagctgtacgtggaaatttacgacaaaataacatcgtagcacgcatatagaattcggagctactacgctacaaatcggccactgcaatatacaaaggataatgcaaggaagaagcaaaatttggatggaaccatcgttataatcataaaatcctttcttttccactgcaacccctagaaaaagcgcatgtgagcggctccacgctatccttgtcaactttcttgcagtattctactctaacatcaatgccataagcaaccgtattgcaagtcagcctttgcaatttttagatgttatcgtgccacgcctgactgcgattcccttttagcctgcgttcaagctccagctccttgtgtcttacctccagctccaaacgtctattctcaatcttcatctgttcattctccaacctcatcttttctagttctctgtccttcttcttactaaacctctcccacttgtggcgttgctttgcaagctccagcgcctcagcttcaatttccatgcgctgtttctcaatctccgcagactgtgtagccaagtctttttgcaccaaagctaagttagttccatccgggaaaactttgttaatatccactgtaatgctaaggggatcggatctcctgctacagtcatgtgagctggaagagttgccaaaacctacatcctcctgatccaccatgtaccgcattcttttatgcacaggcagggtccctttattgacatgcaccacgggatgctcatcatcattctcttcctcataatcagtgtccgcactttgatcatcttcatcagcatctccactcgctctcctccttgtatcatgctcatctttacacttcagagcaagctgcaatgagcgctgaagtgcaggatcttcaggtaaactaaaccggttattgttgtggtaggagcacatctcctcatagaacaagtgcttagagctcaatatcttcctcgcatcatcttttgtcttatctgagagattagccatgctatccagaagttctggattcgccacaattctgcaagtagtaccccgaccaaggagatctgatgaagatgatcaaagtgcggacactgattatgaggaagagaatgatgatgagcatcccgtggtgcatgtcaataaagggaccctgcctgtgcataaaagaatgcggtacatggtggatcaggaggatgtaggttttggcaactcttccagctcacatgactgtagcaggagatccgatccccttagcattacagtggatattaacaaagtttcccggatggaactaacttagctttggtgcaaaaagcttggctacacagtct

SEQ ID NO: 28775 - DNA, 1283 bp, Setaria italica
  Peptide Sequence Number=SeqID_94749
tgcgggaagactggggttgttgctgcgtgccccggctgttcgcgctgatgaagccctgcaggagactctgcgcagctttcgcttggtccagcgtgccctggatctccactaccgactctgaagaaccggcatgtgcttcaagtagcctcagttttgcaccggaaatctgacagatctctgctagattgaccccgccaactccaataatagattccaaggaactatttggaatcctcagttcaatagtgcttgagtacccagcaacacttgtatgtcctcggtgatccgcacgtccatgcatctgtccagcagcctcagtatagtcgtaagcatttgaatttccatctcttgcaatgcctaattgctgtgttcccctactagagtagctatcagtaggcacatggtcacgataagaacgatgggacatataatctgcaccgggactgaaagaggagggaagttctctagtaggaacacgagcaggtgctgcatatctctcataagcagatgacgggaaattactaacaaacagagggcttccattgggatattctcttttagaaaagtagtctacaggatatgaatgggaaggatcacgaggtgcattttcgttcagtcttccatatggtacattactggaaggtcttccgtatggtggatcgttggcaagttttccatatggtgcatagttggcaggtcttccatatggtggatcgttggtaggtcttccaaatggtggaacagcggcaggccttccataaggtgaatcattggtcagtcttccaaatggtagatctatggcaggccttccatatggtggatcattggtaagtcttccgaatggtggatcaatggcgggccttccatatggtggatcaatggcaggccttccatatggtggatcattggcaggccttccatatagtgtgaattctctgctatcaacaggatgatcatgaaaaggggcagcaggtggaggattattggtagaactggtgtctctcaaagtcctagttctaagtctcgaagcaacctctgcgagggctcctcttgcaatagctggaggcccagcaacctgcacaagctcatcatcaaaagacaagtactttggtttatctgctttcgagtaaactcgaatttctgcctcagttcgccttctcatttcagtaattatcttcccaccttccccaagaatacagccaactttgcttgatggtacaacaagccttgtactcacatggcgtttctcagagggtacacttactttatcatggagcaacatt

SEQ ID NO: 28776 - DNA, 1108 bp, Setaria italica
  Peptide Sequence Number=SeqID_94750
ccggaaacttccatccctgtctagaaagtatgcaattgcgccaataatagcaatagtaagctgtacagcaagaaatacgaggagcacatctcttgcaacaaagatccggaacttcattttacgccatgagttgtcctcccacgtctccaccctgagatgaaactgagctttgcatgttgtgcagtgggaaaatgcaaatccttccctctgaagtctgaaccaagctgaaatatgatagcctggagagatgcagcttgacttctaataggcagcatatttgccgttacatgtcaaaaaatttattctgatagcatctttgcaatgccagaatcttaacagaacgccagtgatcaaggcatgagcggtgaacaaactgttgagttcctttgcacatgcaaggtgatatcagttcatcacctatctcagactcgctctcgaggcaaatgcggcagcatgcagcagaagagccatcggtctcctcatcctcgatctccaacggggtcacagttgctggttgtggcgcagacagctccactgatgatgatgactccgcctccttgttctccctcccaagaagagggtccgagtcatttgggaccacctcttccagctcctggttcctatccatcccgtggccgttctcttcctctagccttcactgtcgtatgttcgtcgccggcgcccgacgaaggccaggtggtcggctgacaaaagacctggcagtggctgctcgccttgtcgtcgccgctaggaaataaggcccgacggggtggagcggaaaaaggaaaaggaaagggaaaattggccgctgggaaacgaaagccggagtccaggcgcggggaggagggggctcagctgcgaggcgcgcgcgggcgcgagggagggccgctcggccggtcagggttggagaagacggactgggcggcggcggtccagcaacgaattcagccggttggagtcaagtcgggaggagctcgacgggcgcggggccggccaggcgagctcccccgtcggggaggacaacggcgcaggggaggagaggagcgggcggcggatgcgagagcagagaggggagaagggaggggagctcgggatagcggtggatgcg

SEQ ID NO: 28777 - DNA, 1830 bp, Setaria italica
  Peptide Sequence Number=SeqID_94751
aggacaaggtaggaaggaattaattggtagaactggtgtctctcaaagtcctagttctaagtctcgaagcaacctctgcgagggctcctcttgcaatagctggaggcccagcaacctgaaagcttggaacaaatataaaggcataacaaaagttaaatataaaaggtctggatatagaaaaaatatatatacctatcgtgatgcagctgtttgcaaatattaaatcacctgcacaagctcatcatcaaaagacaagtactttggtttatctgctttcgagtaaactcgaatttctgcctcagttcgccttctcatttcagtaattatcttcccaccttccccaagaatacagccaactttgcttgatggtacaacaagccttgtactcacatggcgtttctcagagggtacacttactttatcatggagcaacataagtgcctcaattgttggggatattggatcagctggtgtctccttagatgaaacaataataagcctttctccagaagcatctttgtcaaattcttgaaccttaatgcgagcaccagtctgctgctctacccgcttaacattggccccacttttcccaataactgaaccaatgagctcagaggcacacagaattctgacagaaaactcctcagtttcagcaacagttcgcaaaggtccatctctatacggatcaagcaggggtataggtggtggatgatcaatatgcaggtgtgacattggatttccatgtggtaatggtggtggagactcgcgtttccttcgtgtgcttgcatctattatttcttcaagaggtcgattttctttacgaggatgttgatggagacgagtagatatttcatagagagctttccttacaagagaaggtgctccagatatctgcactagttcatcacttttaagtgcacattggggaaggctttcagatggcaagacacggatccccgcaccagtatcacttcgcagttgttgtataatggagccaccttttcctagaaggcagccaacttgattgccttgaaccaaaattcgggcagtcacatcatcagcactttcagatttattgttggcaactccatcatgaacttcatctgccacgatcttatcatgaatcttcaataaggcatcttgggcagaacaatggggcttcatgctctctgagccatcactagttatattttcagctgtttcatcagcttgctcagattgattctggtagttgaagatgataattactctctcgtctgcaccaggaatggaatcagcaacccttatctttgatttagtttcctctctaagggccttaacaatgtcaccacctctccccaagacactgcctatcttttttactgggcacaatatcctgtaaatggtttcaattggctcagagggcatagatgcgtcatcatgcctggagtttaaccgtttcctctttccatcatcagaattggaatgcgttcctttttttggagttacttcttctagaactatcataatccattgcactcagttttgtagtccacctgtcggatgttcgtcgccggcgcccgacgaaggccaggtggtcggccgacaaaagacctgtcagtggctgctcgccctgtcgtcgccgctaggagataaggccgagagggtggagcgcagaaaggaaaaggcaagggaaaattggccgctgggaaacgaaatccggagtacaggcgcggggaggagggggctcagctgcgaggcgcacgcgggcgcgagggaggaggggaagggcggctcgaccggtcggggttggagaagacggattgggcagcggcttccgttggagtcaag

SEQ ID NO: 28778 - DNA, 1867 bp, Setaria italica
  Peptide Sequence Number=SeqID_94752
tgctcaatcttagccctgcgttcctcgctgttctccctgactgggcttcttgcacgcctggagggggggctgccaccatgcctgcgcctccctccatcatcgtacctttcatgcctgctgcctccacccccgcggccacggccacggccaccgccaccaccaccacggtagtcatcacggccacggccaccgccaccaccgccgtggcggtaatcatctcggtcacgacgctccctcctgtgaactgggctagggctgcggctccttcctctatgtggcctcctgtaacgcccaaagagctttttcctcagatccctaccaatctgcttcacatgcatgaaattgcaatatccgccacgattgcagctgttctcctcatattgcctgcaggtcgcttcacgaaaatcagtcactggggagaaatcaacaacaattgggcggccagagtaaaagcggccctgaagggctgtatgagctgcagctgcctggtcttcctccctgaactggacatagacattgcctatcatgtgatcagcaaggttatcgcagacattgaggttctcaatctcaccaaacttgctcagttcctcaaaaatatcctcgtaaaaatcttcaaaatgctcctgcatcttgcggggatcaattggctggccttgagcatcaaccccaggggtgatcatgtcagggcgttgatacatgttaacgagcacaagagttggtgatatggttggcctgttatggatgcgtgagcaacgatccccatgacgacaagccccaatcttgaagtaaaatgggcagttgactctatctttctctgtaccaaatattgaagccaagtgctccgccatgattcaaaataagtccaactgactttcctgcagagataatgttagagatcattaaccctctaaattgagaagagtgctccccgatacacaaaagcctccaaactttaataagtatttagagtattgatggacaatgtggtaacacaagaaatcaatggcatctacatgagatatatttcatgtgatgctgtcaccatacatgaaaggtgacaaaaaaaaacattatgaaagtaagtttaacattattcatgaactgaattcattttacaatattaccaacactgcacccagtatatttacccattcattttgaacactcaggctaactgccccaaaaaaggagcagctagtaagacctgcaatcccaaaatataactctatatggtcccacgttcttgcaaaactaattccaaccgcttcttatgacctactctgcacactaactcaaattgttaatatcagaataacaagagcataataactttacaatggtaacgaagaatttaatatttctcctactgcggagcattaatgaacatctgtagcgtgttacttagcctaaactctgcacatcgttcaaatagtcaacaccaaaggcacaacccctgcaactgcaaaaggaagatatactggtagtctcccacactaaagtggtttattgtccctgtaccctgcaactgcaaagagaccaacaggaaaaaacaaaaagcaatgcaacttttcgccttgcacaagagcacctccttctcaggtaggccttgttatgtccgtccagcaaagaattttatttcagccattttaaaaacctaatctgcacaccatttataagatcattaaaatctaatcaaataaaacaaccaggaaaagaaataaagtatattactgcccagaataatgatataaaagaaaacagcacatccaaaaatatatactacctccgtttgaactaataagcttgttctaaccatcatatatttaaaaatggagggagtatataattaaactgaagtgcatggttg

SEQ ID NO: 28779 - DNA, 1008 bp, Setaria italica
  Peptide Sequence Number=SeqID_94753
cagatatgcagctagtctatcagacatgaacttgttgctagtatatcagacatgaacttgttgctagtatatcagacatggacgtgctgtcccaaatcagcagtgatatcaagattggtgatctgcgcatataccaaacatttctctacttattttgctcttttcagtataacagtgcgagatagaagcaagggtgcagcgcacattaagcacagtaagtgaccaagcctgacttggatgcacccagattattttctaggttacaacagtcagcagcaatgttgcaatctatttccctttcccttttcccttccccttctttgcgtcaagctttgcttgcacccgagctgctgcagcagcttttgcttcctccctcttctttttctcttcctctttggtagcagcagcaagctctcgctgcttcttaagttcctcaagcctggctttctcatcagatacactgcccacacttgaacctttcctcggcctgcaagctactaactccacctcaaaaatgagggttgcgttaggaggtatctccggtggtgagcccgcagttccatatgcatattctggcttgcatgtaatttttgcaacttcaccaaccttcatagttcttaaggctatatcccatgctttgatgacagccccctgtccaacttcaaatgagaaaatagagttgtcttcatgggtggtgtcaaaaacttcaccattctcagcaagtgtgccttcgtaatgaacatcaaccaagggcaggctatcagatggcgcaatagcatcatcctttgctttacggaccaccgtctttagaacacctccatcccctgataaatctatggtctctgccatgaccttttagacgtcggatgttcgtcgccggcgtccgacgaaggcccaggtgctcgccggacaaaagaccaaggtgcggtggctgctcgccttgtcgtcgccgctaggaagagggtagagaggtcagaggaggaaggaacgggaaagtctagtaaaact

SEQ ID NO: 28780 - DNA, 1447 bp, Setaria italica
  Peptide Sequence Number=SeqID_94754
ttttttttttttaaatttagttaaactaagtctaaattcgatgcaataagacgaagacgcttgttattagcacgcagttgctgtacattagatgcattgagagatcttatattcagacgaaaaaaacgcaacatgattaattcagacaacagattttcaatcgtccagtcgttcaattccaggaacaaggcagagggcgcacattacagtcactacacgtggtcgacgaagattaccgagaaggtaaaacgtaaaactcagcagaagctctagactgtttcagcagatggtgttcggtacaggtagaagcaggattttcatctgtacagtagcctagtagaactcaaggtgaccattccttgtatgatctggaaccagaggatgggccatgttgtcatgttgatgaggtggccatgaagcattttcaggcaggcacctctctggctctctctagaggagcttcagcatcttcaaccgctcctcgtgctccgggtcaagcttcggtgccgtgtagctgccgtggaggtcttccaccacgtattcctttgtgagctcccgttttgtcaggatgtgataatgcctctgccagatcctctggacggccatggtggctgccaggaagccataggcaatgcccaggatggcaaacacgacgatgaaaaccaacaccagggcaaagcatgcctccaaggaagcaggcaggcagtcaaggatgccccagccatagcagcagttccggcacccagctaggcatggatcctggtggtcgttgaaggatgagcagtgaactatcaacccaaagaatccaagcagcacaaagaaaaccacaacacctatgcagtagtagaatggtattgggtgctttgacaagaagcgatcccagccatcactgaaactgttccggaaacttccatccctgtctagaaagtatgcaattgcgccaataatagcaatagtaagctgtacagcaagaaatacgaggagcacatctcttgcaacaaagatccggaacttcattttacgccatgagttgtcctcccacgtctccaccctgagatgaaactgagctttgcatgttgtgcagtgggaaaatgcaaatccttccttaacagaacgccagtgatcaaggcatgagcggtgaacaaactgttgagttcctttgcacatgcaaggtgatatcagttcatcacctatctcagactcgctctcgaggcaaatgcggcagcatgcagcagaagagccatcggtctcctcatcctcgatctccaacggggtcacagttgctggttgtggcgcagacagctccactgatgatgatgactccgcctccttgttctccctcccaagaagagggtccgagtcatttgggaccacctcttccagctcctggttcctatccatcccgtggccgtttcttctttccttcttagccttctacttgttcgtt

SEQ ID NO: 28781 - DNA, 2310 bp, Setaria italica
  Peptide Sequence Number=SeqID_94755
gctgggggcattacaaagggcagcatgcgtatggatgatgtccttccatttggaccgaggccccggccacggaggttgtggggtccattgagcaaacttgaccacttgcatccttttgcaaaacctatcaaaccatatgctgctcccagtaagcataatggttttatttatgcaaagatctatggtggctttgagaagatacaatcttcaatctgtgaccttgttgccgttgccaggctcttaaatgctaccctggttattcctgagatacaagcaacaactcgtgcaaaaggcatcagatgcactttccaatgatgtggctattgtgcgtggcttgccgaaggatctcagagaggctagaaaaaagatcaaatttcccacagtatctcctaggaattctgctaccccagaatactacatcacagaagtattacccagacttgtaaagtcgaaagttattgggataattgtaaatggaggtaattgtcttaagtcaattcttcccgcaagcttggaggaatttcagaggcttagatgcagggtagccttccatgctctaaggttgcgccctcaaattcaggctcttgggagccaaatagttggaaggttgcgggcatctggacgtccttatctggcctatcacccaggattgcttagagatactctagcttttcatggttgtgctgaactgttccaggatattcatacagagctgattcagtatagaaggaatcagatgattaaacgaggaacagtaaaggaaccgctaacagttgattcagtgtccaggaagatggctggtctgtgtccgctcatgcccgaagaggttggacttctacttcaagcattaggttacccaccaactacaataatattcttggctggttctgagacttttggtggacagagaatgctcattcctctacgagctatgtttgccaacctagtggatcgaacttcattatgtagtcagaaggagctgtctgatttagttgggccagaagatcctctagcctcagatttgccgcagtccccacctcccaaaagtgaaaaacaactcatcgaagaatggaagagagcagggcctcgtccaagaccgttgcctccacctcctgcaaggccattctatgcccatgagaaggaaggctggtatggttggattggtgagaatgacacagaaccggatgcttcatcgattgaattcaggaggcaagcgcaccggttgctctgggatgcccttgattattttgtatctgttgaagctgatgccttcttccctgggtttcacaatgatgggagtggttggccggactactcaagtttgatcatggggcatcggttataccaaacaccttctggtataacctacaggcctgacagaaagattgttgctgcgctgtttgaaaatgttagcgatcatcggtatcatccaccacgaaattggacaattgctgcacgtgagcacctcaacaggagtgcaggtgtggaaggcgtcgtgtcatcagctatgttatcgagacctgtatcttttctctcgcacccattgccagagtgctcttgcataacaccaaaatcacctgctgttcaaccagtgaaagacaggaatggcagactcctatttggaggtgaggaagagtgtcctgaatggatggcgcgccacctggcaatggcgtctgccaagaatagtgaacctcaaaacgaggactatgaggatgagttgcctgaagatgactctagcccaggcacgcagcaggaatctgacagaagtgatgcaaataaatcttcggagcaagacgaagagatggatccagatgattagagatgcggagcatgtatgtatggcgcaccttttaactgctgtcagctccaggttactccagcaacgcaagcaatacactccaagaatctcctggaccagcgggcatcatcttgcattgcagcaacacatcagcaaccggaacagtcccatgatgataagattgtcgatctcgagagtttgcctggattatgcttggtacgcgaccaggcttcaatagaaactaacactttgttctcttcttcatgcctcactcttcttttttcttcttttttttggatttattttttgtgggcacagcccaaagaaattgtttgtgtacaaaattacaaatgtctattaactggggatacactattttttggggtgagtctgatatctagcatttacgaggtagtgagattggcttctggcctgttgatctacctctgtagaatacaggacaggctttgccgttttgccccctcaattgcgtgcgtgtgagtttgttaagc

SEQ ID NO: 28782 - DNA, 1477 bp, Setaria italica
  Peptide Sequence Number=SeqID_94756
tttttgaattacacctgctgcaagtaactacaaagaccaaaatgtcagcacatctctatggccatgcaggcaagcaaaggagcaacttaacacagggccaaaaaccagatggtgattcagaatgacaggccacaattgacataacactaacaccacaaatgatttcacaccaatgctagcttggacagcaaactagcaaatgatccaacgcaatacagatagaaataaatgaagtttacatgtctgattacaaatttagccgagcagaatatcaccaacacaaaactacttagaatatagcagtaattgacgagccaagcaacaactccagcaaatgctcatctcgagacacttgccacggaaatctcactgctttgcctcccgttcacggttccactgctcaatcttggccctgcgctcctcactgctctccctgactgggctcctcccacgccttgggggtgggctaccatgcctgcgccttccaccatcatcatacctgtcgtgcctgccgcctctgccacctccatcatcatacctgtcatgcctgctgcctctaccccgtccaccaccaccaccaccgcggtaatcatcacggtctcgatggtagtcatcacgatcacgatggcccctcctttgaggtggggggcttcggcttcggcttctcccatggtacttcctcgaagcggaacgcccatagagcttcctcctgagatctttgccaatctgcttcacatgcatgaaattacaatagccaccacggttgcagctgttctcctcaaactgcctacaggttgcttcacggaagtcggtcacaggagaatactccacaattatcgggcggccagagtaaaagcggccctgaagagcattgtatgctgcagctgcctgttcttcctccctgaactggacatagacattccctatcatgtggtcagcaaggttgtcgcagacattcaggttctcaatctcaccaaacttgcccaactcctcatagatgtcctcatagaagtcctcaaaatgctcctgcatcttctcaggatcaataggttggccttgagcatcaactccaggggttatcatatcagggcgctgatacatgttagcaagcacaagagttggtgatatggttggcctgttgtgcagacgggagcagcgatccccatgacgacaagccccaatcttgaaataaaaagggcagttgaccctgtccttctcagtgccaaatatcgaagccaagtgctctgccatgattcagctctctaactgacactaaaccaaatcgatacagattcctgatggatctgtgacgaacggggggcggtgaacgggtgggaatcagggagtaggcgttgatcgatggctgcacccgccgcaacgacgggatggggaagagggagccgcgaggaaaaggggtcgagcgaagtcgcctcgccgccgcgaggtcgcgaggaagaggatcgaattgttagggcag

SEQ ID NO: 28783 - DNA, 1819 bp, Setaria italica
  Peptide Sequence Number=SeqID_94757
ctttgcaggtgacacaaagtaattcaggatagcagataacacaggtgacaagccctcaacacattatctgaataaaatgcagcaccattcattgtggcactgcactagagtggtattgtgccgagatacagagggttactatgttgagtacttcaaatatggcccttctggtacaaaacaaggctgcaaaaagtagcacccggctcagctagttccagaatccagattgtatgatgatctaaaggctgttcatctgatttggagaagctgatcgaggtgcgctcggcgacccaaattatgtcttcagaggagctttcttcacccggtcagatatccgatctggagcattcgtgtgggacttgaaccggcctcgcccaccctcctccttttccttcttctttactatctggacgacatcctcgtcttgaaggccatggctgagcccacaatgctgtggatagtgccttgcactggttccccatacaagcacatatttcacatctttgagcaagcttctatggatatgattgcagaagtcttcaactgtgcatccacctctatcagtagaaagaacaactggatccgtgaaatcaggttgctggccctgtggcttggtgtacaccctcactagacccatctcctcccacattcttgccagtagcctgtccaagttcagcttcaagttgcagctgatcactagtgaatttggttgccgagcaagattatccacatcatcaataccaacaacatcaatcttgttatatacataaacacacttaatgtactttcgatttccttcaatgacatcgatgagatcatccacagtagcatcttcgcggaataacacctcagcattgtgaattttgtactcgtgcaaaatctgatagcagagcttctcatcaatatgagtcaaaggtgctgtggtgttgaaagaaatcccaccagtcttcttccttttgaagtatatctggggaggccttttgttgagacggagcccaacggcttccagttctcttgttaatatttggcgatgtccttcactctttgatgcatccaggaccatcagtacaaggtctgatgacttcgcaacagcaataacctgcctaccacgccccttgccttcagaggctccttcaatgataccgggaagatcaagaagctggattttggtatcattgtagtgaataattccaggaatgcaggtgagggttgtgaactcatatgatgcagcttcagaatgtgtcccggtcaacatagttaaaagggttgactttccaacactgggaaatccaataagcgcaacacgaccatgcccgaactttgtgacttcaaatccatctcctcctccactggaaccctttggaggctccaatagttgtgtcctcaactttgctaactttgccttcagttgtccaagatgatattctgttgctttgtttttctgcgtccgagccatctcggcctcaatctccttgatcctctcaaggatacccatcttctacacaacttgctctggggcctgggggcagaggtaatttctgtcggatgttcgtcgccggcgctcgatgaaggcccaggtggtcgcccgacgaaagacctgggccaagcaggggtggctgctcgccttgtcgtcgccgctaggaaataaggccaagagggtggagcggaaaaggaagaggaaagtagccgggaaacgaggatgacgatgggggaagagtggctagccggcgtgcttcggaggaggaactggaggcaggtccggcggcgctggcggaggaaggggccgacgaactggaagattcttcgaggtgtgcgccct

SEQ ID NO: 28784 - DNA, 2104 bp, Setaria italica
  Peptide Sequence Number=SeqID_94758
agtgcgatccgtaaatactattcattagtgcagtactacagtatacaaattagtccatctgaatcgataaatcacaaaagataatcttaacacgctccagtttatgtcaagaagctaaatgagcagctctacaacagctataccacacgctaatcccaaggttttaaacatcacccggggatttctacagcgttacttctgtgacatctagcacaaagtggaagaaagcacagagcacagcggctgatgcaactggaaaaagaagaatctgtagccatccaccatgtcaaatcctatgatacaattttactcggccaaaaatctaataacgtacatgaatacctcctaactgtcggacctatcacgtcaccaccaaattatatcaagtcagaaagagaagtttctgcttttaatctttgcaccaatttccatttgatttctcatcttcaagttctttaagcttctcatgcaaagatgtattttctgaggtcaagctatcacacttctcctgaagttgtttcagttcttctttgagagaactattttcctgctttagcaaatccgcacggttggctacttcctcccattcagcctgcttgcgtaatcttgagcggcgagctgattccctatttgattgcttccgtttttgtttcttcaattctcgctcatcctgtatagccggatcactgagaacaatatcacgtgaatttgacgaaggagctgatgtcggtgctgcaacaactttaccatgcatgggtacagaagcaggagcaccccagtaatctactcccatgttcagagtagttgctgggccacccatgggagggggaacgggccaaaatggcatcatagggttaagcacaactggcccggaagatggttgtgtgggctcaacagcagagctttgagtacctttcctagaatcattaccctgcccacgctcagaactatcctttgtccttgaaccactttttgaatttgtactgcttccttcagaagaactcccacttccactctcactttgtgaagaaccttcattggaggaagaagctgaaggttttgcaggtgatttattatttttggctacaactacatccagactacctaagcttcctttggatctcttcaggggagtctttcgcttatttttgcttgacttatctgtctctgtaccgccagcaccagatgttggagtttgaattgtcccatttggtgactgcataggataaggactgtatgggtgtgaacccggtggcatgggtgcctgctgatatggtgtgccttgtgcatacatggctgcatatggtggtggagtcccataaggaggcatcatctgtggccccccacatgtatgggtgtccttgaggatttggagctacggatgaatgaaaaaaagaccggaggggtcaccggagctgtcccagcagtattatagtatgcctggaactgagaccagtcaggatatgctgtggggggattagtaggtgtactctgctcattctgtattgctgacgatttttgagatttggacctagtggccacatctccctttcccattgtttattcctctcctctagccctatgtcccttttgcctcttaagctcccaaaagaaggacagagctttcactttaaaggaagaggcaacatctgcacccaatgcagaatccttttttttttctatttgcttgggcaaggaataagtggagtctccaagcagtcttgaatgacgcacggaattcgcttatttactagctctgtcgtatgttcgtcgccggcgcccgacgaaggcccaggtggtcgcccgacagaagacctggccaaggtggggttggctgctcgcttgtcgtcgccgcagcagaaggagagaccaatccacgtgcgggtggatctccacgccacgccagcccggcaggggagcaggacgaggagtgccggagagggattcctccggcgtgagaggattcgacgagcagggttggggaggaggcggcgcaggatttgggaattcgggggcggaggagtggagcgctgatgtgaatggacaggcgagaggaaatggtgagagcacctcccccactccccccaattctactaattgtcta

SEQ ID NO: 28785 - DNA, 2017 bp, Setaria italica
  Peptide Sequence Number=SeqID_94759
cctctttgcttcctggatccaaccgccgccgccgccgccgccgctgccaccgccaccaccgcatatactcgtcggcgattcagagttcttggattggatgcgttcttctgcctagatcggagcaaggcgcgcggtgtaaatctcgagaggaggaggaaagggatcgaggcggctcggtccttgttcttgccgcgtccggttcttccaagaaccagcggtggggatggatctctgcgacaagagagaggacatggcgctgcaagacggagactcttgcctcgcgccccgccctttgcgcggcggctgcgagatggagtcgccgtgggcggagggcctcctccaaggcggcagccggaagcgcagcgcgccggaggagtccgaggacgatgtccaggaaatagatgaggtggattgcggcggcaagcggagcaagccaccgtcgccgcagccgcacacaccggacatccgtgaggctcatgcccccggccgccgccgcaccgtggcggccggtggcggcgaccaaagcaacggcgggggtgacctcataggagaaatcggtcgggacctgtccatcaactgccttctccggctatcccggtcggaatatggctcggtggcatcgctgaaccgggatttccggtctctggtgcgtggaggggagatctacaggctgcggcggcagaataacatctctgagcattgggtgtacttctcctgtaatgttctggagtgggatgcatatgacccttaccgggagcgctggatctcggtgcccaagatgccacctgacgagtgtttcatgtgctcggacaaggagtctttggctgtgggcaccgagctgctcgtgtttgggatggcgcacattgttttcagatacagcatactgacaaactcttggacacgaggcgaggtgatgaattcgccgaggtgtctgtttgggtcagcaagcgtaggagagaaggcatatgttgctggtggcactgattctcttggcaggatcctcagctcagcagaattgtacaactccgaaacacatacttggacaccccttcctagcatgaacagggcacggaaaaattgctctggggtgttcatggatggcaagttttatgtgattggtggtgtgaccaataacaacatgatcctgacctgcggtgaagagtatgatgtgcagagcaagtcttggagggttatcgagaatatgtctgtcggtctaaatggagtgagtggtgcacccccacttatttcagtggtgaagaatgagctgtacgccgctgattacagtgagaaggatgtgaaaaagtatgacaagcagaacaataagtgggtcactcttggtaaattgcccgagcgatctgtgtccatgaatggctggggtcttgcattcagggcatgtggtgagaggctgatcgtcattggtggaccaagaacttctgttgggggcatgattgagcttaactcatggattccggatgacaagccacctgtgtggaatttgattgccagacggccatctgggaattttgtgtataattgcgctgtgatgggctgctgagtttacttgataaagggtccgcacagtgatgtttacaaagagaggtatgcacaaaggcaggactgtttagcttcagaactcttcttcatcatgcatttctgccttcgacctggtagctggtttagttggcatcagcagagcagcagcaggatcttgtaacccttgagttcatacatcagtttccgccccagctaatccatttctttcatttacattcggatcagtgttatgatctagaaggtgataccatgcaaaaatgtcataccaataatctagaaaacattaaatttcagaggctttccatcattgatgatgacagagctagttattttgatcgtattccattgtctatgtctgcagcaaagcgaccatcatgtttattcatgcatgcctaatttttgagttatcgtatatttaagtaaactttgatgtcctcctctatgggttgatttggcttgaatg

SEQ ID NO: 28786 - DNA, 260 bp, Setaria italica
  Peptide Sequence Number=SeqID_94760
caatgccgtgccacttgcactcgccccacgggaagccctccgtcttgcacacgttctcgcagttgctcttcctcgtgcaggtgccctcgaacttgtggctctgcgacacgcagtgcctcgcctccgccacccgcgtcggcccaatctctgaggcgacgaggagcaggaggacgacgaatagggcggacgcgaccatgcggcgggacgaggtcgaagccatttcgctgactagtagctagatctcactacgtgatagctac

SEQ ID NO: 28787 - DNA, 310 bp, Setaria italica
  Peptide Sequence Number=SeqID_94761
tcgttccccgacgaagtgggtgactgttatgagctgcctgccaatcttcgaagcacgaatcttgatgaaaaaccttcttcattctcgggtatacggatagggtgcgaactgcgaacagagcatcttcttccttctcagaaacaacaagcagaggggccaagctgccgccgaggagatggccatgcccaccttcaacctaactcccggcctgccaccggtctcccgcctctgcttcggttcctcaccccgtctccctctctctttgcgccgagctcggctgcgcctcctcgacgccgccttcgacgccgga

SEQ ID NO: 28788 - DNA, 347 bp, Setaria italica
  Peptide Sequence Number=SeqID_94762
agtatgatgcccatgtggctggcattgacaaaatggtaagctggtctgcttgggatccttgccctactgctactggaaataaattctttacactgatggaacttctgtcttttcaggccgcagatgataaagctcggcagttgataagagaggctgttgtaaaatagtaagttaattgatttccgtggcaagcaattgtactgtagctatatatttttactagttgattatggcttttaatgctgtctggaaattggctttattttgctaaagcggaggctgaattttatcttcaggcttcacctttgaaacgaaagttctatttggattatgccaggaaaagttgg

SEQ ID NO: 28789 - DNA, 943 bp, Setaria italica
  Peptide Sequence Number=SeqID_94763
taagagtatcttagagaacatggtgctgagccctctagtgcacaaacaggtagctaacctaactaggaatcaatggatgtcagaaacagttcctcagtttcaaaaaacaggaaacaactggcaattcgttgcttatctcttctgataagaagccattagacaccaagcaagtgaatgtgactgccccactcgcaacagcaccaagtttagcactgacaggaaacacaaaacctgcagaaactttcagcttttctactgtcaataacgaaggcacgaatccaacaggaagcaaggcacctagtggattagctccttccttgcaacaaagcagcaacagttttggaaacaaccaaagtggtaaaggaggcctggattcaatccaatcagtgggaacatttggtggatctcaaaactccaataaggatggtgctggctttggtttcaaatcatcattgttcgcctctagtggatctgtccctgccaagatcggagaaaggagtgaagctggttttggaaatacttcgccgcaaaccagctacactgctgataggaaagtatttggtcctccagttgccttaagttctggacctttaccatccatatctccagctaaaccttccctaattggatcttcatcaagtgggtatcggacaggaaactctgaagcacctcaatcattgcatggatcacctccgtcacagcaaactataggcaaatcacataacagcaggacgcaagcaccagtagactattctagaaactccaatatgggcacaatattcgattctcaagaagacttgtctaagaagttgtacagtataaatgaaatgacaaaggaattagatgccctactagcatacatagaaaaagatggtggtttcagagatgcttgcataaccttccagcagcgtcctctttctgtgtttgaggatggtttgcaaac

SEQ ID NO: 28790 - DNA, 313 bp, Setaria italica
  Peptide Sequence Number=SeqID_94764
ctggtcggggacggggacgaacacgacggcgtcggcgtaggtggtgctgctctcgccgtgttgctccgtgtaccgcacggtgagcacgcggttctgcgggaacgggaggtcacggacgcgcgtcccgccgcatgtgccccacgcagcaagtctcgccgtcggtcgccgtcgtcgtcggggaccttcaccacgaggtagccggagttccggccctccggtggcggccgggacgccgcctccgggtggctcttgaacagggacagcggcttggtcgcgtacattttctgattaagctgatatgggtgtcatgtgc

SEQ ID NO: 28791 - DNA, 514 bp, Setaria italica
  Peptide Sequence Number=SeqID_94765
cgaacccagccagcccaaccgtccatccaccatgctcagggtcgcgggcaggcgcctctcgtccgccctctccaggcgccccgccgccgccgcggcagccggcacccggggtcccctcgccggctggcggatggagaagcccgccatccgcggcctcatccactccgcgctccgcatcggctaccgccacctcgactgcgccgctgactaccaaaatgaagccgaagttggtgatgcactcgaagaggcattcgaaactgggcttgtcaagagggaggaccttttcatcacaaccaagctgtggaactcggatcatgggcatgtgattgaagcctgtaaggatagcttgaagaagttgaagttagattatctggatctctatcttgttcacttcccagtggctacaaggcacactgaagtaggctcacttgctagcgttattggtgaggatggtgtgctagacattgacaccactgtctcactggaagcaacatggcatgcaatggaagatctt

SEQ ID NO: 28792 - DNA, 527 bp, Setaria italica
  Peptide Sequence Number=SeqID_94766
gccccagcaacagatcgagcagcaagctagtcgctagagcagtgtgcgccgagtagatatatagctacgcttgctataggatactatggcggcgaaggacgtggcgccggcggtgacgctgagcaacgggcatcacggcggcgggatgccggcggcgacgaagctgagcaacgggcacagcatgaagacggtgccggcggtgacgctgagcagcgggcaccggatgcccgcggtggggctgggcgtgtggcggatggagaagacggccatgcgcggcatcatccacgccgccatccgcaaggggtaccgacactttgactgcgccgcaaaataccaaaatgaagctgaagttggtgatgcacttgaagaggcattcgaaactgggcttgtcaagagggaggatctgttcatcacaaccaaggttatcttagttgctggaaaccgccacttccgaattgcgcatgatcacaaccgttctactgaaacatctgcatttgttatgactgtagctgtggaattcagatcac

SEQ ID NO: 28793 - DNA, 394 bp, Setaria italica
  Peptide Sequence Number=SeqID_94767
atgatttgccaacttgctcgccgcaattccattccatggcaggagttggctgagaagtacggcaagacgcctgcgcagctggtcctccggtggggcctccagaagaacacggtggtgatccccaagacctccaaggtggagaggctgcaggagaacctggaggtgttcgacttcgacatctcggacgaggacatggaggagatgaaggccatcgacaagaaccaccgcaccaaccagcctgccaagttctggggcatcgacgtgtattcttagcttttcttgctcgcgatctcagatcctgctctgaaaacttgttccatccccatctacgtactgtctggaataaaatcgataatgctttctatttcataaaaaaaaaaaaaaaaacaaaacg

SEQ ID NO: 28794 - DNA, 1525 bp, Setaria italica
  Peptide Sequence Number=SeqID_94768
gtttgcagcaagctagtcgctagagcagtgtgcgccgagtagatatatagctacgcttgctataggatactatggcggcgaaggacgtggcgccggcggtgacgctgagcaacgggcatcacggcggcgggatgccggcggcgacgaagctgagcaacgggcacagcatgaagcgacccgggctgcatcatccatccgcatcttcctcctccagcgctgcgagggagaagagagagcgaggcgaggcgcagcgcagcgctgcggaagcccagtacagtagcagcaaccgaatccagcgggcatggcgggcaagggcgcggcgccggcggtggcgctgagcagcggccaccggatgccctcggtggggctgggcgtctggcggatggagaagcccgccatccgcggcctcatccactccgcgctccgcatcggctaccgccacctcgactgcgccgctgactaccaaaatgaagccgaagttggtgatgcactcgcagaggcattcgaaactgggcttgtcaagagggaggacctgttcatcacaaccaagctgtggaactcggatcatgggcatgtgattgaagcctgtaaggatagcttgaagaagttgaagttagattatctggatctctatcttgttcacttcccagtagctaccagacatactggagtcggtacaacttctagtgctcttggtgatgatggtgtcctagacattgataccactatctcactggaagcaacatggcatgcaatggaagatcttgttaatatgggactggttcgcagcatcggaattagcaactacggtgtattcctcaccagagactgcttggcctacgccaagataaagcctgctgtaaaccaaattgagatgcacccttacttccagcgtgattctcttgtcaaattctgccagaagcatggcatctgcgtcaccgctcatacccccttgggtggctccactgccaacgccgagctgttcggctcgctcccaggcctcgacgaccctgtcgtcaaggagttggctgagaagtacagcaggacgccagcgcagctggtcctccggtggggcctccagaagaacacggtggtgatacccaagacctccaaggtggagaggctgcaggagaactttgaggtgttcgacttcgagatctcgggcgaggacatggagaagatcaaggccatcgacaggagttaccgaaccaaccagcctgccaagttctggggcatcgacctgtatgcttagttccacttgcattgcgtgtgtctcataggcacaccaagtttggcacacgtgttgacgtggcgctgtccgtgtgcggtatgcacacctttagtagcaacaaacaaatctaaggcaaaaaaaggtaaaaacaaagctttcatgtgtgtgtggacgtttctgaatagttgttccatctgctgcctccatacagcatcaataaataatataatggcgaccaaaaataacaataactaggaagtacggtaacaaacttactaagtagaactaacttaa

SEQ ID NO: 28795 - DNA, 1364 bp, Setaria italica
  Peptide Sequence Number=SeqID_94769
aattcccaaacccacctttgccaaggagtgaggtttgatcaaaattattggtggcagcctggatttcactaaatgagaaatgacgacaaagattagatggcaacccaatgtctgagcagggtgttcatgagttccagactgagattgagatgttgtcaaagctccgtcaccgccaccttgtgtcattgattgggtattgtgaggatatgaatgagatgattttagtgtacgactacatggccaatggaactcttagggagcacttgtacaacagcaagaaggcaccactctcatggaagagtcggcttgagatctgcatcggtgcagctcggggtctgcattaccttcatacaggtgcaaaatataccatcatacaccgagacgtcaagaccaccaatattttgttggatgacaagttgattgctaaggtttctgactttggcctgtcgaagactggtccaaatgtcgataacactcatgtgagcacagttgtgaagggaagctttggatacctcgaccctgagtacttccgacggcagcagctcactgagaaatctgatgtctactcgtttggggttgtgctgtttgaggtcctctgcgcgcgccctgccctgagcccctcacttccaaaggagcaagtgagccttgccgattgggcactgcactgccagaagaaaggcattcttggccagatcatcgacccatatctccaagggaaaatttctctccaatgcttcatgaaattcgcagagaccgcagagaagtgtgtggctgatcacagcattgacaggccatctatggccgatgtcctctggaaccttgaatttgcactccagctgcaggagagtgcagaggacaacagcagcctcaccaatgggacatcatcaaacacatcaccacttatcgtgcccaggcttcactcggatgaaccatcgacagacacaaccactaccacatcaaccacaatgagcttgacagggcagagccttgcaagtatggagtcagacgggctgaccccaagcagtgtcttctcacagctcatgaatccaggtggccggtgaaagccaactgtaagctagaattgcagttaatatcttcagatttgctatgtatttccagcttcgtggtatatataactaactagtatatttatcatatagacatgttcagctcctattatatagaaccggtatatattaggagctgaacatgtctatataactaactagtatatttatcatatagacatgttcagctcctattatatagaaccggtatatatttttgtctagtcgaaatcactgtaattgtatggctattgccaaggtactgtgttttccattatctctaaaagcttttcaatg

SEQ ID NO: 28796 - DNA, 293 bp, Setaria italica
  Peptide Sequence Number=SeqID_94770
agaatcctcgccggtggcctggtgcgctcgtcgtcccaccttgcgctgccgctgatgccccgtctcgtcttgcggcactggtcatgcctagtggaggagtcgagagactgccggaatgcaagatcgtggtgataagacgaccgaaggagagaaaagatggaactgattactgagcacctggtgggacctgcttagcacggggacgtgtgctagcggccctcgccagctctagcggcagcaccttctctctccatgcttctctcttatacgtggctctagctacagcaccttct

SEQ ID NO: 28797 - DNA, 460 bp, Setaria italica
  Peptide Sequence Number=SeqID_94771
ctaccgtttccatcctctgcgatatttgagatgcaacccgacagactcaaggccctgccaaacactgtctgcttcacctttaaggggcgtgactcagcgagtggccgcgctacctgatgtcgatgattttttctgggagaaggatcctactccaatcctggacacaattgatgcgcccattcatttgaaaaatctatctagtaaggagctcaagcagttagctgatgaagttcgttccgaaatatctttcataatgtccagaaaatgccagccgtgtggtcctggtcgctcggttgtggagctgacaattgctatacattatgtgtttaatgccccaatggataagatactatgggatgctggtcagcatgcgtatgcacacaagattctcacaggaaggcgctctctctttcataccattaaacaaaaaaatggcctttctggtttcacatctcgtttg

SEQ ID NO: 28798 - DNA, 290 bp, Setaria italica
  Peptide Sequence Number=SeqID_94772
atcatcgatccgccccggcccgtttgttcgccaccatttcccccttccttccttccttcgatcccccctcccatcattcgccccaatactctccgccccatccgctttccccctcgccggagcagaaaaaattttatgcgcgctttgggaaagcgcgagttagttttgctctgaagctgcctgctttttatccatccggagccgcgggcgttgggggagagtagagtagaggcgaggcggggttccgtgtgctgctccggccgagcgggcgtgggcaccgaggaggcggc

SEQ ID NO: 28799 - DNA, 293 bp, Setaria italica
  Peptide Sequence Number=SeqID_94773
aagcctgtaatacggccgcacgcttctccgccgacgtgatgccgcggccggcctcggacccgccggagttgatgcccttggagtagtacggctgcgcggcgagtgcggcgacctgcttcttcagggggcacttgccgacgtgctcctccaggttctcctcaagcaccgtgtgggaggggtcgacggggcagggcacgcggcggccggcgccagaagcggactcgggtaggtggttcccgcaatactgagaggacgggaggggggagttggcgcagtggcggcgcttgttgggg

SEQ ID NO: 28800 - DNA, 599 bp, Setaria italica
  Peptide Sequence Number=SeqID_94774
ttctacatagtttgctcatgagttgacatgtggggtttttttttttggtcaactaaaaataaaggagaaggaatacaaggaggtcctggaggcgtacaacgagaagagcaaagagaaagcgctgctaggcctcaggctaatcgaggtaatctctctgaacaaagaacaagtaatagctcattgtaatcaccagctcatgatactgtaacttctgaaacactaaaaacttctcttgctctgcaatcgctggaattactgatgcagctggtaagcgagagcgagaggatgcgtatgaagaagctcgaggagctcaacaagacagtcgactcactctactagatgccaagctgatgctcacttcgtacgtcctccaccgagagcccactcgctcgctctctctgtaatctcagtgtgccataaggattcgtgacttgttcagggtgttgcttgtaactgataatgtttctcatcgagtgattcttcctctttcttttcctttcgtttcttttgtttcatcagatggttgagtcttgttgcggcatcactgtcgagtaagactgacgtatttaagcaacagagaagtaccaggaacaaggctg

SEQ ID NO: 28801 - DNA, 863 bp, Setaria italica
  Peptide Sequence Number=SeqID_94775
ataatacgccgcgctgaaccgagcgagcgagaggtagctgccgtgtgctcgagagagatagagagctgcgtgtaggaagaagatcggaggagatgcaggggggaggggttgaacagccgatgcagatggtgctgcggatgaagcacccgtcgtcgctgggcagcagcgtggccggcgacgaggaggaaggcgagggctcgtcgaggtcggcgctgtcggtgttcaaggccaaggaggagcagatcgagaggcgcaagatggaggtccgggagaaggtgttcgcgcacctcggacgcgtcgaggaggagtccaagcgcctcgccttcatcaggcaggaactggaaggcatggcggatccgacgcgcaaggaggtggagtcgatacggaagcggattgacacggtgaaccgtcagctcaagcctctcagcaagagctgcatcaagaaggagaaggaatacaaggaggtcctggaggcgtacaacgagaagagcaaagagaaagcgctgctagtcaacaggctaatcgagctggtaagcgagagcgagaggatgcgtatgaagaagctcgaggagctcaacaagacagtcgactcactctactagatgccaagctgatgctcacttcgtacgtcctccaccgagagcccactcgctcgctctctctgtaatctcagtgtgccataaggattcgtgacttgttcagggtgttgcttgtaactgataatgtttctcatcgagtgattcttcctctttcttttcctttcgtttcttttgtttcatcagatggttgagtcttgttgcggcatcactgtcgagtaagactgacgtatttaagcaacagagaagtaccaggaacaaggctag

SEQ ID NO: 28802 - DNA, 523 bp, Setaria italica
  Peptide Sequence Number=SeqID_94776
taagtactaagtctagtttgttggtcttgccttgtaggccagccatgcaaagatgacacggctcctctgcccgtcggagagattcttcatcggcatcacctgcgccttccctgacaggccaaacctgccgactgcagatctcatcttctcttcttcagtcccagggtattccttcatcatgtaagccagagccgacatgtccaggtccagcttctctgcaatatgctgatggtactgcgcaatgcggaggtgattgtggcgcctcaccatgccatctagtggaactagatcaccagtcatgagcttcagaagagtgctcttccctgccccattgggaccaaccaatgcaattctagagtcaagatcaacaccaaagtcaagacacttgtatatgagattatcaggtgtatatccaaacttgacttcaacaaactgcagcactggtggcggaagcttgccaacattcttgtctaaagtattggtagtcgtttggtttggtttctttctttacttttgttagttt

SEQ ID NO: 28803 - DNA, 359 bp, Setaria italica
  Peptide Sequence Number=SeqID_94777
caggaaaagatcagatcatgcagtgacggtaatgctggggatcgtgagggtactgagaaggtgtcttggattggcagggaccatggctctgcttttatcaactcggggaattggaatttagctccatctagctccatctttgcacttgcagttccgttattcctgtttaagtacattgatcaggtccgacggagacaaacaaattccatgagggtgagaggtagtgaagaagaagtgcctctcaagaagaggattgcctataaagttgacgtgttcttctcaggacacccatatgcaaagcttcttgccctccaggaatccactgccactaacaacatacaatgcaatcccacccgaag

SEQ ID NO: 28804 - DNA, 645 bp, Setaria italica
  Peptide Sequence Number=SeqID_94778
cgcccagcctgggcaccaggacctccaggggcgccaagacctccttggcggcgctgtccaggaggggtgacgcgctctccaggggccacacgttcgccggtccagggattgaagccccagggaacgcgtttgttggtgctggtgctgccggaggtgttggagaagccgccgtaggagtttgggaagggctgctggccgcccttcttggtgttaggccgcctgctgccctgctgctgctgctggttaccaccaggagaggaggcagcagccaggagggcggtggtggcgcgcactttctcctcgttgtgcagacgcagttctttgagaaggagctggtgccgggcgtcggcgaaggtgaggggctgctttccggcgatggtgtcggtgacggtggagtagacctcgttgagcccgcgcagcagattgaggacgaggttgggctcagatacgggctgcccgacgtcgcgcagttcgtcggccttctccttcatgcgaatgcagtaggcgtcaatggacaggtccccctgagtcatcgagtggaattcgtgattcaggaagatggcgcgaggagctttgttcgcctggaatacagcgctgatggccgtccaaagggcgctcgccgtctgcgtgttgtcggtcatggcg

SEQ ID NO: 28805 - DNA, 1667 bp, Setaria italica
  misc_feature (1)..(22): n is a, c, g, or t
  Peptide Sequence Number=SeqID_94779
nnnnnnnnnnnnnnnnnnnnnntttttttttttttttgaagaataataaaatgcttagttaaggatcccatattcaattacacaatcgaaaagttaagtacaggttgaaaagaatgaccagtaagatcaactattggtcaaaacggttgacatcatagaactcgatattcttatatttctgggaaattatttctgcttgaactttccgagctgtgtcagttgcacacccaacaaggataagcactgatgtaccagcaaatccccggaatgccgtcaagtgacttatttgttcaaccacagaaggtccagcagctagcacagcaagaaatgcagatcccaggacagatatacgactgagaactgttttaatataagcagctgtactttttcctggtctcacaagaggtatagaagcaccttgccgcttcaattgctcactaagatcatcggggtccaattggagaaatgtgtaatagtaattaaagaaggctataagtaatacattagttggaagatacagagaacctcctggaataagggctacagcagccttcttaagaaactccaagccagtgaaccgtgccaaagtaccaggcaaagccagggaagatgtagaaaaaatgataggcatgacaccagaactgttgaccttaaatggtagatatgcagatcgttgaagccccccagttcgactgctgtatcgagaagcatagttgaggggtattttgcgttcagcttcttgaacatagacaatcccaagcactaataaaaagaatgacaatatgattgtgagaagtccaacatagttcccatcttgaaatgcttgtgacactgtcctcccaaatgatgccggcaaatatgatattatacttgtaaatataagaagagatgttccatttccaagtttcaaatcagatattctttcaccaatgaatgtagtaaagactgatccaagtgtcaataatgtcaccgatgttagaacccattctgtgctgaagtcattcacataaggacggagataaagaacttgtccaatagcctggacaattgcaaaaccaacagaggcatatcttgtatattgaagaaccttctttcttcctgcttccccttctttccgctgaaggtcttgcaattttgggtaaagttgtgcaagcagttgaaacacaatctgtgcattaataaatggcacaatgccaagggagcatattccaagacgaccgataccaccaccggagaaagaatctaaagtgcccagcaggctgttctggtcaagattcccagcaaaagcttctctgttcaccccacccaagggtatatacacaccaagccgagataaggccaaaaaaccaaggagcttcaggaacttcccaggtagagggcccttgaagaagtcatcaatgtcaatggagctatcctcaatagcagctgcggctcctcggttctccctcctggccccaccaccgtttgagctcccaaaaaccggcgccaggataccaaagaaggtcgacaggggcgaccgcgaagaggaagcagaccccgatgtcctctccttgtacagccccagagggtcgaagccagcagggccagccgtctccagcgtgcacctaggggagcaagccagggcggctcgccgtcgtctgactgtagtaatggcggtgcggcaccgt

SEQ ID NO: 28806 - DNA, 274 bp, Setaria italica
  Peptide Sequence Number=SeqID_94780
agcgcttcagtcggtgtgtacgagaacggaggcaaagatgacgaccgaaccggtgacgctcatcggcgctttcggcagcccgttcgtgcaccgcgtcgaggtggccctgcgcctcaaaggagtcccctacgagctcatcctggaggacatgagcaacaagagcgagctgctcctgaagcacaaccccgtgcacaagaaggtgcccgtcctcctccacggcgacagggccgtctccgagtcgctcgtcatcgtcgagtacgtcgacgaggccttc

SEQ ID NO: 28807 - DNA, 2020 bp, Setaria italica
  Peptide Sequence Number=SeqID_94781
gctggtaccgttctccaattctccgccatcttcagccaagccttcggctgctgatagctcccggaaggccacacaggacacgtgccagtgaactcttcgctactggcaacagccgcaccccttatagacagaaaggttgtgacgagatggaggcctctcaagttggtgtatgaccacgacattaggcttgggcagatcccagagaaatgcagcttccggacactccgagaattcgtggcgaagaggttcccatcatccaaggcagtgttgattaaatataaggatgctgatggtgatttagttaccatcacatccacggaagaactccggttagctgaatcatttgtggataaagttggtcatgaggttatagaaaatgggaaggagggggacaataagctcccggggttgaggctgcaccttgttgaagtgagcccagaacaggagccacctttgccatcagaagaggagaagttggaggaggatgaggagctgttggtcaagggtgaagatggtacttcacatacttcttcggaggtagctgacactgaggtcacaaagcaagatgcggagaacagagttgctgaacagaggatggagactgggaagaaggattgtggccatgctgagtgcaaggaagctgagatcgatgattggttgcttcagtttgcagaactattccggaaccaggttgggattgatgcagatgcacatctggacctgcatgagctgggaatggagctgtgttccgaggctcttgaggaaactgtgacaagcgaggaggctcaggccctttttgagatggctgcttctaaatttcaggaggttgccgccttggccttattcaattggggaaatgtgcacatgtgtgcagcaaggaagcgcatccctctcgacgaatctgctccaaaggaagtcatggctgctcagctccgcacagcttatgattgggtgagagagaggtatgctcttgcagggcacaagtacgaggaggccctcaaaatcaagccagacttctatgaagggcttcttgctttaggccagcaacacttcgagaccgcaaagcttcattggtcatttgcattggcagacaaggttgacctatccacctgggattcttcagagacattcaagctttttgatagtgctgagcagaacatgagggctgcaacagagatgtgggaaaaggtagaagaacagagaatggcagagttaaaagaaccaggtgcaggtgaaaaggatgagatactgaggaaaaagaggaagcaacacagtgcagatggtcaactggagttgacaccagaagaggcagctgagcaggcagcagtaatgaggcaacaaattcacctcttctggggtaatatgcttttcgagcgctctcaagtggagtttaagctcagtgtcggtgattggaagaaaaatcttgacgcgtctgttgaaaggtttaaattggctggagcttcagaatcagatatttcgacagtgttgaagaatcacttctctaatgcagtctctgagtgtgaagagaagaaagtcatgacttcaggcatggaaattgcccaaacaaatgacaatattgaggataagtgtgtggttgagagctaagtactcatggttttaagctaaatgacatcaatgtgtatcatattgaatttcttgataggctttgtttgttcatggtcctcggccgtgacatctagatgaaactttaagctcactgaattttgtgatctgtgcaactggtgcagaatcacttcataaaatcttgatagtttgctaaacacgtcttgagttgtttaataaattattctacatacacattagatgtatgtgatgtgaaaaattttttttccccctgttagatcaagtgtctacattgtttcctagctcagtattgttttggactcatactttatgttgtgcgattctgttgttgctttagtatttcatagtagacaccgaatgttacccttgattcatttattttgtgaagtcatggatcccgaatttgtactattgt

SEQ ID NO: 28808 - DNA, 377 bp, Setaria italica
  Peptide Sequence Number=SeqID_94782
cgtacttggtggtaggcggcggcgatggcggcgccgatcagcgggcccacccagaagatccactgcacaaacaatacgatcggcagtagtgagtggtggagctaattaaactacaccgtaccgctgatgctttccatggtgcataatgtaagatatcctaagcacttcttttacttgcttatcctcaagagatttgtttgattatggcttgtgggaagcgtagttaaatgcttgaccaagccaaggtgtacgacaacaggttagttagtagttccaaacaaatactgggcatcttttaggtgtctgtaaggtaggagggtgtggcaagggattaggttgtatatttttggtaatgagtgtacatgtcatgcataaga

SEQ ID NO: 28809 - DNA, 122 bp, Setaria italica
  Peptide Sequence Number=SeqID_94783
gagggcaagcacacgcaccccatcccggccacgctgcgcggcgaggaggtgcgagctcccgcgcagcgtggccgggatggggtgcgtgtgcttgccctcgtatgtggtgatcacgaccgccg

SEQ ID NO: 28810 - DNA, 870 bp, Setaria italica
  Peptide Sequence Number=SeqID_94784
aatttctggaaggaagcacaagatttgtattcaaggatgaagaacatggatgatggccctgacatcattgcctctaatgccatgctaaacctttatgcaaatcttgggatggtcactgaagcaaaagaaatctttgatagcctgaggagaaatagtaatgcagatggtgtttcatacactaccatggtatacctctacaagggcatgggcttgcttagtgaatccattaaaattgcatgtgaattgcagaagtcaggcttactatctgactgtgcttcatacaatgctgttatggcttgttatgtggccaagggtaaccttagagattgtgcagagttagtgcaagaaatggttgtggctaacatcccaccagatgcctcaacatttggaatgattttttctctactgcagaatggccatgtatcctcagaagaagtttttaagttagagtcagcatatagtgacggcaagagttctgccaagcaagcaattattgcattcttgttctccatagctggcatgcatgctgctgcactagagatttgtgagcagttattaaggcctgattggacaattgatgcatgtgcatataatgtttgcttcaaggtctatgcttcttgcgggaaggtggaaaaggctttcagcttgtttatgcggatgaatgatttagggctcaaaccggatacagttacttgtatccgtctggcaacttgctatgggaaacctggagtatcggaaggcctaagaacaaatgctcttcttaaatacagaactgatgagcttattccttcgcataatgcatcggtttcgtatatagaaactggaaaaaataatgttgcagttcagttagtcaagaaatgatatgtacca

SEQ ID NO: 28811 - DNA, 389 bp, Setaria italica
  Peptide Sequence Number=SeqID_94785
tcggccttgggaggagtggtacacgactgcgagcagaagccagcacgaccagctcctcatccgcctggcacgtcggctgccgcaactgacctgcacaagccacgcagctgtgccccgccagggccagatgtaactggagaggatgaatgatcttacgatttgcagcagaagctgactcccttgatcacgacggctagtacttacaaggtgccacatggctgtcagatgccaggcagcgtgccatcccgttaagggaggctgccgccgccgctggatgcacgagctggggcccagagctcgccgccgccgctggatgccccacgcgctgcagccagggaagggggcctccaccccaccaccgacttggggggttcctcgcgctgccaccg

SEQ ID NO: 28812 - DNA, 261 bp, Setaria italica
  Peptide Sequence Number=SeqID_94786
ggcatggactacgccgtcgttgtcggctagctccctgtacttgtccttcctggtgaagccggtgcactggtacgagagcgtggaggctatgaccttctgcacgtagttggccacctcatggctggacttaccgccaccgcaggtgaggtctgccggcagcttgtcgaggaacgtgaccgtgtacaccggcctcgggttcatggagaagtagaaggggtccatccccttccagcccctcgccgtcgtgccgtggaacatgct

SEQ ID NO: 28813 - DNA, 250 bp, Setaria italica
  Peptide Sequence Number=SeqID_94787
gcgacatcgcagggaaggagactcgcggtaccatccgcggcgaggtcctggcacatttattttggctggatagacttagcttgtttactaaggcttcctggagattccaatgtcctagcagttgccgtggatgatgttcatttgtgttcatttacttacggtcttgttcagggcaatggcaacattaggaacaattgagcctctgcatgcgagtgacctgtaaggacaggaaaaatggtaaggaaaggct

SEQ ID NO: 28814 - DNA, 458 bp, Setaria italica
  Peptide Sequence Number=SeqID_94788
gctgtggatgctgtacaacgccgccgacgacctccgcggcggcgacggcgccgccatgagggagctcgcacagctctacgcctgctgatcgatgggtcggtcgtcagcctaccagcaggtccttttaacctgcagccacacggttggtttgcgtcgtcgtcttcttaatatttactactcgatctgttctcttgcgccggagatcacccaaggtttccttcggcgccatggcttggaagaacaacttggtatatagagagatgagatcagccattccattgatttgatgcagttgcctagctatgcatcgtgtttctttgtatcggtcaatctactgatatatgcgagaggtagtcatgagcatcgtcatgttggcttaactctctgtttgcatgacgatgtagatgctagaaattgcaactcttcacgacactgatgaaggtgtgtctgttgattcc

SEQ ID NO: 28815 - DNA, 1418 bp, Setaria italica
  misc_feature (1)..(49): n is a, c, g, or t
  Peptide Sequence Number=SeqID_94789
nnnnnnnnnnnnnnnnnnnnnnnnnnnnnnnnnnnnnnnnnnnnnnnnngctgcttgagcatcctgttggtattaaagttgtgtaactttgtattatgtgtgtgggaaaaatagtcaacagtggtaatgttacagaggtggggaaaaagaactgctataaactcgtctgggtgacaatgccgttgggccccggggccttttcttggctaccttgaagaagaacagctcttttagggttggagagcagaagctgttgcatgtccttcggcaggacgctaaaagctgcttggaggtctcccttcaatttctggcacgctgctgctgaatcagcacttcctcttccggagttctccatctctctaagaagataccgctcaacagcattaaaagaatcaatcctctccaattcggacatctttgacattagcttttcagtgtcaacattcatgcgagcctgcctccagagcctctgttgttcttgctctgcagcagcacgtctttgtcggaaccaaggcatgaaattggggccttccaggaatctcctatatagatccaaccaattggatctcatccttttggacaaaaatttccctggacctctagctgccaaaccattgacaaactcatccgcgtgaaatggtggtagcaatggtgggtcaacaaaaggtgaactcccttctgatggtgttgtagttctcagatacggcccaaaaggtgcaaggaagtttgttgtcagctccaagaaatgtcgtcgcaatatctcattgttgactactgacatggactcttcaatcctcggtgacaccccagcgtcaatgagcctatttagaacagaagtatcaggctttgtggttggcccatacgtgctccataacgcttccttgtgctctgtcatgagagaaagaggaccttctcttctcaatttgatggaattcaataggctagtgggagagaacttattgatcgaaagtttgtcaagcttgagcttcccgggtgtcccattagttccattccctggcaattggccacccactgggagcaccctcgttgaattcggattggggcttcccacagccacaacattgggaatgctcttaagactcttcaagaaaaacaggttggtcactccaagcaccattggcgggaagacctcaccttctgcaagcgcattcaggcgagcaaaatccggatcatggatagtgaaatagggcctgaagtccacactatacaaaagcggagcaacaaggctaacaagcccagccacagcctctgagcactgagctggagacggcgcgacaaccaggacgggctcgccgaccaccatgagctcccagagcgtccataagtggaggagtaggccacggaacgcggcaaacaggtctgcatcatgaaagagcccgtatggcaccgaggggttg

SEQ ID NO: 28816 - DNA, 131 bp, Setaria italica
  Peptide Sequence Number=SeqID_94790
ggaaggtgtctggtcaaactttatttgttcaagggaggatgctcagaagaatgttgatgttgccgttgttttcattggctcaaagctacaatcctcagacatatctaaagataagcaagttgcttatcttt

SEQ ID NO: 28817 - DNA, 584 bp, Setaria italica
  misc_feature (532)..(584): n is a, c, g, or t
  Peptide Sequence Number=SeqID_94791
aaaacaatggcgacattaacattcttctgagtttttccatggcattcccttatgtttccactacagatgatgagaaattggagaattcattgctgtccggcttttgctgagaattgtaacggtggttttgaaagaaatcgtgtcacctacacagacacatgtactgtaactggtcaagatgtgaagaaacatcacagcatggattctattcgtgacttggtgacatcacggatgggaaacaacccaagtggacagaccgatctgattgtcttctgcaatggtggtttcgaggatttagaccctgcgaaatcagaaggagagaagcattctgaatggtatatccagctccagacttcttcagcatggcatcccattctttatgcttctcaaccatcagctttactggaaaaaccttctgacctgccattaggcaggtatcttgcagagaagaaccaaataactaactaaaagaactaaggaacttaaggaacaaaataagtaagaaaataaagggaaaagtaaagaaaacctnnnnnnnnnnnnnnnnnnnnnnnnnnnnnnnnnnnnnnnnnnnnnnnnnnnnn

SEQ ID NO: 28818 - DNA, 964 bp, Setaria italica
  misc_feature (908)..(964): n is a, c, g, or t
  Peptide Sequence Number=SeqID_94792
agtaaacggttggttttgaaagaaatcgtgtcacctacacagacacatgtactgtaactggtcaagatgtgaagaaacaatacaacaagcatggattctattcgtgacttggtgacatcacggatgggaaacaacccaagtggacagaccgatctgattgtcttctgcaatggtggtttcgaggatttagaccctgcgaaatcagaaggagagttgctttctgacctggttgccatgctgaagaagtctggagctggatataccattctttatgcttctcaaccatcagctttactggaaaaaccttctgacctgccattaggcaggtatcttgcagagaagaccaatactactaaagctggcttgggcaaatgtgatggggagtgcctagtcaaatcaactcttctggaaggaacttttgttggcatagtgcttcttatcattttgatatcaggactcatgtgtatgatgggaattgatactccctcgaggtttgaagctccccaggaatcttgatcacactttaatgcaggatatgggagcttagcttggcgaggcacaagaaggatgaaggaccgatgtttgttggtctgcactgtggatattgttagtttcctgttccaaagtgccttgtgtattttactgagccacctgttatttacaatgtgctcaatttttggtgtaatattctacagagatctagctgagctattgcaaacaaatacatgtgcgaggcttgtattgtaccagacatcccatggcctccagtgttttctgtgaataacctgaaattcaggtaaccaataagatggcactgtgcatcaaataaaatggaatcttgttatttatttgatcagaaaaaaaaatacttgaacatgtgtcacgtctacttgcatcttgtgcctacnnnnnnnnnnnnnnnnnnnnnnnnnnnnnnnnnnnnnnnnnnnnnnnnnnnnnnnnn

SEQ ID NO: 28819 - DNA, 1440 bp, Setaria italica
  Peptide Sequence Number=SeqID_94793
ctggagtaagcgtggtagctactaagggaacgacttgctggccgtcgtcccctccagaattagcgataccgattcagatcgcggccacggcgacgcagaggagaggaacccaatcgagcgaggcagcacaaattcccaatctcaatctgtgatccctgcttcgcccaaagatggcggcggcatgggtggcgctggcggtgttgctcgtcgcagcgcaggtggcctccgcggctccggtgttggcgccggcgttcctctgggcgcccaagaactacgggttccgttccgatgatgctaagcaagtagtccactatcagacagtgtctccaaagagtttagctaagtccgttcttgaggaaggtggctggtcaaacttgatgtgttcaaaggaggatgctcagaagaatgttaatgtcgccattgtttttcttggctcagagctacaatcatcagacatatcgaaagataagcaagttgatccagctttagcagatacattgaagctctccttcacaagttcagagttttccatggcattcccttatgtttccactacagatgatgagaaattggagaattcattgctgtccggctttgctgagaattgtaacggtggttttgaaagaaatcgtgtcacctacacagacacatgtactgtaactggtcaagatgtgaagaaacatcacagcatggattctattcgtgacttggtgacatcacggatgggaaacaacccaagtggacagaccgatctgattgtcttctgcaatggtggtttcgaggatttagaccctgcgaaatcagaaggagagttgctttctgacctggttgccatgctgaagaagtctggagctggatataccattctttatgcttctcaaccatcagctttactggaaaaaccttctgacctgccattaggcaggtatcttgcagagaagaccaatactactaaagctggcttgggcaaatgtgatggggagtgcctagtcaaatcaactcttctggaaggaacttttgttggcatagtgcttcttatcattttgatatcaggactcatgtgtatgatgggaattgatactccctcgaggtttgaagctccccaggaatcttgatcacactttaatgcaggatatgggagcttagcttggcgaggcacaagaaggatgaaggaccgatgtttgttggtctgcactgtggatattagatctagctgagctattgcaaacaaatacatgtgcgaggcttgtattgtaccagacatcccatggcctccagtgttttctgtgaataacctgaaattcaggtaaccaataagatggcactgtgcatcaaataaaatggaatcttgttatttatttgatcagaaattactgtacttgaacatgtgtcacgtctacttgcatcttgtgcctcaactgaaactgtgaattgtgttcg

SEQ ID NO: 28820 - DNA, 277 bp, Setaria italica
  Peptide Sequence Number=SeqID_94794
acattgaggttatgcatcgagccattgaggttcgaagcttgaacaccaacgcgtgtataactgaatatagtacacgtcatgtatttcacggtgtcaatatgcatagtggtcagtggagattggagagtaaacaaccactagactcgtcatccttcttcattttcatggacgttcaccgactagcttctgctccgcatgctcgcgcccataggcgccaccgggtacggtgtagaaggcaagcactgtggcggccgcgccgcagcagagtacaccttcg

SEQ ID NO: 28821 - DNA, 259 bp, Setaria italica
  Peptide Sequence Number=SeqID_94795
agcactgtacttccttactcatctagtgatctagagcatatctggagaacgggttttcagcaagagtacctgtattaggctaactgctagggaccaatccatttcacatcatacacgcagacaagtcttccttttgatttggagggataccgaccatgccgactgagacgcccatgcccgccctctccggccacggccggacggtctgcgtcactggcgccggagggttcattgcctcctggctcgtcaagcgcctcct

SEQ ID NO: 28822 - DNA, 384 bp, Setaria italica
  Peptide Sequence Number=SeqID_94796
ttgaagaagatgaaaagatgaatggtcctcgtgaaaggattgaaatggcacgaaaccatgcattctacggtctgcctctcctctcctcggaaaaccataattttgttagtccttcatatatgagtcgaatataaacgaagcagactggatgagattgaattcgcgttgatcgagcttggagcgggaatccgagcaccgagctacacggctttgttagttgtggaattctttgtgcttcttcattgccatgtggtacaagagattactgaatcaataaatattacaagcacccagttgagagtactcagtactgttggaactagggagaaacttctcttgctgggaattagcatttttgtagtaacaaaaaaaaaaaaaaaaaac

SEQ ID NO: 28823 - DNA, 381 bp, Setaria italica
  Peptide Sequence Number=SeqID_94797
aatttaccctgaagtctctcagacagcaaaacattgtcaatgaatattatagccgcttatcggaagcaaatgaggatcagatgaaagaattgggtaatggaggtggagcaagattcacatcaaatctgaatggtgctgatgcaaccttccatatccctcctggtcatccaataagtactttaatgaagcaagcaaaggccaaagctacagttaatgaggttacagttgctacacaacaggcgatctacaatcagccatccaccctctcacagatacaggaaagagaagctgatataagagctcttgctgaactatcacgtgctctcgataaaaaggagctttgctagtagaattgaggcacatgaatgaagaagtgtctgg

SEQ ID NO: 28824 - DNA, 633 bp, Setaria italica
  Peptide Sequence Number=SeqID_94798
gtacaatcatatcctaaatctatggaaaatggcatagcctttgctggagcgccagatccgtataaccttttcggttatattaatccagagtctggttcccaagtgattgaagttattgagacttcaaaatgcagagcaaaaatgatggttgatgttgctatccaggcgatgtgcaaagtgagtgaaggagagaacccttttgcaaaaataggtcagtcaaatgcatcgtatcaagaggatggcacacctgctcctgcaacaaataacagttcaagattgccaaatggtggtaattccgatggccaatttcctaatgagttgatttcatcctgcgtcgctatgatgctcatgataaagaactgcacggagaagcagtatcaccctgcgtcgctatgatgctcatgataaagaactgcacggagaagcagtatcaccctgctgaagtcgcgcacatcctcgattcagcgctgtcgggcttgcagccgtgcagctcccagaacatcccgatcttcagggagatcgagatgtgtatgggcatcatcaagaaccagatgctggcgttgataccgactgcaagtggctagccccacgcctgctgggggcaatcctagctaatgttttttgcttcccaaa

SEQ ID NO: 28825 - DNA, 3842 bp, Setaria italica
  Peptide Sequence Number=SeqID_94799
ccccgatttgagtggccaccggaaacgcgcggttcgcgtcacctccgggggtttccctggcgccgtgattccctgcctcatcgcctgcggaggaccaaggtctctcctggtagtttaagtgatttttatggcttctgcaagaaaagtgagaaatgcgaataaacgctatgccaaaatcaatgatgattggaagattgaagatacagcaagtgtacctaaaagtaaagtgcgaaaaaaaaagttatcagacatgcttgggcctcagtggagtaaagacgagcttgagcgcttctatagtgcctacagaaatacggaaaagattggaggaagattgccggtgctatccgtgatagaacatctgacatggtggaggctctttacaacatgaataaggcctatttatctcttccagagggaacggcaactgccgcagggttaattgccatgatgactgaccactacaatattctggatggaagtaacagtgatcatgaaagcaatgattcaccaaaaacttctaggaagccacagaaacgtggccgtgcaaagtttcaatctgtctcgaagacatctgatacacgttaccctgatcaattgcaatctcagcctgcttcatcgagctatggatgcctttctttgttgaagaaaaaacgttcaggagacctgtttgtagggaataggccacgtgctgttggaaaaaggctccaagagtacctgttgccagcatgtaccatcgagatgagaggggtgcaccacatagacaagcaaaaccagattctaacaatggtgatgatgaaggagctcatgtagctgcacttgctctggcagaggtatatcaaagaggaggctcacctcaggtttctcaaacgcctgggagatctggcgaccggatgttcctgtctcccattaaaagtagtgacagaaaaaatgctgattcagagatgggaagctcaaagttgcatggatttcagttggatgctgattaccctgaagctagcttaggaagtagggaagccgagactggtgactatactaaaggtgcatcctatttgatgactaacaaaggatctccatctggaaaacctcagaagaaagtaaagaggtctcaaaagaggaggaaaaaagctgtacgcaaaacaggtgatcagtttgagtatgatagagaggcttgcagtggtactgaagaaggacatagtgcgagaaaggcgaaagaggaaccagagctggaggcattgggaagaaaaactgcgtggccatctagcacatcaaataaaagaagccgtcaactgttttttgatgatgatatttcagctctagatgcattacatactttagctgatctatctgtgaacatcctacagccatcttcagttgttgaatctgagtcgtcagcacagattaaggatgaaaataaagacaatgattctgatggaaagcctagtattcctgcagccgtttcggtgtatgaacagaaagattactccaaagtatggcaaaaaaaactcaaaaggcagtcagaaattgcaagcaccgatatggttactaggaaaaaagccaaacttgctaaagatcctcatcatgatgggagcaccacttctgaagtaaagcagcaagcttgtacatgtggcgttaaaacagaaaaaagaagaggaaatcttccacgggaaaggtttcaaaagatgaaaagaatatattaaaggacgtggagaagactgaggtttctgctgaagaagggaaggcgtcttctaataaagagacaactgcacgaggtgcaacgcctccgcaagctgacttgacctcaaaggtcaaaagccgccgaaaaggaggcattcaaaaatcactaactcaagaatgtaaacctactgagggtgctggtgattctggaagtgataaattgtcttattcattgagtaatattattgatgtcaaggacaaactctctcactgcttgtcatcacgtttgctccgtagatggtgcatgtttgagtggttctacagtgcaattgattatccatggtttgcaaagagtgaatttgttgagtatttgaatcatgtcaagctgggtcatgttccaagactgactcgtgttgagtggggtgtcatacggagttctcttggaaagccccgtcggttgtcaaaacagtttttgtgtgaggagagagagaagctttcccagtatcgtgattcagtcagacagcactatgctgaacttcgatctggcattagagaaggtctaccaacggatcttgcacgacctcttgcagttgggcagcgtgttatagcctgccatcctagaaccagggagcttcatgatggaaatgtcctgactgttgatgataatcgttgccgggttcagtttgatcgacctgaactgggtgttgagtttgtgatggatattgattgcatgcccctgcatcctccggaaaatttccctgagtctctcagacagcaaaacattgtcaatgaatattatagccgcttatcggaagcaaatgaggatcagatgaaagaattgggtaatggaggtggagcaagattcacatcaaatctgaatggtgctgatgcaaccttccatatccctcctggtcatccaataagtactttaatgaagcaagcaaagggtgactcaattgattccattgcacaggccaaagctacagttaatgaggttacagttgctacacaacaggcgatctacaatcagccatccaccctctcacagatacaggaaagagaagctgatataagagctcttgctgaactatcacgtgctctcgataaaaaggaagctttgctagtagaattgaggcacatgaatgaagaagtgtctggaaagcaaagggatggggaaattattagagacttggagcatttcaggaagcaatatgccatggtgcttgtgcagctaagagattccaatgatcaggtagctggagccttgctttctcttcgccagcgtaacacatatcatgggaatccagtacaatcatatcctaaatctatggaaaatggcatagcctttgctggagcgccagatccgtataaccttttcggttatattaatccagagtctggttcccaagtgattgaagttattgagacttcaaaatgcagagcaaaaatgatggttgatgttgctatccaggcgatgtgcaaagtgagtgaaggagagaacccttttgcaaaaataggtgaagcattagataacttcaatagccgtggtactggctctggttcaagcattcttggcataagacggatacctcctgattcaggtcagtcaaatgcatcgtatcaagagaatggcacacctgctcctgcaacaaataacagttcaagattgccaaatggtggtaattccgatggccaatttcctaatgagttgatttcatcctgcgtcgctatgatgctcatgataaagaactgcacggagaagcagtatcaccctgctgaagtcgcgcacatcctcgattcagcgctgtcgggcttgcagccgtgcagctcccagaacatcccgatcttcagggagatcgagatgtgtatgggcatcatcaagaaccagatgctggcgttgataccgactgcaagtggctagccccacgcctgctgggggcaatcctagctaatgtatttgggaagcaaaaacccggacaactgtatgtggcgtgtattattcattttttccttttcttttttcttttttgctgtgttacaaggtgtatgtcatttgtacatttatacattaaagtactgatgaaaaatatatgcgcactctcgcaagggggctacgaatgaggagcgaactccccaaatttcaaagtaaaaaaaaaaaataaaaatat

SEQ ID NO: 28826 - DNA, 851 bp, Setaria italica
  Peptide Sequence Number=SeqID_94800
acttcagaacttggaatgcaccatgttcacgtcgaaggccctgaagcataaaggaatggtggtttttatagcttctaagctgtcatgcaaaattgatacattgtctttttctgtcgatgtcacgttgtcggatgagcagactgaggctgcaatattgcatggtgatgattatgctggatctctagaaaacagctctgcaaagttacaaagtgttgttaagggaatatcctttcgcattacggtgtttgaacaaattcctgggaccctcgtaattaaaggttcattattgaataaagcattatcaggtaccttctcatcattattctctcagctggaggatacgttaaggatggaatgtctcagtaaggcgcgatagttcaagatccttacgaatgcatcagctgcctctgcactaataaatcatttggatgccaatgaacgtgcaagacgaaatcatgagacaacaacagcttaaccagaagccacaaacagagatgctgagctgtgatggaaactcgcacttcactgcggaagtcactgttgctcacatctttacttgatgtgcgctgatagcaaggttgtgaaaacaccaggaacagtgcctggtgtgcttgccttattttcttatctggatttggagaacgacttgacaacggccaaaactgagtctttgctttcaagatcctgcaacggcacgcacgataaaacctttgaacggcattgagtaagtgacaaaatagaacattggtgatcctatacaaacccgattcactgtattgcctccagttttttttccgtgcggcttcccaggtcaatgaacgagggacacgaacgacgtgccgcgcagaaat

SEQ ID NO: 28827 - DNA, 601 bp, Setaria italica
  Peptide Sequence Number=SeqID_94801
tctaacgtgacatcgacagaaaaagacaatgtatcaattttgcatgacagcttagaagctataaaaaaggcctcagttgacttcagaacttggaatgcaccatgttcacgtcgaaggccctgaagcataaaggaatggtggttttttgctggagtactagatctgaggaccttatttcctggagcaatgaatgaccaagcaagaccccatctagctgtatgaccttgcacgaattcagtagttttcacgactgaggccccagcctcgcgagcttttgacatcaataactttaagtttgcttttctgccaaccatcgatgtaaaccacctgaaagagttcttaagggaaacactgtcttcaataatacgtgttacaaaggccagctcgccaccagggcaaaccatctctttaaactgtcccaccacatgatgttttgggtaagaccagcttcctctatgctctcaaagaatggaggattgcacatacagaaatcaaagctctcattctcctttacaacacccacaaggacaggtggcttttgcatctctgcatcctccacaggctccaagatgttctcagtctcagcttccttgacaatagc

SEQ ID NO: 28828 - DNA, 296 bp, Setaria italica
  Peptide Sequence Number=SeqID_94802
gcatctctgaagaaggaattgacccttgaagggtgcataggtgatgatgttccagtggaggtcattggtgatgttctaaggattcgacaaattctgaccaatttgatcagcaatgcagtcaagtttacacatgaagggaaggttggaatcaatcttcaggttgtgcgtgagcagcaaccaggttgcaaaatagaacacgagaaaattcaaaagcgagcttatcctggaaccccaattactactgcagcggaaaatccttgtgtctctccaagaaattgtgataaagatagtttgaa

SEQ ID NO: 28829 - DNA, 241 bp, Setaria italica
  Peptide Sequence Number=SeqID_94803
gttgttgtcgtgcagatcaagaaccttgagaaaggacaggttgccaagaattggtgagaggcgcccagagaggtgagaagagcccaaccttagtgaggtgaccctctcggggtgctgacggctgcaaacaacccctggccagctgcagtagtggctggaggagttccatgatgccaaggagcccgcagaagcgaacgccgacttgaatgcgagtagcgtgagctcatcggctgtcacattg

SEQ ID NO: 28830 - DNA, 449 bp, Setaria italica
  Peptide Sequence Number=SeqID_94804
cgctaaagaatacagaaatgaacacaaacatctgaactagaaatttcactccctccctttgcgaggaactgacatccgcgcaccgggcacgaactaaaactggacgacttgacaagtaaaatcagagtaaacacagagaggaaaagggacaagcaagaatttacaaaagaatggcctgtcacctctatcaacccccgaaaaaagagcaaatgcaccaccaccgcttctgtaggttgctgatgctgatagaaacaggtgggcgcaggttcgtttctgtgttattgagttgcgaacaaataataactaccaaccatggatgtcttcttggcaccttgggttgataggaaactctacataattgcacagttgcactttgattcgacctttggaggcttcatgctgtcagatgtccttaaagattcaggaaccactcgcacaggtacaggatc

SEQ ID NO: 28831 - DNA, 742 bp, Setaria italica
  Peptide Sequence Number=SeqID_94805
caccattcagccaagccaatatacatttataacttcctatgtcaatatataattacagacttacatttgagtcaaaacctacactcaccgcactctgtgtcaaatatgcaaacagatgcacgatggcacaacaaggcacatctgcattctgtcgcaaaagaatacacaattgaacacaatctgaactagaagtttcactccctctagaggagttggcatcatgcacaaactaaaattgaacttcttaaatcggagtaaacacggtgagcaaaaggggcaagcaagaatttacaaaagaatggctccttgagcacctctatcacccccattccccccaaaaaaaaagaacaaatgcacgaccagcagttagcaggtcgctgatgtcgattgaaataggtggatgtaggttcgtttctgtcattctgtgttgctgacttgcgtgcaaataataagtagcaaccatggatttcaactacgatcataagtgctcttggcacgttaggttgataggaaactctacatgattgcacagttgcactttgattcgatctttggaggcttcatgctgtcagatgtccttgaaaattcatgaacctgttgcacaggtatatgatctgtagcgacaacttccatcttggcagtttctgtgaccgttccaccttctgataatttcctatgtcttggcattcgcctgtgggtcggcttcagcgaactatcaccccttggaatggattgtcctacc

SEQ ID NO: 28832 - DNA, 497 bp, Setaria italica
  Peptide Sequence Number=SeqID_94806
ctgtcgcgggtgcagcaccggaacgtcgtcaacctcatcggctactgcgcgcgcggcgccgaggacaagctgctcgtctacgagtacgtgcccaacgagagcctcgacaagatcctcttcgcccccgcctccggccactccagcagcaacagtcaccggtcgcggcgcgcggagctgacctgggcgcggcggcacgaggtggtggtgggcgtggcgcgtggcctgctgtacctccacgaggacgcgcacacgcccatcatccaccgcgacatcaaggccagcaacatcctcctggacgaccggtgggtgcccaagatcgcggacttcggcatggccgcctcttcccggaggccggcgacggccgctcccgcgtccacacccgcgtcgccggcaccaacggctacatggcgcccgagtacctcatgcacggcgacctctccaccaaggccgacgtcttcagcttcggcgtcgtcgtcctcgagatcgtctccggccgc

SEQ ID NO: 28833 - DNA, 319 bp, Setaria italica
  Peptide Sequence Number=SeqID_94807
gacgcgctccctgaggccacggcgcgtcctctggcgctccgcttcctctgccgcgaccgcagccttctcttcctcggcgcgccgcttcgccgtcaccgccgccaggctctccggatcaaccgccttcttcctctcggcgtcagcctgcggtggcgtaggcgtggcctgcttcttgtcggccgctggtgcggcggcctcggccgtggcctgcttcttgtcggccgctggtgcggcggcctcggccgtggcctgcttcttgtcggccgctggtgcggcgacctcggccgtgggcttgggcttggcttcctccttgctcacg

SEQ ID NO: 28834 - DNA, 482 bp, Setaria italica
  Peptide Sequence Number=SeqID_94808
accccatgacaaaggaggcgctggagtccaagatcagcagcctctctccatcctgcctgctcgacaaggacgacgtgtacgcgtgccacagcctgatgctgctaagctcgagctcgaactcgtcggcggcgacgagcacgacggccaagaggccgccgccatccaccagcgccgactcggtcggcgccggcagcacgtacgagtcctcctcgttcgcggccgcggctagcagcaataagagggcgaggctgctagagctgccggccgtcggccggtgaggagcaccgccgggaccggactggacgcgcgcgttttgtcagtcgtcctacgcttgccggagctccgatcgcacgcagctaatcttaatcttcttagtgaggtttttttcccttaatttcgcttgattttttctagttctttgatcgccgcccggcgctgccaaataatcggtgattggcagcgccgccgtgttgtagtggaga

SEQ ID NO: 28835 - DNA, 593 bp, Setaria italica
  Peptide Sequence Number=SeqID_94809
aagtggaatcacttgaaccagtaaaaaagttctcctgtgggcagctttagaacagtctgcaccgcgaccttgtgcgcttcccaaacctctatagcattgccatttctccagcgacttacagtacagtccatcgatgaagagatgatgtcaccattagtgtctacagcaagtccagtgacttgtgaattgtgtcccttcattgtctcaacaacttctcctttatgcagatcccagaggaaaataaatgtatccattccaccagaaacaattcctccttcaggaaagcggtctgaaggagggatccaagccaatgggcccacaaaacttgaatgtcctgcgagggtcttagagagaacgtattcactctccttttctgggttccgtgtccagaatttcactgtccgatctcttgatgacgttgcgatcccagcatcaccacatacgcaaatgccacgaacgtcgtcggcgtggccgtgcagctggacgccgaggcggtactcggccatggcgccgtcgtacggacgcggcggagcgggcgagggcgaggagggagacgacgagttgtgggagcttgggagttggagggggactcg

SEQ ID NO: 28836 - DNA, 260 bp, Setaria italica
  Peptide Sequence Number=SeqID_94810
tacttacaattaacaaagtagctcaaagcagacggctgaagaaactgcacaggtcacaggggccagggacgaagaggctgcaacggggaatgggacagcacaagttcctggtgttggagatgatggaccagcctccaacaaggagttttcatcagctgctactgcctcaaggtagtaggcaactgcctacaaaactacttgtaatggaacatggacacggttgtgaaatgtaatatcttttgctatccgatgtgaagggg

SEQ ID NO: 28837 - DNA, 419 bp, Setaria italica
  Peptide Sequence Number=SeqID_94811
ggcggctgggcaacggttggtggcctccagtgccagggacttctgagaaaactacattacctatcatgggggcaagtggatcgagatcgccagcatgtgttccaacgtgattataagttattcttgccaagaaatagcacaattttcgacatagacattgaagcattgcaacagaagccttggagacaacaaggagtggatcttactgattacttcaattttaatctggatgaagaaggctggagaaaatattggtgcagcatgaagcaattaaggttagggaccagatcacttgcaaatgaaacatcaggactggatcaagaatcgtacaaactgaaatctgttaaagcaatgccaaaggcagcaaattattctggatttgaaggaagaaataagaccttagaccaaaagaaaccaaa

SEQ ID NO: 28838 - DNA, 502 bp, Setaria italica
  Peptide Sequence Number=SeqID_94812
ataattttaagactccacagccatagatgtatctgaagttcattcaaataattgatgccacgcacatcagcccagtctacctcaaaaatgataaaaccgtataaagtttgatgcagttccctattcagtatgcgagcatccttcaacttatttacttgaagcttcttttcccgcatggcctcatcgatcaaggaataccatctggatggtttatttcgcaaatggggagcagatattgggcttgctgagaatacaagctttccttcagtttcatctctctttctcctagtcctagaatttgcgaaaggggaaaaccttgacttagtaaccatcaactgccatagatgagcaggttttgtatcctgatctagcaaccatgggcggttgtcaagcaatataaggaacttcttggtatgagggcacagaaatattgtcagctctgcaagatatgactgtaaatccccgatttgcaagctggtgagcgggaagaaatgctgcttct

SEQ ID NO: 28839 - DNA, 380 bp, Setaria italica
  Peptide Sequence Number=SeqID_94813
actacttactacaaggaattttgttggttatcaaattttggactgattaaagtatatattcttatgtgagtagactggattgtaaaggggggacaacattattgaaccaacctgacaccttcccattaggggatttgtttgtatctttgtattggtataaggatgaaaatagtcttagtgtcctagatgatttgattagtatcaattctatttgaattgaagaattgttggtaccttttcaagtgatgtagatacagtcatgcactagcaaacaagacacagatttacaaatagctacgcctatgcatgctttaaatatcacatcctgcatgctctatatgttcaggaaacctgttggaggcattatgtcttgaacatga

SEQ ID NO: 28840 - DNA, 288 bp, Setaria italica
  Peptide Sequence Number=SeqID_94814
gcgaggcgcgctcgaggccccggcgaggagaagcagcagcgcgtcacctcgccaatggcggccccctcccctcctcctccgcgtacttcttggatgcgggcgcttcctgtgacaagcttgcgcgcgggatggagggctattcgagggacttgctgggcgggatcggcaggggagacgcgccggcgccgccacaggagcagggtccggggccggcgcgggcggaggaggtcgagctgagcctcgggctgtccctcggcgggcggttcggggtcgatagggaagggggag

SEQ ID NO: 28841 - DNA, 325 bp, Setaria italica
  Peptide Sequence Number=SeqID_94815
cagaccgccaccgcaccacagcgtgcaggaaaccggacagctatgcccgatcgcctcctctctctcttcctctctcctacctcccgcccagatctccgcgagcttcgagagagcaccagcagcctcgcctccgcgcaacacgagaacggacatggcggccttcaccaagcttgaggactccccaatgttccgcaaacaggtcaattctttggaacaacttactgatgaactgaaagaacgttgctcaaatctgcataaaggatgtaaaagattcatggggtcacttgatgaggcatatgcaggggatctttcattcgctgattct

SEQ ID NO: 28842 - DNA, 525 bp, Setaria italica
  Peptide Sequence Number=SeqID_94816
ctctcagattttcacacaaaccacagatacaaatcgccaggtaaatggcataaccacaccaaccgcgaagctcgcgggggggaagccaaggacctacgaatcagaatccacactgatcccagctaattggggaagtgggtgactggaaaaaagattggaatttgattcctttcgcagctccacccgaccaccaaccgatcccgaccacgggagccggaacaaatccggcgagaacgggccaaaacggcccggcgaaatcgcgccggggacggccccgtcagaccgaatcttgaccggggaaaagaaatgctgccccgggtgcgcccgccggaccgaattcgacggatcagatcaagaacggggcaatggctggctggaagaaggagcggggagcgtgggacccgcggctagtgggctgcgggcgagctcgggttcggatccctgcgggagcagcttcgcggagagaatggagagggaggggagacgaagagggaggaggaaagaggaggggaggagaggaaaagg

SEQ ID NO: 28843 - DNA, 994 bp, Setaria italica
  misc_feature (968)..(994): n is a, c, g, or t
  Peptide Sequence Number=SeqID_94817
aaaagaaccttaacaaggggacaatactacctaggtagaaaggcaactagggacggtaactaagtgtctgatgatgaagacaatcaggtagacagtgagagcaacatgtttgatggaaatgagggatcagatggtatgggatttggacccttgatgctgacagagggtgagcgatccttggttgaacgtgtacggcaggagcttaaaaatgagcttaagcaggggtacaaagaaaagcttgttgatatcagagaagaaattctccgcaagcgcagagctggtaaactccctggggataccgcatctatattgaaagcctggtggcaggctcattccaagtggccataccctactgaagacgacaaggctcgactggtgcaggaaacaggattacagctgaagcagatcaacaactggttcattaaccagcgcaaacggaactggcacagcaacccaacatcctctggtgaaaagaccaagaagaaaaggtgatgacgaccggccctgagcagtcttgacgaagctagacgtacactataccttattgccaagtacattctccctcccactctgtagccaacaagtatggagaccgacctgttcggagggaactttatgaagtaatgaagatatgcgtcaccgggggaccttagcgggtcacctaatggccctagtttgaccacgtggtggaagtgggagttggtaatgactttgcagtatagcatttgtgctaatgtgatatgtggatcatgtgttgtatgaccgacgaagaacgggagggagtaagttatgttgtattgtaattgcgtatcctaccatgtaatgatattctagggaggattccaagattcagattggccgtttacagtactctccggtgttaaaggtgctggttcaaagtttacctgaagggaatgtaatggttcatacgttgtacgccatgtaagcagcttgctcttcgtgaacgnnnnnnnnnnnnnnnnnnnnnnnnnnn

SEQ ID NO: 28844 - DNA, 1550 bp, Setaria italica
  Peptide Sequence Number=SeqID_94818
gtctctcccggtctccgccgcgcgccgccccgccgttggctggctctctagccgggaggggggatggcgttccactacccggaccacgcgctggcgatggaccccgcggcggcggcggccgcggccggggtcggggcggcggtgaaccctagcttcgtgcccggaggaggcggcgtggggggaccgggcgggtgggagcgggagaaggcggccatcgcggcgcacccgctgtacgagcgcctgctcgaggcgcacgtcgcctgcctccgcgtcgcccacccccgtcgaccagctcccccgcatcgacgcgcagatagccgccaggcccccgcccatggcggcggccgcggcggcgggcggggcgcagtcggggggcgaggagctcgacctcttcatgacacattatgtattgctcctctgttcgttcaaggaacaactccagcagcatgtgcgtgttcatgcaatggaagcagtgatggcttgctgggagcttgaacaaactttacaaagccttacaggggcatctcctggtgaaggcactggggctactatgtctgatgatgaagacaatcaggtagacagtgagagcaacatgtttgatggaaatgaggggtcagatggaatgggatttggtcccttaatgttgactgagggtgagagatccttagttgagcgtgtccggcaggagctgaagcatgagcttaagcaggggtacagagaaaaacttgtggatattagggaggagataatgcggaagcgaagagctgggaaactcccaggtgacacagcttccactttgaaagcctggtggcaagctcattctaaatggccatacccaactgaggaagacaaggctagactggtgcaggaaacagggctgcaactaaagcagatcaataactggttcatcaatcagcgtaagcggaactggcacagcaacccggcttcatcctcatccgacaaaagcaagagaaaaagaagcactgcaggtgatggcaacgcagagcaatcctggtagagcgcggttggagaagaattatatgtaaataacgcttctactgagaagaatggcaccatatttgttgctcgggaaacgaccaccagcatttcccgagccccatattcgtacaaagataccacacgatgtaataatgttgtaagtagtcacgtaaactaaataatttgtatagtgaataactagagactagcattcactttcggtattgtatagtttaagttgtttggacgtgctgtgtctgtactgtacggttcaaatgtatttgactagcattcgatattgtatttttgtggaagtatggcatgtaaaaccgtggatcataactgtatttgtaccttgaattatatgtgaaactgtagagacgcactgtggccttgtatattccagtatataggtagaagattgcagcgtgcgcttgggtgattagattatttaatcgtaacaatccggtatgtgaaagactcagtttgtttcagtttgtgaattataacaatttgcaatctgcaattcaaaaaaaaaaaaaaaaaaaaaa

SEQ ID NO: 28845 - DNA, 541 bp, Setaria italica
  misc_feature (353)..(353): n is a, c, g, or t
  Peptide Sequence Number=SeqID_94819
taaagccacccacaactactaacttctagctagcagcactataactctgcacgtgcatatgcatgcacgtagtatggcacgtagtatgggaataatggaaatacgggtgcatcagtgcatacatatggaaatacggtgtacggtgagaataagcaacgcctgcatgcacgcatgcaaaagcagtataatgaggcagctccaatctagtgctcggccggcggcatgcactagatgatggaatggaagcagctactactccatggagtaggcgcactgcttgaaggcctcgaggttgtgctcgaacacgggcacgaaggcgtcgacgctgccgtcgcccaggtaggacggcacgnggaacagcatcccctccgtgggggaagtaggaaggcatgaagtagctcgggcacccgccgccgaagtccaggtcgtagaacgggaacgtcagccagctgtccacctccaggtccgggcacagcacgtccttgagcactgccgtcgcctccagcccttccttctccacggctccgagctcgcgaagtcc

SEQ ID NO: 28846 - DNA, 1389 bp, Setaria italica
  misc_feature (1)..(1): n is a, c, g, or t
  Peptide Sequence Number=SeqID_94820
naggggcatgagttggtatctttggagcagcatattcgtcacatataagatacatgttatctcgatgaaattttcaagtacaagtgccgtaggatttgcacatgtaacttcgcataaatgaaattaaacaggtcacgcagaaaacaaaatctgcttcaattctgtgggaacatgatcctttggtaagctcaatgcagtacagcatcttctgtaacaaatatttgtcctgaaatgatcgatatgcttttattcctagtgtagcacataactcaaaatagagcatgctgggcacaatatctttggatcagtgagtataatgtgtagaatcgttcattagaaccagaacaagttctgtgcgcaaagccttcacatatggttgcttacaacgaacaggccctttgtcttgtttactcgccaaaatgcatttcatctgcaattgatgctatagctactcaagagagataccctttggtgggtcaaattttgccccaaggttgcttaatttagcatgagcttcagcatagtccttgaaaaatgcatcctggtcctcagcatatttttcagcatagaccttgaatgaggaatcctcaaacagcacagcatcagtaggcaaaactagaaggtcctcatcccgcctttctttgacatccttgaagtagctattgtcgaactttagccactgagatgtccaagactgccccccaggtgccccaggtccatttttagtgtattttgtttctggtttgccccagccactacgttctggtcttgcccgtccaagcgtatgagctcctgatagtgcaacaatttccttgtcattcaggcccattctatagaatacttcacgcaaatgttccgcaggtgaaggtggaccggcagcaggaagcctcccctctggtgggcattgttcaggggcagtaatgtcaacccttccatagatcatgggaattttggggccacctgcttcctcaatggctgtggcgctggcaagctgaaagagatctgcatatgtgacacctgaaaacttgtccttgatcggttggatcagcttcaaagcattcacaagaccagcattagccccgtgctttaactcaatttcaaatctcaagctaccattagctccaccgcacttgggccactcagcaatgttcttgtcataggtaccagcatcatgccaacccaatcgaaccaggatgggatggcaggaggtggtcttgagcagctgcttgacgtcctcccgcgcgcccctcagctcggccgccgcatcccctgccgccgagctcaacggacgccgcccgagctcctgggaggcgaggaggccgcggagcgggtggagcgggaagccgccggagaccccgcggcggaggaggtggtggacggccatgtcgg

SEQ ID NO: 28847 - DNA, 410 bp, Setaria italica
  Peptide Sequence Number=SeqID_94821
caccacaagtgcacctcatcaccagaaaactggcaagacagttgctaagctaggtgcagagcactggaaacaaagttattcctatgattccaaagactcggaagcttccagaatgataaccaagtgtgtgaaccagcaacacctggctgtagttccacctaggaggatcctctgtatagtagtccatctgacgtgactatagtcagaactctgaatggatgctggcttggtgactttgcaggaaatgccaattcttttggttattatgtcgacaaacttgccgttttctaattactatggtcaaacaaataaatgatttgatgcttctatcgatcgcataatgaaccaaaattcgctcagacacgtcggcatgaaatttggtttccaaacttcaatatgagtataaaata

SEQ ID NO: 28848 - DNA, 427 bp, Setaria italica
  Peptide Sequence Number=SeqID_94822
cactcagcaggcgccacggcggaatccgacggccccgccgccgatgtcatacagcacctcaagcgtcctctgctgcacgttgccgatgatccccacggactcgtcgtcgccggtggacgcgaaggcgaggcagccgtcgagaatggtccccgaccggtcgagctccaccgtggcgcccctctcgaacacgagggaaacgcttggaaccttgacgtcgtcgccgacggcatcgctgatgttgaagcacgtgtccaagatcgccgacgacgacgccacccgcgggtacatcttcatctccttcctgaacgccgcccgaagaacacggtacgccttcgggggcagccgcgtgatgatcgttcccgagtccatgaccgcgccggcgctgaacgccgacgggggcacgcggaggcgccgcccggccacggtg

SEQ ID NO: 28849 - DNA, 397 bp, Setaria italica
  Peptide Sequence Number=SeqID_94823
tgaaccacttggaggtctatttggtggttctgggggtaatacggaaatttctgtagtttttaagtatttcgcatatctccgctggtcgtaaccatcggttttgtgcttccttcagtatctgctcaatatctagctgcggcgcgatcgcgtagcgccgcgcctccgccatcgccgaacacggccgccttgcgcgcgcgaccaaccagaaccaggcaccaccgcggcggagttagtcaccaaacccctccgggctccgggcccgctggcgatggcctcgtgactcgcccggatttttcgcagggttttgtggaggattcgagagggtgtttggctaatttggctgtgacgtcccctacctgacgacggaaaccggtggtgtgaggcgataagggagagg

SEQ ID NO: 28850 - DNA, 263 bp, Setaria italica
  misc_feature (262)..(262): n is a, c, g, or t
  Peptide Sequence Number=SeqID_94824
gagttccggacgccaaggacctcatgctaaggatcaaggagatcgtcgccggcagcgagtgacggaggattaggttggtggatgtggatgtggaattgcgttgcgtgacgtactggggtcagtgacgtggactgggactgtgggtgttgtgtgacgtggacctcatcatacagggcgtgtgggtctgtggatgcgccgtgcgcgtcacaagttagtgtggtactcatgtgagatcgtcgcgatgatgagtggtgcaaattang

SEQ ID NO: 28851 - DNA, 509 bp, Setaria italica
  Peptide Sequence Number=SeqID_94825
tacgggagcacgctcgacgacgaccagcgctacgccgacgccgccgaggtgctcgccgctgccgcggcctccgctaacttcccctccgccgcctccgattactgttctgataaggacgatcaagatcctggtgatgttgaaggatcagtgctgggtctccaaagctattgggatgcttcttattcagaagatcttgcgaattttcaggaacatgggcatgctggagaaatatggtttggtgcagatgtaatggatacagttgctgtttggacaaaaagtttgtgtaacattatccaaggcgggattccatctggtcatgacagcatcaaaagtgaagtcgatgaaaaattattctccaactaccctgtgcttgatgttggaactgggaatggccttcttttgcaagcacttgctaagcaggggtttacagatttaacaggaactgattacagtgaaggagccattgaacttgcaagaaaccttagcactcgtgatggtttcacttcaat

SEQ ID NO: 28852 - DNA, 1127 bp, Setaria italica
  misc_feature (1069)..(1127): n is a, c, g, or t
  Peptide Sequence Number=SeqID_94826
aaggtaaactaaccaaaaagaactaaattaagggaatagacttacttaattcaagaagatcttgcgaattttcaggaacatgggcatgctggagaaatatggtttggtgcagatgtaatggatacagttgctgtttggacaaaaagtttgtgtaacattatccaaggcgggattccatctggtcatgacagcatcaaaagtgaagtcgatgaaaaattattctccaactaccctgtgcttgatgttggaactgggaatggccttcttttgcaagcacttgctaagcaggggtttacagatttaacaggaactgattacagtgaaggagccattgaacttgcaagaaaccttagcactcgtgatggtttcacttcaataaaatttttggttgatgatatactagagacaaagttagataggaaattcaaaattattacagacaaagggactttggatgccattggattgcatccagatggtcgtgcgaaaagaataaagtattgggaatctgtatcaaacctggttgagcctggtggcattgtggtcataacatcatgcaaccacacaaaggatgagcttctgcaagaagtagaagagttcagcaggaggaaatttggaaaggagaacatggatgaaggtgcagctgtgtcccagatattccgttacatagatcatgtcggaacataccccaccataatgtttgggggtgttgaggggtctcaagtgtgcaccgtggcctttcaacggatgtgactgagaactgatgcacacataataccaggttggctccagaaggaagttctttacttcacctgtgggactcttctcactgtatcaagaaacagttcaagttagaagggcttccacggttgccacttttacgggtggcccagcctagatgggttgtttctttgatcgtcaggatagtaagagaacttcccgaaccatttttgtgcgattgtaaacgaacttgagaggcactgctgtattgtcaatgtaccgtgaacttctagtaatgttcggtcatcctgaatacagagttgtttaatccatgagttattttaaggtnnnnnnnnnnnnnnnnnnnnnnnnnnnnnnnnnnnnnnnnnnnnnnnnnnnnnnnnnnn

SEQ ID NO: 28853 - DNA, 298 bp, Setaria italica
  Peptide Sequence Number=SeqID_94827
gagggactcgcagacggggcggccggcgtggaggaggacgggggatcttcttgtggacggggttggatcggaggaggaggtcgctcttggtgcccaggagctcctgctccgagtactcgtaggggatgcccttctccgccagcgcgatccggcagcgctgcccgaacgggctcacccagaagtccagcagcaccaggtccttgttgtcatccgccgccattgctgccagcggctcaggtgctcagctccctactcgactgtcgtcggtttctcggcgtgcgtgtgcggtgacgatgga

SEQ ID NO: 28854 - DNA, 520 bp, Setaria italica
  Peptide Sequence Number=SeqID_94828
gttttctttctccagtgcctgcagagttatagtgacgctacacttggaccgtggtggaagaatgtctttgtttgtgtttatgcagtaaggacgcaggctagtcgttgagatcctgaaggcgaagtaatcatccgtatcattggtcagctcaacagagcatgatatctgcttgttaagctccaaggctaaatggatttcgagtggctcaattccaagcatgtcttccaactccaggcattcagtggcatcgcttatgtgcacatcactgttgtccattttgttgagatcactgattatatcccatatattaggcctatccactgggtccgtctgaatgcatcttcgcgccaaattgaggcatttagccacttgtttgtaccctggttgtatatcctttgttgatttatgccacctgtgcttccattttctcagtactttagtagtacacgggatctgcttacttccagtcaccagctccagaattataacacccaaactataaatatctgacttagcgtga

SEQ ID NO: 28855 - DNA, 249 bp, Setaria italica
  Peptide Sequence Number=SeqID_94829
tttgttgccagcaccaagtatgggaatggataacacagcaccaagtattggaatggatagcacaggtcacaatggtccaaaaaagaatataactacacagacatatgtaaagctgtactgagcaagaaaataaactcatcttggcaataagtcacaccgtactaccatatctacatcagcaaacatctcacgggatttcttcccttcccaaatctcctatttccaccatcagctctaacaatttggaga

SEQ ID NO: 28856 - DNA, 445 bp, Setaria italica
  Peptide Sequence Number=SeqID_94830
tgtctaaatttcctattgtctttcttcttctattgttatttttcatctaggtgacatgtactccaaagtttcaaacatgtgatgataatgggctagttgtacagttatttgtattttgttagacatatctgctaatgtacttttttagtgtttgaactctgctctgaatttattttggggtttcatcgattgtccaaattaatttggtaatctgcattgcatagaaattaggtttgaagtctctgagcaacctgcatttctggggttttgtaaaagatctctttacttgtttgacagtttactgaaaaaattgtgtccttgcttcactttgataagtgctttattccgaacaaatttgccaagtaggttgcttatctcattaatagaaatcttgtcatatagcatttgaaggcaaggttaactctcttacaaagtaattttaacc

SEQ ID NO: 28857 - DNA, 591 bp, Setaria italica
  misc_feature (1)..(32): n is a, c, g, or t
  Peptide Sequence Number=SeqID_94831
nnnnnnnnnnnnnnnnnnnnnnnnnnnnnnnntttttttttttttttttttagttaccataagttggtaacgataaaatgaatttgggagaacaatacaccgtaccaatcctgtatatacaaccctgttcacgagtagtacgaaaatacacaagacgacatctcatcactacgctctgatttctgaagatgacgatgaattgctggaaagtgtagaataagagtgaaaccattctgatgcaatcccattcaatcactgaattttgccaactcctcgacgtatcactctcctggttcggccgcccgggtgactcgacagacgcagcgaggacagggccgcaagatccggcggtggcaacccagcagtcgctgcagagaatgacaccggcgaagacgaagacgacccggtttggccgcggctgtcatccttgtcggcttcttgctggtctccttctccgccaccgctgccttccgcagaacattgaccaagtgcaatttccagatgcttcttcttgggctccatgttgtttctgaaagcgaggaacacgaggcactgtgcccggagctgcttcagctgctgctctgcgaacgg

SEQ ID NO: 28858 - DNA, 555 bp, Setaria italica
  Peptide Sequence Number=SeqID_94832
gcgacctggattgggtcgtccccggggtggagagttagctgcagaggattgcttgcttgatggataccacggtgtcattgacatgtgcccttcaattcgagctcttgttggtgaggtagcaccagacatcaattttggtgttgctgtggtagacattcgccttggagaagttgaggtggacaatattttaggtgtggcttccggggtaaggcgaggagtgatgtgtgatgagagggcatatttttggatcaggggccttgttgctgtaccttctcggtttgtacttccaacatcaaaagactcgctcaatacatttggcgtagggtgactggcagatccaccatctccacatgatgacgcttttgatgctactgactgatcacatgttgtaatgtcaattgtttcttgtggcgatgaactatcatcacgcaatgactgcatcagatgcctcttgaatgactccagcttctgcaggtcgcgcgccagcttcttggacgtctgcgccagcgagtcccgctccttgctgagcttaatattgtcctcgagcgcggcgcg

SEQ ID NO: 28859 - DNA, 245 bp, Setaria italica
  Peptide Sequence Number=SeqID_94833
gtctcgtccaggtccttctggaccttcatcagcgagtccgcctcctccggcttctggtacttctgcagatatgaatcgagctcggggaagggcgtgtcgctgggcttgccggtccatgcagatttgggataccgcttggtgaactcatctgcgcacttggcgatgagagagaaggcaaccctggaggggtaatcgtggtcgcagatgaccacgccggccgtgttgtcctggcgcacatggacgta

SEQ ID NO: 28860 - DNA, 1878 bp, Setaria italica
  misc_feature (30)..(30): n is a, c, g, or t
  Peptide Sequence Number=SeqID_94834
taggcttgcggctaggcacgcctgctccancgttctcctgacctgtcatggaagaaacgatggagcaggcgggaggggtggtgaccgaagggcaagaaccgaccgacgacaacgacgacgccaagaacggcgaagtggaggccgcggtctcgccggcgtgtgcgcctaaggccgccgccgccatgcccccttccttgccgcgccaccggcggtccaagagtgcatcttctgacaggaacgcggaggcgtgcaagcatggaccaccgcatgggcatggcgccgtcgagcaacgctgcggccaagcaccgtctgccatctctccctgctcgtccaagaacccgacggacgcgaggaggtcttgcgcgaccaccgccggaggctcggttcaccaggcgccgcgagatcacaggcccaacgcgtcgccgaaccaccgcgtgtcgctggagaatgatgttaggcagctgcagctgaatttgcatcaggagaggtccatgagggtcatgcttgatcgggcgattggccgggcatcaagcactctatctcctggccataggcatttcccagcccagacaaaggaactgatagcagagattgaattgctcgaggaggaaatcgccaaccgtgagcagcacgttcttactctctacagaagcatctttgatcagtgcatgtccgggccatcgtcggggcagagctctggtatttcgtcccccgcacacaccaagaatatcactactagaactgctagaaggcagccaagcataatatcaagtgcattttgctcatccaagaagctcccactacagcctttccacatcatggagtcgctgtccgagtcgggaagaaccaagaatatgctcaaggccaagatcaagcatcaatctttctcaagcgaaacattggatatccatcctatatcgttcccaccagatccgaaaaagctaccttattcggggagtagttctctggctcgcactctgaaagatcacctttatcaatgcccaagcaaaatatcagaagaaatggtcagatgtatggcctccatatactatcttctgcgcaccgaagcaccagaaaagcctgaaaaggcccgttcaccattcttgtcaagatcatcgacgaatgtcatacttcctcggagagtgaacggggaggaaaatagttcatcaaacaacaaatgtactgtggaaatagcttccatatcagttgacaagaaccagatgccagatgtttcttatgcgattactcactacaggttgcttgtggagcagcttgaaagggttgatctgagcatgtcagattacagtattaaattggccttctggattaatgtgtacaattctcttatcatgcatgcgtatctggcatacggaattccaaacagctcgctgaaaagaatggcgctatttcacaaggctgcctacaatattggaggtcatgccgttaccgccaattccattgaacacgccttgctgtgcttcaaatctccacggattggtcgttggttcgagtccattctctcgacggcgatgcggaagaaatgcgcggacgagaagcagctggtccagctcaagttcggcctgccggactgccagcctctggcccttttcgccctgtgcaccggcgcttcgtctgaccccatgctgcgggtgtacacggccaagaacgtgatggaggagctggagcgcgccaagcgggagttcctgcaggccacggtggtggcgcgtaagtccaagaagaaggtgttcctgccgcgcctcgtcgagcggtacgcccgggaggcgtgcctgggccccgacgacgtcctcctctgggcgcagcgcgaggggggcgtcggtgcgtccgcccgtccctacggtccgtaccgtctagcaggac

SEQ ID NO: 28861 - DNA, 286 bp, Setaria italica
  Peptide Sequence Number=SeqID_94835
tgatgcagatgcagtttcaagaggttagccatttggatgcttcccaaattgcttcatctactggacttgaaggttccactggcaatttccacagtaaatctaaactagtctataggtctccactagcaaatactatccatcctagtgatgtcaacgacctagccaatcgtttggtgattgtatgcagaaaggcagctgaaggattcacaacaatagctgataacaaagtggagatggaaatgatagggaagtttcataatacctaccagaattcgacgtagacaag

SEQ ID NO: 28862 - DNA, 354 bp, Setaria italica
  Peptide Sequence Number=SeqID_94836
aaagcatatgaaaagaacttttcaaacggaagcaccggtagatgaaatcaattgaaggcatccatgttcaaatatcaaaatgatacaaaactgattacatcgtacaaaacgacaagtacaaatatctatctgtcaccctcttctttcacggcgttcactattgtcatcgtaccgtgaacgcttgcgatccatgtcatcatatttacgtctttctgatctttcttcccttccttgagaatatctgtcatcattcctctgcctctcacctcttgatctctcaggtgacctgtcatgcctgtatttctcctatcttctgctcttctatcatcacgcctactcctagatctcgtctca

SEQ ID NO: 28863 - DNA, 477 bp, Setaria italica
  Peptide Sequence Number=SeqID_94837
cgcgtgctcggccggggaggcttcggctacgtctacgacggcttcttggaggatggcacgcaggtggctgtgaagctgcggtcagattcttccaaccagggcgtcaaggagttcctcgctgaggcccagaccttgacaaggattcatcacaagaatctggtttcgatgatcggttactgcaaggacggggactacatggcacttgtctacgagtacatgtccgaaggaaccctgcaagagcacatttcaggaaatggccgcaacactgggttcttaagctggagacagaggctcaagattgcactggagtcagcccaagggctggagtatctacacaaggggtgcaacccgcctctcattcacagggatgtgaaggcggccaacatcctactgaatgcaaaactggaggccaagatcgccgattttggcttgacaaaggcttatcatgacaacgatacccatgtatctaacaaacac

SEQ ID NO: 28864 - DNA, 460 bp, Setaria italica
  Peptide Sequence Number=SeqID_94838
gtgcagaaagaaaagcattcttctgccaagcttacatcaactgcatctgaggtagcaacacgcgaaaattctaacttgcttatttctagtgatgttgatatgatggatgagagaagaaaattgtttcctagcacaaatgatcaagttggtatagataataaagacagtaaggtgttaaatcctgttggaactgaggcagatattgcagaatcacatactaaacaatcttccatgatgggagaaacaaatcttgaggaagcgtctcttgttattgagactatacgccgtgaagagtttggtcttgatcaggccctaagttacactgagaatagcttgttgaaaaagcagcatgctcgacttggcagagcattgcattgcctttcgcaagaactatattcccaggattctcatctacttcttgagctggtacagaatgctgatgacaatgcgtatcctgatg

SEQ ID NO: 28865 - DNA, 224 bp, Setaria italica
  Peptide Sequence Number=SeqID_94839
tagctgcatgtctcttccatgaaaaggaggatcaagggaatcctgaagatgggatgcagatgcagctaggcagtggatgtgtggccgaggctggtgcggtctttattcccattctctctcccccggtctgatgtgtgatcgagctcctgcttgccatttatacttggcagcagagccgcgcgggcgcaggtgcaggcagctgtcccgatccgggcagcgcggcg

SEQ ID NO: 28866 - DNA, 1045 bp, Setaria italica
  Peptide Sequence Number=SeqID_94840
ccattctgtttgcattgtgtcaatatatacttatagcgttgacacaatgcaaacagaatggctacactttcttttaactattccatcaatgtccacgacaattcaataagtacaaaaattgttagtatatgtgcgtatgatctcttttggagggcgtcttaacccttgagcctctcgatctctacactgtattgcttctaatccattttgtggcaacccatttctcgcccttgatcacggggcagctaccgtgaagagaagtcgggtcaatggtgccatttaccataaggagtaaacaagagtccatcacccttccttggtttacctttaggccaatgcagtcttcatagttatagcctatattcatattctccccattctcatatgggaacattgtttctcccccttcttcgacatccgtgagataaagcaagaaagacgctaccctttgatttttttgtggaccatactgggcagggtcaaatgcatcataatgtgaagcatacctttgtccaatctcataccgcaggacattaaagggctccccatgatttctgggtatcatggtagcccttgcaatcttcttctcaacttctgcaagggttccagttgggtcttcattggcactgaggaatgttcccgaacttgtcctgattcctttggtactctctgtagtttctcctctcctcagggctaacgttgatggtgcaagtctttcctttgcagtttttactatattttcacactgttctgatgtcgcaaattgtggaaagtacaatgcacgaggctgccagctcaaaatctggtatgggatcaaggacggcgcagcctcgccggactcgccgaagggcatctcgggcaacgccgcctccagcagccgctccctccgcaccggcatgtccgcgtcctccggatcctgggtgaagaggagcgagccgaagaaaccggcaaggaagaagagggagcaggagaggagcaccacgggcagccgcagccgcgtccgcaataagacccacgccgccggcgcctccgccggcggccctga

SEQ ID NO: 28867 - DNA, 251 bp, Setaria italica
  Peptide Sequence Number=SeqID_94841
atccaagtagttagctcggattaccaccaggagtgctctgctgaaacatcacgtctctgaacttgagcttcccaggttcagggaacaccaactgcccaggaatcatatactcaccagggccgagattccgtggtggctcaatcttgtcagattcagtaggaatgaacagcaactctttggtgtcttcggctaccaccatgttggactcatcaaagccggacacacagatgtcagaatcgtggaactctttt

SEQ ID NO: 28868 - DNA, 847 bp, Setaria italica
  Peptide Sequence Number=SeqID_94842
acattttgggacaatgtgaataattcataacccgcatcttttcaagtctagcacacctcaaccccaacaaaagaaggattccaagctaactcaaatgtcataaagctcatatatatggagttgcgttagaacataataacccaagcaacactcatgattatcgtgccttctgcaggtggttcgtcttccagagtgactcctggatcttgggcattaactcagggtatgtcaccgtcgtcacaatctcagtctcatcaggcttgtacccagattcaccaggtggatacccaccatcaggtttgaaacagcgagaccagcaccactccatcttattgattgagatatcgtagaagaaatcgagcaaaccagttgcatctgcacgatacttgtctcggcggtggttgaagaagagctctaggagcttgttgttctttgctctctcaatccaatcatcaaggtacggcatctcactgagaaccgtcgcctcagcagcagggtcaacatgtggcagcacgtgacggatgtatgggatgtaggacatgacaagccctcgccgaagtccccatggcaccacagacgcgtgcctggagatgagggggcccatggttgccgactcaggagacttcatgagcttcagctggtgcttgatgtcatcagggacaggtatccctggctgaaggaggttcttggtgatgaaggcgtgagcatccaagtagttagctcggataccaccaggagtgctcagggccgagattccgtggtggctcaatcttgtcagattcagtaggaatgaacagcaactctttggtgtcttcggctaccaccatgttggactcatcaaagccgg

SEQ ID NO: 28869 - DNA, 509 bp, Setaria italica
  Peptide Sequence Number=SeqID_94843
tttttttttttttttcttcagaagtttgatcattagcaatttgacattgcacaatgctggtctgaaacataaaggcaacataaatggggcatctgaattcagattcataattcacattttgggacaatgtgaataattcataacccgcatcttttcaagtctagcacacctcaaccccaacaaaagaaggattccaagctaactcaaatgtcataaagctcatatatatggagttgcgttagaacataataacccaagcaacactcatgattatcgtgccttctgcaggtggttcgtcttccagagtgactcctggatcttgggcattaactcagggtatgtcaccgtcgtcacaatctcagtctcatcaggcttgtacccagattcaccaggtggatacccaccatcaggtttgaaacagcgaagaacctaagtactaacctaacttacctaattacttttaattttagttaattttagttaagttaatttaatttacgtttaagtta

SEQ ID NO: 28870 - DNA, 437 bp, Setaria italica
  Peptide Sequence Number=SeqID_94844
gcccagacaggttgttgtggtagagctggatcaccgtgaagcccttcagcgccgcgaacgccggcgggatcccgccgctgatctggttccgggacacgtcgatctcccggagtttcgccagcttcccgagctccggcgggagctcgccggtgagattgttcttgtacaactcgatcttccacaggttccggaggttcccaatcgccgccgggatcgcgccggcgaggttgttcatggacatgtccagcgtctccagcgcggcgagcccgaagatggactctggcatcgcccccgtcaggccgctctcggcgaggtacaggtaggtcaggttcttgaggttgccgatgctcgccggcgtctccccctggtcgtagccgttcaagccgacgctgagcgtggtgagggcggtgaggttgccgacccacgcagggaaccgg

SEQ ID NO: 28871 - DNA, 377 bp, Setaria italica
  Peptide Sequence Number=SeqID_94845
aaaggtaaacctaacctaaaaagaaaaggtcctcctaagaagcaagtctagcacacggatatcttgatttgcatgctacatgctttgtggcagtatgctgctgtcatggatgtgggtaggtccatcaagtggtgcatcatatgcatggctgcaccagcaacaagctagggctggggccatgcttttaacgaagcattcaactgccatggcctcgtggatgtgcgctaggcccatcaagtggcgtaccaagcgcatggttgactaagctagatcaggtggctacatactttgattaagcatgcagctatcacaggtgtgggctaggctcatcaagttgtgcaccaagcaccaagctaggtttggtaccaagaacagat

SEQ ID NO: 28872 - DNA, 320 bp, Setaria italica
  Peptide Sequence Number=SeqID_94846
cttcttcaggtagtccagctccagcgccatggacgaggccgctggaggcgcgctaagcttgacgctggactcactgctcgcgttggagctgccgctgccaccaccggcgtaccgctcgccgaagacctcgacggcctgccggaccgactggaacggccgtgaggtgtcgacctcggcgcggctcgcggcggtcgcctccatgaccataggtgagggtgctgccaatgccagtgctggtgcaaccgagatcactgatgggaacacgatgcacagggtggtgaagtagacatggttcctgggctctgtcttggcttctactt

SEQ ID NO: 28873 - DNA, 857 bp, Setaria italica
  Peptide Sequence Number=SeqID_94847
tttcattctcaaacaactgattatttttaaaagatattaatccaagatgctcagcattctatcttccaggaatgacaaagtacaagtatgtaaacacagcacaaatacagtatagcagcagcaacacaaagtagtgtgtgtctgaacggttgatatctagctcccgcagcagttacatgctatacatacacaactgtttggttcacaggtgttgataaacatagtcacccaccaccaagataaaaaattaaaaagaaaatgaaggaacaaaccaattaagcaccactgtaactgaactgaagaacacggtgtgtacaagagcagtcatatctgaagctaatttcgagctgacttaagatgatatgatacgcttgtgttgttacacttctgtcatgccaacatagtatataatgcatccgtctcaagccattatgtcatctcacaaatggtaagcactcagtcatctttgtgaaacctttgagatcagtgatgtggcaattaagctgtatctacaaaacactgtcagtcatctgtataaactggttcttgccaatctttggtattcttcttaggatcatcacagagagcaagatccttgtcaaactctttcattgtcttcacaaacgtcttggcaccttgcatgatcaacctttccaccatgaatagctgataattgttctcaattatcggagccaatatactgctgaagttagatgaatatgctagcttgtacctgtctgatagaggtgaaaagaagcctggggtcctttcatttgaggcaatgaaaagagtgcgacctggtctaacccactttgcaattttttgttcttaattttcttgcgagtatctctgtcaag

SEQ ID NO: 28874 - DNA, 295 bp, Setaria italica
  Peptide Sequence Number=SeqID_94848
ggtgccataagctactgagaatttctaatgtggccccggcgtatcactgacagtgtaggattgcgttgacaagtatgccgaccaaccaagctaagatctttttcaagtcctcgaatgaagcaaccgattttatttttctttgtaagatttcccaaaagttagaatttacaatgaaattcctatccctgaaacggaggtgggaaataactgaaatgctagaacttgcagattctaccatactgactccaaatcagactacagctgaaattgaaacgccaaacacacaagcagaaga

SEQ ID NO: 28875 - DNA, 327 bp, Setaria italica
  Peptide Sequence Number=SeqID_94849
atcggcttacatctcttctgcctccagtgctagtcatctctcttcctgttcctcctgctcgcgtttcttcttcttcttcttcttcttcttgttgccatggccagcctcgtgcaccaggcgtccatgccggcgagggcgatgccggcgtgcgacgaggagctcgtcccgcagggcttcagctgcttcgggcgctcgctgtctcgggcgtcgtcgtcgagccggctcgagtacagggcgctgcagcagcagcagcagcaggagcagggcgaggagaggtgcgccgcgcaggacgcgtggtcggcgcgcgccaagctgcggtggaaggcc

SEQ ID NO: 28876 - DNA, 854 bp, Setaria italica
  Peptide Sequence Number=SeqID_94850
ttttttttttaaaggtttaactacgtgatcatatataggataatgggtgattactcttgtacctccctagctaatatatctatggtgaagcacgaccaagatcaacccagatgtactgcatcagactcttgcagccaacgattcgcttgtcaacctcggagtccaactccaggtcatagcaccatgcacatcactatctccatcggcaccgtgcttgcacaacatcatatcatcaactgaccctgctgcattagagctgctagggagttgcctctcctctctctgtggcacaaagccgaggcgacctacagagtttgtgagctccgcctggatcacctgagggcacccgtagaacttgggaaggtagaccttgtttgccatggctcccggtggcttatccatcgaccgcgacgacagcgtacctgtaaagattgctctgctacccagtgactccaccctctcccatgccatctcttcctcgttaagcctcagcacattgatgggtgtgcagttcttgtatttcaactctgtcccaaagccgttgggttcctccaggacgctccactccgatttcatgggatcgaaaactcctaagcgtcctctttcacctatgcagtaccacagccccttgtgcagcaccggtttgcagtagagcattgcaaattcacttctttggccttgaaagtattttgagctttctccatcccagctctgaaattttacgccgtacttaagagcgtacatgccaacgactcctcgtagctctggaactccagtaacatcctcgcgggatgagcagaagtatcctccataaaattcggactcggtagttattcgaattgttggtagtccta

SEQ ID NO: 28877 - DNA, 484 bp, Setaria italica
  Peptide Sequence Number=SeqID_94851
taaataactaacttaacctacgtttaaagacctacaagacacattgatgggtgtgcagttcttgtatttcaactctgtcccaaagccgttgggttcctccaggacgctccactccgatttcatgggatcgaaaactcctaagcgtcctctttcacctatgcagtaccacagccccttgtgcagcaccggtttgcagtagagcattgcaaattcacttctttggccttgaaagtattttgagctttctccatcccagctctgaaattttacgccgtacttaagagcgtacatgccaacgactcctcgtagctctggaactccagtaacatcctcgcgggatgagcagaagtatcctccataaaattcggactcggtagtatcgaatgtggagccatccaagggactagccaacgagacagtcttttctggccccctcagcatagcccatccaattgcatcacctgaggagatcctgctctccgga

SEQ ID NO: 28878 - DNA, 289 bp, Setaria italica
  Peptide Sequence Number=SeqID_94852
aggtgccgaagggcttcccggggaggttgcagtcgatggagtagcagcagctcgtgtccacgcagctgctcgcgttcgacggcaagcagcaacggcacccctcgcaaacggcgaacggctcgtaccccaccgcctctgccgtcgccgccgccggcagcgccaccgacgaccgcgaccagtacaccacgctccgcaccggcacgtactcctccggcgacgactgtcgtttcaccttgccgctgcccaagttgctggctcctgctgctcaatatcaccgaggggaccagaa

SEQ ID NO: 28879 - DNA, 225 bp, Setaria italica
  Peptide Sequence Number=SeqID_94853
gcatgcccacgcgcttctccagctccgtcaccagcgccggcgccgccttgagcatgatggccagtcggagcaggcggaggaggaagccgcatgacacgctgtcgcgctgcggcggggtgatgctgatcaggctctccaccaccatgcgttgctcccgcgccggcgcgctcgccgcgatgtcgtccttgccgccgccgccggcgatgatcatgtggagaccgcccg

SEQ ID NO: 28880 - DNA, 351 bp, Setaria italica
  Peptide Sequence Number=SeqID_94854
gccaggggccgcgccggccagctgaaatagcaaagctgtgcgaagctgttcgggaacaactgcagcaaggtaataaggctgcagctgtgacctctgcttggagccagaggtttaagtagtaggaaatgaaagagtacagctactgcattactgcaatatacctttgcttgtataaagtgcctgcctggtgctaaaaccagctcattaaacaggtacatattgtaatcaaaatgcttatagtgggatgctctaagagtaatcacactgataacaaatgttgaagcttaagtactttttgtgtgcaattcaggcggaagagaactaggcaaagcaatatacttgatcaaagta

SEQ ID NO: 28881 - DNA, 636 bp, Setaria italica
  Peptide Sequence Number=SeqID_94855
cacgcagctgagtacagatttgggcgcaccgccgcaggaaaacaatacacgcgacaggcaacaccggtgaccgtagacccacggctcaaaagcgatcgcctagactcggcgctttcacgcagcgctgtcgatggccatcggctggggctcctgcttcccaggcaccttcttggtgtccatgtgttccagcttcctccatttcgcaaacatgttgccgtagaacttggcgtcccgcctgttgtactctctcatcttctccttcagggtcttgtacaccagcttcacgtccctattgtcagggtcaaattccagcgctttctttacatccagctctgccagctccaggtctacaagttcgatgtatgcttgcgcccttctgtacagggccttaacattggtgctctcaagttccagaacctttgtgcagagtttctctgcttctctgtactctttcagcttcagcttgcacgccgcgttgttgagcttgcaactgatcttcagagctttagattgcttcttctcatcctcgctgaaggagctgtcatactcgatgtactttgcagccttctcatatctcttggaggccttggcatactttcccatcttaaaccaggcattgccttcatctttcttctt

SEQ ID NO: 28882 - DNA, 203 bp, Setaria italica
  Peptide Sequence Number=SeqID_94856
ctacgccgccgacgacgacgacggccagcagctactagctagcgatgggtgacacgggtgcgaacatggcccactgggctgggatctacggctgcggcagcggcgcgccggcggcgacggaggcgacggtggtgacggccgcggtggcggggacggtgtcgagcccgacgtccggcgggtcgggggcagccccacccacgccg

SEQ ID NO: 28883 - DNA, 556 bp, Setaria italica
  misc_feature (524)..(556): n is a, c, g, or t
  Peptide Sequence Number=SeqID_94857
acttggtctggagctggtggttgacgtcctcgaaggtgcggcggagggtggcgaactgaaggaggctgagaaagcgtctctgaaggagtcagaaaggatcgagaaggaaattgctgaactcagggaaatgaagaaaaagatcagcacaatgacagcggatgagtactttgagaagcaccctgaagtcaagcagaagtttgatgatgaaatccgtaacgattactggggatattgaagagcagaagagtaatttagctgccatttccatgtttgtgaagaaccaattaatttttccgtgccctgatatgtatagggaaaccagccgtctcaaatctggtggtttcggtaacatgtgcatgggggcttgggtggaatgccttcagaaccgactgtgttaagctttcttgaaattccatctaaacacattttgttaacctcaccatttctcgaggattgtcggctgtcttgcgaagattatgttatgtccttagctcctttctacttgaataagaggattatgcagnnnnnnnnnnnnnnnnnnnnnnnnnnnnnnnnn

SEQ ID NO: 28884 - DNA, 885 bp, Setaria italica
  misc_feature (856)..(885): n is a, c, g, or t
  Peptide Sequence Number=SeqID_94858
tacaattaaatatttgcttccattagtgtttctactgaatacttgcgctgctatgttagcatgttttttattgcaagctgtgggcatataacatcacatatcatattattttttcacttatggtggacctttgtctacctcaatttttgttgcaactgatgctgtgaatagtctttggtctgttgaaatacttctcagggtgattgtttgtcgaacatatatcctttattatatacctctttctcactgatatttaatcttgaaataaatgcaggcattgagatccccaagtatgttgacaccgttactcctgagtacaagccaaagtttgatgctctggttgttgaactgaaggaggctgagaaagcgtctctgaaaggaagtcagaaaggatcgagaaggaaattgctgaactcagggaaatgaagaaaaagatcagcacaatgacagcggatgagtactttgagaagcaccctgaagtcaagcagaagtttgatgatgaaatccgtaacgattactggggatattgaagagcagaagagaacttttagctgccatttccatgtttgtgaagaaccaataatttttccgtgccctgatatgtataggggaaaccagccgtctcaaatctggtggtttcggtaacatgtgcatggggcttggtggaatgccttcagaaccgactgtgttaagctttcttgaaattccatctaaacacattttgtttaacctcaccattttctcgaggattgtcggctgtcttgcgaagattatgttatgtccttagctcctttctacttgaataagaggattatgcagactttgtacccccaaaaaaaaaaagtgacagtctttnnnnnnnnnnnnnnnnnnnnnnnnnnnnnn

SEQ ID NO: 28885 - DNA, 524 bp, Setaria italica
  Peptide Sequence Number=SeqID_94859
aacgaaagaacccaaaggatcactcgccaccgcttcttccgtcacaggctgtcccccgctccatctccgaggcgagcgtagatcggcggtggcggcggcgcgaggaggagagagaggggaggcgagcaagatgagcgggaacggcgtggtgaagaaggtggcggacgccgcggcgaaggctggcaaggcgatcgactgggacggcctggcgaagatgctcgtctccgaggaggcccgcaaggagttcgccaccctccgccgcaccttcgaggacgtcaaccaccagctccagaccaagttctctcaggaaccccagccaattgactgggagtactacagaaaaggaatcggatcaaaagttgtcgatatgtacaaggaggcgtacgaaagcatagagatccccaagtatgttgacactgtcactccacagtacaagccaaagtttgatgctctgttggtcgaaatgaaggaagcggaaaaggcatcactaaaggaatcagagaggatagagaaagagattgctg

SEQ ID NO: 28886 - DNA, 731 bp, Setaria italica
  Peptide Sequence Number=SeqID_94860
acaaggaccaaaccccaacaataacctaacccatttccttgtgcggtcggagcgcagcgcggcggcggcggcagcgagagaggggagggagccggcgggacccaggaaggctcgagggaggagccagctgcggggcggtgaagatgagcggcaacaggaaagaaaggtaggtacgaataatggcggtcaaggccggcaaggcgatcgactgggacggcatggccaagatgctcgtctccgaggaggcgcgcaaggagttcgccaccctccgccgcaccttcgaggacgtcaaccaccagctccagaccaagttctcccaggaaccccaaccgattgattgggagtactacagaaaaggaattggatctaaagtggtggatatgtacaaggaggcttatgaaagcattgagatccccaagtatgttgacaccgttactcctgagtacaagccaaagtttgatgctctggttgttgaactgaaggaggctgagaaagcgtctctgaaggagtcagaaaggatcgagaaggaaattgctgaactcagggaaatgaagaaaaagatcagcacaatgacagcggatgagtactttgagaagcaccctgaagtcaagcagaagtttgatgatgaaatccgtaacgattactggggatattgaagagcagaagagaactttagctgccatttccatgtttgtgaagaaccaattaatttttccgtgccctgatatgta

SEQ ID NO: 28887 - DNA, 944 bp, Setaria italica
  Peptide Sequence Number=SeqID_94861
catcactccgcgagcacgaccaggccaaccccacatacctacccatttccttgtgcggtcggagcgcagcgcggcggcggcggcagcgagagaggggaggggagccggcgggacccaggaaggctcgagggaggagccagctgcggggcggtgaagatgagcggcaacgggaagaaggtggtcgatatggcggtcaaggccggcaaggcgatcgactgggacggcatggccaagatgctcgtctccgaggaggcgcgcaaggagttcgccaccctccgccgcaccttcgaggacgtcaaccaccagctccagaccaagttctcccaggaaccccaaccgattgattgggagtactacagaaaaggaattggatctaaagtggtggatatgtacaaggaggcttatgaaagcattgagatccccaagtatgttgacaccgttactcctgagtacaagccaaagtttgatgctctggttgttgaactgaaggaggctgagaaagcgtctctgaaggagtcagaaaggatcgagaaggaaattgctgaactcagggaaatgaagaaaaagatcagcacaatgacagcggatgagtactttgagaagcaccctgaagtcaagcagaagtttgatgatgaaatccgtaacgattactggggatattgaagagcagaagagaacttttagctgccatttccatgtttgtgaagaaccaataatttttccgtgccctgatatgtataggggaaaccagccgtctcaaatctggtggtttcggtaacatgtgcatggggcttggtggaatgccttcagaaccgactgtgttaagctttcttgaaattccatctaaacacattttgtttaacctcaccattttctcgaggattgtcggctgtcttgcgaagattatgttatgtccttagctcctcttattcaagtagaaagga

SEQ ID NO: 28888 - DNA, 231 bp, Setaria italica
  Peptide Sequence Number=SeqID_94862
tccgacgtcgcgttccctccgccgccgccgcccgcccccgcggcacgcgccggcgagtcgacgagcaagaggaggacgacgaggagcgaaagaggcctgagcatcttcgggctcggcatttccgggagcggttggcgcgcgcccggctgcgagtggcggaggagcaggagctctgctccttctcggctgacgtcgggggcggagagtgagacaaggagtggtaaaatgggg

SEQ ID NO: 28889 - DNA, 393 bp, Setaria italica
  Peptide Sequence Number=SeqID_94863
tcatagataaagaacatcgctgagcaagctagcctgcttagctactgatgtgtctgaaatgaacttacagattcctggtccaaatggagtttagcatttacactatataactttctagttattcatcggtagaaggattatcttgcaaacattttataggactgtaagtccagtgagcgaagctccataatgatgtgtgtatttctgttacgctttgcaatatctgtaccataggactcctgctttggccatgaccaccttagcatcgtagactaataagggtagcaaaacctctgcttttatctggtggaacttgtcaagtgtctcgatggtcctgtcacgtttgtgcttacagtggtcattgcttcttatattgagttcttgaggcctgtg

SEQ ID NO: 28890 - DNA, 272 bp, Setaria italica
  misc_feature (256)..(272): n is a, c, g, or t
  Peptide Sequence Number=SeqID_94864
ttaaaatacatacatatacatgcataaataaagcaaggttggttggttcagagttgcttgtgctccattgtcgtcaacagctacatgtactgtagtgcttgtgtgtgattgatgccacttccatgtcgatatgatatggtgttgaggatgtgtttagtctgatcgtgtaaagtagcaagagaatgtgtgtgtgattattgctaagtgcagagacaccatcgagctttctttgtccagcccaactaaaaaaaaaaannnnnnnnnnnnnnnnn

SEQ ID NO: 28891 - DNA, 439 bp, Setaria italica
  Peptide Sequence Number=SeqID_94865
tttttttttacttacaattctatattgtgttgaccaaggacgtcatatggtgtcctacatatttacactgttttacaacaggaagttacaaccaatgcagaactctccataacaaagatattcctcccctaccaacaaagtgtaaaatgtgaaaaatgatcagaaaagtcctatatatatgcacgtcattgaatgcctaaacgtatttacagaatagttttgcccttttgcactgttcttctatctgacaactgaaaaaaagaaatgaacataatatccatgtgttcagtgcctaagagccccatacttatgcctaaacagaaaaaatttccttctgaaatgaccccttctgtgcagaaggagaaactatatatatgtcatgactcccgttctgacttagcaaaatcctggggctcactgctggcaaacgctaaccata

SEQ ID NO: 28892 - DNA, 527 bp, Setaria italica
  Peptide Sequence Number=SeqID_94866
acatttattgcttataatgagcatggctgttccaacattgtttatttcctctatttacatgttttcaaccttcctcttcaaccagaatttttggacatcagattctgtagtgtcgcaacatctaaacacgcatctccatcagctgatcatataggtttagggtttcaccacctaaaataacctgctccacaaaagaatcacggatcatgctgggtacctgagggattgttcgcttcaatgtcctgaattttccaacaaatgcatccaatatgcgccccaataaaacacgagcttcatccatgctttgctggtcaacacctttttgatatatgggctcaaccagattcagcatcaaacgagcagatgttgtgtgaattataagggttaaagaagaatcatgcatatttcgagagaacaaatagatgatccttgacaactgtggaagagaaatatcttctcgaacataatgcaccaattcagcaaggagagtgtaggcaagaggtcttaaagtttcaatgcaaactcga

SEQ ID NO: 28893 - DNA, 379 bp, Setaria italica
  misc_feature (370)..(370): n is a, c, g, or t
  Peptide Sequence Number=SeqID_94867
attagcaatcttaaagtatggaatattggaatatgctcaagtcatgataatatatttcagaacacaagcagttaaccgtctaggctgtatttgttatagggtaagtgtagccgtcttcaaggttcaatgatgatgagttgattaaatcaaaaggtaagcaaagatatggcatagcaataaattcaggagacaaagagaaatctagcagaggtaaatctagtgaaaactagaatcagtaattctggataaaggacagaacctaacacttcatggagaaaggcatcagaacaacggactttagccctgaactgaaataaacacatattgacacttcttggttgaaggtaattcaggttatgtatcaaatttntccacattt

SEQ ID NO: 28894 - DNA, 231 bp, Setaria italica
  Peptide Sequence Number=SeqID_94868
ctcaaggaacaaacaggacgatattaatagtcacaataggatcaatcgtacatcaagaatcttaacttcgcagtcaactgttgaacagcgcagtatcgatagtgatcaacagtccattaacagttcaagcattcaacgacagccacatgagctaagaattcctttttctattagtatcttatcatgtggtaagacctgactctagcttattgctacaagatggagtttgag

SEQ ID NO: 28895 - DNA, 313 bp, Setaria italica
  Peptide Sequence Number=SeqID_94869
tcgaacaatggcagaacagagctccacttaacggagcaggggaaaggaatccggacgaatcaggaaccggtcaaaaggaggcgatctttggttgggaaaagcggcctcagcggaactagctcaatctgaaaatggccttcctgaatgtcaaagaggggaggaattcgaggaccaccaaagatcggttgaaaacgaaaggggaaaagaatgtcagtggacagaaaattcttccaatatcttagctatcgacgctaggtgccccaaattacagaatctcaagcgaagcctttgcaaatcggaaaggaaagaaacg

SEQ ID NO: 28896 - DNA, 193 bp, Setaria italica
  Peptide Sequence Number=SeqID_94870
ggttggtatattcaaccggaacaaaagatttagtcccagttggaattaccaactgggacaaaggggtagcgtcggtaccaaattttttagcagttacaaccgggactaaagccccttccgtcggtagccttcggtgcatcatttttgatccgggactaaagacactttagtctcgggttcaaagtcaaccgga

SEQ ID NO: 28897 - DNA, 298 bp, Setaria italica
  Peptide Sequence Number=SeqID_94871
acttctcaaatctcaaaagatttagtgagaatgcttttgaaaagtatttaaggtaacaatctgaggaaacaaacaaaatgaagaataaagaagttacaaacatcaaacagaagacccaatcaaagaataagattcatgcacaaaatagagcagaaaacttaaaatgcattattgctaatggttcatactaagccatgtggttataagaacattatgaaattttcctgatatcttaaacacttactgtagccaagacaatttgcaagcatctccgtataccatggataaccaagtcgaa

SEQ ID NO: 28898 - DNA, 2465 bp, Setaria italica
  misc_feature (1)..(1): n is a, c, g, or t
  Peptide Sequence Number=SeqID_94872
ncggaacattatcaaaaccgctccacaggacgcagcaatcatcaaatatagcagcgacaatccccgtgccttcacgatttcaacaacttatagacaatctgtctggataataaaattattaattccaatatgttgagccatcatcagcccttctgtaaaagcataagcctccaccattggtgcgtctacaacgtgagcaagatatctttgagctgctgcaatgcaagcaccacttgtatctcttatcactactcctgtgcttccactccctgaatctacgttaaaaccagcatcaacattgatcatcagctttccttctggtggtttcttccatccttccctcatctttgtttttgacttcgttcttgccaacaaataattatgtgtcagtgttgcaatggataaggttgatctatttggagatcgaatttgattctcacgtacaaactgccttctcttgtaccagccacctgttagaattagctccactaatcccacgttattcagattcggctccctacctcctcttcggattatttcccctagcaacactgatccagaccgatcaatatgcaaggcttcttcaatcttgctccagatccctagacttttccaaacttcttttgctcgatcgcatgtgaatatcatatgtttaacatcttcgcaaccacaaggggatataggacatcccccaatgttcccaatgtgctacgcaaaagacactccacaggctaggcaaaaaaacgccagcaagccggcaacgaaggaaactatcgtacaacaacacgatctcatcctaacactgttctagccagcctcagggtacactctataagctcgatctcctgctggtaccgcttccccttgtcaacacccttatgtggttctgtcctaactgatggagccgcacgccaaagtttcagactggtgaaagcagccctgcttgggctcgtatccattttattgttttcgtcctctgacactccctcaaattttgtttttgtggaagcgaaccaattgagttcatcaaaagagctttcttgtttcaagaccttcaggacaaaagcaactcctagaaggaaactgtcgtatgtatgaatgacactcttgccgtcatgcccccgtctcagtagtttatccttgtgaagaagtctatggtccaccatgttgccaataagcaatggaacaatttggaagaagtccttcattgctttaagctcattgctctgaagcttctgtgaaatgtgggttaccaatattgcaaaggtttgaatcctctcatccaaagcttccctgtttcttgcctccgtatccagcatcttcccaacttcagcaatgtcatcgactaaacccactttcttgcaacttgcagaatagtcatagttggattttcttgcatatcttgagatgctgttggaatagcgggtacagccagcagcaagtattctcattaggcctagtgcgtttcctattctagcaacaacagcttgtacttgtccgaggaagtccagagtatgatctccaagtccatgcttcccaaaagcaacttttagttctccatggatagcagggtgtacactggacaccctggtgttctctaatcgttttaaatccttcaagaaatcaagttcagtgtcactttgaagcaatgcatccagatccaaaaacatcctgtccaaaaacatcaaaatggtgtccaaagcagcagaaatttgctgcaaactgcacattgcagttgacgatgcaatgtgttcaacacataaaactaagttttttcggccttgaccatccagatcattctcgataaacatctgtttggcaatgctgtaggagtatttctcacaaaatgaatcaagatgttggatagtatttctgaaatcaaaaccttgatccagagtatccacagtaagatggaaatcttccagttcaacgccatatttcagctgtcctagttcatgcatctctgcatatatcttattatcatagttaggcatcacagagtaagtatagaacgcagaatttagatggttttccacaagcaatttaacatcaacaaacttgaaaggtaatcgcaagggcttcattcgtaagtaccatgaaagattacgaaccccagtctttgttgggttcacaacaacagctcctttcaaacgagtagaatgaacatgaagtcggagatcagtctcaatgtccctgcacaaaggagcaacaacctcctccctcaaagcattctcaatgtcttcctcataactctgaagagcaactggtcccatgttcccaagttcgaggagtgacgttccatcagaaaatgcatcgacgatattttgtagccaagacaatttgcaagcatctccgtataccatggataaccaagtcgaaagcatctcttttatccaatacaagaagcaacatttttgttctttcttcaatcagagactggaaatttgaaagaactctgaactttg

SEQ ID NO: 28899 - DNA, 388 bp, Setaria italica
  Peptide Sequence Number=SeqID_94873
ctgatttcttgcggaacgccgagacgcccttgagcttcatgctctgctgcgtcttgatgagccgccggcgtgacgcgaggaagctccggagcggcaccgccggcaagtgcgtgtggccgttgagggagcagtaggtgtaggggcacacccgcagcgccgcggggccctcggcgtcggtggcgcccggcgcgaggtcgagcgcgtcggggaatttggcctccttcatagtcgatgagcacgtggcgcggcccaggccggagccggagccgggcgcctcctccgggaacagcacctttccccttgtcagaacccgcaccgccggtctcctcgcgggcgacgccgatgccgacaccgtcgccgccgtcatccgcctcgccggcgacgccga

SEQ ID NO: 28900 - DNA, 954 bp, Setaria italica
  misc_feature (1)..(31): n is a, c, g, or t
  Peptide Sequence Number=SeqID_94874
nnnnnnnnnnnnnnnnnnnnnnnnnnnnnnntttttttttttatgtttatgtgcgcgcgtatattattaaagaaagcaagagattattaaaaatatattacacccacctcaattttttacagcaacttcccaacaaaattgttcttcatcacttgcccctctcctatcaatcatgttcttagcaagatctccaatttttctctctctattcttccttatgttgcgcaatttgcaaattactgaacaacatcatcatcatcaagtatgctcaattactacaagtcttgaagcagggacacatatacaacatctcatccacgcgaatggacgtatatactagctaagagagttttgactgatttttcgcttgcacctcgagcgcaagaacgaactataaccatccatggatatacatatacctaatcaatctcgaccaccatcagttgtagccggccggcggccgcggcttctggtgctggatggtgagccgcgccgggagcggcctgcccgtgccggacccgccgcagctgcggcagggcatcctgcccgacccggcgcaggtccggcagccggagtcgccgtcggaccagcggttgcagaggcactcgacccggccagagccgccgcacgtggcgcagcgtgggcgcgcgtcccacctggatgccgccgggatcccgtcccccagcgaccggttcgccatcgccaggcccgccagcatgcccagccccgccgacgcgatcaccaccggcgccaccatcctcgaacctcaaaaccgtcgatctctggatgtggaacggaaggaaggggtaaagaggaggagtgttttccttggctttcttgcgtatataccggctaaccggcgactctcgcctgtgtggagaggaaaagatttggggtcgtgtgtggcgtacggttttttggccggaggcgacggcgattctgtgtaggtaaagg

SEQ ID NO: 28901 - DNA, 1307 bp, Setaria italica
  Peptide Sequence Number=SeqID_94875
gccgattttaccctttcggtctccctcctctcacatcccatcaccagcggaattttacaagtcgcggcggcgcggcgctgccggccggcgcccgtctctctcggtggccggcttctagtagtgcggaggcccgaagcagccgtgctcgtcgcagtgcggcggcgggcggtgcaggaaggcgaggcactggtcgccggggcgctggtccggccggccggcgatgcagttctggcggtcgtcgacgcggcggatgtcgaggcaccgccgcggctcggtgcagaagtagttgtacgagtacgtgaagttcctgaggctgggcagcgcgcagatgccctccgggatgtgtccccacagctcgttgtgcgcgacgtcgagctgctcgagcttgtgcatcccggccatggactccggcagcatcccctggagctggttgaagctgaggtcgagcacggtgagctcacggagccaccccacctcctgcgggatgcaggatcggaggccggagtttaggatgacgagctcgttgagcgtgccagccatgcggccgacgctctgggggatgcagccacggaggcggatgttggcgagcacgacgaccgacgccggcgagttgccgaagttctccggcaactcgaagtcgaagtggttgtcgttgaggaacagcgcgtcgaggggcttgtcgaagatggccggcggcacgggcccgcagaggttgttgaaccggaggtcgacgtacttgacgttgggaaggcagaggatgtgctgcgggaacccgccggacaggcggttgttgctgacgtcgagctcgtggaggaggtgcagcttggggagcgactccggcaggccgccggcgaagcggttggagttgaggtggagcagcgcgaggtcggagagcatgccgagctcctcggggaacgtgcccgccaggtcgccgtggttgaggtcgaggccggcgacggtgagcgcgtgcgggtcgtcgggcgccgccgcgcagaacacgccgaagtaggcgcacacgtcggggccggcaccacccgcgcgtcaggttcttggggtcgtcggtgatggcgcgcttcagcgcctgcagcgccacgtacgcgcgctgcagccgcgggttgttcgccgccgtctgcttccccggctgcggcgcctgctggccggagaccgccgcaaccgccgacgagaggaggagcgccaggaccacaagcgccggcgaggccttcctcttcatcccgtgatgcattgccatttgccaagctctctccctcgatttcgcagcaagccgtgtgcgcctacttcggcgtgtt

SEQ ID NO: 28902 - DNA, 388 bp, Setaria italica
  Peptide Sequence Number=SeqID_94876
ccatccgcgtgatcacgttcatgctgagcgtggacaggtggtcccggttgaggcgcaccggcacggcggcggcgccccccgacgccgcggcgaagagaccgcgcacgagcgagcgcacctcgtcagcgcggacgtgctcgaacgacgcgatccgaccggggctgaacagctgggtggcgcagatccggcgcgcgtggcgccagtaggcgccgtagggggaccacgtgatgtcggcgtagttgtaggtggtgtgcttgccggcggccgtcctggggcggtcgaggaagagcaggtcgtgggtcttgaggaacagcctggccatgtcgaccgacgagccgacgacgacggagtaggagccgaagcggaggtgcacgagctcgccgtactt

SEQ ID NO: 28903 - DNA, 616 bp, Setaria italica
  Peptide Sequence Number=SeqID_94877
gaatattgttcttgtccaagtcgtatgtgaattctgccagggcagccatcttggcagcatgacttgattgggtctcaccggacgtctcatcataccatccagacacccggcaatcttttggagctgtggacctatcatatgccacatccttggagacatgctcgagtgtcactgcctcagggattatacctgatttaagcttgatctccacaaacccgctgctgccctgcacagcaaagcactgtccaggctccccaaagctcggctgaatcatcttctgagggtcaggattacctccacccagcaacccactgaagataccacgtttaggctcgtagggcaccgagtggtggacaactctcccccacccgatgctacagcgtagtcaaccctgccgatcccatctgcggcatgcttctcaatctccctcatggcaatctccctggcaagggcgcggacctggtccagatcgacctcactcccggaacccgaggccaggccgcccttcacctcctcccagaacttctcgaactcgtccttccggaggaactccatccgactgagccccgccagcgcgtcgccgagctcgccggccctcgcgtcgagacggttgagc

SEQ ID NO: 28904 - DNA, 995 bp, Setaria italica
  Peptide Sequence Number=SeqID_94878
gagtagaatcattttttttctgataacttcgcacactcagcctacaaattgcggcaagccgccaacccatattacaggacacaaaaagcttttggacatccatatccatttaatgcacacactaaacatctgccacatgccattggactaaagttacccagcaaacaattgttagatttacagtttgtacatgacagcatcctagggctaaaccagaatgggtaaaaagagcaagccctaaagcgtactgaaaacctttccccactgctctcaggcccgaaaacctgcagtgcctggagagacaggctcgcggccatgcacccggaggcggtagatgcacgtcagcagtgagcttccgtggttcgaagtgaaatccaacctgatcatattgatcacgcctacatctggggctgtaacatcaaatgtctgaatattgttcttgtccaagtcgtatgtgaattctgccagggcagccatcttggcagcatgacttgattgggtctcaccggacgtctcatcataccatccagacacccggcaatcttttggagctgtggacctatcatatgccacatcctgcatgccacacacctagtagtcagtcatgtaccaaggaaatattcttactggaacaaaatgaaagtactattgaggatttaaatgatgcccggtagacagaaaacacattttcctgtgaggttgaacatatcttgcatacccaatagtcatgtttcgctgaagtgggtttggttttacctacagctgaatccccataagtactaatcaatacatgggtaatgagttttccctttttggttaagatagtatctcaaacaccagcaatttaccaaccaaacctgtgggcccaagcaatgtcatcttcaatcaaacaaatagggaagaaattgcttgcacagttatttgtctcttgatactaattgctattagtcatagtaacacttaaacagggacacaaaagaaacggtttattcaga

SEQ ID NO: 28905 - DNA, 385 bp, Setaria italica
  Peptide Sequence Number=SeqID_94879
atgctaaagcttccactataccaatggatctaaattgacccacaaagtcatctgtgacagacaataacatattgtgtgcccattccataaaactgctgaaagcatttgccatgtcaggacgagtcaagagccttgcaagcaacaatcctgaaatccttctcattggaccagaactggagagataatccttacagatgtccaatatctttgtcacaagtggaacaacctcagtcccatccacactatcagcagaagcaatgcttgtatccacagtggagatgtcaaatgggatcaggaccagtatataaagccacaatagaacaacacatttagtctccatttcccctgtgctctcttgcctaagagcagtcgtcgaactaattgt

SEQ ID NO: 28906 - DNA, 274 bp, Setaria italica
  Peptide Sequence Number=SeqID_94880
cgtcctgttgcctccgccgcccaccggcgatctcgccgccgcgacgctccgctgccgcggccgccagtttcctaacatccgtgcgtccctaaattcaactcttaccttcgtgttctacagcgcctccaccctgcgcagcgggcgccacctcgcgtccgattgctatgcccgcctcggcgtctcctcccgtcgagcctgcgccgccgccgccgcctgctccccctccggcttctcccgcccctgcggttcgcgacgcttcctctctcttctggtt

SEQ ID NO: 28907 - DNA, 463 bp, Setaria italica
  misc_feature (224)..(224): n is a, c, g, or t
  Peptide Sequence Number=SeqID_94881
tttacagaatatttgaattcactgagatgaactactacaacgaacgtctgagactgcacagagcaaacacgaacagactgaagaagccagctcttcatatagatatggtctcgctacgtttacaacaatgatggatgcagagagagcaatgcccaagaaccgtgccgccgccgccggccggccggccggccgcgaagctaagactttcagaggctctgcaggancttgagggtctcgccaatgtgcttctcgggctggaactggttgttgtagatgtactggacgacgccgttcttgtcgagcacgtaggtctgccgcccgggcagcgtcccgaagaggtcccccggtacgccccactccttgcgcacgcggttcccctcgtcggccaagacaagacgtagaaacggacaagaccggtaacttactagacgacgaaacgaccttagtagacgaacgaccggga

SEQ ID NO: 28908 - DNA, 266 bp, Setaria italica
  Peptide Sequence Number=SeqID_94882
ttagttagtaattcgtgagacgaagagcgagagcaatgcccaagaaccgtgccgccgccgccggccggccggccggccgcgaagctaagactttcagaggctctgcaggatcttgagggtctcgccaatgtgcttctcgggctggaactggttgttgtagatgtactggacgacgccgttcttgtcgagcacgtaggtctgccgcccgggcagcgtccagtacatctacaacaaccagttccagaggctctgcaggatcttgaggg

SEQ ID NO: 28909 - DNA, 808 bp, Setaria italica
  Peptide Sequence Number=SeqID_94883
cttcagaagtgcagtttctactgaattagatgaaattgcacatgtgatgcatgcacatacagaatatttgaattcactgagatgaactactacaacgaacgtctgagactgcacagagcaaacacgaacagactggcctgtcaaacgggccgagcctgatagactgaagaagccagctcttcatatagatatggtctcgctacgtttacaacaatgatggatgcagagagagcaatgcccaagaaccgtgccgccgccgccggccggccggccggccgcgaagctaagactttcagaggctctgcaggatcttgagggtctcgccaatgtgcttctcgggctggaactggttgttgtagatgtactggacgacgccgttcttgtcgagcacgtaggtctgccgcccgggcagcgtcccgaagaggtcccccggtacgccccactccttgcgcacgcggttcccctcgtcggccagcagcgtgaacggcagccggtacttctgcgcgaacgccttgtgcgacgccgggtcgtcgccgctgatgccgatcacctccgcccccgccttcttgtacttctcgtacgagtcacggaacgcgcacgcctgcttggtgcatccgggcgtctcgtcggcggggtagaagtagacgacgaccggcttgcccttgaacttgttcagcgacacgggcttgccgttctggtccttgagggtgaagttgggcggcacgctgcccttggtcaccttgccgcatacgatggccgtggacgacgccgcgcggcgccaccgcggggccggcgcggcggacgtggc

SEQ ID NO: 28910 - DNA, 269 bp, Setaria italica
  Peptide Sequence Number=SeqID_94884
aatatgaaaagctaaagaacaaccaacattcttgttcatgtagaaattgttgcatcttgtagcataaagtttagctgttaggtcttgtaattcaaccaaagatatcggttgctggtccctcagttttggtcatcttcactgtggttgaagcctgatgcacttccagtgaactattagtcatcaggtttactgactccaccgaattttcctgaaagttggacaaaaactcatcctgtacttggtgtttctgacttgtcccgttgcacact

SEQ ID NO: 28911 - DNA, 238 bp, Setaria italica
  Peptide Sequence Number=SeqID_94885
gcgtctgcagcttgccgcccgcgcagagctccggcggcagcgtgccggtgagcttgttcgacgagaggtcgagcagctggaggcggccgttgcggccgaggcggcgtggcacaccgccggtgaagttgttctcccacagctgcagcacctcgaggctgggcatgtcgccgacgaagtcggggatgtcgccgcgcagcttgttccggaacaggttgagcagcgtcaggttcttgagctc

SEQ ID NO: 28912 - DNA, 274 bp, Setaria italica
  Peptide Sequence Number=SeqID_94886
cctcactgacaaccctaaagttgtcgaaacgcttaaggaggagcacgaaataatactaaagaaacgagaagacaagaattctggattcacatgggaggaatacaagtccttgacattcactactcaggtaatgaacgagattactcgaatgggtaacatcgcacctggggattttcaggaaaaccctgaaagacgtgcaagtgaatggctatacaattccagcggggtggctagtgatgattagccccatgaccgtccatctaaacccttaaaa

SEQ ID NO: 28913 - DNA, 205 bp, Setaria italica
  Peptide Sequence Number=SeqID_94887
agcatccggactttcctcctctttaactactgaacgggatggggggactgtggcagccagatcctcatccacatttgcattcagcagaacattagctgcattcggactgattatatcttctataggttcttcgatgttaacacttgcacactttccgagcagttgcctgataaaattgcagggctggaagttaatgttctgctga

SEQ ID NO: 28914 - DNA, 460 bp, Setaria italica
  misc_feature (365)..(365): n is a, c, g, or t
  misc_feature (439)..(439): n is a, c, g, or t
  Peptide Sequence Number=SeqID_94888
tttttcctccctgatgagattcagaaatatttaaaaagccctgtgaaggaaaaggagatttttcttgcttctggtaatggtattgggcttgcagatatcaacccgctggaagctgttgctggaaaatgtactgttatatgcatttcaaaggacgagaggaatcgccaaccttcccctcaggaacaagcaatggctgattatatcttctataggttcttcgatgttaacacttgcacactttccgagcagttgcctgataaaattgcagggctggaagttaatgttctgctgaatccaaaagatgagctagtcatatccagtccgaatgcagctaatgttctgctgaatgcaaatgtggatgaggntactggctgccacagtccccccatcccgttcagtagttaaagaggaggaaagtccggatgctgcagttcccttntcagccagcagttaggagtga

SEQ ID NO: 28915 - DNA, 3570 bp, Setaria italica
  Peptide Sequence Number=SeqID_94889
agaatgcatgcccatgatagaagatagacaaggatgcttctactctgaccagcaatgtgaagccgataaacaattgcatactgaaagaagaaaaatcgaaggtctaatatgatttccaagatactgccccatagaccagttgtccggagatgatcagtttcctcctcccaccacgtctcccagctttgatctgacttgactgagatcccaccccggaaccaaatccagtttagaaaatcctcaaagtcattaaaattcttcagccaatctaaaccagaaggattaaaaatgaagggagcaagaatccatgaagacacaagaaaccaacttgaaattgtcagcagaatatacaccagcgtattcccagaggcactgccataagatgcataaactgtcaatatcacaccaagctctattgctttgatgaaatggctgcgagcatagagcctatagttctcagcaaacttcttatgctccacaacaaaacctcggccagtagcccgatacttcgcacctccatgaaggattgtcctcccataatagtgtgtcttagttcccatggagaaggtgtagaaaacagatgcaaactgtagttgcattttcatgaaatcccacacagcagtgaggaaaccatgctcaagtgagttttcaataatcatgggtaaagctgtgaacaggccaagctgtatgacgaactgctgattgaggacagctcccagggctgcattgttagtagaggaagtgttcttgctgatgtagtcctcgagcccactgagtgcaaggtaaaagcgcccccaaacaaatgcatagacagtaagcacaaccatcattgtgttgaaataaaatccgacagttgtatagaagaaagaaagcatccggaagaaatccaatcggtggcccagcctgtaaacatctcggctcaaagtttgctcaccattgccactagcaactttggcttcaaacatagagacctggttgagccccacgtctctacctttaccaacctgaatatactcatggtgtgtaacattgccaccacggagggtacagttgaaaccagcgaatatgtcctcactgatgttgatcacttttgatgctttactgataccacctcgccccaagaaccaaaggcgatcaaagacgtcggggtggccataatgcattctgactttaagtggatcagccagaacacgctgccccagagtgacaaaacttgtttcctgggcagacatgaaccaagcaagagaagaaacagaacccgtgaacacatgttcccgaactccaagaattttgggcttgcgaattccataataacgattgaactcttctagcaggtttctcatctttagagcctcttcaaagtaattatcttggttcatatcaatcgtttgaaccgcatcaccccttgtgaagattagtgcatgattctgattttccggttttccttcaccaagctttaactctccaggcaacttaaccctgtaaatttcaacctcccgctgcagtagctgatcgtatttcacaagaacagagaagtactctgtttcaccaccatgttctgcctttcgtcaacataggcaacacgtaatgcttaataatttttcattagctccaatatttcaaaagcacgggggtcattcttagctttctgctgaccatatatctggcatgcaactacatatgtgtatttcatgaggacagtcccatactcacttcctttaaacaaggagctcacactgctgcttgctctgctcaatgcacgtgaggaagatgccctgctgtaatagcctgacccaccagcaaccccatcatgcctcgaggatccaattcttgaagaacccatagtagctagctcccttgacccagcctttaagtcatgttcagaggcggaatccagaaaggtcagcattttgagagcttcgtagtagtacatcatgcccctcactgtacgtgataatgtctgccccctgtatgagacccagtgtcgaagatctctcagcctttccttctcgctgtacagctccttaatatcagacattccctcacgcttcattctctccacgaagtactcccactcatctgggtaaatctgttgtagatagtataagattgagatgccatcttcgttctccttatagagctggtccttgctgtacaacacctcctcattataataaggagtcaagacactgaaagccatcatcttctccacttgggttgccctgggtatgttcataaacaatgaattactgaaaaaggcaatccttcgacgagcttccaggttcattggcacattgatcatagagtccctggaggtcaggatggtgtgcatgcgcctcacttgcttatagaaggtagcgttctcctctccaggcagcacaactgcatccacaaagagaaggctggtgggccttgactgtgcaaggccttcatttctcagttgttccatgctcctcttctcagcctggaaatcacgaatgacaacgtcatagagagtctgcaaggcattgactatcttggtaaaatccttggtgggtttgagaagtaggctcaacagagctacaagccttgtatggacattatgcagctcagtcatcttatactccacagtgaacttctctgttgccatggatccatcaaaatcgttgaacaattgtgtaacaatgccatgttcctcagtcccctccttgatgatctcaagcagcaagtgttttgcactatcatagacctcaaccactgcacaacgacgataatcgttcttgcagatcttcctccatagcctgcgatcaggtcctttgacctcctttgcctgaccaagtgcaagagacagctcattacagagcaagaaacaaggccagcggattacacgcacattccacagctcaggcggcagctcaaggagctcaacctcacgatcactaacaatgtcctcctcccggaacttgcttattatttcattccaaacaagtgcaaatcgccgtgcctccacctgatttgactcaatcttccggaatgatcggctgaaaccataccttagctgtacccgctgccagaaattgcgaagccggttgggcaagaagctctcattcacctgctgctcctctggcatgatgttgaatgacatggcacttgcaaagaactggaaccgaagccgcagctgtttcatgtccctgatctcccccaagtgtgcaaaaagccccacaagtgcaccagtcagagaagaaaagatagcataccaaatctggatatccatgaggtagatcaacaccactggtaaccagagaacaaacactgcaaatcgattgctttggccaaagaactcatgccaagtgtacttgattccactcagcttgtatatctcttttgtgggttttacaagcggcctaatttggagaaaatagctgaaggcaaacttcacggcaagcaaaagcacccaaaagaaggagtacttaacattgtcaatggtgctctcacgtaatcctcggccaacaaagctgcggctatggaaccaccaggtgagggcgtaacagattttccagttggtcttctccaatgcattccgcacccagg

SEQ ID NO: 28916 - DNA, 898 bp, Setaria italica
  Peptide Sequence Number=SeqID_94890
cagaaatttcatgtgtacatcaagtcaagaagaatcagagataaatagatcgcctgtacagggaactagcatccatctactctacgccagcaagcttgtctaaaccatatgtcatgaagactaactaatcctccagaataacgaagcagctcactttgagaaatggtcagttggaaggtgaactcagctcaaaacgcatgtgccttttttccagtaatgatttgggaaatatgaagtcccctgctgaaggcttcattgaacaggatccttgtttgcatttcctgaagcccaggcaaccatgacaacacagccacaggtgcaataacaattactccgaacaatatatcgtacaaacgtgctacagtcaccacagttttccacactatctcagacctcctcagatatggcttgaataccagagcaatagatatgattccccagccagttggcagaaaagccaaaagactagtaaaagtatcaacaaactgaaactttgtgaattttaacagcacaacaatagcagccactgtaccaccaacaatgattgcctggacaagacgataccgtatgtgctttttgctgaatatctgtctcgaaaataagccactgtcaccagagccacaaaagctaggagaatgcatgcccatgatagaagatagacaaggatgcttctactctgaccagcaatgtgaagccgataaacaattgcatactgaaagaagaaaaatcgaaggtctaatatgatttccaagatactgccccatagaccagttgtccggagatgatcagtttcctcctcccaccacgtctcccagctttgatctgacttgactgagactcccaccccggaaccagtttagaaaatcaaacaaagtttttaaccaaacaaactaaataa

SEQ ID NO: 28917 - DNA, 660 bp, Setaria italica
  Peptide Sequence Number=SeqID_94891
aagaactctttaattgtatttgcaattcatgattttccaaagaaaagcaataacaatcaagactagaagggcatggaacagctgaggcaagagaggctagcgccatcaagtccacaggaatccagtctcctctttgaggatgtcataaaatgcccaagcaatgatgatattagcttctataaacaggtgaggcgcctccatacaattctcacatccagggattctatgaacaatgtcccaaagaatcctgaggctcaacggcgtataactttcttcagcaactctctattcatgaatatgcctcgtgctccaacagttgagaagatgatggcattcagtgttttaaccccatactacaatgaggatgtgatgtacaacagggaccagcttcgtcgcgagaatgaagatggtgtctcaattttgttttatctccaaaagatctatgaagatgattgggggaacttcttagaacgtatgcggagggagggaatgactgatgatgatgagatttggactgtaaaatatcaggagctccgactttgggcctcatatagaggccagaccttagcacggactgttaggggaatgatgtactaccacagggctctgaagatgcttgcttttcttgatactgcctccgaggtagacattacagagggg

SEQ ID NO: 28918 - DNA, 3120 bp, Setaria italica
  Peptide Sequence Number=SeqID_94892
ttttttttttttttttggttcacggaaagaaacttcggcataaatagggtgcactcatgatttaagttttgcacagccttactaaaaatctaacaaaactctggagctatgaatatgggaccgaatcaacatctcattacactcattatatcatccctaccacagaaattcatgtgtacatcaagtcaagaagaatcagagataaatagatcgcctgtacagggaactagcatccatctactctacgccagcaagcttgtctaaaccatatgtcatgaagactaactaatcctccagaataacgaagcagctcactttgagaaatggtcagttggaaggtgaactcagctcaaaacgcatgtgccttttttagccggttcttccagcaaccttttataccttcagccgagcattatcatccacacaccattttctggcacaaaagatggaaccatctagcgaggccaacagataattcaccagagctcaccggtggcgcagcaacagaatcagctacacacaactagctctaccaatgtacaaaaaaatgaagacctacattgcctaaagcgcaaatctggacacctaaactagatagctaaagctaacaaaggagttcaatagctatatcagtaaagcagaaagcccttccacattcaactgggaagctgtacataggagatggagcactgctacaccgcaagtccgcaacaatccggttagaaacctcaagctgtattcgcttttttgccagtaagaatgcgagatatctggaggcccctgctgaatccttcattgaaaagtacccttgtctgcatttcttgaaatcccggcaaccaggacagcaacgcaactggcgccataacgaacaccccaagcagtatctcatatagacgtgccacagaaataacactgttccacactacagtggattcaatgaatggccgaatcacttgagcaattgaaatcaagccccaaccagtaggaataaatgccaaaagactagtgaagatgtcaacaatttcaaattttgtgaacttcagaaatagtatcagcactagcaccgccagaatgatgaccgcagtttggacaacccggtagtaaaggtgctgctttgcagcatacttgtctcgagtataggacattaggacaaatacaccaaaaatcacagccacacatatccaggaaagcagataaacagcaatacttctgctatcatttgctatcttcagctggtatacaactccatactggaaaaagaagtacctgagatccaacagtatttccaaaatcttcccccaaagaccagtggtccgtagatgatcttgctcctcaaaccaccacacttcccagctctgatcaggcttagaaaagagactaccaggataccagatccagttcatgaaatcatcaaaatcatacactgttttcaaccaatcaaaacccaatgggttaaaagcaaatggagccataatccatgataccaccagaaaccagctagatatattcatgactatgtaaacaagtgtattcctggcaataacactgtgagcagcatacacagtcaatattattccaagttctattgcctttataaagtggctcctagcataaagcctgtaattttcagcaaaactcttgtgttgcacaacaaaaccacgaccagtagcacggtactttgccccaccgtgaagtattgtccggccatagtaatggctcttagttcccatggaaaatgtgtagaacagagatgaaaaattcatttgcattgtgaaaaaatcccagatagcaggtaggaaaccttgttcaagagagttttctataatcattggcaaggcagtgaagaggccaatctgtatgatgaattgctgattaagcacagtacccagggctttgttgttggttgaattagcactaccctgaataccagcctcaagaccactgagagctagatacaatcgtccccaaacaaatgtgtaaactgtcaagaccaccagcattgtgttgaagtagaaccctactgttgtataaaacacagagagcatccggaagaagtccagtctatgaccaagcctgtagacatccctactaagggtctgctcaccattgccactggaaacctttgcttcaaacattgatatctgattgaggccaacatcacgacccttaccaacctgaatatactcatggtgactaacattgccaccacgcagggtacagttgaaaccagcgaatatgtcctcgctgatattgatcactcttgatgccttacttaagccaccccgagtcaaaaaccaaaggcggtcaaatacatcaggatgcccataatgcatccgaaccttcaatggattagctaggacccgctggccaagggtaacaaagcttgtctcctgtgcagacatgaaccaagcaagtgaagagacagatccagtgaaaacatgttcccgaactcccagaagtgttggttttctgctcccatgataataatcgtactgctctaacaggttacgcattttaagggcctcctcaaagtaattatcctggttcatgtcaatcgtttgaactgcatcacctcttgtgaatataatagcatgattctggttttcaggttttccttccccaagcttaagtggacccggtaatctaatccggtatatctcaacctccctctgtaaaccctggtcaaacttcaccaggacagaatagtattgagtatagccctggtgatggacctcatcaacataagcaactcggagtgcctcatttttcttcatgagattcaaaatatcttcagcacgttgatctctagcaattttctggtttccatatatctggcaagcgagcacataggtgtacttcatgagagcagcaccatcttcctgccctttaaacaattggcttacagtactggttcctctgtctaacctcctttgtggtcgccgctgcaaaccaccattcatgggatacatgtcattctcatgcctaactgaaccaaaggatgcaagatgttttgtcccctctgtaatgtctacctcggaggcagtatcaagagaggctagcgccatcaagtccacaggaatccagtctcctctttgaggatgtcaataaaaatgacccaaa

SEQ ID NO: 28919 - DNA, 258 bp, Setaria italica
  Peptide Sequence Number=SeqID_94893
cctcctccttccggaccttctcggcgtcccggtcctgccaagccttttgccgctcgcgccggatgcgctggacggtcttctgaagggcttcatgctcccccttcagccgtgcgagctcctcggcgtcgtggcgggccttttcggcagcggcctggaactcctcgcggtcgcagcgggccctctcggcgacgacctggagcttggcctccgcccgccgcgcatcctcctgagccgcttgctcgcgcctctgcagattcg

SEQ ID NO: 28920 - DNA, 222 bp, Setaria italica
  Peptide Sequence Number=SeqID_94894
gaggatctgtgatgccagcgtagagaggtcgtagagcggggagtaggggccaggctgtcggagcttgcgaacgccggagcgtggttttgattggacggcagcaggctcgatttggctttcaaggacttcttccgattcggttgaggtgcggcacaagcaaggcaggctctggtggagagaaaggggagcgatggggtgcgattgtgcaaagccaaagtctag

SEQ ID NO: 28921 - DNA, 310 bp, Setaria italica
  misc_feature (279)..(279): n is a, c, g, or t
  Peptide Sequence Number=SeqID_94895
agggccggatcatccactcccggcgctccgacgaccgggtcgctgggacgagggtcaccgacagggccgtgccgttggtgcggacgtcgccgtcgacttcgcaggtgtcggagcggccctccattttgcactccaccttgccattattcttcacctatttcactgggagctttgatattatgcattatctcttgtagctccgtgatgacaactgtttcaccgggagctttgatattatccatgatctcttgcgcctccgtgatgacaacatggggggcnctgacggcgaaatgctgggcgacgagataga

SEQ ID NO: 28922 - DNA, 551 bp, Setaria italica
  Peptide Sequence Number=SeqID_94896
ttgcagatgagagtctggaagtaggattccatggagtaagctgtgttggcaaagtacatcagcagtttgcggggtaggttgtcccaaccatgcacacagtgttcagtgaagctcctgctcagaattaaccacggagaacctgtgaatatctggaatgcatcaggcattcgtcttgtttcttttgaaaggatgggttcagtgtttctgtccatatatagacttgggtcaacaataatcttttcaaacctttcatgccagcagaactcactctttccatcccagatcacttgtgtgatcaataaagttgaggtcccttggaacagaagaaaaagcataaaggagatcgtcctgcgtgacgagcgggtagtcctctgcactgagcgtgacgagccagtcccagtggggccctcgcctaaggaggacggcgcccgtgcaacacggcggcgagcggccgaggacccggtccggtcgaccgcgtatgcgtccccgatcgacgtcgacgttccggaactccctccacgcgggctcctctgtcctcaccgcctccgcca

SEQ ID NO: 28923 - DNA, 549 bp, Setaria italica
  Peptide Sequence Number=SeqID_94897
gttgcgtcctttggatgtttatgttgcgccgcagcatcgccttctttgcatcctccaattcagatgtcttcactttaagggcggcttttgagcacacaagctcatgttgcaacgctttcaacttgtttcttccaagattaagctccgccatcatctgggaattggtccgcgcgagctcccagttggcgagccgcagcttctgaatctcagtcccgctcaactgtatgatctcgtctctctccgcgatgaggctcacgagatctgcgttctccttgactagctgcgcgaacctctcaacgccggccgcgccggcggctgctgcagggcacgccgactgatcgggcacctcggccagctcgcgcctgctcaggttggtgatgtcgcagagcgtcttcctcctcgcggcccttgtcttcagagccgacgtcggggccgccgccagcgccttcttggccggcgaggccgccgggggcgagacggctggctggggcgggggtacgggtgcctcgacctccattggctgtctgtcaagaaggaggcacaccaagc

SEQ ID NO: 28924 - DNA, 370 bp, Setaria italica
  Peptide Sequence Number=SeqID_94898
ctcatggctggttgtagatttcacaagaatgtggagttggctgagtatgttgtcaagcattggattttgttggaacctgacaaaagtggtgcctatgtacttctagctaacatttatgctgcttcaggtaggcacaattctgcgagggaaattaggcacctaatgcgtgaaaagggagttgacaagacacctggttgtagcactgtggagatgaaaggaattattcatcagttcattgttggagatctgtctcatccacgcataaaagatattttggcaaaatggcatgaaattgatagtagaattaggttagaggagggttacatcccagataagaaaggaagttttgcttgacattgaagaagaggag

SEQ ID NO: 28925 - DNA, 193 bp, Setaria italica
  Peptide Sequence Number=SeqID_94899
gcgtaatcgagggattcccaaatcaccggaggtgatcgtgccgtgcacgcgcgcggggggttagggcttgtctgcccccggaaatggacgccgctgactccggcgggggcggcgcggcggatgccggcgagcccatctgggactggggcaacctccttgacttcgtcgtcgacggtgacgactcgttggtcct

SEQ ID NO: 28926 - DNA, 374 bp, Setaria italica
  Peptide Sequence Number=SeqID_94900
cccgaccgcgatgagcacgtacctgacgtagtgccaccggtggtcgtcgcctccgccgccgacgccggagggcggcggcggcggcccgtgcccgtgcatccctcctccctggttcctccgacccctatgcgcggagggagaaggcgagggcgggaagtggataggagggcacgctgggatcggggaggacgccggcgccggggaaggggcggggccgtgatagggggagctgggaaccggcggcgacggcggcgtgcagacgtacccgtcgcattccacggcgcccgggccgtttaccgggaagaggctccggcggtgaggcctcatcgccggggatcgatcgcgtcagatcggccgcggcggcggcatctgtg

SEQ ID NO: 28927 - DNA, 626 bp, Setaria italica
  Peptide Sequence Number=SeqID_94901
tctaatgatgactaaaacgtgctttaattagtaacacattatcaaatctttgaaactgtagtacttcaccaattaagttataaagaggtttcctgatgttggaacaatgaattatcttttatcatacaagctctattatgaatgacctctttctatatttcagtttgctttacattattcatggtcaactgaagcacgtgctagacaagccttggcaaatgtgtctgcattacttcgtcctggaggcatttttattgggacaatgcctgatgctaatgtcattatcaaaaggcttcgagaatgtatgttgctgtaaacaaaccaacatcttatattggttaactttatcacactatacttgctgtaagctgtgtgattaagtatataaactcttctgctatgctcagctgaagggttggaatttgggaacagtgtttactgggttagctttggtgaggagtatgctgaaaaggtaaatggcttaaatattttataacattttttggtttagaaactgatgcatttgtttgttttgatgatggtatagaaattccctgcatccaggccttttggtatcaagtacaagtttcacttagaggatgctgttgattgtccagaatgggttg

SEQ ID NO: 28928 - DNA, 975 bp, Setaria italica
  misc_feature (922)..(975): n is a, c, g, or t
  Peptide Sequence Number=SeqID_94902
aaggaagaagttcagttttccagcacgacttatttgcactgattgttatgaggctcgcctggatgaatatttatctgaggatgccccatttgatatatgtagctgtcagtttgctttacattattcatggtcaactgaagcacgtgctagacaagccttggcaaatgtgtctgcattacttcgtcctggaggcatttttattgggacaatgcctgatgctaatgtcattatcaaaaggcttcgagaatctgaagggttggaatttgggaacagtgtttactgggttagctttggtgaggagtatgctgaaaagaaattccctgcatccaggccttttggtatcaagtacaagtttcacttagaggatgctgttgattgtccagaatgggttgttccattccatctcttcaaattactggcagaggagtatggccttgagctggttctgatgaagaacttccatgaatttgtacatgagtacttgcaaaaggcagagtttactgaactgatgcggaggctaggtgcccttggtgatggaaggcatgaccaaagtactctgtcacaggatgagtgggaagtttcctatctctatctcgcgtttgtcctgcgtaagcgagggcaaccacctagccaacggagatccaataatgcaaacagagggaagatgttcctcaccgagggcgatatcgaggttctcgggatatagtcagaagtgtactattagagagcttgctaacagctttaccaattctatgctccacatagcatgaaagaaagttgtaactttagtggctcacctgtttgttcctccaatttgtatctgttgtataactccacagaattaaatctgtaaaccaaaggactcataaatgcagttttgcaggaatgaataaatattaataggattcgtaactaaaaaaannnnnnnnnnnnnnnnnnnnnnnnnnnnnnnnnnnnnnnnnnnnnnnnnnnnnn

SEQ ID NO: 28929 - DNA, 765 bp, Setaria italica
  Peptide Sequence Number=SeqID_94903
tccgccacacactgaatcggatcgaatcggaatcgaaacccaattcgagccgccggagaagcttccgtcgggcggcggcatgaacaagcggccccgcgacgacccctcctcctccttcgcctccgcgcccaagcgccagtacggcggagggggcggctatggcgcgcagcaggggtactcggaggaccggggcagcgcgcggcgggtggcggaccactacagcgcacggtccaaccagacgctcgaggagcgcgagaacagccccatcatccacctcaagaagctcaacaactggataaagagcgttctaatccagctatatgcacgcccgggcgactgcgtgctcgatcttgcttgcggaaagggaggtgatttgataaagtgggacaaagcaaaggttggctactatgtaggggtcgatattgccgaaggctcgataaaggattgcatgactcgctacaacggtgatacagatcaacagcgaaggaagaagttcagttttccagcacgacttatttgcactgattgttatgaggctcgcctggatgaatatttatctgaggatgccccatttgatatatgtagctgtcagtttgctttacattattcatgacttctaatccttgagctttcttgtccactgctttgctgagaaatatggatcgaactgtatcctttcctaattgtcggtgcagctttgtattattgagatctaaatataaatggtcatgaatgcattcatgatagacagttaccatttaaatt

SEQ ID NO: 28930 - DNA, 220 bp, Setaria italica
  Peptide Sequence Number=SeqID_94904
ttctggccaccgcgtttcccccgtttccaacggtgctgttgctgtccagaggtggagccgcccctcgaggcacccgtgccgcccccgaagcctccggtgccgcccctgagctgctgctgttgaggacgctggggaggctgctgtgaagtgggcggtttggggccaccagagccgctggagccgggcaccgcggcgagagcgatggcaggggcagccttgg

SEQ ID NO: 28931 - DNA, 281 bp, Setaria italica
  Peptide Sequence Number=SeqID_94905
cctaaacaataaaatatgtttacatgaggaggaacatatttactagttatatcatcagcaattgcctgaatctcaagacgttcctcaaaccaatcatatactttattgagataggtaactagcccgattccccctccgagaaccgtatatgaaaatttcatctcgtacggctcaagcagaaacacacaaattttcaacggatattagaaaaaaaagttcaaaacttcaccagccacggtattcgatcgatttgccttgaagatatgaaataaagaaaatcc

SEQ ID NO: 28932 - DNA, 1282 bp, Setaria italica
  Peptide Sequence Number=SeqID_94906
cgccggttcaccaatcattgacggctcgagaaccgctaaacctacattacacgcaatagtacctagaattactactggaaaaatgtataaaagatcgttgggccacgcgggttccccgtaataattatgtcccatccctttagctaattttgctcttaatacaggatcatttaagtcaggtttctttgttactcccataatccgccttattttctttcgtaaaattaacttcaactataactatttgtatcaaaatagttcgaagttgaagagaagtatccaaatgacatgtcttattgtaaaataagatatgtttgtagcaatgaaataccacaacctaccctatatgatatatgagaattagaattctctatgatatgctttccctataaaggacccgaaataccttgcttacgtatcattagaaagtgcattaacataaatacggcagtaagcagaggtagtacaaaggtatgtaaactataaaaacgagtcaaagtggattggcccacactagcacttccacgtaataattccactaaaggggatcctattactggaatcgcgtcaggtacacctgtcacaattttgactgcccaataaccaatttgatcccaaggcaaagaataaccagttacaccaaatgatgcagtcaatacagccaaaaccacacctgtgacccaagttaattcacggggttttttaaatccacctgtgagatacacacgaaatacgtgcaggatcatcattagaaccatcatacttgctgaccatcgatgaactgatcggattaaccaaccaaagttggcctccgtcattatatattgaacggaggaaaaagcctctgtaacggttggtcggtagtaaaaagtcatagcaaaaccggtagcgacttgtactagaaaacaagtaagtgtaattccccctaaacaataaaatatgtttacatgaggaggaacatatttactagttatatcatcagcaattgcctgaatctcaagacgttcctcaaaccaatcatatactttactcatataggagacttacccaaacaatctaatgaaagcccgaactaccagaatgtctagaaactgtgaagcttaaagtagaaaggcttttttttggatggaaaaactatggacttcatagtttttgttagtagaaacctaattcgttaaaattccgtccagtaaaacagaagaattataaatttctaaaatgatagataggaattatcgcgaataaagccattgcgacccccataaaaggagttagtcccccc

SEQ ID NO: 28933 - DNA, 270 bp, Setaria italica
  Peptide Sequence Number=SeqID_94907
tttttgaatcccacttgaaacagatctgttgataacctgaagatgtacagatagtggaaattacagcagaactgaaggtaagtttaaagtaacaaataatgaagattaccaggtaatcagttcaaccaatatcgagttcccagtaatcaaagtatagttaggaaaagggcctgtccattccagaaacgtggaccgcacagttatatgaccttcagaacttcagtgaggacaagtgcccactgtgtccaatgtgttcctccctggcagaag

SEQ ID NO: 28934 - DNA, 893 bp, Setaria italica
  Peptide Sequence Number=SeqID_94908
attaaaaaaaatcaagttgcaaaactttgccactaaaccttcgaaagagtctattctatctgccactacttcccctccgatctgtcaacatggtttcaacaattaagccatgaatcccacttgaaacagatctgttgataaccaggtaatcagttcaaccaatatcgagttcccagtaatcaaagtatagttaggaaaagggcctgtccattccagaaacgtggaccgcacagttatatgaccttcagaacttcagtgaggacaagtgcccactgtgtccaatgtgttcctccctggcagaagacagcatatggatctctcaagggtccatcacatgatagttcacttgtgcttccatctatgaatgtcccgtcggcaaaaatgacctctgaagcataaccaggagtttccccagcagttggtttaacaaaagatcctactgggcaagtttgctgtaccacttcacagaatgctatgagtctgtccctgttgccaagctccactgcctgcacaatatcatggcgaggaacccttggaagcggttgaactctgtagcctttggctgacatgacttccgcaattagcaaacctccttttattgcttctccaaccatttgtggagcaagaaacaagccttgaaacagtgaacgcataacatggccaggtgttgacccaaattccaccccaaggccaggtgcagataggcgagctgcagctgcttcaaccaaatgtttcttcccagcaacataaccaccacaaggcgcaatagttccacccggattctttattaaactaccagcaatcaagtctgctcccaccattgcaggttcggatgtctcaacgaattcaccatagcaattgtcaaccatcaccatgcagtttggattttgcat

SEQ ID NO: 28935 - DNA, 376 bp, Setaria italica
  Peptide Sequence Number=SeqID_94909
gctggactgacagattacagcttctatggtggaatggataacgatgcaatttcccatttcgattccagtgcaagcgctgcaggatacggggatcagagcaccaatgcacaattggactccactgatcccaaatacctggagaccctctaccctgggtggaagtacgatgcggctacgcagcaatggtatcaggtagatacccccagtgcacagagttatgttgctgataatactggtgctgttgcagtcctgggcagtggagttcagcagcagcagcagtttaatgcttcgtacctgcaaaacagtttgcactcagcgcttgagaccattgcggaggagagcagtgccaatgccgcgacctggggtgcagctaccc

SEQ ID NO: 28936 - DNA, 333 bp, Setaria italica
  Peptide Sequence Number=SeqID_94910
ggcgggggctgaggaggagaagctgcggcgggtcggccccgcgaggtggagcgagaaagggaggaagcctacggtttgggccgctccagaacggtgctggagcggggtgtggagcggtggaagcgggatcgggagcggcttcgacgagctcgcctgctcgtcggaggagtgggaggtgagggcgtgggggacgcagggatggacgcggcgggtgaggtggtgggagagtcgggtggcgatgttcctccgcgcggcgaacgccatggctgggctggggcgtggcgaggcggcggcgcgcagtgggaggcgagcccggggcttagctgtggcgac

SEQ ID NO: 28937 - DNA, 205 bp, Setaria italica
  Peptide Sequence Number=SeqID_94911
gttacaggcgaagctattggcaggttgaactggaacaccatcatctttagatgatggtgttacaggcgaagctattggcaggttgaactggaacagagagaaggacgcatccgcatcctgtgatttgttcttgtcttctgggagatcctttaggcccgacctgttcttgtcttccaggagatccttgcctgaaagcgtcgtcaac

SEQ ID NO: 28938 - DNA, 2316 bp, Setaria italica
  Peptide Sequence Number=SeqID_94912
tttttttttttttttacttttggtaaatcaagaggcagatagatgccccattcgctagcttttcataagaacaagaggaacatacagacagaaacaaagaaaatctgaacaccgtttatttcattcggagaatacaaatcattcacgaagtgcagctgaaaaacatgggtagcaggtctgtcacagtttttctttatctacataaacgaaaatatatcattatctttcgagcacgaaaatataccattatctttcgaggagaacagattatactccttcacatctgcctgctccctcgagcaaagctgagcttgaacctgaagcaatggcgtccttgcggtcaactctccattcttatcatctttagatgatggtgttacaggcgaagctattggcaggttgaactggaacagagagaaggacgcatccgcatcctgtgatttgttcttgtcttctgggagatcctttaggcccgacctgttcttgtcttccaggagatccttgcctgaaagcgtcgtcaactttgcagggtggcctttctagattcatttctctatgagcatgaccagcaatatgctgaggtccatttcgaaatggtgttgacagaggcatggctctgaagctggctggagtcgtgtggataggctctggaggcatatgactgaaggcaggagccaggtaaggatttacactgctgtactggaccggataatcaacaaaatggttaccaggtgctccaaacacaagcggactagaatataagtgggtaggtctggcataatggaagtttccatttgtttgagcagcccaagaacggttgtgaagccccatcgttgctggcgaatatggagatacatgcatgctttgttgacgcagcagctgatcctggaaaggggatgtgttgaatccaagtctgtcattgtgagccagacgtgtggcttttggttggtattctctaaaaccgtttcctgcacatgcctcgagcaaggaccgtgacgctgttcttgacgatggagtacctacggtgctctttgttctgtctggggattcctctgactcagatgaagatgattccggattttgagcgctcaaagaggtcatgctgctggagctgctttccctatccccctcgctcatacatgaagaggagccatcagaaccagcagagttcatcatcagctcttcatcatgcctggagccttcatcatttccagggtaacagttttgtttattcaccgtaagagtaccatcacaagcagcagcttgacttctctcagcggttccacactgctgatcagatttacaaacatcactggaactttcagaagccagaggctgtgattcacatcttgcagcaagcttttgacatccactggtatcacaatccacagattctagtggatcgacattgtcaattgaacatgcaacattatccgtgttgtctaaattagtcgtctttcgagcatccattggttcccatacttgcttaagaatagcatttttttgtgtacttgcaatacgggttgctttcgaaactataaagttatccaacggatagcatctgcggtactgcaccctaggtttatcaactcctgatttccttgccatcttcatctccctaccagatctagctgtagacaagaaacagttattcacaactccgtagtcttcctgatggccacagctgcaagaattgtatgcatgcctatctcttgttctgttatttgtagtggataccgcgttgcagctttgatcactacttcttgctctttccctcgattgccactgtaaatcaccaattcttccatattcatcttggcagtcatcataccaacaggactgatcttgaggaaaatcctctctcaaccttggacttcgtttcgaagatttggattgctctgatgtgcaaagatcactgctgtccattagtgaaaattctgccatggcattgcaccggacgctgttttgtccattaatttccatacacgaggattgatctatatggctgtcacaagagcgtggattcacaacttcagcattatcttcctcttcagtagctgaatctcttgagtcaagagtatttgtcgaatcatcattggtagatgttgataagttgcttagagctaaggatgaaacatcatctggtgacttcagttcaactagtcttttccctttgttttccttttctttcagtctttcttttctccttagcttcttttctctctctcttgttctcctcttcatcctgcgctcttgttcttcacgcttctctttttcctcttcctcaagaagtttgttctgtttttccaagtaata

SEQ ID NO: 28939 - DNA, 259 bp, Setaria italica
  Peptide Sequence Number=SeqID_94913
cttagtttttatccaccaacgaagatcctgcgtactgtcagtttttaagagatccctttgtgtttaatctgccatcctaatgcgtcaatgattggctatgcaggggcaggaaagaggcaggaaagctcatggcgtccaactacgtggacaccgctgcggaggaaggcaggttccacggccactaccaccaccacagcaccacgcccaccggcgcggccgcggcgtcgccgaagcacatgcggaggagctggtcgtccgg

SEQ ID NO: 28940 - DNA, 342 bp, Setaria italica
  Peptide Sequence Number=SeqID_94914
gcgctcggcacctcgcctccctcctctgcttcgattcctgcctgtccgcagtttatttctcttgttccgggggcaggaaagaggcaggaaagctcatggcgtccaactacgtggacaccgctgcggaggaaggcaggttccacggccactaccaccaccacagcaccacgcccaccggcgcggccgcggcgtcgccgaagcacatgcggaggagctggtcgtccgcctcctccgcccacggccacggccacgcgcccaagtgcgtctgcgccccggccacacacgctgggtcgttcaagtgccgcctccaccgcagcagctcccacggccacggccacccgg

SEQ ID NO: 28941 - DNA, 419 bp, Setaria italica
  Peptide Sequence Number=SeqID_94915
ttctagttagttaaggttaaaacctttcttttctttccttggtagtaccttcttgtcgtcttgtctaggccaccaacgtggagaatgcattccagaccgtcttgacagagatcttcaagatccacagcaagaagaacatggcggcggacccgaaggccaatggtgctgccccgtccctggcagggaagaaggtccttgtcccaggcccggcccaggagatccctaagagcaaatgctgcagttccatgtgatatcttgcctgggtcgggttgtgtgtgcgtcgaaaatattcatgtgatgtttctggatgtacatctagactggaataggcctaggtttgaattacattgctatttgtaattaattccacaagtctatgcaaatagtgctcttctcctcgctccctatcctcgtgtcac

SEQ ID NO: 28942 - DNA, 473 bp, Setaria italica
  Peptide Sequence Number=SeqID_94916
aatgctagttggcaacaaaagcgatcttgaggagcagcgagccgtgagtactgaggatgccaaggagttcgccgagaaggagaacctcttcttcctggagacctccgcactccaggcaacaaacgtagagagtgctttccaaactgtcttgacagaaattttcaaaatccacagcaagaagaacatggtgtccgagccaaagagcaatggggctgccccagcaatgccaggcaagaaggtccttgtcccaggtccggcgcaggaaatccctaagagcaagtgttgtagttccatgtgatgcttctgtatttggtgttatgtgtgctgaatatattcctgcaatattgtttttgttgtaaatccctgtcgaaatactcagatttgggctggttgaaacactgttgtattttatatttttgtcacaattgtgacatgaggggaagcatgtgctaatgtcttaccgttaaaaaaaa

SEQ ID NO: 28943 - DNA, 509 bp, Setaria italica
  Peptide Sequence Number=SeqID_94917
acgacccgactttacaaaaaatacaataaaaaccaaaagcactctctccactagcgcccccgctgcctcctctccttttcccgacccccggagccgaagcagagccagagcgacgcgccaccaccggcgggcgagagggcatggcgggggccggggagaaggtggactacgtcttcaaggtggtgctgatcggcgactcggcggtgggcaagtcgcagatccttgcccgcttcgcccgcaacgagttcagcctcgactccaaggccaccatcggggtcgagttccagacccgcaccctcgtcatcgaccacagaagcgtcaaggcccagatctgggacaccgccggccaggagaggtacagggctgtgacaagcgcatattacagaggggcactgggagctcttctagtctatgacatcaccaggcgccaaagctttgatcatatacctcggtggctagatgaactccgtgcccacgccgacaagaacatagtgataatgctagttggc

SEQ ID NO: 28944 - DNA, 485 bp, Setaria italica
  Peptide Sequence Number=SeqID_94918
ccgtcgcgtctcccccgcgtcctcctccgtctcatctcaaatcaaaaaaatccaaaccaaacgcccccacgcgcactccgccgcctcactcctccctccgagcctccgccgaccgccgccttcgtgcgcgcgcgcgagcgagccagcgagccagcgaccccaggaagcgaggaaggaggccatggcggggggcgcggacaaggtggactacgtcttcaaggtggtgctcatcggcgactccgcggtcggcaagtcgcagatcctggcccgcttcgcccgcaacgagttcagcctcgactccaaggccaccatcggggtcgagttccagacgcggacgctcgtcatcgaccacaaatccgtcaaggcgcagatctgggacaccgccgggcaggagaggtaccgagctgtcacaagcgcgtactacagaggtgctttgggacctctgctagtatatgatatcaccaaacgccagagcttcgaccaca

SEQ ID NO: 28945 - DNA, 1053 bp, Setaria italica
  misc_feature (984)..(984): n is a, c, g, or t
  Peptide Sequence Number=SeqID_94919
tgatcccttcaacacgtccgctattttaacattaatcaatctagttaattacacctcttgactgcttctactcccgataacaatcacggactccaccgcctgctcctcctcttctccaacctcgcgatcctggaaagtagaaatcaacaaacccccgttcttgatgccaaggtcctagttggatcaatcgagagaggaagggggatcgttcttggataggagaaaacaattctagagagagagagaaggctatccatcttttaaattgggacgacgggggcgaggagatgtctcggggcgagctggggcagaagatcgactacgtcttcaaggtggtgctcatcggcgactccgcggtcggcaagtcgcagatcctggcccgcttcgcccgcaacgagttcagcctcgactccaaggccaccatcggggtcgagttccagacgcgcacgctcgtcatcgaccacagaaccgtcaaggcgcagatctgggacaccgccggccaggagaggtaccgagctgtcacaagcgcgtactacagaggtgcactgggagctctgctagtatatgacatcaccaagcgccagagctttgatcatatacctcggtggctagatgagctccgtggccatgccgacaagaacattgtgatcatgctagttggcaacaaaagcgatcttgaggagcagcgagccgtgagtactgaggatgccaaggagtttgcagagaaggagaacctcttcttcctggagacctctgcgctgcaggccaccaacgtggagaatgcattccagaccgtcttgacagagatcttcaagatccacagcaagaagaacatggcggcggacccgaaggccaatggtgctgccccgtccctggcagggaagaaggtccttgtcccaggccccggcccaggagatccctaagagcaaatgctgcagttccatgtgatatcttgcctgggtcggtttgtgtgcgtcgaaaatnttcatgtgatgtttctggatgtacatctagactggaatggctaggttgaattactggttatttgatgtg

SEQ ID NO: 28946 - DNA, 896 bp, Setaria italica
  Peptide Sequence Number=SeqID_94920
gagctgaccagcagtagaagcagagctccacctcaaaagcgccgcgcctgcggcaaaccgccacgcccccaagtttcctcttgcatgccgcacaagtaaccagagcctagctccctgctgccaagttcttctcgccttcctcttctcgtggtctcggcgccgatcgcgcgaggttcacaccacggcgaggctggttgcaggaatcaagaagcgaggccggccgccagggaggtgatcggggattcggggtggtgagaagtgaagaagaaggagaaggggaagatggtggcgcggggcaaggaagcggaggaggaggaggcgcggtgggaaggggaggcggagatcgactacgtgttcaaggtggtggtggtcggcgactcggcggtggggaagacgcagctgctggcgcgcttcacgcgcgacgagttcgcgctcgactccaagtccaccatcggggtcgagttccagacgcgcaccctcaccatccaccgcaagcgcgtcaaggcgcagatctgggacaccgccggccaggagaggtacagggcggtgacgagcgcgtactaccgcggcgcgctgggcgccatggtggtgtacgacgtgacccggcgcgccacgttcgagcacgtggcgcggtgggtggaggagctccgcgcgcacgccgacggctccaccgtcgtggcgctcatcgggaacaaggccgacatgcccgcggcgcggcgggaggtagccgccgacgaggccgcgcgcctcgccgaggagcaggggctcttcttctccgaggcgtccgcgctcacgggggacaacgtggagcgcgccttcctcacgctcctcgaggaggtcttcgccgtcgtgtcgcgcagggcgctggagctcgaacgaaggaacccgaaccgaaa

SEQ ID NO: 28947 - DNA, 788 bp, Setaria italica
  Peptide Sequence Number=SeqID_94921
ttccagacgcggacgctcgtcatcgaccacaaatccgtcaaggcgcagatctgggacaccgccgggcaggagaggtaccgagctgtgacaagcgcgtactacagaggtgctttgggagctctgctagtatatgatatcaccaaacgccagagcttcgaccacattcctcgttggttggaagagctccgtgggcatgctgacaagaacattgtcatcatgctggtcggaaacaagagcgacctcgaggaggagcgtgccgtgagcactgaggatgccaaggagtttgcagagaaggaaaacctcttcttcctggagacctctgcgctgcaggccaccaacgtggagaatgcattccagaccgtcttgacagagatcttcaagatccacagcaagaagaacatggcggcggacccgaaggccaatggtgctgccccgtccctggcagggaagaaggtccttgtcccaggcccggcccaggagatccctaagagcaaatgctgcagttccatgtgatatcttgcctgggtcgggtttgtgtgcgtcgaaaatattcatgtgatgtttctggatgtacatctagactggaataggcctaggtttgaattactggttattttgatgtgcggattgaaggggtcgatatcatagtttagatttgtcaccgtctccatggtgacacgaggatagggagcgaggagaagagcactatttgcatagacttgtggaattaattacaaatagcaatgtatgccgattgtttaatgtcgtcttgaaaaaaaaaaaaaaaa

SEQ ID NO: 28948 - DNA, 1293 bp, Setaria italica
  Peptide Sequence Number=SeqID_94922
ggcgtgcctcacgtgcccgctctgcggccgcctcctccgcgacgccgccaccatcaccgagtgcctccacaccttttgcaggaagtgcatatcagaagagttcataaaaaaggaagtctgctggtgccctgtttgtagcattgatttgggctgcgctccattggagaaactcagaatggatcatagcctacaatatgtacggtcaaagatatttcctagaaggcaaaagtttgaggccccagaagtcacgtcgccagttacatcacctatcaagaggaaagaacgatctttatcttcattgacaattcatgctcctcaagtgtctatgcaaaaatgcttgacaaagaggagaacaaaagcttcatgcttacataacctctctttgcactcaaagttacggggcagtaacatcacaaagaaagttgggggatggaaacctttaggttctcactttaaagctgctaaaaataaaagatctcttggatctaaatcagaagatgtgaagacaactgaagataaatctgatgatccagttgatgaaactcctaccagtcaagcaaagactaagagacagtatagaagacgtggaaatctggagaagagaactggaaacaagaaactgttgattttaaagggaaaacagaaaaagatcaagccaaagctgcttaacaagaagaggaagttgcaagcattatggttataccttgttgctgcttttgaccagaaaggtcagcctcctctaccgcaggtaccatcaaaatttttgaggatcaaggatgtagatttgcctgcttccttcatacagaagtacctcgtgcagaaacttaatctttcaagtgaagctgaggtggagatactgtgtggtggcaagcctgtgagcccaggaatgacactgcacgatctagcagattgctggctaaataaaggacaaaagggccgagtgcggtcatatgtgggcacacctgctgctggattcatagcgaaggtattctatggcagatcaggagcatccatacctgaaactgaaaataaccaaggttgatcgagggcttcctcttcgtttctgaagcagcgacgcattgtttcattcttaggaaccctttgatttgagcaatttaacatgtacatagatgttagtgttacaacttagaagccgtgttgggcttataattggcctataagatgctgagtcgttgagtgcttgacctgtaagcgaggggctttgtcaccatggaggcatggagctcatagctcacctatgcgagtgtatgtgatgtatatatagtacttgtt

SEQ ID NO: 28949 - DNA, 293 bp, Setaria italica
  Peptide Sequence Number=SeqID_94923
gctgctgacgcacccgcccgacggtcgccgcttgctcgctccctcacccgccgccgccgccgcctccgcctcccgtcgcagcgcgtccggccgccgaccatggcgacggtggaaggggacaagatagagccgcctggattaggaccgagaacccggcgatctgcggcgaccagggagaccggcgacatggccggcggtgccggggagggggagcggggaggggcccctcggatatgtgctctcgctcccagcggcgtcgctgcccctgcccgtcgccgtctcctgcctcgacg

SEQ ID NO: 28950 - DNA, 452 bp, Setaria italica
  Peptide Sequence Number=SeqID_94924
taggaatggatatcagcagaactagcattggaatcacgtgggtcaacaagttttcctttatttcgcactgtgccttccgatgtactttcatctaacttgggcgctttgcagctctgcatatcattttcacctttcttgcgcttggaacccttagttggttcattatggccaacatctttcttaacaagatcaagaacagttcttttatcctcgtctgacaaagtatcccagcctgagaatttctcaacagttgcagatatggatacctctaagaaacagttgacatgataccatggtattcccttggaagcttgaccttcaagcttagcagaaacacggactgttccttttgtaatcttttgactgcatcgtctgcatgaagtacgagcagatggagcaacatcaatagtacatttatcaggaacagtagctgtggaacttgtagcagctga

SEQ ID NO: 28951 - DNA, 460 bp, Setaria italica
  Peptide Sequence Number=SeqID_94925
attcaacggcttgggtcctcaagaaagctcatggccatcattaacgtcgatggatctgtatccaaggcttggccagttgagtccagtggtgatggaaaatgcagttctgacaacagtactcagaaatctgtagggaatccaatttatggacctttaaacattggaagagcagagtcagtcaatctgcagtttggcacctttgggataagtgcgtggcctactgatacaggctgtacaagtcaagctggaaatgccgatgaatcatggaccaatgctactgaaggtagtagcagacatgttccatcttcatctggttctcctaagaagtccgatgggcactgtaaagagatcaaagagtcgtcagcagcatctggcagcgatgaagaagaggaagaagaagctgatgttcagcctaattcagggagcgacgaggatctcagtgaagtagacaacagggaga

SEQ ID NO: 28952 - DNA, 240 bp, Setaria italica
  Peptide Sequence Number=SeqID_94926
ctctctctctctcggctccgagaagacgcacgcacacatcaacaggcagaggaggggagggataacgcttcccgaatcgcttccgttcttggcttcgatccttcctacccagcgcgaggagcttcacttgattgttgatcctcgcatcttccgttggttccatctgggcagccaagatgaggctcctggcgtgctgctacaatgatccggagatgcagatcgatccggacaccgtctacc

SEQ ID NO: 28953 - DNA, 255 bp, Setaria italica
  Peptide Sequence Number=SeqID_94927
atttttatcttactgatacacttttctgtggtgtctgaattggaaatatttgtccctaagctggagattggaatatgtcacacattatttttctcatttgcgccattgacacatatgtttatttttcgtcatagttatttgttgtgggtggttctgcatagctgggaacagggagtgatgatgtatcctggtagtgttaacataatgtattgcattctacatatataatacacccccatgggtttgacttttttt

SEQ ID NO: 28954 - DNA, 407 bp, Setaria italica
  Peptide Sequence Number=SeqID_94928
ccgtggtggtggccgcggcggacgcggaggcggagggccacccctacgatttccacgtgtccgggccgcgcaacctgccgccgcctaactggaaggagatcatcagatcgagctggaaggacccaaattacaaaagaatggtgatggcctgcttcattcaagcagtctacctgcttgaactggacaggcaagatcagaaaggggaagaggatggccttgctccaaaatggtggaagcccttcaagtacaaggtcacgcagacattggtggatgagagagatggttccatctatggcgctgtgctggagtgggatcgttcttctgccttgtctgacttcatcctcataagaccaagtggtgcacccagggctgttttagctctcagaggaacactgctgcagaaacca

SEQ ID NO: 28955 - DNA, 228 bp, Setaria italica
  Peptide Sequence Number=SeqID_94929
ggtccggtgaaatccagcaacaaacttgccagcagataatcgctcattcctcaaatagctctgtgagcatacgtggacttcagatatcagaaccaacagccaactgcttcagtgaacttctgatagcgagtaatgtttacaaagccgagaattgctgaataacagcaaattcttcataacctccagcatgtctcagcaaccaaatgaccaatatgtcgcattcaagat

SEQ ID NO: 28956 - DNA, 451 bp, Setaria italica
  Peptide Sequence Number=SeqID_94930
cacagcgccaaaccagccagtccaagatggcgcaactcaagccggctgtgctgctcgccgtctcgctctgctgcctctcggcgctgctgccgtggtgcgcggcggcaagctacggcggcaagcccctggtgacggccatcaccaaggacgcggccaccaagctctacacggcgccgctcaaggacggccggccgctggtgctcgacctctccggcccgctcatctggtcgacgtgcccgcccaagcacccgagcttcgagtgccaccaccacgtgtgcgcgcacgcgcacagctaccacccgccgggctgcccgcgcacgggccacggcgtcgccgacgacgacgacccgttccgctgcaagtgcacggcgcacccctacaaccccatcgcgcgcaagtccggctccggcgacctcacgcgcgtcaccgtcaccgccaacgacaccgacgg

SEQ ID NO: 28957 - DNA, 464 bp, Setaria italica
  Peptide Sequence Number=SeqID_94931
aaaacatgaaatacccacagaagtggcaagaccatccaagaaaaggcgaatttttgtaagaagtgtttctgatttactaaagtatgcaaagagggaaccttccaatggaagatcagcttctatcctgtccagtattatagcttctcctatacttaattcttctgtaagagatgatgggaaaacttctgatctcagtagctctgcacagagactgaaggaatcctcccatgttgaggatacaagcaaatcaccaaaaagcaatgctcaagttcagaatagtgtcatcagaacgccttcaaaaagttgttaaggagctgtcacccactttcagtcctgtgaatccatcaacaggctcaaatagaagcttgtcaaagtcttctgttgcaagagaattactgaagctagatcctgaaagtgcgctatcaaatcagcagagaaatgattccagaagaaggatggatatg

SEQ ID NO: 28958 - DNA, 429 bp, Setaria italica
  Peptide Sequence Number=SeqID_94932
atgggcgtgcggtcgccgtcggcaatgcgccggatgtacggctgcaggtcctcgtacgtcgccatgggcaccttggcgcggaacgtggcgcggtcggtggcgccggcgaggccgcacttgatgaggtactcggtgtcggcgttgcgggtgaggatctcctccagaacgcgctcttgcacggcgtcaacgtccgaggtcatctcctcgatgaaccggagcttctcggcgtcgccgtccttcaccggcgactgcgccggcgaggccgggccgcggagagctgcgccggtggtcgtggacacttcggccatcaccgccattggctcgaccgaacactacttgcgaacgctagctagcagctgcgtggaacgtgtggggtgcgtggagggaggagggaggggaagggcaggagatgttttctgctgcttgctg

SEQ ID NO: 28959 - DNA, 247 bp, Setaria italica
  Peptide Sequence Number=SeqID_94933
tgtcaatagtactgaatcaaaatcctgttatagtactgaatcaaaatcctgttctaacagccaaataaagcatcgctatgtcaaccatgaatccatgattcatacagtgcatggatctgtatacacctcacaaccgcagaattctgagcactccacttgcctccatattccaataacaagtatcaggttcaataataaaagaagatggccctctcgccttgaaattctcatacaaaaaaaaaaaaaa

SEQ ID NO: 28960 - DNA, 254 bp, Setaria italica
  Peptide Sequence Number=SeqID_94934
cggcacaccgggaagccgcagacgtcgcaggcggtgaagagctcgccgtccgccgactcaccgcattcctcggcttcctcgcacccggacgaaccccccgtatcggcacggcaccgaatcgcctcgcctcgggtttgcgcgccgacggggtgcctccccaatcccagtggcagcagcagcagcactagcggcagcgagagcaccgtccagctcgcggaggattagacgcgggggagctcgcgcgggacggcgac

SEQ ID NO: 28961 - DNA, 442 bp, Setaria italica
  Peptide Sequence Number=SeqID_94935
cttatcataattaaaccttctgatgagactgactaccatgagaggaacatgccaaatgcaaaaaccgcagaattctgagcactccacttgcctccatattccaataacaagtatcaggtacagtttccatcacaaaaattaggcgtacgaacaaattatcctgaacagaccaatcatcatgcaaaccagagacagatcgagaccaaacccttcagattatcctgtttcggccaagccaaattttccgtgctacccaattaaaacagatctgaccttgaacagaaatcgaaacaaaagagctgcagaacctagacctggaatcgaacggatcgagcaccgcaaagtacaagcaacccaatccatccggctagcccgcgcacccatcaccagttcaccacgacacgatggagcaagtcgtacttaggggtaagtcccccttctt

SEQ ID NO: 28962 - DNA, 414 bp, Setaria italica
  Peptide Sequence Number=SeqID_94936
tttgataatgatagaacaacaagccaccttcatgagtatgtcaatagactgaatcaaaatcctgctctaacagccaaataaagcatcgccatgtcaaccatgaatccatgattcatacaatgcatggatctgtatacacctcacaaccagcatcaaataatccgaccaatactgcttgctgaaattaacagcaaattgacaccatatacttgtaaattccaaacacacctaagcaaccatatcttatcataactaaaccttctggatgagactgactaccatgagaggaacatgcccaatgcaaaaaccgcagaattctgagcactccacttgcctccatattccaataacaagtatcaggtacagtttccatcacaaaattaggcgtacgaacaaattatcctgaacagacca

SEQ ID NO: 28963 - DNA, 377 bp, Setaria italica
  Peptide Sequence Number=SeqID_94937
cacgcttgccaatgttcccagtaggggacgatcatatggtgatcaggggaagctccaggaatttctcccgagatctggctgttagtgacagatgggatgtatccacgagggatctcaccactatcatacttggtgagtccgatctctccactgtcatactttgggcggccaacatccccgcctgcccccacgcattcatgcgccagctgcgcatcctatcagcaatcttctgcttctggtcgtcattgccagatgcaggatagttgaagtcactggcgtcatcggcatcagtatcatcaccttcctccccacggatcgctgggctccccttgtggcgcttgtacttggtcttgcactgcgggcacgcctgggtgccg

SEQ ID NO: 28964 - DNA, 904 bp, Setaria italica
  Peptide Sequence Number=SeqID_94938
cttgctgtcacagcaatgctgtgaccaggtccggcaattgcctgggacttttctctacggcaacatgcttcacctgccattataaacctaagaactagcttccaactcccaccacagcgttgtttaaaaagttctctttcatgtgcagtcataggcttaaatatagcccttttctgacacatatccaatgctgcgagctctgacattgacagatcgaaatcaggagggaaattggcaggtttcctgaagaatgtgcatgttgcctccaggtgggcgaggtcctcagggtccagattgcacgatgtgaggacatggaggacaattgacgggtttgcggccaatgggaactccccaggagcagaatcaccaaagcagaggcgctgcgaccgctgaaatgattgctgcaatggagacacaagagcaagcgtgtcatccacgatgaggtggagggggagagatgaggaagctccgcggctggttgtggcatccatcagccactgctggaacttgcactgcccaatgctttcaactcaaacttgtggtgatcttggcttcgggcctctacaccatggcggaatgagacactgaaccatcccccaattcctcctgtcaatcagcctgcgcaggagagtcagggcaagaatcgagctttcgccgggagcggcacgatcggccgtcaggtcaatcaacgaaccgaatcgggaattccgggcgccagcgccagagacgggcgaatctggccaagaaacagggagagagagggagggagggaggcggcagcgactggcacggcacgacttctcccaataatgatgtggggaggaagagaggagggagaggttgctgcttggacgggcaactgcgggcgctgcgcgtgtattgttttgcgtacgtgcctttcgtc

SEQ ID NO: 28965 - DNA, 3915 bp, Setaria italica
  Peptide Sequence Number=SeqID_94939
ttttttttttttttttttttttttttttctttagggttaatgcatttgatattggcagatgatatttgaatttatgcagtagatcagcctgctgggccgtaaataattaattgatactgtcagacacttgcaaaaaaggcagtgatatattagcttatcgatattcgataaccaaggtgcatattagtgcatacgaaagtaaacttctgacagtagagttcctagcataatagaaagtgtcacccgctgataacttacaacacaatgggtgccaattaccttcctaatatttttttactattctagcagttgatgccacattttacgatatcaggaccagtcacccgggtggtgaatggatcaatgcgaacccacagcagggaaaagatagatgcgaggaggatggcccagacgacaacaatggttggcgtgcggttctgcctccccatgagacccttgaggaaggggtacaagtggacaatcacccagaaggcgaagaagagcttcccaaagagaggcccccatgactggtagccgctgttgatcgcataggaaatgcctgcaaccacaccaaccaggttgatgatcaagatagtggttggtgggatcagaagcgttgtccacttgaacatgtagagctccgcaaaatcgccttcttcatcagtggccttagaggtgacagtgaagctggtgtcgataccagcaagtactttcaggagaccctggaaaacggcaaataaatgggcagaaataccaccaataacccaaaactgctcattcctccaccattcgtcaatgccaactccactccacctcatctcaaggataccagtggcaaagatggaaataaaaagcgatataaaccaaatacttgcaaagttgctaatctcagggatgatgaacttcccagtgagaagacaaacagccggcaatatgcagtacaagaggagtgggattgaggtgagtggataaattgtggtgttcacatatgcaaatctctccaggaatttaagccgtcctccatagccataccatatgggacaatgcctgctgaaaagaatttcaatggaaccaagagcccaccgaagcacttgattcagacgatctgaaaggttgataggagcagatcccttgaacgctggtcgcttaggcatgcagtagattgatcgccaacctcgagcatgcatcttgaacccagtgagaatgtcttctgtaacagaaccatagatccatccaatctcagatccccagtcagttttgtcctcatagccacagctgataacatggatagcttctttcagaagagactccggagttgcagattgtggaacaccaccatattccatcagagtagaggctacaaagacactggactgaccaaatctcttctccaagctcatttgagacataatcagcgatttctcatcatcaaattgagaaccttcaatcccttcctctatatcttcaagattaaacactggcacagaactgtctgcatgtttgtgtgacttcttcttttccgagctcttcttcttagattttgatgtctttttccttcccccacagagtgaagagaagaagcctggttttttcttcttgattggaggctcataaccatatagggcagttctgttaaacacacaaccagttcccacataaacaggtccttgaagaccatcaagacctctcaagttaatatcgaaaaacacagtgttcctgtttgcatatcgatcattcctatcaataccatcgaacctctgaggaaattggacataacagacactccttcctaggtttgggtccataaggaagcacatagcttctcggagagccttgctattgttgatgtagtgatcacagtcaagatttaacaagtattgcccattagtaaggacagctgatacacgaacaagtgcattcatagcaccagcctttttgtgatgttggaatccaggacgtttttcacgagacacgtaaaccaaacgaggaagttcattgccctcagcatcaaggcctccgctgtgacctagaaaaacctgaatcattccgggatgatccctagtattgttcccaggccaaggtgtaccatcttgcatgatccatccctcttcaggaactttctgtgccttggctacaaggccattaatacggactttgaattcttcatattctctcttcatggcccggcggtctttaacaaatgaagtttggactttgtctttcaagtaatcaattttctgggcaaagtaccactctggagccctaggttctatattgtacttcttacagaatggtacccattttctagcaaactctgaagtttcagcaagtgcatcaaaagtcagcatagcagctccatcatcagatacatagcaagacaccttgtcaaccggatagtcaacagcaagaatggaaagcacagtatttgcagtgacaagaggaggctccttcataggatccacggtactaacaaaaatatcaacaggagccaactgagacggttcaccttctcggtcataccttaaagccagtctatcaagataagtttcacggttgattggagaccacttcgggaactgatccaaaatccaggacagagcaaaccaaatctcacatataacggacaatagccacagtggatatgcattgcgcacaggatttgtgatacggtagtgcaggaaaatgcagagaacaatcaaacgtagcacgatgaccattctgtagggatttattctggatgaaggaattggcacttttctagatagaggttgccgagtttcatcattcagtaaagcgtcttccatgttatagtcagtagatgcatcaatatcaccgacaccacgtccttctgagggagcaatgcttgtcccattagtcataggaattgcacccttgtccttcattttccatccatccactctttctttccatgcaacattaccaaggctaccagagaactccctcgatgggtttggagaatgattcacatagggaaattgatgtccacgcctgccaatgttcccaacaggagacatcatgtgatcaggggaagctccgggaatttctcctgagatctgggaatgagtgagtgacgggatatatcctctagggatctcaccactgtcatacttcccatgcccaatctcaccactgtcgtacttagcaaggccaacatcactaccccgtgagttggtgcgccaggtgagcattctctcagcaatcttctgcttctgatcctggttgccagatgctgggtagttgtagtcactcacatcgtcagtatcaacatcctcattttcctcaccatgcacaggagggctccccttgtggcgcttgtacttcgtcttgcactgcgggcaggcctgggtgccgtccttgcgctcgtactcgtagcaggggcggcacaccgggaagccgcagacgtcgcaggcggtgaagagctcgccgtccgccgccgtgcccacgccgtcgccgcagatctggcacacctgaccggccctatgcttccccgaattcgcagcgtctcggccgcccccgtccatggcgcccgcgccgatcactccccggccacccccaatccgagcgaggttcgcccccgccgactcaccgcattcctcggcttcctcgcacccggacgaaccccccgtatcggcacggcaccgaatcgcctcgcctcgggtttgcgcgccgacggggtgcctccccaatcccagtggcagcagcagcagcactagcggcagcgagagcaccgtccagctcgcggaggattagacgcgggggagctcgcgcgggacggcgacgggggccagaggaaaaggaaagggacgcggcaccggcgagacggcgacgggatgggttggggtggggagcagcgcacgccgccgcgtgaattggatcggtgcgtgcgcccgtccg

SEQ ID NO: 28966 - DNA, 2081 bp, Setaria italica
  Peptide Sequence Number=SeqID_94940
caaactagtgaagaagattcaataaaatagagtgctttattgcaacgagaagatgtatgtttacttaaaaactaagcagttatttctacaatactaaaagagatacgatttcttaactgtgcacagctagaggtatgattcattacaatgcatactgtacacatcttgaggtatgattcattacaacacatattgcatcagaattgttaaaagttggttacataactccataaacagacctcaataaggacctaaatatgaatggaaattaatgtttttttcaactacagtgtatttcaaatctggattttacactatctctgctgtttgttcattacagtgctaggcgaggcgacgttgctccgcctagcaccaccttttgaaacagagttcaggttagaattctattgctccaagaattatgcaaaacaaccagatgttaataatacatagtggttacaacaaatccttctatactgaaattacacaaatacaactcccgacatagagaagatgcttggttaacagtacacatacaaacataagttacaacagaaggaagctggcactgaaaccggcacatggtccagtaactgaaggaacataagatgataagaagctaaaatctagtagagtccgcaaatccaagattcattcaaaaccatgtgactgaagtatcaccagaggactaggagattcagaccaaagcactacaccataatctgacagaagaccttaaggtaccaccagataaacacgcatcagtagcacatcagtaagaaaaccacaacttagagcatacatccatggccctcaaagcaagaatagtacttagaagaatcttcaagcagatggcttcacatgtagctagcactaaactacactgcacagatatagcaattataaaacccacattctgaatttccttgaaatgaaccttcaattgagctgactatttgataatgatagaacaacaatttgataatgatagaacaacaagccaccttcatgagtatgtcaatagtactgaatcaaaatcttgttctaacagccaaataaagcatcgctatgcaaccatgaatccacgattcatacagtgcatggatctgtatacacctcacaaccagcaccaaataaatccaaccaatactgcttgccgaaataaacagcaaattgacaccatatacttgtaaattccaaacacacctaagcagccatatcttatcataactaaaccttctgatgagactgactaccatgagaggaacatgccaaatgcaaaaaccgtagaattctcagcactccacttgcctccatattccaataacaagtatcaggtacagtttccatcacaaaaattaggcgtacggacaaattatcctgatcagaccaatcatcatgcaaaccaaagacagatccagaccaaacccttcaggttatcctgtttcggccaagccaaattttccgtgctacccaattaaaaccgatctgaccttgaacagaaatcgaaacaaaagagctgcagaaccttagatatcaacaaatagtaattagtcacaaatcaacacaaaactatttccccaaacagagggatcctgggggaagcaggggaatcatccaacctagacctggaatcgaacggatcgagcaccgcaaagtacaagcaacccaatctatccggctagcccgcgcacctgatcaaccaatcgacaaaacaaacatgagatcgaaaataactgcggctggctcacctacgacttacccatcaccagttcaccacgacacgatggagcaagcgactagggccctgtttgtatccgcttatcccgcgtattggcggaaataagcgataaacccacccctgccgcctgggctcggcccccgcctccggccgagcccgtatagaggctcggcccccgccgccggacgcccctgccgcctgggctcggccccccgcctccggccgcccctgccgccttggctcggctcccgctatacgggcagttcacccgttcaccacgacacgatggagcaagcgactaggggaagccccccctataccacgcctaccgattctattc

SEQ ID NO: 28967 - DNA, 514 bp, Setaria italica
  Peptide Sequence Number=SeqID_94941
ttggatcagttgggaatggggatcagcatccaagttacgatcatagaagatggggatgtgattgttgtgtgttagatggttttctggatgctttcagaaagtctgcagtcaaagagggtagctgggtgcacttcttttgcaagtctggaaagagctttaagagcaacctaaatcaagttccagttttttgccatttgtattctgatggccaacaggttgacatcaatcattgccacgtcatattatatgaggttccaacctttggcagaaaccatttttcactgggagtggatgcacctcgtaagttaaaggcttctttcaaaaaagccaaattggataaatgatctccaaaagcaaccatcatttcttgatttggtatgtgcatgggtgaacttgcatgatattactttcttcattaataagtctgctaagtcgcttcacatttgtttgaaggattcaattattttggcgctcaattgttcaaatgcagctagactgccagtttactctagta

SEQ ID NO: 28968 - DNA, 368 bp, Setaria italica
  Peptide Sequence Number=SeqID_94942
aagcgtatcagcaaacccataagcgaggcaatttggacacgtaagaccgcagtttttgacagtcgaagcatctttataagaagcaacataattgggccattagttattttgttcgcagcatctgagttcatgcttaacatctctaggtatctgatagtattttgtttttctgaaacctgaaaagttccacttaaactctgaagtatctgactgttgaatgcattcaactgctcctgtggtaacttaatataatcgcatgctgtaagagcttcgaaaggaagtgtgggaaccgtgtccacagctttatctgctttcctactaggcataactggtttaactgcgagatctgttggatgccagaatgcttc

SEQ ID NO: 28969 - DNA, 344 bp, Setaria italica
  Peptide Sequence Number=SeqID_94943
tgactgatcacatttcggattttgggtctatgtttccttccgtttgcacaatgatcacagcacttagctacacattgttcctatccacctgtatgtaagcagcgttcaaaacaacagaactacatacatctgaaacactatcgccctcttttgcattaagcaacagcgagcagccgataaccaccttcgaaactatattcctgtgacctgtaatcctgtatcatctttacatgatgcatatactggcgtgcagatgcctgacgtaaatccatttcagttcagggctcttgcatcgactttgaagtgcagaaacgcacagcgtcagcaactgtcaggaaaatatg

SEQ ID NO: 28970 - DNA, 493 bp, Setaria italica
  Peptide Sequence Number=SeqID_94944
ggataaggttgttgttgggctgggccgtattgcaaagtcggacggatacgtatcagcccacataccaacatttatcgttattatttttattacgaatacttctcagtacgtatccttggcgtatccaatacggatacgtatcagatacgcgatacgtcacctctccctcgtatccatgtaacataggttatgaaccatttgttgctgctactcttgttgttcccttttagttagagttagcttagtgtaatccctgtacatatttgaattgcttcctactacagtgaaattgcagagcacctgccacagttcactaaaaagaaagaaagatgacccataactcataagctaattgcaacagcctcccctaacagacacattaaatgcctggaaagatacacacatctgaagtaggagtatattgcaaagctagaaagatataagcacatacaaggaattcctattatggtaaatgtagatgtgctccctacca

SEQ ID NO: 28971 - DNA, 238 bp, Setaria italica
  Peptide Sequence Number=SeqID_94945
gcagcagggtcgccgagcttcctcatctgcggggcgggtggcttcaggggctccgccttcaagatcgcccccagcgtcggcaggttcttgttagctgcgtatggcgcgatccggctggtttgcgacgagaacgatcttgcaggggtcagatctccattgacgctgtagaaatcatcctcgcaatccgattccaaccgagggggtgcttacaaagacgtttcatctctgctgcctacct

SEQ ID NO: 28972 - DNA, 425 bp, Setaria italica
  Peptide Sequence Number=SeqID_94946
ccgcgaacacacacgtacagccgtacagctggagcgcctgggtttgcactattttcccgacacacacatacatatagccgtaggtagtatgggcttttgcctgacgaagctcatgtttcttgagagggctagtcattggttagttgtgcacgataggaaccgagacaaagctatcaggcttttcatccacatcccccacccgaacaacgttgacggtcaggctccgggtcaccttggccgttgccgtttgcgacggcttggtggcgacgttgtaggcctcaatcctctccactttcttcaccctcaccacgccttcgactggaagctcgttgctcatgcccacgctccgcccttattcgtcccccgcggaactattttccttaatttcttctttggatggaagcaattcaacttagctaattcct

SEQ ID NO: 28973 - DNA, 501 bp, Setaria italica
  misc_feature (457)..(501): n is a, c, g, or t
  Peptide Sequence Number=SeqID_94947
tagacaaggaatagaccaaccaatggcaggccatgcttgcgtccgccggattctcgcccgtgcaactcagcagcgccgccgaggcacaggccgaatgccttctccggcgcacggccacgccgggcttccatgtggagaagcggcagacggctcttgcgctgcggtggcagcagtctgagctggtgacggtgtcggcgtggcagtgctcaaggtgaagtaattcaggcactgggagggataattgttgtaaattctctatcatgtttacaaagattgaatctttttacatgtaagtagtggagtaggaatatgtgctaacttgttttgtgatgtagcaattgggtaatgcgatgtaattatatattgcataggataattcctgctccaaggctaatatgattgtttcacatagtatttgtttggctaatatgtgaaagcttgaatatatacttacccnnnnnnnnnnnnnnnnnnnnnnnnnnnnnnnnnnnnnnnnnnnnn

SEQ ID NO: 28974 - DNA, 503 bp, Setaria italica
  Peptide Sequence Number=SeqID_94948
gcaagctaagcagatccatcagatggatctgctagcgatgcagttaatcttcatgtcataacttgttcaaacttcaaagcattatggtagtagcttcatgccagtctattccaaatgtcattcaatctctggtcctataacactttgccatggtttgagttgcaaatttatggaattcacgtctgcaagtgcagtgacgtgcccgagagcattgacagacgcgaaaatggttataatacttcaccaggatgttaattggtggcccgtagtgttcatgtccacaagcttcaaaacatgcccgatagcactggccgatgctaatgtgcttgcatttacgaacacgatagcgcaagcatttggtctgtttgcctccaatggagctttcgcaaaaagtagatgtgcccttggcgagagattagtaatcaaggtagtaatgacagccttcagccttctgttcagtgtcctttgtagacccaatcttgttaatccgaggcctgtaagtt

SEQ ID NO: 28975 - DNA, 429 bp, Setaria italica
  Peptide Sequence Number=SeqID_94949
tgttcattgacatcttggatagcataattatcaaacgaactatgttcactttaatacagattctaaatggggaaaacatgtagacatacagaaaggtgcaggaaagaatcctggtttacaagaaaatgatacaacacttgcaacctatgaggctatgactgaattcaaatacgatggaaaaagtattgtatctataactcaagagtggagtaatttagacaatggaatgataagatacttcaatgatcattaaggaaggaaattttatgacttgagattgaccgccttgaaatattcttcacagtagtctgacgaaccaaattatgtagtaactctaccaactgacaagaatcctccactgaatgcttcagcttttgcgtcatgctcccacaaggatcagaatccttgtcattgtctattgttattgta

SEQ ID NO: 28976 - DNA, 574 bp, Setaria italica
  Peptide Sequence Number=SeqID_94950
cggtcggcgtcgtacatctggaagcagagccggagagcatcgtcgcctcgggagttcctgaggctggagagcccgcagaggatctccctcatgtccacggtgccgtcacggttgttgtcgaacaagtcgaacacgcgaggcgccagcggaaccagcgcgtccattttcatcgccttcaggacctgttcaaactcttccagcgtggcgttctctccatccgcacatattcgtgcaaaatgaacgcgcagattgtctagctcctctgagctaagatcatgggttcctaaaaggttcctcagccttttcgtcctcaatgccaccttgctgctaaggacgctggctattgcggctgcccgcagtttccttctagcattgaacctctgcagttttgacacgacctccgcatccatgagatcttgctttgcacaatctcctatcacccaaggatgcctcagaagttgctgttggcctcttgtaaggttcaacagaaagaagactggaaatcaattctttggctgatgaagatattgttttcacgtgtgatcctgaaaactaaactctccttgcaggatcc

SEQ ID NO: 28977 - DNA, 248 bp, Setaria italica
  Peptide Sequence Number=SeqID_94951
tagtttcttcattttttcctttgtcagaactctatgtcggaccagcagctctcatcaatgagtttatcttctggccagtttgggttaaaactgactgaagctaaagatgagacgagtatgactttcttaacattcatagctgagcaagcctcgaatacattcacggtgcccttcacagtcggagccatcatctcttcctcaggactgagacacgcaacagaggataggcaaggcacacaggggatagg

SEQ ID NO: 28978 - DNA, 244 bp, Setaria italica
  Peptide Sequence Number=SeqID_94952
gtttttcccccctttatgctttgctgttgctcctatttctaatgcaaacatggacttgccagcaactcctattaggttccagctttatgctgatagccactgttgtcctttatgtttgaagtgctagccagctttggactagccaagcaaccaaatatggttcaattgcatagcactagacaagcttgagctggcctggctgcagatcctagcctggctaggcaaccaaacagacccatagtcg

SEQ ID NO: 28979 - DNA, 604 bp, Setaria italica
  Peptide Sequence Number=SeqID_94953
agcgacatcttgaatttccagtcctctcctgcctaccatcttcttgccattggaaccaggagaacgtttactaggcacagtcagagccgaggacgggatggcgaacctgacgaatggatttgccagcttccaatgcgcacggttgatgcatatcgagaaagtgcacatgcaagcttctggactaccttctctctgtttcagaagatgcgcccagcttgataactctaggtgaagttgatgctgtcaaatattcttctctccgagagcgtcaaacgtttatttttttacaggaggattccaagtgcttgttgcagtctgatagcctcttattatattgaactatttgaaagaagcagtgtcacgatttccaaactgactgaagtatgattcagataagagaaccaaaagaacatgtaaaaggtcttcagttagaaatgatatgtataatcaattgagtacttatttcaaattgcgggctttgatctgacacttcctaccgtgttattgttgcattgtttaatttgatgatagcgtgctaattgtttgatttcattgcctgcaagatgataccacaaaattctttgtatttcgtggttattggtag

SEQ ID NO: 28980 - DNA, 506 bp, Setaria italica
  Peptide Sequence Number=SeqID_94954
ggatagggtgcgcggggggtatcgtgcgtccagcactcgccccaacacgttttagacctcctcgcgagcaaaagattttagtccagattttagctgtgtgctccatttagtccacctggttgaatcccaaaggcttaaaaaaaatgagctaaaagtgcagaattaaagttttaccataggaaatagaccctaagtgttcttttagccttcaaatttttgtcctacaaagagtggtgtgttttaaacctagtgaggctctctgattacatcaacactcacactaataaaaaaatatatggagaagtgcattgagccaatcgaatgatcgattgatattatttctctgatttcaatgcacatgcatttatttatgattaaaaaaatcaaataaacaacacggatttcaatcacaactaatacgaataattaaaggcaacaacggacacttattttaaagctgttgacaaacatagtgaagcggagatagtatatttttcctccagggc

SEQ ID NO: 28981 - DNA, 480 bp, Setaria italica
  Peptide Sequence Number=SeqID_94955
gatgacaccaggcccaggccctgccccttccacccgtcttggcgaggcaggcagccgctcccccctcgcactgccttgctctgctcccccatcacctcgaacagcggcttcacgaacagcgtgacggtcgcattgcccgcctcagcaacgcccgaagcggccagcggccggaggtacaccgccgcgagctggcccgcggcgtctcggcatgcgtcgcgcacggaggtatccgaagccgggtccttgagccgccgcgcgaggtgggcaagcgccttgtggaggtgcggcgcggcggcgtccgggtgggaggcgcagagcgtggcgaggaggcgcagcgactcgcgcctggcgggtgacgcgagcccctgggagtcggaggccagcgcgttgagcagcatgggcacggcgtcgggcgacggcggcgcgcggatgatgcggtcgaggtcctcgacggcgatgtggtgggtgtcgcggtcggag

SEQ ID NO: 28982 - DNA, 652 bp, Setaria italica
  Peptide Sequence Number=SeqID_94956
tcgacgacccccgcccacctcgggcgccacgcccatccgacgagcaggccgacgagcgcggcgacccagagcggagccgccagcgcggcaagctccagggcggcgccgccgagggtctgctggcggaagatccccatcagcagatcgacgagcgccgacatctccgcccggcagcctgtggaatccgccgccgcgaaaatcctcgggaaattaaattaaagatccaatctttcgccgcggaaccctcgagaacgcggccgttccccgagcaatccgccgcgagggctcggaattggccgatactcccaacgaattcaccccgcaaaaaaaatcgatgatactggaaaagagttttaggtataggatttggggcacttgaggcacaccagaatctctctcgtctcaccactccctcgttggggactctcggagtaccacccagtgcgcaaccaagaagggaaaaatccgggcggaaaaatccagaggagacgagtggagatgattcgaggtggtggaggcgcggaacgtgtggcgggggatgcgtgtgggggataagaggatggagtcccctggcgtcgggccgcgccaacacgaaagctggcgaaatttcgcaacacgaagaaatcggtaggaggaagaagacaagtccggg

SEQ ID NO: 28983 - DNA, 511 bp, Setaria italica
  Peptide Sequence Number=SeqID_94957
gggaggtcgtgtttgaccacctcctcgctggctcgctgccccctcgtctccccttccaccttcctcttctcctcctccgcggccgcgtcgctgggcttggctttaccactggcgggttcccacccggggccaggcgccgccaccgctgaccccgtctacaccgaatccctccccgcgatttaacccctcgcctcgctcgccgccttcgctccctacaacgccgcacaccaaacgcgcacgcgctgttcgtttctcggccgctttctctatctccctccctctaccttgcagatctccgcggcccgtgcggttctttgattcggctaccccggggcagtcggatcttcgcggcggcgggggatgggcaactgctgcatgacgccggggggagccgccgccgacggcggcggcggcaagaagcccaaggagccgaagcagaagaagggcaagaagccgaaccccttctcgatcgagtacaaccgctcggcgccgccgggcggcgcgccgcggc

SEQ ID NO: 28984 - DNA, 496 bp, Setaria italica
  Peptide Sequence Number=SeqID_94958
atggaaattaggatagcaggcataatggctaactagaattcacatttcagcaaaatgaagcacaaacttccaatccacggataggacctagatgccaagatctcgacctaagcaagtaagcaggggaggtgcaaactgatcagtttctcattctctcatggattgcctattcatcttttgttcgcttcatctttcataagcgttaatactaccattctgtcttgacacagacaatacaaacaccagttttccagctattacggtaggtcccactacaaatgaggaaaacaagaaccagctggttactttggtttttgtgaaccagacatcctgcacaggattagccaacagatagaacagaggacagcttgaaatgcagtaggttgccaggacagcgcatcagtgtatttttattactaaaattagctcgacgattataatgcccagcattacatatacatctcatattgggcaaattttagtagaaaccaattag

SEQ ID NO: 28985 - DNA, 454 bp, Setaria italica
  Peptide Sequence Number=SeqID_94959
cccacagctgaagctaggctcaaatataagattgacaaggccaaattaaaggaagctatgttggttgaaaagttaaagaagtatgaggttgcgaaagctcaaggccctatggctaaaccagatgatcttagttgtgaggaaaggttttacttgaagaaggtttcacagaagaagtcaaattatgtccctgttggaaggcgaggagtttttggaggcgtaattctgaacatgcacttgcattggaagaagcatgaaactgtgaaggtcatatgtaagccctgcaaaccagggcaaatccaggaatatgcaaatgagatagctagacttagtggtggtatccctgttaacatcattggagatgacactatagtcttctacagagggaagaactatgttcagccagaagttatgtcaccagttgatacactttcaaagaaaaggcacttgaaaaatc

SEQ ID NO: 28986 - DNA, 242 bp, Setaria italica
  Peptide Sequence Number=SeqID_94960
gatccgtccccgtctcgccaaggagtctgaacggtgatcgccggcaaggatggagcagctccggcagctcggcgaggcggtgggcagcataaacgcgctcatggcgttcgagccggagctccgcgtcaacccgcgccagtgccgcctcctcgccgacgcgtgcgcgcacgctctcgccgccgtcacgggcgaggtgcgcgcgagcctccgcttcgaggagcgcggcaccaagtggcgcgcca

SEQ ID NO: 28987 - DNA, 233 bp, Setaria italica
  Peptide Sequence Number=SeqID_94961
ctcgatcgcgcgcccacacaacacgcacagaggcggcagaggaaagcggcgcgcggcagagcaggttgccagagcagagcacagcggcggtggggcatccacggcacatgcgagcaggagcagcggcgcggaggcagccgcatgcggaggcgccgcgcggggtctctcctcgtgcaatgagcggcgcgggcgccgcgtcgtcgtgccggcggcggcagctcggggtcgcggtt

SEQ ID NO: 28988 - DNA, 264 bp, Setaria italica
  Peptide Sequence Number=SeqID_94962
gttgttcgaattcctacatccacatctgataaaaaagcagtagccagaaagaaacgagttgccgatcgtagattgctgctaggatggagtaccaggggcagcacggccacgccaccaaccaagccaacgagtacggcaacccggttgccgctgggcatggcgccaccggcgtgggtgctgccggcgaccaggtccagcccatgagggacgaccacaagaccgacggcctccttcgccgctccggcagctccagttctagttcgt

SEQ ID NO: 28989 - DNA, 313 bp, Setaria italica
  Peptide Sequence Number=SeqID_94963
acgagaagtgtgtgctccttgtgcgcatggacataaataacgtggttggaccttgattaacaatcgagattaattaatagcgagggcaggtcaagccgggcgggtaatccttgcggccgcaccggtttagactgaggctgatgtcgatgggcacgtggagggaaatgccgaggaggttggtcttgagcacggtgcagaggcaggcggcagcatcgatgtcgacgagcccgtccagcagccggcaacacttctcccgctcctccggcaggctgatcttgacaaggccgtccaggacacttgcgcacacctggag

SEQ ID NO: 28990 - DNA, 689 bp, Setaria italica
  Peptide Sequence Number=SeqID_94964
cgccggcccggcggcaaccccccgttctccccctgcgaggaggtcgccttccgctccctcacctccgcactcgcctgcggcggcgcccggtgagagcgagcgccgcacgtctacgtacgccaacccaccgccggcggtgcaagcccgcacgtgggtggctattcgttcgattcaaagattcattgatttggctggccctcgccggcgaagtaatcagtaatcacacgtgtacggtgaagaaggttaatggattagaggtgcgtgtaaatatggaggattagaggaggaggaggagatcacgaggagtggtgcatgcgcgcggaggattacattagcgcgcgcccgccctcccccgccattggagagaatcgtcgagctcgaggacggagatgagacgatcgacgagacctgcttgtagctttgattggctaagtatttgctggccgctgctgctgcgtgtacgttgtttgtgatgtgttctacttcctggccggcctactgctagatacggttattaggccaagtgaaggaaccatcattatttggttttttttccctgtacatgcaaagatgctggccggctagctagctaccagatcagagcttgcactgcaacgagatcgatcaaccagatgtattcatgcatgtgtgttcctgctcccctcctgaatcattcaattcttatgccc

SEQ ID NO: 28991 - DNA, 415 bp, Setaria italica
  Peptide Sequence Number=SeqID_94965
ccgtagctgtacacgtcgctcttctccgtgatcttcatcatgtacccgtactcaggggcgatgtagccgtaggatccggcgacggtgttggacgaccgcccaaagtcgccgtcctcgacgagcttggcgaggccgaagtcggcaatgtaggcctcgaagtcgagcccgatgaggatgttgttggccttgatgtcgcggtgcacgatcggcggcacgcagtcgtggtggaggtacgcgagcccctgcgccgcccccagcacgatgcggtaccggacgtcccactccaactgtgcgccggcgcctcggcgttcgtggagcaccgcgccgaggctgccgttggccatgtagtcgtacatgagcagccgtgttgtcttgttccagcagcagccgaggaaccgcacgatgttcttgtgtc

SEQ ID NO: 28992 - DNA, 628 bp, Setaria italica
  Peptide Sequence Number=SeqID_94966
tcagggtcagtctatgagaaaaaagtttagagatacgaacatttgcatccagtagctcagatagcagttcacatagcagtggcaccagagagactgacagctgggttatgcacgatgcggagcatgatcattcaggtctgatgctgcaaccacatgatgacctggaaaggatatataatgtacttgaacagtatgatgacctaatgaaggatgaactagcaagcgacgatgtctatggttctgctgctcatattatggatgagaagctttactcgaatggcgttgacgatttccagatcttatcaacaggccaaggtggctaccacggtgagaagaagctgacggttgatcaagaatttgagcagtatttttccaacctcatgctttaggatggaatggataatctcatgacaaaaatgtgttgctctggacctgtaaaagtggtttgcttcctgagcaaagtgcaagccttacttactgttgcagttatcagtctgtttgtacgccacctcttgtcactgaatgtacatatgtttgatatggggcctttttcagtttgcccatcaaatgttggcatcatatatgtgtatgtatgcagatataagaacatgtctaacctaaagagtat

SEQ ID NO: 28993 - DNA, 1933 bp, Setaria italica
  Peptide Sequence Number=SeqID_94967
aaaccgttgtgcatgccctaagcccttctcactgttccccctctgcaacgagttctctccttcgctgccgcaccacgccatcaccgcggcgggggcgagacagccggcgagcgctcagcctctccggccaccgccttcctcgtcgaggctccccggcgactcccccgcgatcggttccgccgccgtcaccgccgcgcaggactcgacaggagtagcggcggcccctggtcgcgtgttggggggcggcaaggatgagcgggaggaagaatgccggcaggacctccccctggctgctcatcctcatctccgtgggatgcttcttcgcgacctacaacttcctgaccatgcacggccggggccgggacgggccgcgcaagttcctcggcggcgccggggatcgggactcggccgtctcgtacgggtcgggctccggctccgacccggcgaagcggttccacgtcgcgctcacggcgacggacgcgctctacagccagtggcagtcccggataatgcactactggtacaaggagatgaggaaccggcctgggtccgacatgggcggctttacaaggatccttcactcggggaagcctgatggattgatggatgagatacacaccatggtggttgacccccttcccgaaggcaaggataagggatacattgtcttaaataggccttgggcgtttgtccagtggctgcagagggccaagatcgaagaagactatatattaatggcagagccagatcatgtatttgtgaagcctttaccaaacttagcccatggtgatgaaccagccgcgtttccatttttctacatcaaaccaactgagaatgagaagatattgaggaagttctttccagaagaaaaaggacctgtctcaaaaattgatcccattggcaactctccagttataatcaagaaggctcaacttgagaagattgctccaacctggatgaatgtttcattaaaaatgaaagaggatcaggagacagacaaagcgtttggatgggtcttggaaatgtatgcatatgccgttgctagtgcactgcatggtgtgcaccatagtctccgtaaagattttatgattcagcctccttgggacctaaaaacagacaacacattcatcatccattatacatatggatgtgattatacaatgaagggtcagctaacttatgggaaaattggtgaatggcgttttgacaaaagatcttatattcaatcaccaccaccaaggaatctttcactgccccctcctggagttcctgaaagtgtggtcacccttgtgaagatggtgaacgaggccactgcgaacattccagggtgggaggatgagagataatcagataattgatggcttggctgagttggagcttacttcagctcacagctggtatggtttttgttggaaaaacatagaagaatgccacggatcaataaaagaagagtgttcaattcatatctaaagtgtgctagtgtaggactgtggccaattgtctacaatttaacgtaggttagtgtttgggaagaaaaggctatatcacattgatctagtgagttgcatcatttttgtactgtaaagcagaaatatgggcttttggttactcttggttcatttagccatgttgtaaagcagagatgtagtttagaatcatccgatgcataccatgaggtttgttagtagtgatcttgggacaaattctgctgggtgctgacaacatcctgctgagtgctatccctggaaaccgccaaaagctttcagaaataatctaatataccttcgatatgcagttgcataatagttgatgtggttttttgctttcgaacctgtttgtaacactgctgtctgttgtgtaatactgtacttattttgttctgctcagaatacaaattgcttggtattgtttgtcttgttcttaaaaaaaaaaa

SEQ ID NO: 28994 - DNA, 402 bp, Setaria italica
  Peptide Sequence Number=SeqID_94968
cacataaattggcgatcgcaccagccaccatccgcaaagtttgaggatcatcagttttagaagcaacatttgctaataatcgagctccacctttgttcataataactccctggtttgatccattcatcgccaagttagcaacagcaccagctgtgactcgatgaatagtggtgttttctgatgtttctagaagggataaaagagcatcgagccctccttcctcaacgattctttcctgattaatatcttcagcagcaagattagcaaccaccttgacagcgtggatctgcacatctagatcctcagacttcaaaagagcaagcacgtttgcaagaccaacttcttcaaatatctttgatatggtacctctctgaccagatagggcctctcttattttcctga

SEQ ID NO: 28995 - DNA, 374 bp, Setaria italica
  Peptide Sequence Number=SeqID_94969
ctcttgttctagtttgcatagtcagttcaagcatatcacagcatgcccagcccccgaccaaacatttttagtccaccctaagctatggaccagtacagatcccaggtgttatggtaaaatgggggcatcacctgccatgcggatctaccatactacaattcaacactacaggtttccttgcacgtgctgaggagcaaaaaaaccaccatgcctcaacacaagactagcaatctaacatcagactatgatttgttgtcagccgttgccttcagagcatcctcggctgtaactctctgcggtacgaaatctgaaagaaacttcaaacccttctgggtgcagacagctgttgaaaagatttattcgttaaattaatt

SEQ ID NO: 28996 - DNA, 406 bp, Setaria italica
  Peptide Sequence Number=SeqID_94970
tggagctgcgcgcttgccagcttggcctcgctgccgaatgccgcgtacacgacggagcgcggcgcctgtctgttcagccactgcaacgtcgcctcgtggccggcgacgtcttgcgttggtggcggagggaatagcccgaccgggatcaccggcttctggtagagctcgccgagcacccgtagccactccggctcgaaccccacgctgctcctgatccccacgagctggctcccctggatagccatggcgaaccggtagccctccgacacgccggagtcgtcggggaccaagcccggctcgaatatctcgcgcgcctcgaaggcgcggtacgcgacggtggtcgggaacggcacgtagtcgggcaccacggtgaggtcctccaggttcgtcttagcgtgcctcccac

SEQ ID NO: 28997 - DNA, 275 bp, Setaria italica
  Peptide Sequence Number=SeqID_94971
cccttcccgtgcctcgtccggtccctgcggtcctccctcgccgccgcgctcggtgacttcctcccgctcgccggtaagctctcctaccgcccgtcagcaggcgacctcgtcgtggactgttcgccggccgccgtctaccctggagttaggttcgtggaggcccagtacgacggcagcatcggcgatatgcgccgcctcgcctgtggcgaggagcacgacccggaggacttgctgcggctcgggcccgagcttgaggtcggcgcctcccgcccggt

SEQ ID NO: 28998 - DNA, 193 bp, Setaria italica
  Peptide Sequence Number=SeqID_94972
ccgagaagcagagcgcagagagaaggataatacacgcatacagtttcatcggttacaaattaaaattctgacaggaaacgaatctgtcatgttgctgatgctgctcctatttgcattcctgatcaaataatattttacaaccaattttcaaagctgcaactccaaaatgctgcagtcgattcgcaacatctct

SEQ ID NO: 28999 - DNA, 2033 bp, Setaria italica
  Peptide Sequence Number=SeqID_94973
ggccgatgaaactgtatgcgtgtattatccttctctctgcgctctgcttctcggttacaaattaaaattctgacaggaaacgaatctgtcatgttgctgatgctgctcctatttgcattcctgatcaaataatattttacaaccaattttcaaagctgcaactccaaaatgctgcagtcgattcgcaacatctctattctaaccatctcagacggacaattggctgggaagtgacggattcagctcaggagaccagatccccactggctcatctgccgttctaggctcccagctcgagtctcaggcttcagaatggaaagatctcctgttgaggctgcagtatttttacccctgccactggcggtgttgttggtcagcaactcggcatcaataccatggcgaacatcctcatactgctttcggctgaacctgttcgaagtcaaacacctcaaacatcaagcgccgcacgtcaggtttgccatacacacagtatgcaagcccgtgtaacgcttgctggacagaggttgttgaaggattcctgagacgtcggttgtgttcaaatttctcttgcaccgattccccatagataacgtagtggtgcaggtgcttgtcccgcaggtatcgtccgcaatacttgttcatcaacatcctcctatgcttctccgccaaccacctgcctggtgcatctagatgcttcatgagcagcctctcagccagcacaagatcctgaatcttctggccaacatattcgagtcgctcaaaacagaatcttggatgctcaaacttatgttttgacgggtgcaaaaagcagagctgtagaccaagtccaagctctatattccttgcttctgtgatttcaggaattctgtcattcatgggcaagggatatcctagggtgttcatgaccttgggtctactgtcaaaatcccaaatgtttcctctgaaacgatgcatgcctggtggcacacaagctcggaaaagcctcggatgagcgaaaagggcatctggtggtggcctgtaggcagcaacatcctgccatgtgagttgtctcttttcaaactccactgagacataatcaacatcttctagttggcgcctcaattttggctgacagctctcatcatcagggtccatcccaaatgcctcaaaaaggactcgatagacttcgggcatcccaaagcacaaatatatagccccaaataatgcccagaatacagccttggatggcggctcccggtccttgcgtatcatcttatccaaatcatcataagggaacaccaagttgtgcaggctggccgccttgagccatttgggcaacaccttcttcccaatcagagcgaacacccgctccctcatcggcccgggtgattccctcgggtacctctgcaagaagaactcacagaacgcgagctccaggacgtactggcccaggaaccagagcctggagtggccgttccggacgtgccgcgtccgcgtgcgctcgcaggaggggtccagatgctggaacgcgaggtagagcagcacatcgaaatgacgggcggggcagtcatcaccttcgccgagcgtctccgagggcgcgagcgggtacccgagcgcctgcttggcctcgaggaggtactcgtccatccaggtcctgtcggcggtggagagcggcgcggaggggaggcatgaggagagcagcgggagcgccttgagtgacaactgcgggctgctgaggaaacgccgggtgaggcgctcgtcgtcgagcggaggcttgaggatgaaccggcgcggcgggtgcttcttcttgggggatacggccttcttccgctgcgcgagctcccggaggaggcggctagggctgttcgccggctccgaagggggcaccggcggcggcggaggggtctggtcggccgcgacggcgaggacgcggacgcgaaatcggcggttcgagctggggagagagagggggagtggcgtgagggtgaggacttggaacgccatggcgggtggcgccattggtggtggcgaccggcgaccgcgagctccggctg

SEQ ID NO: 29000 - DNA, 843 bp, Setaria italica
  Peptide Sequence Number=SeqID_94974
tcccgaacatcgccgatggcgacccgatcccggacgaagtgaaggtcaatctccacatgcttggtccgctggtgctgaacagggttggtggagaggtacaccgcactgacgttgtcgcagtagacaagagtgctccgggaagaaggagtgtggagctcgacaaggagctgccgaagccaggatgcctcagccacgccgttagcgacagcgcggtactccgcctcggcactggagcgggagaccaccggctgacgcttggacgaccaggacaccaggttgccgcccagaaagacggcgtagccggaggtagagcgccgagtgtccggacacccggcccagtcagcgtcggtgtagacaacaagctcagtggagggagaccggtgaaggaggaggccgtagtccacagtgccccggaggtaacggagtaagcgcttcagagcagtgagatggggctctcggggatcatgcatgtgaaggcaaatctgctgaactgcataagtgatatctggcctggtgaaggtgaggtactgaagggccccagccagactccggtatgcagtagcatctgtcacaggagtgccggcggcctctgacaacttggcctgagtatcaactggagtggagcagggcttgcagtcagtcatcccagctcgctccaggatatcaagagtatactgccgctggtgaagaaagaggccggcctgacgaggctcaacagtgaccccaagaaaatgatggagcacacccagatccttcatagcgaactcctgctgaagcgaggtgatgatccgccgtaggagggacggactggaggcagtgaggacaatgtcatcaacatagagc

SEQ ID NO: 29001 - DNA, 291 bp, Setaria italica
  Peptide Sequence Number=SeqID_94975
tcccgggccccaccccgacggcgtggttgttggaggcgtcgatgccctggtggagcggctcgcgcgcctgctcccagcggaggtccggggagaggcggaggacggagggggagggcgcgcaatcggaggggacgacgccgtcccagcggttggcgacgactccgccgcggccggccatgttggactggcccgccaggatgaagatgagcttgtcggacgggggcacgtcggcgagggcggccggggaggaggcgaggaggaggaggaggaggaggaggaggagcatctcca

SEQ ID NO: 29002 - DNA, 249 bp, Setaria italica
  Peptide Sequence Number=SeqID_94976
gctagtgcaattcgctaaacctccgtagatcaccagcctctgcgcttctcctcggttagtggcttcctgctgccggggaggtaggcaaggcaaagcagcaacgccggcgccatggacgtcgacgtcgtggaccgcgcgcgcaacgggggcggcgacgagatccagaagcacgagctcgtgcccgaggaagacatggagtccgacccggcggcggcgcgcgagaaggagcacgtgcagccgtggcgcgag

SEQ ID NO: 29003 - DNA, 897 bp, Setaria italica
  Peptide Sequence Number=SeqID_94977
ctgaccccatcgatttgggtggttgcgttgcttggagttgggaggtggagtgggagaggaggatccgagcggggagggtatggaggagagcgattagcggttgccgagtagggaggaggggtagttcttgatcttactcgcgtttgccgggcctcgaatttgagtgggcaaaggttgtttctttaccgggattcttgggcgtgtgttttgggtgaatttcgggggctgcaagttgttatcctcgtggatttctgtttcgggcgttcaattttgttgtcggaatttttaagcgggagccaatttagggtgatttttgtttttctttctgtgttgggagcaatgagtttggttggattccatgtttgccgcatgaagatttgatggttggtgacgcgcttaatttctcaccggattagagattttttccccagaaagagccatttttcctcggttgtgctagtctgtcaatccaattaactcgaactctgaaagaagaaactttcccaattggaccaggatttttgtggttggcgtctaaagaagtttttggctcggcagatccaagagaacgccgaatttgctcaacttttggcctgatagggaggtccccgagctttttttttcctcgcgagaagcaaggatttttctttttgcgccatgtccatggcgttgagccgcttcacgcaatggctgtggccggggggcgccgcggcgcgggtgtccacccacgagctctcgagcgcggggctgacgagctcctccttcccggacttcccctccggcttccgggagcccgacaccgtcactttctacaccggcggcggcggcggcgcgggcggccgccgcacgcgcccgaggagggtcaggaaccggcgccgcagccgcggggagtcccgg

SEQ ID NO: 29004 - DNA, 480 bp, Setaria italica
  Peptide Sequence Number=SeqID_94978
actacaaccacggaggctccatcacatcaaggacttgagtgaccgcgccttcaccggcttcctccaccgcttccacgggtcttcctcttgccgtcaccgttgctagcatgtgatcaccacttccatccatgctgctgccagcgataccaatcccatcgtagtcgtcgtcgctgctatcctcgtccacaccagcaatccctgcaatgtcgtcatcacagctagacacatcattgtgaggagcagcccgattggtatcttcagcagtttgagcctgatctgcagcaggaggagaagcatcttcaggcacttcctcctcctcttgctttacagcaggcacaggctcgttggtgccgccgcttctgcagtgcctcttgctgcggaaggggccgaacccggcgtagtagtagaagccctcggtcgcgttgaagtcgctgctgggcttcttctgtcgcggcttgttgctggagggcttggaggcgg

SEQ ID NO: 29005 - DNA, 369 bp, Setaria italica
  Peptide Sequence Number=SeqID_94979
cgtacaatgcagtgccatgtccgtttcctgcagatgcagaggctcgtcctgccggtggatgctgtgctctggcaccgcagccctggggcctgggccaccctgctgtctgctggctgctggtgaacaggctcggtctgggcagcaaaggcgtggctctagccaatgccgtctcctacctggttaacctgtcattgatggcgctctacatcaggctctcaccatcctgcaaggccacctggacgggcttttctggtgaggcgttccgtggtatccctggcttcttgaagcttgctgtgccatctgctgccatggtctgcatggagtggtggtcctttgaactcctggtgctcctcgctggtcttctccccg

SEQ ID NO: 29006 - DNA, 239 bp, Setaria italica
  Peptide Sequence Number=SeqID_94980
tgtgattggagttggggctagggttttgggacccgcggagggcgtgctgcgcgagaagggactggaactgaagcagcttcctccgcatggcgaacccggctggctacgcctgcaaggctctcttcggctgctccggccgccgtctcctccgcgcctggcggtggccaatcggtggaggttgatagcttctgttccaactccgagatggggggtttcgaacattcgatcgggaaatgacg

SEQ ID NO: 29007 - DNA, 494 bp, Setaria italica
  Peptide Sequence Number=SeqID_94981
tgcaatgagtagcagggacaggttgtaagttccagttcacgatttgcctctcctgaggacttcaaatacaagcagaaatctcttgttgattcaccaatggaaataacatctgaaaagaaggtgcctatactgctcagtagaaaatatcctgataaactgaaagatggttttgttgttgcattgagagcaagagataattcagggtaccatgttgcgagacagagagtagttggtggtggtggctggattcttgatgttgtgtcaaatgctacaaacagagatcctgctgctcagttcctagttactttcaaaaacaaggtatgtttataacaaccaccctcctcttccattttcacgcgtgctttggttttatgcacatgcaggccctgataaggcacgtacttttcaggatactatggggctacgatcctttgttgctggtggtaaactactgcaggtacatctctccgactctatggccagagcttctttct

SEQ ID NO: 29008 - DNA, 1969 bp, Setaria italica
  Peptide Sequence Number=SeqID_94982
gtccacgtcgacgccaaccgcgccgaggaggtcgccgacaccgtcatggcgctcatcctcggcctgctccgccggacgcacctgctctcgcgccaggcttcctcggccccggccgcggtcgccgccggatggctcggctccgtccagccgatgtgccgcggcatgcggcgatgccgcggcctcgtgctgggcatcattggccggtccgccgccgcccgctgcctcgcgacgcgcagcctcgcatttcggatgagcgtgctctacttcgatccgcgctatgtggccaatggggaaacaaagaggccttctattgtgtttccttctgcagcgaggagaatggatactctcaacgatttattagcagcaagtgaccttgtttcactgcattgtgcgttaacgaatgacaccatgcatatacttaacgcagactgtctgcagcacataaaacctggagctttcattgtcaatactggtagttgccagcttatagatgactgtgcactcaaacagctcttgattgatggtaccatagctggttgcgcattggatggtgctgaaggtccacagtggatggaagcatgggtgagggagatgccaaatgttttaattcttccacggagtgcagattacagcgaagaagtgtggatggaaataagagagaaagcaatcactatgttacagtcctttttctttgatggtattcttccaactagtgcaatttctgatgaagatgatgaaataagtgaagctggaaatgaagatgatcatctagacacacaggcaaaagatagccagtcacagatttttgatgctgaaatagatgaaagccacttaactctggagtatgaaaagaaaagagccgtgtcccaccataaagagcctcaggcttctggaaaatctgtaaacattggctcccgatctgaaggaaggcgtagtcgatcaggaaagaaaggaaaaaagaggcctgctcatcgcagatctcagcagaaacctgatgacttgtctgctgtagagagtgatagtaattattcctcacggagagatgatgacactgcaatgagtagcagggaccaggttgtaagttccagttcacgatttgcctctcctgaggactcaaaatacaagcagaaatctcttgttgattcaccaatggaaataacatctgaaaagaaggtgcctatactgctcagtagaaaatatcctgataaactgaaagatggttttgttgttgcattgagagcaagagataattcagggtaccatgttgcgagacagagagtagttggtggtggtggctggattcttgatgttgtgtcaaatgctacaaacagagatcctgctgctcagttcctagttactttcaaaaacaaggatactatggggctacgatcctttgttgctggtggtaaactactgcagattaataggaagacggagtttgtatttgcaagccattctttcgatgtttgggaaagctggatgctggatggttctttgctggagggttgtaagcttatcaactgcagaaatccatcggctgttctggacgtgtgcattgagatccttgcagctgcaagtgaagaagatggagtcactcggtggcttgattagccacgctggccgctgggggctgcaaaaatgaactgactgatcattactgtttggttctgcttgcttccggttttttctttctgctcaaattttggtttctctgatacaggaacccctgtagctgtaggcacatcatgtgcacatcacgtttgttagtactgtcgttattgtcgtgtagacccaatcctcgtgccacacgcttctggcgatgcaagactgcatatcgtgttagtaataggagtacacatgcacaagcgtggttgatgctgacttgagcgtacaggtaaactgctgaaggcagccgctgctgcattttaacaaggaaattttgaaccgaagaaaaaaaaaaaaaaaaaaa

SEQ ID NO: 29009 - DNA, 352 bp, Setaria italica
  Peptide Sequence Number=SeqID_94983
cacgtcggcaggtcggtggcggcgctggcggaggagtggcgcgccatggcggcctccggcgggagcggcgaggtggaggtggacgtcgccgagtggttccaggcggtcacggaggaggccatcacgcgcgccaccttcggccgcagctaccacgacggccgtgccgtgttcgccatgcaaggccgcctcatggccttcgcctccgaggccttccgcaaggtcctcgtccccggctaccggttcttgccgaccaagaagaactggcagtcgtggaagctggacagggagatacggcggagcctgacccggctcatcgcccggcgcagcgacgaggccgaggcggagaacgccg

SEQ ID NO: 29010 - DNA, 437 bp, Setaria italica
  Peptide Sequence Number=SeqID_94984
cagagacacaagaggcacaagaacaagcctgaagaaggaagacgacggcgacggtggcggcgatggggtgccggtcctgcgagaagcccaagatgaactacaggaaggggctgtggtcacctgaggaggaccagaggctgagggactacatcctcaagcatggccttggctgctggagtgctgtccctgcaaaggctggtcttcagagaaacggcaagagctgccgcttgcgttggatcaactacttgcggcccggattgaagcgtggaatgttctctcaggaggaggaagacgtcgtcatcaaccttcaggccaaactgggcaacaattataccaagcatgtacatgtcgctgatgaattgggatctcaggtggtctcagattgcgatgcatcgtacccgggaggaccgacaacgaggtgaagaactactggaact

SEQ ID NO: 29011 - DNA, 1282 bp, Setaria italica
  misc_feature (1)..(61): n is a, c, g, or t
  Peptide Sequence Number=SeqID_94985
nnnnnnnnnnnnnnnnnnnnnnnnnnnnnnnnnnnnnnnnnnnnnnnnnnnnnnnnnnnnnaggtttttttccttaaaaggtacgagcaatgtttattcagaattggtaatcaagtattcaagtggaatcattcccagcagtttgcagcatacaattctttccattctccaacggaaaagatgcatcatccgtgactttagctagctatccttgataaactgtggcatgcaagacgtgtctgcgacatagcagcagcgttcctggcatgcacatcctagcacagcactacaacagaggattggttcaaggtcaaccgaaaagacctcttccttgagaaccgagtggtattacaagtacaatatacaagggcatacatctacagttcagaagaacctctcgatgagttcagaatccgacaacagttctttcaatccaataaatttgctatactgcaaggtaatccaaccaacagcagatacatatgcgacaagaaggcaggcacgcttcagccggctagcaaataccctgatgctatgcttcctcacggcccacctggcggcagcaagcaataatccaaagaagcctctaaataagacggtaatgatcatcgaactcaacatgccaagcacaacacctgctgctacatatccaagcattcgttctgaactgaaatcttctgacgtgtatgactttgaaaacagtgtaagtatccttttgagaatctcccttgttgaaggttcctcagcagaacaattgaatagcttgtccgagtgaatatcagccttgttactacctagtgtatatctgcagctgtacgattcattgaccttgaactttgatgttgtcgaccatgcagcaccaaaatcaggtcgacaattatgaggaagagcctccttcggggtctctgccacagcataagatagttggccagaaaaatattctgtgtattcaacctggaaaactgaagcccagtagtagtcatcatggcagcggaatcttctcttactcgatgggtaaaagacatgcttagctctatagttcaataatccaagctcacaaacttttgatgacctgatgtcaacgccagtggagaggatgcggcaggtggagggcatggagacggatgcagtggatgagaggccaccaagcgcgagaccctgcgagcccgacgaggaaggagaagaggaacgaggccgcgatgggaaggccacccgagggcgccacggagagcagacctaggtcgccgctggctccgctccgtctggttgtgccccctcgacc

SEQ ID NO: 29012 - DNA, 259 bp, Setaria italica
  Peptide Sequence Number=SeqID_94986
cgcttggattttgaaaccttagtgcaattttagaaggctaaaagaatcgcatataatcattattctttggctccgaagttctgctggcagtcctgcctccaaatgtagttgaaggttggagctcatagccgtatatatacccatttttccttcaatcctccaaattaactgatgatcgttttgttgagctccaattaatgttcactgtgaggcaagaaactgcaccttcattttgagctgggccatactctcattcgtg

SEQ ID NO: 29013 - DNA, 346 bp, Setaria italica
  misc_feature (27)..(27): n is a, c, g, or t
  Peptide Sequence Number=SeqID_94987
gtgctcctcccatccccgtatccgcanccttgcccatccgcgccgccgccacgccgaaacgccacccatccatgcccccagcttatgccgtcgtcgtgcagacccaccgtcgtgccgcgcctctgcttttcgtcccatcccatgccgagcgcctccctcgctgccgccaggcctgcgccgccatcctccccaagctacccgcggtgcagatggagggccacggcgacgacgacttgagggatttgttctccaagtcggatccggttttccccgccaccagctatggtttcttcttgcaggcggagtcttcccaagctccccgagcgggcatgcaggcactggacct

SEQ ID NO: 29014 - DNA, 895 bp, Setaria italica
  Peptide Sequence Number=SeqID_94988
tcaaccaaatacctcaggagcaagaacgccccggcgggaggaggaggaggaggaagaggcggcggagacgagatggcgccggcggcctccaaccgggagcaccgagaccgagaccgagaccgcgaccgcgacctctacctgtgcctgcccggctgcgtgccggtgcgcgccaagcgggggagcaccacggcggcgtcggcggcgacggtaaccaccacgacgaggacgtcgcggcacaacttcgtcaaggccgcggcgtcgggcctgctcgcgggggcgcagttcaccaaccacgagtcgctcccgccgctgcccgacgcctacgccgagttcgccgccgcgttcccgctgtacggcgcgctggcgcgggccgacgccatccgggacgaggagtacccgcacctcgaccgccacgtgtgcctcgactacaccggcatcaacctcttctcccacgcgcagatgaactcgtccctgccttccacctccgctccgccggcatcggcggcgtccgtcgcgtggcagccgcccttcttcgacatcgcgtacaagtcggcgagcctgcgggcacaggtgcaatgcggggacgccgcgacgggggtcggcgccgccgtgacgaggcgcatcatggcgtcactcaagatccccgaggacgagtacgccatggtgtgcacggcgaaccggaccaccgcgttccggctcctggctgagtcctactcgttccagcccggaaagcagctgctccccgtgtacgactacgagagcgaggccgtggccgccatggccgacagcgcgcgccgccgtggcgcggaggtcacgccggcgagcttcgcctggccgagcatgcggatccacggcgccgacctccgcaagaagctgtgccgcggccggcggcgcg

SEQ ID NO: 29015 - DNA, 595 bp, Setaria italica
  Peptide Sequence Number=SeqID_94989
ccgcctgccggcttcacaagaacatggcgctggggcagcgcatcgccgactacctcgtcgccaacgggctcgccaactccgggatgtacgtgctcctgtccaacatctacgcggccgtcgggaactggcgtgaggtggggcgggtgcggtcgatgatgaaagcgagcggcatccagaaggagcccgggtgcagcgccatcgaggtcgggcggcgggtgagcgagttcgtcgccggcgacacgagccacccgcgcaccgacgagatctacgccaagctggaggaggtgatgagcgttgtggtgagggagcacgggcacgtgccgcagacggagctggtgctgcacgacctggacgaggccgccaaggagaaggcgctggcggtccacagcgagaagctcgccgtcgcgttcgggctcatcagcacgccgccgggggagaccggatcaagatcgtgaagaacctccgggcctgcgccgactgccacgccgtgatgaagctggtgtccaagatcacggggaggaggatcgtgttcagggacaggaacaggttccaccatttcgtcgacgggcctgcagctgcgggattacgtggtgat

SEQ ID NO: 29016 - DNA, 349 bp, Setaria italica
  Peptide Sequence Number=SeqID_94990
tactgttccgtgccagtgccaacccaccccgagaatggcgagaagcgccgccacccggctgctcgcctgctccgctcgtcccttccgcccccagccaccatcaccaccgcgcgcctcgccctctcttcctcctccctaactcccgctccaagatcaccacctcctcctccaaccttccccgcccgtcgcctggccgagagcccggcccctcactcttccatgaaatctctgacatcgtcgcccctgccgtcagtggtgccgcattacgacctgaactgaatgatgaggcgtgtcgtgacgatcacggagctgctggtgtccggtgcggcggaaggtgctcggaggaatt

SEQ ID NO: 29017 - DNA, 453 bp, Setaria italica
  Peptide Sequence Number=SeqID_94991
gagaccgtgtacagaactagctaagcttttcagcttcttcttcagttcttccccatgctaatagcagccgggaggctgctccagtcaataatgcccgctaccggcaatgtcctctgcatttgatctccttggttttttgcatttttctccatgttcagtttctccatgtcctgaccaaggtcagcctcgggccttcgtctaggccttcacacaccaattcgccattcttatcagtgtagcagaggattcccatgttcttgtcctcataaaccttgtggaccttgccagtgaagctgacagacttggggctttttttcaattcagaacttgggcaggcatccatggaggctctgatcatcatctttcttgaactcttcctcctctgaacgatggttgcagtcgattgaaggcaatagcacctcaaggccgccatggatgatgggattagaggag

SEQ ID NO: 29018 - DNA, 1075 bp, Setaria italica
  Peptide Sequence Number=SeqID_94992
ggctgcccagcgacgtcgtcttcgaggtgcatgacatgaccttccacctccacaagttcccgctcatggccaagagccggaagatccaccgcatgctcaccgagcaagaggagcagcgtccggcgcggggacggcggcggaggaggagtagtgacggaggcgattccggcgatgacggtgctgcggaaacggagattgaggaagccgacgatgaggaggaggagggggccgaggagcagcaggttaggagggaggacgacgggcaggtgtacagcattgcgttcccggatttcccgggcgggccgggcacgttcgaggcggcggccaagttctgctacggcgtccgcgtcgacctcaccgcctggaacgtcgcgccgctgcggtgcgccgccgagtacttggagatgacggaggaccacgccgaggacaacctcgcggcgcgcgcggaggcctacctggacaagaccgtgctccagcaccccggcgacgccaccaaggcgctcaagtcctgcgaggagctgctgccgctcgccgaggagctcggcattgtggcccgctgcgtcgaggccatcgccgcgcgctcgtcggccacgtcgcggtcatggttcgacgacctggccgtgctcggcttgcgcatgtacaagcgggttatggcggccatggccgcgcgcgacgacgtcagggcggaggcccgggagagctgcctcgtgtcctacgctaggggaaccatcccggggttgtccaggtccatgcgccggcgcctcgcgtccgcgcccgtgtcgtcggaggtggagcagaaggagctcctggaggcggtggtcgcgagcctccccgccgacaggtgctccgggcgcgtggtcaccgccaagttcctgttcgcgctgctccggacggcgcacatcctgcgcgcctcggacgcggcgcgcgcggcgctggagcggaaggccgccacgcagctggagcaggccacgctggaggacgtgctcatcccgagctactccggcgccgcggagacgctctacgacgtcgactgcgtcgagcggatcgtcgggtacttcctcgccgaggaggagat

SEQ ID NO: 29019 - DNA, 250 bp, Setaria italica
  Peptide Sequence Number=SeqID_94993
ctgcactgcaagatcagttcagctagtgcttcacacaagagctagtgagaactgagctgcaaatcgctagtcaaacagcgtgccaagccaagatggcatcctcgctgagtagccgggccttgctagccggggcggtgctcgtcgccgccgcgctgctgctcccagcccgccacgcgatggccaccaacgacgacaaggccagggcacccacgtcggccaacgataaggccgcgccggcaccgtcctacga

SEQ ID NO: 29020 - DNA, 285 bp, Setaria italica
  Peptide Sequence Number=SeqID_94994
cacctacgttaatgaccatcccgttcggccaaatttttgcagcaacttaaattacatggccgaacgagagtgctacctctactatcgctttgtatagcccttcttttgcatcatgtcttatcccacatgcttagtttcggttgccgtacgtgcaactgctctatttggcacttggacgcccatttgaggcgccgcgcgctgttagatctgacgtagagcttaaccaccgtgctgcctttggtattttcaactaccataaagtcagatcgtccttcctcatttggg

SEQ ID NO: 29021 - DNA, 245 bp, Setaria italica
  Peptide Sequence Number=SeqID_94995
cctgctcatctagtatctcattgagctcaccttgatccagggacgtgacaaagtgtgccacgaggcccacaccttcaggcgaaatgtacataattttctttcttgttagaagttcaacaagcatgacgccgtagctgtagacgtcacttttgtcggttaatcgccttgtgtagtagtactcgggatccaagtagccgaatgttccttgtatgccggttgtcactcccgattgatcgattgcaatg

SEQ ID NO: 29022 - DNA, 900 bp, Setaria italica
  Peptide Sequence Number=SeqID_94996
ccgaaaggtgagtgttaaacttcctgcatatccttttgttttcaaataataactaattagtgtggaaagcatggtctaataggggatgctccattctcgtggtgaactattactcatgcttgatgctgatggggcaacaaaagtgactgatttggaaaagctcgaagctcaggttcatgcattggctcagaaagttaattccagccctggaacatctactggttcacctcagaaagtatcagatgttgaaattgctgtctttggctcacgtgctcatttggagaagcaggcgcttgcaacagtaaatctcttgactcccggttaccctcaattgcatgattttctttctttttcaccttacctttttgtattcatttatgacttatcgcagaggaagtggtatcgaaactttcttatgaaaggtttccacttggtagttttgttgactgctggtcctgggatcagagacacacaggtatgttttatttgcttaatatcctctaataaacgagtgcagttgattttacatgtactttcttcatgactacactgttcactatccaccatatgtgcattcttttacaaattccagtgtgggtttaagatgttcacacgagctgctgcaaggaaacttttcacaaatatcagattgaagaggtggtgttttgatgttgagcttgtatacctgtgcaagcacctcaggatcccaatggtagaagtatctgttaattggactgagatacctggatccaaagtgcgcatgacaagcatcatgcacatggtatttgagctcctgctgatcagagtaggctatggactgggcatatggaaaatatacacataaaccctgacatctgttgttgacaactgcagcttagttcatcgtcaccatgcaagtcc

SEQ ID NO: 29023 - DNA, 1412 bp, Setaria italica
  misc_feature (1358)..(1412): n is a, c, g, or t
  Peptide Sequence Number=SeqID_94997
cggtggactcagcaccggccgccggggacgcgatggtggccgtcgcctggcccctctccgccgtcgccggcctcatcccggcctcaaccacgctgaccctcctcatcgccaccctcgtgtccatcctggtgctgggcgccgccgccttcttcttcgagcacatccgcaggatcggatgcatgcactcgctggaaagatcggccgtctcagacgccttcttcgaggaccccaattcgctcaacaaggttccctgcccgtcgatttttgatcctcctgagaagtacatttcgttgatagttcctgcctacaacgaggagcatcgactccccgaggctcttacagaaacactcaactacctgaaacgtcgtgcagctgcggacaagtcgttttcttacgaggttttgattgttgatgatgggagcactgaccgaacctctaaagttggcttcaagtttgtaaaggaacacaagattgacaatgttagagttcttctacttgggagaaatcatgggaagggtgaagcagtccgaaaggggatgctccattctcgtggtgaactattactcatgcttgatgctgatggggcaacaaaagtgactgatttggaaaagctcgaagctcaggttcatgcattggctcagaaagttaattccagccctggaacatctactggttcacctcagaaagtatcagatgttgaaattgctgtctttggctcacgtgctcatttggagaagcaggctcttgcaacaaggaagtggtatcgaaactttcttatgaaaggtttccacttggtagttttgttgactgctggtcctgggatcagagacacacagtgtgggtttaagatgttcacacgagctgctgcaaggaaacttttcacaaatatcagattgaagaggtggtgttttgatgttgagcttgtatacctgtgcaagcacctcaggatcccaatggtagaagtatctgttaattggactgagatacctggatccaaagtgcgcatgacaagcatcatgcacatggtatttgagctcctgctgatcagagtaggctatggactgggcatatggaaaatatacacataaaccctgacatctgttgttgacaactgcagcttagttcatcgtcaccatgcaagtccatttgaaggatcactgtaaaatttttcggatattttcacctggagagaatccatgcctcctgtactttagtgtctgaatcatagagagtgacaaatatacgccgaacttgtccccactgataaattctcctactgatttgttatacaggacatcaaaattcaatcaatggaaaaagaaaaacttatctgcttctgagtctctttaaaaaaaaannnnnnnnnnnnnnnnnnnnnnnnnnnnnnnnnnnnnnnnnnnnnnnnnnnnnnn

SEQ ID NO: 29024 - DNA, 301 bp, Setaria italica
  Peptide Sequence Number=SeqID_94998
aacagaacatgcctgtggtttgatgacatcagagcattgctttcctaccttacatatcttccaataatattttcccaagaatttcaaagttttagcagaatgtctgctcctagaattgacaggtgacacttatagccaatatggttaggaaggcaatgctttgttttaacttttacaattcatcacacagaaacagggaaaatacagtctgatcaaacagaaatgggcagctacagttagatgggaatcagtccactttatatgcaaccatccatccaaaatcacagaaaaacctcaaaat

SEQ ID NO: 29025 - DNA, 261 bp, Setaria italica
  Peptide Sequence Number=SeqID_94999
gataatcattggtttaatagctagtcagacatccatgtccagcacgagcgctgcgtcccctttgtcgacggtgaatgccttgagcatcttcccggccgccgtggtgacctgcgccacgtaggtgccatggaagcccctgaacctgaactgcccgtcgccgtcgaggcgccctcgcgcgtcggtggtccactcattccggagctcgacgaacctctgcccggcgccgttgacggtgccgtcggcgttgacgagggcggccgg

SEQ ID NO: 29026 - DNA, 333 bp, Setaria italica
  Peptide Sequence Number=SeqID_95000
cgaagtgcttggtgaagaagtccacgaaggccgggttctggatgacgctggggttgatgcacgccccgaacgggaagctgctgtccatctgaaacacccggacggacgcgccggagatgcccgacgccgcgctgccgaagttgaggacgacgtcgcgcttgcgcaccttgtcagtcttcctcctgagcttcctgaaccgcgccctgcggtcggtggcgtagacctggaggtccatgaccttgacgtcgacgccggcgggcgcgccctgcacgtacacggcggcggcgcacgggctcttcttgagccggaacgcgcccttgatctccgtccacc

SEQ ID NO: 29027 - DNA, 787 bp, Setaria italica
  Peptide Sequence Number=SeqID_95001
gccgcctcccggaacatgagcggcgcgacggcgtcgccgaggcggtcgcggaagaagcggccgtggagcatctcgttgttgacgtcgtagtgcgggaaccggccggcgtagcgtccgaggaggccccggacgcgggactccacggcggccgcgagctggtcccggtcgccggcggggatgtccttgatccactgctggacgtcgccgtcgacggcccagaagatgcagtggccgcgcacgggcttcccggcgcggtcgcagaagtcgaggaggcggtcggcgtcggcgtagttgagctggccccgctgcgcctccgtccagtaccacttgagctcgttctcgaagacggcccagtcgaagtgggtggtgaagaagtccacgaaggccgggatcttgatcacctcgcagttgatgcagctgcccagcgggaaggcgttgtccagctgcaccacgcgcaccgacgcccccgccgacgccgcgcttgcgcacctgaggaccacgtcgcgcttgcgcaccttgtccgtcttgtccttgaggtggctgaagcgcgccttgcggtcggtggcgatgatccggaggtccatgaccttgacatcgacgccggccggcgccccatgcacgcgcaaccgccgcggcgccgcggctctccttgagccggaacgcgcccttgatctccgcccacctgccgggctcggcgcagaccgcgccgccgtcgacgacgcggctcccgtcgccgtcgccgcccacgcggatgctgacacgaacggggtggcctgctccgtcctcc

SEQ ID NO: 29028 - DNA, 391 bp, Setaria italica
  Peptide Sequence Number=SeqID_95002
cctgaacttgaagtggccggcgctgtcgatgtgcccgcgcgcgtgcgacgtccactccctccggagatccacgaacctgcaggtgcagaacacaaagtgcacgtcagccaccgataatcagtaggccaaattcgattctttgtgctgcgatttggggttcgagaatcggtaatggagagtcggttagtttgatttgcgactggcctttcgccggcgtcgttgacggtgccgtcggagttgacgaggcaggcgtcctggcgccacatgtgtccctgcatgaacccccagaacacgacgccctcgacggccgggtgcgcgtacgcctcccggagcacgacctcgaggtcctcggcgcggaggtcgacgtcggactcgcacacgtccagctcgg

SEQ ID NO: 29029 - DNA, 598 bp, Setaria italica
  Peptide Sequence Number=SeqID_95003
taactaagaaccggaacctacggtagaagacaatgccgtcggcgttgacgagctggccgtgggacctccacatgtgtccctgcatgaaccccccacagcatgacgccctcgacggccgggtgcgcgtacgcctcccggagcaccacctccaggtcgtcggcgcggagcgcctcgtcggcctcgcacacgtccagctcggtgatccagacgggcaggcccgtggcggcggagagcttgtcgagcgcgtcgcagatgacctccccgacggggttgctgacgtgaccctgcagcccgatcccgcccacctgggcgccgccgcgctggagctctgcgatcaactccacgtacttctccggcgtcgcgttggggtcgttgccgcactcgacgttgtagtcgttgacgaagagcgcggcgccggggtcgagccgcgccgcctcccggaacatgagcggcgcgacggcgtcgccgaggcggtcgcggaagaagcggccgtggagcatctcgttgttcacgtcgtagtgagggaaccggccggcgtaagcgggtgaaggaaggactactaggaaggacgttacctaggaacggacggaacttagaa

SEQ ID NO: 29030 - DNA, 2042 bp, Setaria italica
  Peptide Sequence Number=SeqID_95004
atagctcgttgactttattcatcaccaccaataattcttaaggagtacaataccttaagtttctcttacaatacccagtaatcatagaaatgtaaaattacggagtgctttctgtttgcggtacatatctttcgcactccgtaggatcaaatcaatgtatatgtagtgtgtatgcatcggtataattaactaggacctttgtttcaaggcagtatatgataactagggagtggcagcggtgatcgtcaaaggttcatgtccagcacgagaggggtgtcccctttctccacggagaaggtcttgtgcaccttccccgtcgccgtggcgagctgcacgacgtacgagccgtggtaccccctgaacttgaagtggccggcgctgtcgatgtgcccgcgcgcgtgcgacgtccactccctccggagatccacgaacctttcgccggcgtcgttgacggtgccgtcggagttgacgaggcaggcgtcctggcgccacatgtgtccctgcatgaacccccagaacacgacgccctcgacggccgggtgcgcgtacgcctcccggagcacgacctcgaggtcctcggcgcggaggtcgacgtcggactcgcacacgtccagctcggtgagccagacggggaggtcggtggcggcggagagcttgtcgagcgcgtcgcagatcacctccccgacggggttcgtgacgtgcccctgcaggccgatcccgcccacggccgcgcccttctgctgcagcgccgcgatctgctcgatgtacttctccggcgtcgcgttggggtcgctcccgccctccacgttgtagtcgttgacgaacagcgtggcccccgggtccagccgcgccgtctcccggaacatgaaggcgtcgatgtcgtcgccgagccggctccggtagtagctcccgtggagcatctcgttgttcacgtcgtagtgagggaaccggccggcgtagcgggtgaggaggctctggaggcgttcctggacggcggacttgagctggtcatcgtcgaggttcttgacccactgctggacggtgttctcgacggcccagaagatgcagtggccccgcaccggcttgccgtgctggtcgcagaagtcgaggagcgcatcggagtcggcgtagttgagctgcccctgctgcgcctccgtgtggtaccacttgagctcgttctcgaacacggcccagtcgaagtgcttggtgaagaagtccacgaaggccgggttctggatgaccctggggttgatgcaggtgccgaacgggaagctgttgtccagctgaaacacccggacggacgcgccggagatgctagacacgccgtcctcgcccggtcgctgaccttgaggatcacatcacgcttgcgcaccctgtcggccttcttcctgaggtgcctgagccttgggatcttgttcacggcgcacacctgcaggtccatgaccttgatatccaccccggccggcggcccgtgcacgtagaccttggcgcagcgcggcggctcgtcgtcgtccacccggaacgcgcccttgatctccgtccaccttccaacctcggcgcacaccgcgccgcccttcaccacgcactcgtcgtctagccggaggttgacgcacaccgcgtggccgccggccccctcctccgcggtggtggcggcgccgcccccgaggctgatccacccggagacgcggtacgtgacccggggcttcagcgcgcccttgatcgcctggcgcaggccgtccgtctcgtcggcgcggcccgacgcaaggatgtaccggccgctgggcctgtagtcctccgccacgtcgttgatcgtctccgtcggcaccttggccggctcctcctcgtgcaccgacagcgccgtgcacgagcccaccggcgcccagccggccagcccgtcctccagggcgctgttctcgatcaggttcacgtcgaacaccacctcctgagtgcaggccatggcacactggatcagaggaaggattgaaggaaagaagccaagaaggtgatcgctaataagggcttagttttgggtagggaaaaac

SEQ ID NO: 29031 - DNA, 213 bp, Setaria italica
  Peptide Sequence Number=SeqID_95005
ttttttggtatgtggtgccaacgtattctcccttcagatttatgtgaaccttcttttgtgaaaacaagagttctgaaccttgtaatggacacaaaacacgcaatctgtaagctgtgaaaagagaagaaggctgatgaaataaaatttaaaaaagtaacaaacactctgtgatgaagcaccatgcttgaaaaaccttcaatgacaccattatta

SEQ ID NO: 29032 - DNA, 339 bp, Setaria italica
  Peptide Sequence Number=SeqID_95006
acacgcagcctgccggagctgacgtgcgggccaccgctgacgaggagaaccggcttgaagagcgtgggatccatgtatgcgcaggaccacatcatcgcggagcggaagcggcgggagaagatcaaccaacgcttcatcgagctctccaccgtgatccccggcctcaagaagatggacaaggcgacgatcctctctgacgcgaccaagtacgtgaaggagctccaagaaaagctcaaagacctggaggctggcggcagcaacggccacaggagcatcgagaccgtggtggtcgtcaagaggccatgcctccatgctccagcagtgcccgacgacgatcgg

SEQ ID NO: 29033 - DNA, 228 bp, Setaria italica
  Peptide Sequence Number=SeqID_95007
tgacatggcgctacgagtcacagaccataagataatgtacatgtaatgacctcttggtcatggagagatcgatcgatggacagggagagccaagaactagcaagagacgacgctagccatgagtcattgccgaagcttccgcgcgcgcgtggacggagcgttagtgtagtccctctccgtctctcgtttatgtcaagctgtggcacaggccggccgccggcggcttga

SEQ ID NO: 29034 - DNA, 429 bp, Setaria italica
  Peptide Sequence Number=SeqID_95008
ggggtgctcttatcataaacgtcaatggcaaaggtcaaatcattgattaatagcaacgctcgacgaccgggtcggtttgcatgctttgtcttccttattagccctctttctttgacggaacgcggccctcgctgccggcgagtatcccgtacttgtccttgcgcgtgatgccggtgcactcaaacccaagctgcgcggccaggaccttctggacgtagcttgccacctcgaccggcgaccgcccgccgccgcaggtgagctccctcggaagctggttcaggaacgtgacctcgtacgccggccgcgggttcatgaagaagaagtagggatccatgctcccgtgaccgcgtgccgtggacccgtggaacatggtctccctggcgtcgatggccacgggcacgatgcggtcggtgagctgggcgaagagcg

SEQ ID NO: 29035 - DNA, 388 bp, Setaria italica
  Peptide Sequence Number=SeqID_95009
gacgtcctcaccgacgtcgcatcgacgtgccgcgcacgagtccgacccggccgccgccgccgccgccacgctcctcctctcccaatccttcaacctatctcccgcgcatttaacccctccggcgggccgcctgacccgagtcctgatataccccgccgcagggaacggagcagagccttgcataaaagccataacagatcgatcggactcggcatggacttctcctccggcgacgtcaaggcggcgatcatgcggcccgcgggtgttgtggtcggtggcgatgctgctgccgggacgccggcgctggtgcgggggtggtttgagttccagaggagcgccgcgccggcgaggttcctctgctttcacgagtggggggtgggtggacgtc

SEQ ID NO: 29036 - DNA, 270 bp, Setaria italica
  Peptide Sequence Number=SeqID_95010
gaggtggatggagtagcggagggagcggatcttgacgtcgcgcggggcggcgcggtcggcggtgaggcgctcgatgcccagctcgagattggccaccacggcacgctgcggcggtggcaaggcatacttctccctgagctcactaaggaactcagcgtccaccagtaacctccccgccgaccgcgccaccgtcagcggcctcctcccctccttccccttccaagccagcggcggcgatgcgtgcctccgcctgcacgacctggatctcga

SEQ ID NO: 29037 - DNA, 406 bp, Setaria italica
  Peptide Sequence Number=SeqID_95011
taacatcaaggaatgaccaaacgaaataacccttcacattggctccattccttagtgcagtgagggtgctgccaatgtagccactcaagtactctactctcttatggtcctcaattgagtcattgaagaacgccccatatccattttcttgcacatagacagcaacattcttgtaagtgttgctgaggtactcgagcatgcattgcagcccctgtggatccgtaggcatgttgattggaataaactgaccagtaggtggatcattgcgagaaaatctgaaggtagcggccacatcaccattgtaatcccggggcccggtatctgcgctgttcgatcggtcgctaacgtacactgaggtgtagtggttttattgtcctaattgtaaattctagtccgtttcctacgt

SEQ ID NO: 29038 - DNA, 2717 bp, Setaria italica
  misc_feature (50)..(50): n is a, c, g, or t
  Peptide Sequence Number=SeqID_95012
agttttttttttttttttttgtttgtagaagtcgtagcttgtgattaaanaattttgagtcaaatacaccatagcccctcaaactattctcgcataatcctcatctagatccatgaacttttaaagtcatccgggtcattcaatttttcaagtggttcattataagttcacttgaggtcccatcatgaaaatgaactcacgtatggaatgaaccacataaaaagtttaataacccagatcaccacttttagagttcacggacccagatgaggatgtggaaatagtcttacgacatcatctgcaaagtgatatacacaaaatcggcgtgagaagtatgagaactgatctacgaaatgtgaatcataagccctagaacgaaacagaggacgtaagggttgtgcaaagcgtcctacacgcgctgcaaacatgtcatgactttctcctacgcttggtaagcgttggcatggcgctcagaccacggcttgcattacgtctctgctccgacgacgatgcacctcgtgcctccatgcctgcattctcggtacactctccggccgtcgacagactcgcactcttgccactgtctgaaaccccaatgataaggtcactgggatcactagttcctggctcctccatttctgcaccacatcgatcaccagctggttcttgttcgtcaccatcctccatacagaaaccacctccagtgaagaggtagtctttcggtgccgaatccgcctgatggtcctcacgtaactcaaagccctgtgaatctccactgatatcttcagctgtgccagtatctgtctgcatctgattgctgttcagttcactcgcatcctgatggaccggattaagttctgtgtcttgtccaactatgtctgtgtttgcagcagcttcgcctgggtcattttcactgttttgatgcacggggacatcattgccatctgcttcatcaccatcttccatgtaactcacttgtttccgcttcctacttgaccttcttggtgcaattccttctgatttgtaattgcctgcatgtgtcttatgcgaatcttcatctgaagctgaagaagagtatttcgtgtcagaatccacctgacttcctgttgcaccatgtccagcattcttcctgcttcgtcctcttcctttggaacaaccagggggccttccttttttgctcttgtttgtgttgttactttctttagtaagctcgaccacatcagcaaagctattaggatcgctggtttccttatcttctggactctccatattcctgatttcagaacttctcatttttcctctacctctacctctagcatggctagatgagcttgcatctttcttcttagtagtcttactagcactaggattatcctgctctgtttcatctgtgtcaggaaagcttttacctgtaatgcccttgatagctttcttaattcttttgctgcgaatctttgcaaatctctcgttgaatgaatagaatgcctccatgcgtaactgagtctcgtgcttattatactctctcaaaacaggaagaagcagttcatcagctttctccttgccccacccaaacctttcccaacacaacttgcgaagtaggcccaaatctggtcttccccatgaaaaaggctctgtcgaattatcaacttgtggggtaatatatgcacttatgactgactcactaggaaaagctgcagggatatgccagttcttgctcacgtttctctgacaaatgaagcagtgagagagaaaacaagagcaaagctttcttctatgagaatcaagaaaagcagtgcacaatatgtttcttacaagaaaacatacttacatgcttactcataaatacaagcttgatccgttcagtctcattagcagataaatcatcagaaccttgatcgcattcaggttccaggcctttcccctttccatctgaataatttccaccaggtttccttttcttcgacttactacttgtttccatatgcagttgaccaaatatcgaaggatctggtgactcaatccattctttaaatttctgcagtccatcttcctcaggaaacgcatgtacaacttcaatagcattcacaatgccaataccactaactccttcagtgtagtcactcccaagaagcagagccattcgaatcaattgttgtcttgttagcccaagctcagactcaatgtccttcataaaatatgtttccacatacttcctatcatcaaatatgttcttgtaaacattccttgctccaaacagaaagacatctgaatcatcagtgacgactccatcaacgagtttactcatttccatgtatgcacattgagcttcagcttccattggtgcaataatatatggcaggccaaacatttggagcaactcctggcattcagtaaacatctcactgcttacagactctgcatgactttcaagttttcgtctttcatggccaagatctacctgttcttgtctaagacgagataattcctcatcaagataagttgctgatatgccatggttgtcatcattgtcaccaacttgagtataatttatctcagaagttgaaaccatcagatctccctcagtatcattttcttttggttcagtggtgtcagctactggttcatcaaccaaaagatccttttggggtgacttcaaggtttctccaatgatggcaacatcttggctgcattttgtttgattaggattcatactttgg

SEQ ID NO: 29039 - DNA, 924 bp, Setaria italica
  Peptide Sequence Number=SeqID_95013
aataattaaattacactagttgtgccttgtgctttccaaacacatatatttgtttcatgcagaggtgatgcttgttggctgttgcaggccatcattgatccaaatttggcctatttccctctggaaatgctatattcatcctaaatggtcgtattatttgttagcctcctaataagcattaaaatggatgcaatggatcaaactgacctaattttgtttgtcacgagttggtgcggtcatagggtaaagccataactaaacaaagtatgtaatgtttttatatttattaggataaatactactgctgtaattttgtgatgcttttgactgttagccaccatgagtttcttgttggtctgtctgctttgggcaaagttgcgttacttgtagcaagaagccgagaacatggtcaattcaaaagtctctctgggcattgctagattggtagggagtttaagaaaacattgttcctgacttctcatacaaagtttcatttggaagtagtatcttaatagttaaaaatgttctagcaaattgatgtttcttagggaacatatcgaaaggttactgggtgagcatttaggatgcatgcacccagggcccagaagtgctggtgccatagaaagacaccttgatagccattctgctcagtagatgttagaccatgtgttgacgaccaaaattggcagacctgtccagaccggtcttccatgtatttcgatacttgtttattttattgtgaacaggctagcttgtactttatagtcaacactataggaagtgtcccctatggtgcctaacaattacaatttcttttttttcctcgaaagaagcaagagagttttgtgtcatttcattaagatagagaaaagcgtacagcttgaccgtactgggcccttgagtacagaactcacaccacacacc

SEQ ID NO: 29040 - DNA, 255 bp, Setaria italica
  Peptide Sequence Number=SeqID_95014
tctgtgggacgccattcttcagataagcgtgcatcagcaaagcattgtgtatgttgacccagaatgctatcttttcttcatttgtcattctcctcagatcaacagtttccaaccggtacaatatcagcttgtacgtctggagtaggtcctcagcttctttcagcctccgactgtcgcggctaatcataggaacctcaaccattgtgttgtacggtccactgaactccttcaaaccctcaacatggaatgggttta

SEQ ID NO: 29041 - DNA, 241 bp, Setaria italica
  Peptide Sequence Number=SeqID_95015
ccccggcgtgcgcgttcctggcgaagcggatcctgcctgggctggggtgggctgtcggacgacatcgtcatccctctggccacctccggttccgtcgcctacctcatcaagtccaagaggctctgatttctctgctgcctgcatgccccagttggttggtgacacaagtgtacagtagatggaatgaggagcgtggttacatcaatcaataatcggaaaaagatactccatcaaaatatgc

SEQ ID NO: 29042 - DNA, 332 bp, Setaria italica
  Peptide Sequence Number=SeqID_95016
aaacttatgaatcatataaaaagcattttgtgttttctgcatgaggatcagaatgagattggctgagaaatgaatagtaggagtaggacataggaaccctactatactttactagaaactttagaagcagacaagggtttggtcacatctgaagcatggccggtttcttggttgtggaatggggcataggatgctctgttgcctcctaccttctcccctaccctttctttctctccatttgatttgattcacgggaagaggtgaagtgtgggggacacaggacagctcaagaacacaaaccttggggcaaacgtacaaaacattgtcctact

SEQ ID NO: 29043 - DNA, 297 bp, Setaria italica
  Peptide Sequence Number=SeqID_95017
tcttgtctagcggcagcgcaggttggtggtgcgacgccgggaggccagcgtcgtcatcttgctggtagtagccgccgatggcggccaccgcgccgtgatcgaaggcgaggtaggcatcagcagacggcatctgcggcagcggcaggctgatcagctcgccggacagcagtgacgacgtctcgtcggggcatgctggtattgcggtggtggttctgctcttgtagaacaccctgcacagcacccagtcctccttgagaggtgagcaggggcggccggcaacggcaacggccggaccct

SEQ ID NO: 29044 - DNA, 338 bp, Setaria italica
  Peptide Sequence Number=SeqID_95018
cggtgacattgaagctgctgtaaaaccttacaagcgtaggcttggctcctgatgaatgccagtgcccagtagatctctgaggagcgttagctggtgatgaattctgcagcgaagtgatgctctggccgtcgaccgtgccagctccctggatggtgaagccgttgagccacttgaagttgagccactggagaggcctcctgggcttgggccaggagtccatgtccggcggcgccagcacggtgccgtccacctggagcgtgagccgtgcgctgcaggggccctggagcgtgaccggcgagacgaggaaccggtgcccggacggcagcagcacggtccgg

SEQ ID NO: 29045 - DNA, 509 bp, Setaria italica
  misc_feature (1)..(41): n is a, c, g, or t
  Peptide Sequence Number=SeqID_95019
nnnnnnnnnnnnnnnnnnnnnnnnnnnnnnnnnnnnnnnnntttttccaaactcccaaaaactcccaattccagactcacagcatgtcggttatgtatcagtctgacacgcagaatcgaagccccttttgcacagggattaaaaaataataaaggatagagctacagccgattaatcacacggcaacgcagaggaagaggtttttttcaggtcacgatgtacaaaagttaatttagcacatggtatgatcacggcagaggtggatgtttctttgtggggcattcagctaacggcagacgatgcagaggaccacggcgacgatgatgatcagaatgaggagcggcagcgaaatgatcagcacgaactccatccggtctctccctgcgcgggatcgagctgctcttctcgctgtacttgctgatcttgctggagaagcgaggaaaaaaaaaggcgacagggcgcagtaatgggggacggcgtacgggggaagtaagtaacttaggggtcta

SEQ ID NO: 29046 - DNA, 883 bp, Setaria italica
  misc_feature (1)..(22): n is a, c, g, or t
  Peptide Sequence Number=SeqID_95020
nnnnnnnnnnnnnnnnnnnnnntttttttggtatggctctaggagagatgtcgaagttgcattgcttaaatggcaatggagccctgaactcatagtgtctgaccatagtacttgtagcctgctggatcataaatacaatcagatcccagctagagcatctgagcaagcattgcacatttgcatggaatggcatgttcagataccgcaggaaaatgtcaaacaatggccatgcctgggcccaacactagtctactcaacaaccctaataactaccatgatgagtgacaggtcaagagagcagcacacaagttttagctggacggcttggggggttctggtacttctgttgctgctttggagagctcaagtgaaacagggcagtgatcactaccatagaatccttctaattcaattccacggccatgcatttcacatgaaattactctgcccttcaattgttctgaaacaatgaaatagtcgatcctcattctctttccccggtacttgccaattggatgaccggaccaagagaagccactgtccatgtctttttctttatgcaggtgtctgtaagcatctaccagctttccctgggacaatatgttgccaaagcgacgcctctctgctagggtgaatcctggctgtccacagtcctctttatttggtggggtatatccattctgcttagcactactaaaaaaatcaggatggctgacatcgatttcttcatgactgacattcaagtccccacaccagattaagggtttgtctacacattgaacaaattccagcattctcttgtcccacttacgtcttctttgaaatgaattttcctcctccttccatccattgtttggagctattaagttgtttctagttaagt

SEQ ID NO: 29047 - DNA, 494 bp, Setaria italica
  Peptide Sequence Number=SeqID_95021
gcccgcggcgacgcgtatcacgaagtagccgctgctcccgccgaggttgctgggcgccgccgccacggccgcgccgacggtggtgaagttccccgcgccgccctggtccaccgtcacctcgccgaccaccggcaccgccgccgcggcgccatcgagcgccatcctgcggaccatctcgtcgtcggtggcgtcgaacagccccctcccatggccgtggcggggaggcttggaccccttcgacttcttgcccgcgggcacccacgctctggtgaagagcgaaagcgagacgctgtagagcttagtgctgttgaccatgggcacggagagcccgtcgcgcacggaccacgcggcggcggcggcctgcaggccgtcggcgcaggtctgctggttggtcaggatagccgacagcagcgtctgcacgtcctcggcctgcgggtcgaggagggtgctgttggccgacgtgttgagcgtggcgccggcggcggagaggaagt

SEQ ID NO: 29048 - DNA, 260 bp, Setaria italica
  Peptide Sequence Number=SeqID_95022
ggatatatgtgggctgatctggctcaagtgtctggttcttacgcgctgctatcaaatcacagagctcccacgggagattgggagactgcagaatctggagaccctgtacgtggcaggtacagggattagtaaactaccaacggaaattgggaaactgcagcacttagagactctggatgtaagtgacacagaggtcacggagctgacgtggatcgagaaattgcaatatttgaagactctggatgtaagtggcacaagga

SEQ ID NO: 29049 - DNA, 381 bp, Setaria italica
  Peptide Sequence Number=SeqID_95023
gctgtgctggccgttcttcgccgagcagcagaccaactgccggtacaagtgcatggagtggggcgtggccatggagatcggccacgacgtgcggcgggaggccgtggaggagaagatacgggaggtcatgggtggggagaagggaaaggagatgcggcgccgcgcggtggagtggcgggagacggccgtgcgcgcgacgcggcccggcgggcgctcgtacgccaacctcgacaagctggtcagcgacgtgctcctctcgggtggcaagagttcttgatctccagttctccacacgggctttccttccacaagggtgcccccctcccaccgcgcaccacctttcgatgtgtgtcgtgattcgtgaaacgaatgtgtgaaacc

SEQ ID NO: 29050 - DNA, 1833 bp, Setaria italica
  Peptide Sequence Number=SeqID_95024
ttttttttttgttttatttctttgtttctttaaatttctttgtttgttacctagtagggtttcttttattttctgttctatgttcaatggatggatgtaccagatggcacagtttcatttgtagagtgacaatgattctcagaatgagaaatgagcaaagttcagctgacaatatttacacttctgttgtggatatatacagctctctaattcagtgcacgtgttgatgccctacgctgataaaaagaaccagtaaagataatctatgactaaattttgtacagcaagggcattctttttgcgaatctacaagatggactaattatgtgagtgccattggcatcaatgactgctgtgctggaggacatcgatcatacagcagccaccacctgctgccgtagaggtgtgagaagccttgcaagaggtagaggcacatgagcttttacaaatgtcccattttccttgtactccattttttcgaccattccaaccttatgtatgtcattcagtagatctcctttgtcatacgggacaaaagcttctattggcaccatcgagtctttcaacttcgcttggattgtgttgcagaattcttccagaccatcaccattcattgctgatatgcagattatcccttggttctcagcttcctctttcactcttaatggttcatcggtattgtcaatcttattccacacgaccaatttggggattgactctacatccaactccttcaatactctgtcaacagcatctatctgctgttgagctaatggatggctaatatcaacaagatgaactataactgacgattctgatatctcctccaatgttgctctaaatgctgctaccagcatagtgggtaacttctgaatgaatccgaccgtatcagttaaaaggaattcagtcccattcttcatcaaaaccctccttgttgttggatctaacgtggcaaataacttgtcctctgcaagtacatcagctccagttaagcggttcaggagtgtactttttccagcatttgtataccctaccagagaaacaacaggaataggaactgattggcgacggttccgatacagctttcggtgttttcgaacagattccagttcttttttcaatgcacctatttgagttctcaagatgcgcttgtcgacttcaatttgcttctcacccatacccttaacttgacctccagcctgccgttcaagatgattccacatctttgtcaacctaggaagttgatattccatctgtgccaaggtgacctgtaaagcagcttcatgtgttgctgccctttgattaaaaatatccagaatgagagcagtacggtcacagacacggacactcccaccaaatgatttctccaagttacgtagttgtccaggggataactcgtcatcgaaaattacagtctcaacgtcaagggcttgaatggcactcctgatttcagaaaccttgcctgaaccaatgtaagtccttgggtttggggtagaaagcttctgataggttgagccgacaaccacaagcccggcagtatcagctagttgctccagctccttaagagactcctctatgccgaagagattccctcctgtccgtttgaactcgacaccaaccagataagccttctcttgaaatatctctttgccgttgatgagcttgaaccggtcttgccccgcggcggcctcctcctcctcctgccgctgccgcctgctcttcacgaacgccctcgccggcggccgctgctcctcctccaccacctcctgcgctcccactccatcaccctccgcgtccccgaactccacaccaccgtcatccttgcacgcccca

SEQ ID NO: 29051 - DNA, 305 bp, Setaria italica
  Peptide Sequence Number=SeqID_95025
gccggaggcggagtcgccagagccggcgaccgcgcgcccgcgccccccgcccccttgtcgggccgcacctcggcccggcacaccgggcacgtggtcctggaccgcagccacgcgtcgacgcactcgacgtggaagacgtggccgcagctcggcagcgcgcgcaccttctcgccgtcggcgagctccgacaggcacaccgcgcaatccgtcgccgccgcggcaccgccggtggtggaagtggatccgtcatcgccgtcagcctctaccttgcggcggtactcggtgacggggagggcggcgagcgc

SEQ ID NO: 29052 - DNA, 213 bp, Setaria italica
  Peptide Sequence Number=SeqID_95026
cgggcagcgtggtgaaccgcgtcgcggtgctgaacacgacgccgcccgtgccctggcggcggtcgaggtcgaaggcgccggccggcaggttcaggtgctcctggttgacggcgatgccgcggacgccgaagtagtaagcgccgttcttggggttcttgaggatggggagggggttctggcggatctctccggcgaaatcaatgggttgtggag

SEQ ID NO: 29053 - DNA, 264 bp, Setaria italica
  Peptide Sequence Number=SeqID_95027
aacatattttcatgctagaacaggtagaaggagaaggctatgtaaaagcctactaggctactagcacaatgttttcatgtacaagtatgatgtacagtaacaagtaacaaccaacaataccctcaccctttttggctgtgtaatgagtcttcttagacccttctcttcttgtttatataattctatgtagctctcctttgtgttcaagaaaaataaacacctacaatatcaccatcttagggaaacacatgaatcgcaatatgg

SEQ ID NO: 29054 - DNA, 268 bp, Setaria italica
  Peptide Sequence Number=SeqID_95028
acgcgctctagctcggcaaccaaaacacccgtctgatcttctaccggggcacgcgccaaaggttcaacgcgagcgcagcaaggatcggatggcgcggatcaggggcatgcccatgctcgcgctgttggcggccgccgtggtcatcgcggcggcggcgcgcgccgaggcgcgggtgccggactaccacccgtcgacgttcacggtgacgggccaagtccagtgccaggactgcaccaagaactggaacgcctacgcctacaacgccagg

SEQ ID NO: 29055 - DNA, 411 bp, Setaria italica
  Peptide Sequence Number=SeqID_95029
cgccggtccgtcccaaccacgagagggaggaggcggcatcggacgccgccgacagtcgtggcgtgattccccggtaccacctgcagtgagacgctggcgcttgccgtccctccactccccaccgccaccacggccattggccacggcgaccggggactccctcctgggctccttcctcgcctccacagcgtggttcctctgcgccgcgtccaccaccgccactgcattgtgggccacggccttagccacctcctgcaactgcggctgcagctgcggcggagccacgggcgcgggcgcgggcgcaggcgcaggaggcggcggcggcggtgccagcggtgggggcgctctcggcgttgatgctctcgagtatccgatcgatctcggcgacgaagccgtcgtcggcgccgcagt

SEQ ID NO: 29056 - DNA, 772 bp, Setaria italica
  Peptide Sequence Number=SeqID_95030
gggcagtgaataatatatggcgtcactgacggccggtagaggtatcagcggccatgctttctgccaagtcgttctgctactggcggtggtgctttccccgggagttgtccatggttcaggctccggtgggttcgaaaaaatctcggccatcctcatgtttggcgactccatcgtcgatcccggcaacaacaaccaccggctgacagaggcgagggccaacttccctccatacgggcaggacttccccggcggagttgccaccgggagattctccaatggtttggtcccaggggacctcttagcttctaagttgggcgttaaggagctactgcctccttacctttctgacaagctgcaaccgaatgacctgctcactggtgtggcctttgcatctggaggcagcggatatgatccgctcacatctacactctcgactgccaggtcaagtgccgagcaacttgaattattccatgactacaaggaggagctagcagctttggttggagaggaggagatgacacgtgttatttctcaagccgtcttctttacaatcatgggggcaaatgatattgtaaataactattttgcagttcctttgagacggcatgactatgaccttccttcttatatggactttcttgtctcttcagcgatcaacttcacaacgactctgaacgttatgggagccaagaagataggaattgttggtgttccaccattgggttgttgtccttcacaaataacacttggaggaagtccatcaagggaatgc

SEQ ID NO: 29057 - DNA, 882 bp, Setaria italica
  Peptide Sequence Number=SeqID_95031
aaggaaaggacaacaagtacagtggtagattatttgatcactacgccatcggcgtagcagtagcatgcagtaatcatcatcagcacatatatatatagatagaagtagatcaagaggaggaggatgccggcggtgggtgagcaggagggtccttgccgaatcccatgagggcgtgggtgagcagcattgctccccggcgggtggcctccgcgacgcggcccagcagcgggaaccccaccgtgtcccggttcttgagaggcttcttgtcccaccagtcctcgtgggtgaccaccttgccgtcctggagttggagcctgatgagcgtggtcagctccaccgccttcccaagtaccttgtagtgctgcttgttgtcgatcagaatctcggctttgccggggcccgtgggattctcatgtacagtgtactccacgatcttggattccccgaacacctttggaagcgcgtaaaatgaggacttgatctgctgcaccccgtgggctcgcatgagcgggtcctcaaacgtggcgttgggcgcgtaaatctcgaagtcccgggccgtcgcgcgcgatccgtagatgttgaggagatgcggcatgatgcgctccgcgacgccccccgccggcggcggagacgtcttcttgtcttgcgaagaaacgccgtcgtccatggccgtggagaataataatcctagcttgtgcttgcgcaccaacaccgagagcgggagggcggaggaggaggaggccgtcaagcaacccagcagcggcaggggtggttgcatgcgatgcgacgacggtcgggaggggaggagagatggatcgagcctgaaggagattattgaagatgagcagcaggcaaggaacaagatgagctgctgattcttct

SEQ ID NO: 29058 - DNA, 358 bp, Setaria italica
  Peptide Sequence Number=SeqID_95032
atttttagtaatggtatatgttggtaatctatatatgtgaagattataggattacttcaaattattttataacaatacttatggtaatttatttagagagttactctaaataatttataatgacacgagtgagggatttaaaaaaatataaaatagacccaacaggtattattctcaactataattagattcaaccaaactgatgtccggatgcttcttaattatcctataagaatttctagacctatcatttcattttaaatgcttgtcgtgaggattaacatggaggcttaaaaggagtctccaactagtaagggcaagatatagaaaaactggtagttcattaggtgttttgttc

SEQ ID NO: 29059 - DNA, 325 bp, Setaria italica
  Peptide Sequence Number=SeqID_95033
tcctccctcaacggcgatcctgcccttggcgtggccatcggactctcatgctcctccgctcctctcgcgagctgctccgagggagacgcggcgcttcccgtatccacgctccccggctcctctcgcgattcaacaaccgacggggactcctcccctccatcgccgcgcaccccgatgatgaagccgaaggcgagtcgtacgtttccacttcctccgcagcggccggcccgtcgccctgcgatctccacgctgagggcgacgaagacggcgaggcctccgcggcggcctcgctatcgccctcgcggcacgcgaccggcgacgctga

SEQ ID NO: 29060 - DNA, 520 bp, Setaria italica
  Peptide Sequence Number=SeqID_95034
aagagaaagcttattcagcagtggatttcacttaacatggttgagcctgctacacatgggtccgttacagctgaaatgaatgcagagaacatcataaagcaactaaaggctatccatctccttcaggttgataaccatgctgaaggaagctccggcgcaacaggtgaggtattacgcatgcattacatggcatatgaactggcccgtttcacctcgaacaaagatatccttgtggttttagaaggtgaagaggcggcggtcagctcttttcctcaagaaagagatgaggccaatcggacatgttgtttttctcaagaaaaggaacagaccagtttgacctattgtgaccatcgctatgcacaactcccagtttttaccaagcatcgtccacagaaggtcaggtcgctaattctgatacccacaaccaatctgcaggaacacaaacctgtgatccctgttgctgtcagtgaagtaatctcaggaaataagtacttgcgagtcttggatcttagcggatgtg

SEQ ID NO: 29061 - DNA, 256 bp, Setaria italica
  Peptide Sequence Number=SeqID_95035
gcataaaaaacaactcatcctactgttgatgaatgcgcattttgaacttgataactctttgaaaatcgaggaattcgttgacatctgagaatgcatcatgacgacaaactcttcaatgtgacttacgtgcctgctcttctccatttcagggtggattcgtggtaaattatcgtggaacatggcgagttcagggctccttggcagtttcaagaggcattggggatgcacacctgaagcagtggatcgtggctgaccc

SEQ ID NO: 29062 - DNA, 1280 bp, Setaria italica
  Peptide Sequence Number=SeqID_95036
ggtccttcttgtctactttggccgggccagtcctgaagaggcggcgaccggcgccgctcgtggtaccgccgactggcaccgcggcggccgcggtggccgcggtggaggtggatccgaggaacgaggtcgaggaggaaggggaggagttcgcggcgtactgccgtaggggaaagggacgaagaagggtggaaatggaggaccggcatgtggccaaagtcgcgctcggcggagatccccaagtggcgttgtttggtgtattcgatggtcacggggggaagaacgcggccgagttcgctgctgagaacatgcccaagttcatggctgaggagttgaagaaggtaaatggcggagagattgaaggggcggtgaagaggggctaccttaagacggacgaggagttcctcaagagggatgagagcgggggcgcgtgctgcgtcacggctgtgcttcaaaagggcggcctcttcgtgtccaatgccggagactgtcgtgcggtgctcagccgagcggggaaggcagaggcgctcacctccgaccaccgggcctcccgggaggatgagaaggagagaattgagaatttgggtggattcgtggtaaattatcgtggaacatggcgagttcagggctccttggcagtttcaagaggcattggggatgcacacctgaagcagtggatcgtggctgaccccgacaccaggaccctcctggttgaccagcagtgcgagttcttgatacttgcttctgatggcctctgggataagattgataatcaggaggcagtggaccttgcacggcctctctgcatcaataatgacaagccctctcgtatggctgcctgcaggatgctcactgagacatcgatttccaggggctcaactgacgacatcagcgttgtaatcatacagttgcagaaatttacaagttcttaacttatttctgggagaaactggatttagattctagccaagtagccagtagtgctaacagactggtggtggggagcaggcaggataggttgacatcacttatgttacgttgcaggctaaagttttcatgagcttgcactactttgtggggattttaacattcattctttggcgtagaacaattctttttttagaaccattctttatgtacttagatctatttgattcattctttgacagtaccataataatgcggatgattcctcgctccatactgtaaaaaggcaatttgcctatgtacaatgttacattctattcattgattaaaacttatcctgttttactaaaaaaaaa

SEQ ID NO: 29063 - DNA, 244 bp, Setaria italica
  Peptide Sequence Number=SeqID_95037
cggcgacgcctacgcgtgggccggccccggaggcggcggcggcggcgccggccgcgtcgccccgtactgatcgatcgccggacatggaaacagggagagcaagcaagcaagcaaagcaaacaagcgcgcgctgcaatgcaagcttcgtcgtcatcgccatcgacatgcagcatggtagaatcgatcgatcgaagctaagagttatttcatccatctctctcccgcttccgctgattacccggcc

SEQ ID NO: 29064 - DNA, 322 bp, Setaria italica
  Peptide Sequence Number=SeqID_95038
gggcatcgatccacaactgacgagcttatgacctgagcattgtcaggaatcaaaaggctctcctttccttttgataccattgcaccgtccatgcttatctcgatcttgtagacgcggcatccggaggcgaggtaagcggagcaggaggatccggcgccattgacgtggacggcgaggcgggtgggctggaggctgccgggcgtcgggtcggagagcagggccggcgggacggacgccttccgcaggctccgcggcgccagcatcgtcggccgcatatggctctcccctcttccgtaagtcgtaaattccgtcgggttttttt

SEQ ID NO: 29065 - DNA, 277 bp, Setaria italica
  Peptide Sequence Number=SeqID_95039
atagggggaaaagtttctagtcccactttgtttgtcaaagttgattaaagtgttcatagactaatgcaatattcgcatcagttaaaggtgcatatcatttgattgcgccctttacctgtgcttctttcagtaaacattgttcttttataaatgcaacagcaatcaacaacaaagagattttctgtttgtcaaagtcgtgttcagtagggggaaaaaggtttctagtcccactttgttggtcaaagttgattaaagtattcatagactaatgcaatta

SEQ ID NO: 29066 - DNA, 287 bp, Setaria italica
  Peptide Sequence Number=SeqID_95040
aacctgtccgtcctgtcagtgaaggtgccagcggcgacgatgggctcgttcgaggtggtctgcgtcctgacatgggtgctgctctacggcaaggcgatcgtgccggcgctgaggggatgcggattctcgtttggcggccacggcgagccgtcgcagctgcagcgcatgggcgtcggtcggatccttatggctctgtcgatggccgttgcggcgctcgtggagatgaagcggctcgccagcgcggcgcgcggcgaggagatcaccatcgcgtggcagatcccccagta

SEQ ID NO: 29067 - DNA, 319 bp, Setaria italica
  Peptide Sequence Number=SeqID_95041
ggggacggcgcagccggggtcgcccgaggaggcgaggcggacgaggcaccgtgacgcggtgaggtcgcagccgttcaccttgctgggcacctcgacgttgaatacgccctggccgtccgtcgcgtccgagccgtagtacaccggccgctccctgtcgtccttgcacgtgatgcccaccacgctgccggggattggcctggcgttgtaggcgtaggcgttccagttcttggtgcagtcctggcactggacttggcccgtcaccgtgaacgtcgacgggtggtagtccggcacccgcgcctcggcgcgcgccgccgccgcg

SEQ ID NO: 29068 - DNA, 1094 bp, Setaria italica
  Peptide Sequence Number=SeqID_95042
ttttttttttttttttacctaagacttctaaattaaaacgtaactttttttttaaatttcagtgctcagtaaacgagttccaatgcaatttggccaaaaataactcgccagctatcaattactgttaaaccgtcagacaaatggttcatgtgcccgcttaagagcatgtagatttacaccatatacagagtacatgctatcatgagacatgagttttgctatttcgacaatgttccatccttgaccaaacgctgctgcactataggagttggaggttctgctgtcttaaaggatctggaggctggtcagcgaagcagttcataggttcttcaaggcaaaagtatggaacttgcctatcagccaacgccaccacaccattggagatccaggagacagtggctttctaagtggagtagcagccggccagctcctgaattgttactgtcagaagggttgccgccatctatcgacagagacgtgctgatccgcattagttcaaaaatcatcagttaaggaactctcgagtcatctcttggcgttgccttctagtgccttgaaatcagccagccatgtctagttgtttccttctagtgccttaatatcagcctgtttgagctcaacaaacttcccaattcccagatctgctggaagtcggaacctgcctacccgaacacgcttcaacgcatagacctttagccctgcattctgtacaagttcacgaacttcatgatttcgtccttcatggaccactatcttaagacgggtctttctcgtatctgattgtgcagacaatggctctactaaatcaggtacacacatgaccccatcaatttttgtgccttcactaatagctatgaggtgtttcttgtgcacagcaccatcaatagttactacatattcctttgttacatttgaagaagggtgcgcaagtttctgagcaaactcgccatcatttgtgactattatcaaaccagttgtggcaacatcaagacgacccacagtaaacaagcgtggttttggcagccctggttgaatcttgttccagcccttcaaatagtcattaaataaggagacaacagacttcgattcttccg

SEQ ID NO: 29069 - DNA, 940 bp, Setaria italica
  Peptide Sequence Number=SeqID_95043
gccttcactaatagctatgaggtgtttcttgtgcacagcaccatcaatagttactacatatctgcaacattgaaaaagaactgtcaaattcaaatttatattcacttttcctactgttcattgcccagcaaccattccaaaaatgatttatgattgggaaacctagcataagaacttttgaagttagattttgatacgattctagtggtcttccttcataattctcatattataatggatacctcaaggtggtaccaagaagacattaccaaatatccgtgctacaaaaattgaatagttaacagtagtggaagtaatgttactttgtattacagtactaaataacatataaacccacaaaaggagttaaaacttactcctttgttacatttgaagaagggtgcgcaagtttctgagcaaactcgccatcatttgtgactattatcaaaccagttgtggcaacatcaagacgacccacagtaaacaagcgtggttttggcagccctggttgaatcttgttccagcccttcaaatagtcattaaataaggagacaacagacttcgattcttcgccacacgagcagatatacccttttggcttgttcacagcaaaatacaactttgggggcagcttcttggaaatgcggttcccattaacgtagatagagtcctttgcaatgtcaactttggtctgaggagaagtgcagaccgagccattgacagtcactttcccttggaagatgagctcctcactggttcttcttgaggccactcctgcggcggcaaggaccttggcgagccgctgtggctcgtggtccttgatattctcattgtagaacctcctggctgcctttgaaaacttgggcggcgcggccggggcgaccttcctttccttggccttgacgcttgcactggaagcagcggcggcggcggcaaccgc

SEQ ID NO: 29070 - DNA, 156 bp, Setaria italica
  Peptide Sequence Number=SeqID_95044
ggcggggcaggcaggaaggcaggaccgcaggaggaggaggaacggaaggagcgagtggtcggcgtcgaccagatgcgttcttcacttgtctttgcctcgttgggcaaacacatggcactatggcagtgggaaggactgaaggagacagagggaggg

SEQ ID NO: 29071 - DNA, 1270 bp, Setaria italica
  Peptide Sequence Number=SeqID_95045
acaattgaaccaaaggaaaggtcagtcgtgccattacaacggcagtttgacagggcatacaaataagtatctgatagagaaaatgcacgttgcagactacttgatttgttgatagcatgtacaataacataaaatatgataaaacagaagtaatgttcagaatgaacttctcccctgatctggtcaaaaaggttacattggtacagccatcgctaaaatgcacacttgccctttgctgatagtatttgctttttgaagcgtgtcagtgcctgaaacctaaggctgagccaaggcttgtgtaatacctcagttcactaggatttgcctgcagtccattggctccaggggttttgcagtagcgctacttgcctgatcttgtccagtttacaaggacatccacaaacccactccaggggtttaacagaatggatcgctggcacgcagttttctagtaaaaaaccaaaccacaacaaaagaattgtctcttcatggtatatgctacacatgtgaagataacagctgcttgaaactgaaaacctatacagtttacagggaacaacaatccatgagttctggttttctgaatcatgacttctccttgttcgtaatcctggttttaatgcctccgtcagcatcctcaaattcgaccaccttaatcacttcagcagctgcatgatactcaaacctgttagcagaagccacctcaggttcatactcagatgtgctcttgatagccttaactatgacatcaacaatttccttctttctagtgctggccattaaacaatcgtactcagtcggcacaatgatcgcaaagaagttatcactgagattgctaatgcatagcttatccacggctgcaagtgctatcctcctctttaatatatcggcatcaggatcaacaaggtatagagcaaaatccgtgatcaccaggatgcgtcttttcatttttcctgattgagtgaacttcaataccttgtctgcaaacagaactttattgtccccttgcttggagaggatcttggtgaggcagggatcgttcgggacgccgatgtagtcgcccttgcagtcgcggtacaccgccgcgcggcgcctcaccttggcccccatgagcagccccgccgcgggcgccggcgactcatccccctccgcgtcaccgccagctcccgcagccggcgccggtggctccgctggctcgggctccacctggatccgcctgagcggccggaaccggtccatcggcgagcgagtttggagaaatttgggggag

SEQ ID NO: 29072 - DNA, 615 bp, Setaria italica
  Peptide Sequence Number=SeqID_95046
aacacatcctcgtctgctacggccagagtggcaccggcaagacgtacaccatgtggggccccctccggcgccatggttgacagcggctctgaccacgctgaccggggtgtggtgcctcgggttttccaggacctcttctctcgaatccaaagaacacaagagagctctcgtgagaagcagaccagctaccaatgccggtgctcgttcctcgaggtgcataacgatcagattaatgatctgttagaaccatctcagcgtgacctgcagataagagagaatgcgggcaatggtatccatgtcgaaaacttgaccgatgagtatgtgtcaacagtagaggatatcaatcagattttgatgaaggggctgtcaaacagaaaagttaggcaccaacagtatgaacttgaaaagttcacgttctcatgtgatattcacctgcattattgaagcatggagcaagggttcatcaaatggatttagcagttcaagaactagcagaattacctttgttgaccttgctggccctgaaaatgatgaacttgatggtgcagcaaagcattgtacaaaggaggaaaggcatctgaagaagtctctttcaaggcttgggaaactagtcaa

SEQ ID NO: 29073 - DNA, 303 bp, Setaria italica
  Peptide Sequence Number=SeqID_95047
tcctatggcacatcggcgtacgtgacgcaggatgacgtgctgatgacgacgctgacggtgcgcgaggcggtgcactactcggctcagctgcagctgccgagcgccatgtccgcgtccgccaagcgggagcgcgcggaggagacgttgcgcgagatgggcctggagggcgcggcggacacgcgcatcggcgggtggatgcacaagggcatcagtggcgggcagcggcggcgcgtgagcatctgcatggagatcctcacccgccccgcgctgctgttcctggacgagcccaccagcggcctcgac

SEQ ID NO: 29074 - DNA, 331 bp, Setaria italica
  Peptide Sequence Number=SeqID_95048
gaaacaaagatagaattattgtgacaagcagggttattggcattgtcatggccaagaaaacaggtccgctcttatcaatcacccatacttgcatataatatgcaactccagaaacaagtatgccagagtacaccacagcaataagacgtgcgtctaggcctaacctccattttgcaaaatctctctcagccactagggcgataaagaaagattgaattgttgcaaagatcatctggagagttgtgttgagcagcttagatggatatgcttccaacatgggcccctgaagaactgtccaaagagcccaagatgtagttgataaagtagtcag

SEQ ID NO: 29075 - DNA, 691 bp, Setaria italica
  Peptide Sequence Number=SeqID_95049
ttttttttttttttttttgtcaccaatagtgcataacacactagtttgaaccttgataccttgaacaagagatgacatttacaggaaatagaagagtaacataacttcaaaattctctcagttgatcagtaactacaaaatacaaaccagcctgaaactgccattgagttttgatgtacaaacagaatcgctagtatgagctaaacttgtgctgcctctactggagcagccatgtgctgcttcctgacaactacatgctcagatctctttgcccaaagaacactatacagaccaccaaccataattactccacctaagatacttcccaaggtaactgcttctccgagaaacaaagatagaattattgtgacaagcagggttattggcattgtcatggccaagaaaacaggtccgctcttatcaatcacccatacttgcatataatatgcaactccagaaacaagtatgccctgcatgatgtgttcagcactttcaaacaaccaagcatcacattcatattgttggtagtgctctacctaccgatggtcatatgggaaaagcgtcaatgggacataaaatgcgcctccattaataaaactatagggttaattaaaaaataccaatatacttctgtattggtgactgggaaaacacaatgagacaagtgcagaatatatataacaacacggat

SEQ ID NO: 29076 - DNA, 258 bp, Setaria italica
  Peptide Sequence Number=SeqID_95050
cacaaggaactgcaggtcaagagatgtaccatgtgaattcaaatatactaataataatcatcgaagccatctctagatacccgctacgctaacttaggtcgtcgagacaaaggggacaacaaaggtatcccctcgggggagaatggggatcgaaaccgaactaaaaacctagtatcgtcggctccgcaacgatccccagagccgcccaacctggggcacctagatttgcacggccctagttgccggctcctcgcgctg

SEQ ID NO: 29077 - DNA, 251 bp, Setaria italica
  Peptide Sequence Number=SeqID_95051
gcttactgcacggatggatgctcatcgaattgacggtgggatctgacaggggtttgtggtgacgggagtgtcctactatctacaagcgtggtgtatggagatgaaaggccccgtgtttctagcaatgtggaacccactctgcttcgtcttcacaatattctgctcctctttctttttgggagagattgtccaccttggcagcattgtgggtggagctctgctggttggcgggctttacagcgtgttgtggg

SEQ ID NO: 29078 - DNA, 505 bp, Setaria italica
  Peptide Sequence Number=SeqID_95052
atgactgatgatctttgtccaccaccagccaccgccttatgctgtcagctcttctcttaaattcatcaacttttcaagaatccaagcttgtgattacagatcaacaaggtcaacatggaagcagtgatggcaaggattaatcttgtactggtgctgtgcgtggcagcggcagcgctgatggcttcttttgtcgccgccgccggcgagggtgcggcggcaacagcgaaggagctgcggcgaggcttctcggtaacccacgaccagtcctactcgcagttccagccggtactcagcgaccccaccggcgccttcgcgctcggcttcctccgcgtcgacaccaccatgctggacctcgccgtcctccacctcccgtcggcgttcccgctctggcgcgccattcccgaccgccccgcgccctggtccgcggccgcctccctctccttcgatggcggcctcgtcctcaccgaccacgcggtcaacaaggtgctctggtccaccgccgccg

SEQ ID NO: 29079 - DNA, 299 bp, Setaria italica
  Peptide Sequence Number=SeqID_95053
ctatttcttgcacaactactcctccaatctccaagccaaaagtcatccgttaccctctggtcagaagaaaggccacacagctcacaagtgcttatttgtttttgggctaggaatcatctggcaggaagggggaacaaagccgcggctgctaccatcaattcctttttgatcatctccgttcatcgatcagttgatcatatagcagcgctgtcgcaaagagaggaaggagaaagttgattttggattggtacgatgattcagtccatttcaagagtgggtcaattctatgtgaagtggta

SEQ ID NO: 29080 - DNA, 405 bp, Setaria italica
  Peptide Sequence Number=SeqID_95054
ttgtcgtgacatccatgcagataattggtgctttctcagtgacctgaataatctcagtccatcttacatcctctacgttagagagttcagcatgatgcagatatccattatttgtggcaacatacagaacattttcttctgcaaagtgtagacaacgaacatactcgcttttgctatccaggggaccatactgccccgaaacagaaggagaagatactacgaagatctcataatcatagttcagaccatcagataccgctttgtcttccactttgtcatgaaaagtggagctgcatagatggtgcactttgattgctgaatcaaacccagcagtgaccagaagcagtgagtgtgggtcaaacaaacatcgccatattcctcggccaattgttgtttcttttgaaa

SEQ ID NO: 29081 - DNA, 518 bp, Setaria italica
  Peptide Sequence Number=SeqID_95055
tctgcagtttacaagggcactcatcggatgggccttccagcttgtgatcctgaaaggtctgctctactcaatgggcggtggtgaggtgccactactcgacttggtagcatatggtggctatttatttgccggtctatcccttgctgttgttgcaaggctcatatgggcatattcatattacgtcatgatgccatggatgagcctgtgcatgggagtgttcttggtgaggacaatgaagagggtgcttttcacggagatgagaagcagtgagaggcactcatcgcgacagcattacttccttctcttcatggcaatagctcagtttcccctgttcttctggcttggcagcataggtgcatgatacagtttcttgtttgttttagttctgcggtgttcacatttcaagtgaatttaatttaagtagtaaaatgctttgtaaaatagttggagaatgatctcaacagcttaagcagtttgagtatcgacggtatgttcttgactgactgtatagatgggga

SEQ ID NO: 29082 - DNA, 215 bp, Setaria italica
  Peptide Sequence Number=SeqID_95056
tctcccacgagatgtcgtatgggagcatggcatgggcagaaccagccgccaaagtctccggcattcggaagcgggatgcagccgaggtgggtgcagacgccgatgaccaccagccactcagggttcttcacacgctccgcatcctgctgtgggtcacgcagtgacgcgacgtccacactgttggccagcttgatgtcatcctcagtccggcgcct

SEQ ID NO: 29083 - DNA, 471 bp, Setaria italica
  misc_feature (448)..(448): n is a, c, g, or t
  Peptide Sequence Number=SeqID_95057
taagtcgtattgggtattctaggtaacttgtctagtttggcaaagcaaatgccaaccgagtgaagctccttataaccaattttgccctttcttaaatctccagtcattcgtaagggttgtttcttggatttaatcattatacacttgtaatatctcagagtgcatcagacatggttttggcggatgacaactttgccacaattgttgctgctgttgcggagggaagggccatatataataacacgaagcagtttattcggtacatgatctcgtcaaatattggagaggtggtttgtatttttgtggcggcagtgcttgggatgcctgacacacttgtacctgtccagctactctgggtgaaccttgttactgatggattgcctgcaactgcaattggttcaataagcctgatagcaacatcatgacagtcaagcctcgcaaggttaangaagctgtggttagcggatggct

SEQ ID NO: 29084 - DNA, 1292 bp, Setaria italica
  Peptide Sequence Number=SeqID_95058
aggggaataccgtgttatagttgttactggggacaacaagtctacagcagaatctctgtgtcggcaaattggtgcttttgagcacttggatgactttgcggggtattcctatacagcatcagaatttgaaggattgcctcctctggaaaggacaaatgcattgcaaaggatggttctgttttcaagagtggaaccttctcacaagaagatgctggttgaagccttgcaaacacacaatgaagtggttgctatgaccggagatggtgtcaatgatgcacctgcgctgaagaaagcggatataggaatagcgatgggatcaggaactgcagttgcaaagagtgcatcagacatggttttggcggatgacaactttgccacaattgttgctgctgttgcggagggaagggccatatataataacacgaagcagtttattcggtacatgatctcgtcaaatattggagaggtggtttgtatttttgtggcggcagtgcttgggatgcctgacacacttgtacctgtccagctactctgggtgaaccttgttactgatggattgcctgcaactgcaattggtttcaataagcctgatagcaacatcatgacagtcaagcctcgcaaggttaatgaagctgtggttagcggatggctctttttccgttatttggtcattggagcttatgttggccttgctactatagcgggttttgtttggtggtttgtttattctgaaaatggtcctggattaccatactcagaactggtcaattttgattcatgttctgccaggcaaacttcttatccttgcagcatctttgaggatcgtcatccatccactgtttcaatgactgtgcttgttgttgtggagatgtttaatgccttgaataacctgagtgaaaaccaatctctgcttgtcattcatccatggagtaacctatggcttgttgggtcgattattctgacaatgcttcttcacgtagcagtcctgtacattgaaccactagcagctcttttctcggtgtctccattatcgtgggctgagtggaaagttgttctttatctatccttcccagtaattcttattgatgaggtattgaaattgttctcgagaagcccacgaggacgaaggttccctttaaggttgtggagacgtgagatacttccaaaagagtcgagagataattagttttagtcctcagcatatggagatgcttacaatacagagcgggaatcttggcttctgctggtagcaagattgatttcggctaatgtttgtagactaacaagcactg

SEQ ID NO: 29085 - DNA, 1092 bp, Setaria italica
  misc_feature (1041)..(1041): n is a, c, g, or t
  Peptide Sequence Number=SeqID_95059
tgtagagacattaggatgcacaaccggaatttacagtgccaaaactggtactctcacgacaaacatgatgtctgtgtcaaaggtgtgtgttgtgcggtctgtacaccagagaccgatgactgatgagtactccattagcggaacaacatttgctcctgaaggttttatttatgatgctgatggattgcagctggagtttccccctcaatcaccatgtctccttcatcttgctatgtgttcagctctttgcaacgagtccactctacaatacaaccctgataaaaatgttatgaaaaaattggagagtccactgaagttgctctgcgtgtgcttgtggagaaggttggtcttcctggttttgattcaatgccttcagctcttaacatgctaactaagcatgagcgcgcatcatactgcaaccgttattgggaaaatcagttcagaaagatatccgttctagagttctcccgagatcgcaaaatgatgagcgtcctttgtagtagaaaacaacaggagattatgttttcaaaaggtgcccctgaaagtataatggcaagatgcacacatatattgtgcaatgatgatggttcttcagtaccattaactatggacattcgtaatgagttggaagctagatttcaaagttttgcagggaaagatacactgaggtgcttagcattagcattaaaacggatgccagctggtcaacaaagcatctgttatgatgatgaggccaacctcacatttataggattggttgggatgcttgatccaccaagagaagaagttcgggatgctatccactcttgtatgtctgcggggatccgtgttatagttgttactggggacaacaagtctacagcagaatctctgtgtcggcaaattggtgcttttgagcacttggatgactttgcggggtattcctatacagcatcagaatttgaaggattgcctcctctggaaaggacaaatgcattgcaaaggatggttctgttttcaagagtggaaccttctcacacgcagagcaacttcagtggactntccaattttttcatacatttttatcaggtgtatgtagagtggactcgttgc

SEQ ID NO: 29086 - DNA, 559 bp, Setaria italica
  Peptide Sequence Number=SeqID_95060
ttttttttttttttttaagggtacctcaccggtagaataaatccccatcagaacagggggcaatcgtgaactcattattttctgtaagcatcagttacaggtatgagcagagtctataaacaactacagatcctagagcacattctcaaagctgttctatgttttctgcccaaaactggcattctgagacctgaaagaattccagcgtcagtcattgtatgaatcagattgcccacaacaggatttgcagtgcttgttagtctacaaacattagccgaaatcaatcttgctaccagcagaagccaagattcccgctctgtattgtaagcatctccatatgctgaggactaaaactaattatctctcgactcttttggaagtatctcacgtctccacaaccttaaagggaaccttcgtcctcgtgggcttctcgagaacaatttcaatacctcatcaataagaattactgggaaggatagataaagaacaactttccactcagcccacgataatggagacaccgagaaaagagctgctagtggttcaatgtacaggactg

SEQ ID NO: 29087 - DNA, 292 bp, Setaria italica
  Peptide Sequence Number=SeqID_95061
cacaatcacaagcagcggaattgtctacttcagatagctcaaaaccaaaacagagagaaactcaaatggctgcctcctcctactttcttctagcagccttcttcgcaattgtcatttctcgggccattgcctctgaccccagccccctccaggacttctgtgtcgccgacatgcactctcctgtgaaggtgaatggatttgtttgcaaggaccccatggccgtgaacccagatgactttttcaaggcagcaaacctggacaagcctagggacaccatgcatagcaaggtggg

SEQ ID NO: 29088 - DNA, 1201 bp, Setaria italica
  misc_feature (1)..(76): n is a, c, g, or t
  misc_feature (84)..(84): n is a, c, g, or t
  Peptide Sequence Number=SeqID_95062
nnnnnnnnnnnnnnnnnnnnnnnnnnnnnnnnnnnnnnnnnnnnnnnnnnnnnnnnnnnnnnnnnnnnnnnnnnnntttttttntttttttttttttttttgggggttacacgtaactgtggtctcctcacatttattcataattaacctgtgaattgtgcttctggagcttacaagataaaaattgtcaaggagagaaaaaaaaagtaaccgtgacctatagcactgcatcgaacttgtactgttcactctttagacatcgccgaacaggcactcttagatacggcttatgtcccggccaaacaataacgtggtcagccaattgatagccacatagaacctattcctccaactaacaacacgagttaagtaggcggagcgccagataaaaaagctcacaaatcctgcaagagatatccctctcgactccttgctttgcctcagatcgactagagctttgtatcttccaacagttgccatgctgcctagatgcttgtacacaaagggtggcccaggatcggcttcgacctcagagtttgcatgccctcctccagctttcatgacatggttgagcaggttggcaaggtacttaccttgtcgttctgcaacctgggctagagctgggagaacatccttgccagtgctttcatgaaatccactgcagtcaccaatagcatacacatcccgaacagaaggaactcgtaaccactcatctacaccaatccttccaccaggtgacttaggaaatggcaacgacttaacaaatggtgaagcaccaactccggtagaccatactaacaaaccataaggaacctcctctccattgtcaaggattaatttgttaggttgtacatccttaacaattccttgcacaagcctaacacctgacttaattaattggtttgtagcatattgcctgaggcgaacatcaaatgatgacaatatttcatttgcctcaatcagggtcacatggatataatccttcacgtgtgaataacgttgtttaacatctcgcatgatgaaatcactaagttcaccactaaattccacccctgtcggaccacctccaacaacaacacagtgcaatagtctgcgcttttcttcctcggaaagtccaggtacatcagacaacatcagattaagaaggagccttctgcgaatctcttgagcatggtgaacttcccgaagaaagatagcatgc

SEQ ID NO: 29089 - DNA, 706 bp, Setaria italica
  Peptide Sequence Number=SeqID_95063
agttgaggcttcaaatcctggtgatatgaccggcgaaacagggacgcttggttacatggcacctgaggttctcaacggtcatccttacaacaggaagtgtgacgtttacagctttgggatctgcctgtgggagatatactgctgcgacatgccgtacccggatcttagcttctcagaagtcacttctgctgttgttcgccagaacctgaggcccgagataccgcgctgctgcccgagctcgctagcgaacgtgatgaagcggtgctgggacgcgaacccggacaagcggcccgagatggcggaggttgtgtccatgctggaggcgatcgacacgtccaagggcggcggcatgatcccgacggaccagacgcagggctgcttctcctgcctccgccgtacccgaggcccctaacgccgtggatctggtcgcagtaacgcgtacccggtgaagtgacgctattattgctcggtagaactcagtgtaaaatctagttgcggaacagggtataatggagaaatttctcacgggtgtaaatgaatgggctgttcgacatcgtccttgtatgtttgctgcggattctagatgcttgctgcacgttaaggtcaggcttagagagaattactgtggccgaggaattgaaattcatggccgtgtcgtgaagcaggcttatgtactgttggattcaccatctctttacataatgtt

SEQ ID NO: 29090 - DNA, 249 bp, Setaria italica
  Peptide Sequence Number=SeqID_95064
agattgatgtctgggtactgaatcagcttctttactgaaactatatattattaaatcagcttgctgaaattgaaatgatcagacttgatatgggtcatgcaagtcagattcttttcctttgcttcaaccactgagctcaatacccgagtaagttttccttgcatcattttcctattaccattggtttcatatctctgtaattttagtcagtttaattgattaagacttgatacaagctgaaatattaag

SEQ ID NO: 29091 - DNA, 300 bp, Setaria italica
  Peptide Sequence Number=SeqID_95065
tatttctttcatttgatgctttcacctatgtgccagcagtgcacttcggcatttgctcctcacggcctcatattgttagcattaacctgaaacggctcaaatatggttgtagttccatgaatctactaaaatcaatacttgagccgtttcaggttaatgctaacaatatgaggccgtgaggagcaaatattgattttagtagattcatggaactacaaccatattttttgcctttccaaaatttactgttaagtacaaatataagaaatacgacaacttagcttcacaacttatatggtg

SEQ ID NO: 29092 - DNA, 188 bp, Setaria italica
  Peptide Sequence Number=SeqID_95066
atttttctatttgttcatattgactgtttttactatttgagaggctacaaacctagaatatactacagctagatcactgaaacttcgtaccgattcaccacatgaaagtggtgttaacataaggcaggaaagctaaaacaaatgcaactcccatagtagacaaacttaaattagaacccccccccccc

SEQ ID NO: 29093 - DNA, 580 bp, Setaria italica
  Peptide Sequence Number=SeqID_95067
taagggacgaccaagctgccgctacgtgccccaggccggccggcgcgctgctagcttcatctacctcgccgtcgccgtcagatggagaccctggtcgatgtgaagcgtgatcatggtccggtagttgacggtggccttgtcgccgtcgcgcaggcggaacgcgaaggagcggaggagcacggccgcgaagatcttcatctgcctgtacgcgaactccttccccaggcatatcctcgggccggcctggaacgccgtgaacttgaacgggctctgctgctggaactcgccgctgtcgtcgagccaccgctccggccggaagaccccggcgtcctcgccccacaggtactccatccggcccatggcgtacgggacgtagaacacgatgtcgcccttgctcacgctagagccgtcgggaaggacatcgtctccgaagcactgcttgttatccagaggaaccgatgggtacagcctgagcgtctccgtcagagtggcgtgcaggtagtgcatgttgttcagggcctcggtcggtcaggctctgcgcgaactcgtcgaccgttgccgtctcgctggcgttgggtag

SEQ ID NO: 29094 - DNA, 559 bp, Setaria italica
  Peptide Sequence Number=SeqID_95068
aacaaatctgactttgaaatagattcagacattcgcacgttggaactcctgaagatccattttggtgagagcagcatgcagaagtgtgagattatgcttaatgacttgattgactcgaagagaaccaactcaaacattaaaacatctttgctaaagacatctcaaactgttgctgggcaagaggaagcagaaatatctcatgatgttcttgatgcaacaataatatcatccaacttttggccaccaattcagacagaagaccttgttgttcctgcttcagttgatcagttgctatctgattatgcaaaaagatttcatcagataaaaactccacggaagctattatggaagaaaaatacttggaacagtcaagttagaactggaatttgagggaagaagcatgcagtttactgtggctcctgttcatgctgcgatcataatgcgatttcaagagaaatctagttggacttcaaagacacttgctacagaaattggcatacctatggattctcttaacagaaggataagcttctggacaagcaagggtgtcctgacagaa

SEQ ID NO: 29095 - DNA, 477 bp, Setaria italica
  Peptide Sequence Number=SeqID_95069
tggaacggcacgggcctcgacgcctgctccggcggctgggccgggatcaagtgcgcggcgggggaaggtcgtggccatccagcctccccttcaagggcctcgccggctcgctctccgacaaggtcggccagctcaccgcgctgcgcaggctcagcttccacgacaacatcatcgggggccaggtacccgccgccatcggcttcctccgcgacctccgcggggtgtacctccacaacaaccgcttcgccggcgccgtgccccccgcgctcggcggatgcgcgctcctccagacgctcgacctcagcggcaactacctctcggggagtatcccttccaccctcgccaacgccacccgcatctataggatcaacctcgcgtacaacaacctctccggtgtcgtgccgggcagcctcacctccctcccgttccttgaatcccttgagctaggcaacaacaatctcagtggcgtgatgcccg

SEQ ID NO: 29096 - DNA, 645 bp, Setaria italica
  Peptide Sequence Number=SeqID_95070
ggcatctggcaccaagaaggttgtgcagtgcacttaaagggtccattaacggtactctgtttatgtttgttcagcaatgtggacgtgggacttttggttcagcttctgattccctatgactgatggaaaacggagatgtatattttctgtccagatgatacctggaaggtgtagttaccaccctacattctttgaatcaagtgttatgggggctctttttctgcctcaagcgcttggcagtagtcaactgcttgttatacttggtagttactgaagttgttgacagaagaatttgctgaaaagacatactggagaattttttttgctttggaacctctatgcggctggtgtatgatacttgcggtctgagacctagtgaacagagatctttgactaaacctttagtctgagagaaataactggctggtttcattctctgagaccagtttattcaccttcatggattctccttgaaaatgcatgaaatcaggtaagagtagtggatatgttagtttcgggttgtagggctgtgagactgtaaccctttcatagttcataccctagttagattttggagcattgtaaagcacaacagcctcgagggagaatccattcaatctattctttcctgttacatttctttct

SEQ ID NO: 29097 - DNA, 215 bp, Setaria italica
  Peptide Sequence Number=SeqID_95071
atttaatagcgctaaattcagacggatcgttgagagatgcagagacaatgttagatcaactatgtttactagggaagaagataacaccatcgcttgtaaatgatctggttggggttgtgtccgaggagaaactccttgacctattggagatagccatgtcatcagacactgccgaaacagtcaaaaggtcaagagagctgatggattccggtgtt

SEQ ID NO: 29098 - DNA, 419 bp, Setaria italica
  Peptide Sequence Number=SeqID_95072
gcactcgccagggaggcgcaccgccgcgtcgcggccgcggaggtcgcgctcgacgtagtcgcttggaacgcgctggtggacatgtacgccaagtgcggcgacgtggcggcggcgcgccggtggttcagggcgatgccggcgggcaagaccgtcgtgtcgtggaacacgatgatctccgcgctcgcccgcgccggcgagcacggtgaggcgctggctctgttccgcgagatgcagcgcgcaggggtgcgcccggacgacgcgacgctcgtcgccatcctcggtgcgtgcgctcagctcggcgcgctcgacaccggccggtgggtgcacgcgtacatgggcaggcagctgggacgccgcgaggccgccgacggcgtcgtcggcaacgccctgctcgacatgtacgccaagtgcggcgccgt

SEQ ID NO: 29099 - DNA, 388 bp, Setaria italica
  Peptide Sequence Number=SeqID_95073
gtcagcttccaaattgaaaagcttgcaaacatcttttgccacatcaatgaccgtcctctctctctttgttccaatattataaacatgcccaacttctccatgatgaagaattacctcaaatgcctctgcaacatcctcacaatagaggtagctacggacattggttccatcaccatggattgggaggggctcccctctcatggccaagagaatgaactttgggataagcttctcaggaaactgattagggccatagacattatttcctcgagtagttataaccggcaggccataggatctcccatatgccattacaagcatctctgctccagctttggtggctgcatatgggtttgtggggagcagctgtgatgcctccttgttgcca

SEQ ID NO: 29100 - DNA, 1043 bp, Setaria italica
  Peptide Sequence Number=SeqID_95074
ttctatgtaattatgaatagttgttacaacagtgtatatcaaagtagtagcaatagtgaccagcagtgtataatactcctgagaacagagtatgagaaacgagttaaagaataacattctcaaactttcttgattcaaagccaactcaaacgaatcctagatgtcagaacagccttccattgtctactctcatagaaccaacacagtaaaggccttagacaaggcccggaccagctgcaggcggatggagagctacacacccaaattgctccgatgcgtacttctggtagatggtcttcagcttcccttcaggagcggctgcatgggagctgaccagcatctttgcgccttccataagctgctgctcatggagtccagtgtggtgcttcagggtgtctgtccagagaggactctttttcaacgtgcaacgagcagcgtacactgcggaagcagcgatcactgaaggacggattgtcaccatgcggtaatccatcagcgcgagctctccaaagaagagaatcatatgctcgagctgcttatcacctcttcccgcagccttcgcgaaccgcaccaggaagtggtatgtggtgggaagagtgaggttccactccagtgtgttcagaatagccttctccatgacaagaatctgctgctgactgaacgcatcatctgatatgctgatgaaatcgttgaccaatggtgcccaaatctcttcatatttgcaggcgatcagcattgccgcaatgccgacgagctggagctccctcttcagcacgggttgcagcgacaggtaacggtccacgatgtacatggtcagatacagcgtttcaggcatgagctcaaatttaccgtggacctcagccatccagtccgtgaggatggcgcgcattttggggttgacctcggactgatggcccatgtaatcactggggcggctctcatgctcagtggccttgtagaacttgtagatgtcctccacatagtccaccatagcaagctggttgttgccatccagcttgtcaatatcttcaatgagtcttttt

SEQ ID NO: 29101 - DNA, 938 bp, Setaria italica
  Peptide Sequence Number=SeqID_95075
tgatggccaataattctttgagctaacagatctttttatagagatgctaacagatgctgagatagtaacagattgcatttatcatacaattaatattaacttgctctacctgtctaccaaccaatgatcaatgggtcaaaccaaggactaaaaactatttttttaaaaaaaggacctgattgatcaaaatactgtttgcggaacaattatcgacaatccactagaaaagctaatcaacagtcaaattgcttagccaaaattcaaggcaacttgctcagcctactgatcacaattacacatggtgagaacaaatttaccctgttgaactcagtgcatttctagtttctagtggaagtcttatagctacttgacaaacactttagcactccagacaaacactgtgatttccacatgatgagaacatatttattacactttagcttgaagacaatttattcgagaatactagcttccaagtgatgcagtacttctatttgggtgatgtacatgtacctttttgtttgaaaagaaaaacactcatcaattttttcagtgatgttagaaagtaatatcacttgttgctctaagaaagaaagtactaggactagtcagattgggaagcagttttattttattggctaatctgttataacagggattctgttagtgaccttacaaactaatatttaaatatgttaagacaatttcttgttatgtaaggacagcacattgatcgctaacacatattgaagcaactgaacttctctagtgatggtgaccagtggaactgagcaaccgagcaagtcaccgacgtactagcaaggtaaaaaaactaaaaacaaaatggcccctaattcagtccaatcaaaccgaatttgcacgagcgatttatactagtacttctttataactgccatagtaattactagatgcggatg

SEQ ID NO: 29102 - DNA, 1413 bp, Setaria italica
  misc_feature (1413)..(1413): n is a, c, g, or t
  Peptide Sequence Number=SeqID_95076
tacttaggtaagtctgggggctgttctttctggggcttcaataccaatactgtcacagagctatcttgtctggcagcttcttctatctgctattttcttgaagaggcgctatagaatcaacgagataactggatgctttctagtggctgttggtgtcataataactgtagcaagtggatctgttactggtgcttcacttaaaagtactggaattgtatggccactgctaatgataatatcgttctttctccaagctgctgatacagtattgaaggaaataatatttatagatgcttctaagaaattgaagtgtggctcagttgatctttttgttgtgaattcatatggctctgcttatcaagctctttttatgtgtctcctgctgcctttcctgtcaaagttatggggagttccattccatctgctaccagcatacattaaagatggtgcagcctgtttcttaaatacgggatcaatatctggttgtgagggggcgccgctactaccactactatttgtgttggttaacatgggatacaatatatcattactacacctaataaagatctcctcagcagttgtatcttccttggcttctacattctcagttccgctgtccatctatgcatttaccctaccactgccgtatatcggtgtggcatcaactctgccacccggctttgttgcgggtgcagcagtactcaccgctggcttactactgtacagcctcccacaggcacaacattccggaaattctttccacaacaagaatgactagttggcattcttttcttcattagttcaccaccctttactcgaagatggtgcatcacctgggcttgaaaggtagaacagaagttctcctgagggcctcctgggtgtcgtatgttgtatgatacatatcatatatatacccaccaataaatgcaaggaaatggcatacggatatacagggaataatgaatagagtctgagaggagtaagtacctggccgtcggacattgttattactgagtgaaggttggagatgggtaagcacagtggtgagacgggaagagaaccagggagaagagcaagagcatcatcaccacagggacgaagagaaggaacagcggcggtggcgaaagcgatggcagaaccaatggcagccacaaaaggatcactgtcgccgcaagcaacaccatcagtgctctcttgttcatcgtcgtcaccgccctgtgttgtgatgaaactaaacttctgcctcctccaatggccagccggctccggtctttctttaggctttcatgttttgttgtgaggaagctgttgtatgtgttggaaaatgttgtactaatccaatggatctggggagttggcaagttatatatatggccagcttgaagcagcaggtcagatggggtattttaggtn

SEQ ID NO: 29103 - DNA, 303 bp, Setaria italica
  Peptide Sequence Number=SeqID_95077
aggaagttgctttgccatttctatggaaacagtgacaacaagatctgattcctgccccttcaaaagaagagggtggtcacaagcctgccgaagccgcaacagcaacacaaggatgtttgcataattttcatttattgttccagctgcatcatatgccttgaacttttgtcgagagccttcttcaagtgttaaatagaaagctcgctcctcttgggtgaaatctattttactcagctgaattgtcttcggtggtagttttaagattggatctctagatattagcgtttcttttgtgcgccgcag

SEQ ID NO: 29104 - DNA, 689 bp, Setaria italica
  Peptide Sequence Number=SeqID_95078
gctcatttgaagggcagagatggcttccaaatctctgcttctcattggcgttgtcctagcttccctcctcctcgtcaccaaggacgtggttgctgctagaaaccagttcgtcgaggcaaatgagtccgagggaaagaacacgaagcttactggtggggctgacttcagggatgagaaagggggtcacgcttattatggtggcggctatggtggtggatatggtggagggtacggtggcggctacggtggatatgtacctgggcgcggttggtatggcggtgggtatggttaccctgactttggtggtggatacggtggcggcggaggcggcggaggcggcagatatgggggtggtggtggatatggcggtggatacggtggcggcggtggtggttacggtggtggatatcctggagctgaatattatggtggaggtggggctggcactaggagctacatacaagagtgcttcaacaatattaccaagtgaacttccataaaagattaccatggtaagcttgccgacggcacggcttcatgttctccctttgatgttaactttcatttggtacaatgttgtaatatcatgttatataggagccatgtataaaataaaatggaagacccactttattatttttaaatacaaggaatgttttggaacgtatagaaaaaaaaaaaaaactaaa

SEQ ID NO: 29105 - DNA, 404 bp, Setaria italica
  Peptide Sequence Number=SeqID_95079
ggcttctcctccccctccggttcggttcggttcggttcgggttcgtgaggtgtccggttcgggggtgagaggcagagatggcggcgtcggatgttgagtaccgctgcttcgtcggcggcctcgcctgggccaccgacgacaactcgctccacaacgccttcagccccttcggcgaggtcctggagtccaaggttaggatgatttcctttgggtggagaacaaaacgtgatttttgaaggggaaataggggaactgtccagatctgtggtggtggagggtttggtgtgctagatctggagtgtttctgacatgatgtcttgctttccctcgcagatcatcctcgatcgcgacacccagaggtcccgcggcttcggcttcgtcacgtttcgtcgtagtcgtagtct

SEQ ID NO: 29106 - DNA, 526 bp, Setaria italica
  Peptide Sequence Number=SeqID_95080
ctggatctgttgatgtgtcagtcataggactatcagccatagctgactctccccagttctcaatgttaccagttggtaaagccaccagatttggttgtgctcctgtttgctgttctagcgactgagggtcaatccttgctgcagctgttgctgcggttgtggtatttatatgagacggagaaataggctttccgtaatttccaaactgaagaggattattgctaattgtatgagtatttgtcttcagattgaacaaagtgcctgtattaatattagcaagatcttctattcggaatccagcagactgtgcaagcgccccaaagtcagcaactcgagaaggttgcatgctgttcatatctgtgtggatggagtgctgaggaggcccaaagctcggcatcgccccgcccgcatcttccgctgccgctgccgccgccgccgccgccgaacctcctcgcctactctccatcggccaccatcaaggcatcaatcaccatgcaaccccgggcgccgccgtagcctcacctcg

SEQ ID NO: 29107 - DNA, 335 bp, Setaria italica
  Peptide Sequence Number=SeqID_95081
tgtcgataaaaaggcgtaaagccgtcgcctctctttccccattccacgctgcttcggcgcccggcacccacctccccccacttcgccgccggcgggtggagtcgggccggagcagccgcctttaccccaaaagcctaccaaactatccggcggccgccatggggcacggcgtcagctgcgcccgcaccggcgacgagcacgactacttccgcgcggcgcagctcggggacctcgacgccctcgccgcgctcctcgccgccgacccctccctcgcgcgccgcgccacgctctacgaccgcctctccgcgctccacatcgccgccgccaatgggcgc

SEQ ID NO: 29108 - DNA, 370 bp, Setaria italica
  Peptide Sequence Number=SeqID_95082
tttttttttttttacgttaacgtacagacaacatattacaaattcatacatacaaattacaacattatttacacacatacatcccgcggtctacatcaacgagattcccgccgcaatccaatctcagacactgcccatatcaggagtagcattagctgccacccattcggacaccgcatagtccggttctcacgccttggacgatcctgcagaactgtcattagcaaggtccagcaaataattatgcagtgcaaagcaagcaataacaatcttcgtttgccgttctcttgaatatagtggaacttccgcagaatgtgccacctcgatttcaggacaccaaatgcgcgttccaccacattgcgaagactgg

SEQ ID NO: 29109 - DNA, 319 bp, Setaria italica
  Peptide Sequence Number=SeqID_95083
aagagaatgattttcatatgaaaagaattgcagtgtgtgtttctttgaagatctattaatgttttactccaattattcagagatatgttgttttgctatctacataatacatactcataaggcaatattttgcatccaacttctactctggcattatgcggttatgcctgtcatcaggcaatctgcagaaatagatgaatggtataaatggagggaaaacagagggaaagctcttgttccaaacctgctgaagttctcatcagtcaccaataataaactgttcagcaaccaaaacatgcatgatgcattgttacatttt

SEQ ID NO: 29110 - DNA, 323 bp, Setaria italica
  Peptide Sequence Number=SeqID_95084
cccttagtgctgccgcctctgtgttccaatccatccaggtccggttagtggagtaaactagacaaaatagctgttccaggatattgattgctttttacagtacagggcttgctgcaaatgtattacagtaccaaactgcataacttttatgccctccgttcttaaatttataacacatacatttaagaccggggggagtacatttgttcctgaattacatgtccccattcttcaataaggagttatctgactgttatatagtacatgaaaaatgattatttacctttgtgtgttgaagactaactttaaaaaaaaaaaaaaaa

SEQ ID NO: 29111 - DNA, 309 bp, Setaria italica
  Peptide Sequence Number=SeqID_95085
taccgagccccttctacgctctggggccgtcgcaggccgcgccgtgaggtcttcccattcgtcgcccccgcgttgggcaacttgggccgccgtgaggtcttcccattcgtcgtccatcgtcctccctccgcccccgcgttgggcaacttgggctaaaccctaacgaagcgcgccgccggtctcgtctccacctccaaccctcggcggacgccgtctcgtcgatcccttccttctcgcccaccgcggagaccggcgtcgcatctcttttcctttgtttgggttgatccccggggcggcggcaggatggcg

SEQ ID NO: 29112 - DNA, 717 bp, Setaria italica
  Peptide Sequence Number=SeqID_95086
ggatgatccattcactcgttcttggaacctgagaaattgaagagcttgcgggtataaaactcaattgttgacttccatagaagcctacaatgcaattagtataatttataaagagcaccattatcttttctgaaggaagtctggtacgcaaggcgcactaacgggtgtaggtctatcgattagttacccaatggcagttaatggatcacctacaggagttgctgtaatgacagccaccccaggtggtcctgcagaaaaggctggcattcttcctggagacatcattttggcaattgacaacagaagcactgaagacatggatatatatgatgctgcagaacgcttacagggccctgaaggaagttcagtagatttgtctattcgtagtggggccaataccaggcatatcgttctaacgagacaaacagtcactttaaacccagtgaggtcgaggatgtgtgagattccaggtgcaaaagatagctcaaagatcggttacatcaaattgacaacatttaaccagaatgctgcagaatctgttaaggaggccattaagacattaagggacaacaatgttaaatcctttgtgttggatctgcggaataacagtggtggcctctttcctgaaggaattcaaattgcaaagatttggatggacaagggagttattgtatatatatgcgatagccaaggtgtccgtgatatttatgaggcaga

SEQ ID NO: 29113 - DNA, 580 bp, Setaria italica
  Peptide Sequence Number=SeqID_95087
cagacaatatttaccaggatgattgcattatctgtcatcctgctttccttgttatttcttaggttagtacacatcagatgatgccacttttgaacttgttaggtaaataaaggaactgcaagtgcaagtgagatccttgctggagcactgaaagacaataaaagggcagtggtatatggggaaccaacatacggaaaagggtactgcttgccctccctgtatcactgaatcccttgttctgattcggaatgttcattatctcactcctgttacctgctaacattcaggaagattcagtcggttttttggattatctgatgggtctggcttagctgtgactgtagcacgctatgaaactcctgcgcataccgacattgacaaggtaagcaactagtccttgcctcaaaaaaacaagaatttgaggaaaacaatccctcacttatggtttatctgccttttgagttgtcttgaatggtatctttggtaggttggtgtgatcccagaccgaccactgccagcgtcattccctacagatgaagatggcttctgcagcttgtcctttagggtatttcgttacgtt

SEQ ID NO: 29114 - DNA, 818 bp, Setaria italica
  Peptide Sequence Number=SeqID_95088
tttactttagttttaaaggttaaggttaccttaattttaaagttaactatttaagggtactaactaattgtttaaattccttttgttgtttggtattcttgtcggtaattaactagttggtggcctctttcctgaaggaattcaaattgcaaagatttgtatggacaagggagttattgtatatatatgcgatagccaaggtgtccgtgatatttatgaggcagatggagctgatacaattgctgcatcggaacctttggttgtgctggtaaataaaggactgcaagtgcaagtgagatccttgctggagcactgaaagacaataaaagggcagtggtatatggggaaccaacatacggaaaagggaagattcagtcggttttggattatctgatgggtctggcttagctgtgactgtagcacgctatgaactcctgcgcataccgacattgacaaggttggtgtggatcccagaccgaccactgccagcgtcattccctacagatgaagatggcttctgcagctgccttagggattcgacggctccttgcaatctgaatgccgcacagttgttcgcaagatcatgaccaggcccttctctcaacattttgggttggatgggttgtacagatgagcattgtgcttcctatggttttgcgtggccatgctggcttagcatccgtaattcatttcattaacattgattttggttccaatttcgttgcatgtgtaaaatgaaaagtacagcttctgggtgaagccgtggttgtcatgaacagatcctaaccgcaacaattttgaatggaagcactgccaaa

SEQ ID NO: 29115 - DNA, 272 bp, Setaria italica
  Peptide Sequence Number=SeqID_95089
gttgccgctgctctgcttggcgcgcagggaggcgcggcagacggggcaggtggggtgctgccggagccaggcgtcgatgcagggcgcgtggaaggcgtggccgcaggtcggcagcacgcgcaccacgtccttggcctcgtactcctccaggcacaccgtgcactgcgactcctccggcaccggcggtcgctgcgggccgccgtcgctgagcttgacggtcgggaaggtcgtcaccacggagggctgcagcccgtggatcccgcgctcgacgt

SEQ ID NO: 29116 - DNA, 352 bp, Setaria italica
  Peptide Sequence Number=SeqID_95090
tttttttttggtatcactgatagaaactaatatctgacttagatgagccaattgctcgtactgcaaccaggacaatcagatctgtatttaacaggagattgggtgtcattgacaatatctaacatgtttgaattcagtaacaccactaacaccaacaaggatgtgtctggagcaaagcatggctttagaaggctcgactgattatcttgcagtaaaaattggttcagcttcagagcttggttgggttcttctggtatacttgatgagcaatccttctgaagagacaccgggtacgcgcaagtccctgatgtaaggctccagatctttccattcccacttcggtcgctcgcgg

SEQ ID NO: 29117 - DNA, 263 bp, Setaria italica
  Peptide Sequence Number=SeqID_95091
agaaagagacttcctcttgtccaactagtttcaaaggggacagtgtcagagtgacaatttgtttctatcttctcctttgtttcatggaagatataaactgcttctagcaacaaagagaagcaaaacaagataatataatgtcccgggacagattgacaaggtcatgtaacttccaagaaggtgaccctttctttgatatatgaactatagaattacagaaacctaagaagacttgatgctcaatcttgctggttacgcaattg

SEQ ID NO: 29118 - DNA, 446 bp, Setaria italica
  Peptide Sequence Number=SeqID_95092
aaggttggcccaagaatgtacactgtagcacctcttactgctactgaactattaaaatgcttctctgggttaccaaacctgttagaaaaatgtgcatggtgcaatatggtgtcatcaaacagaaggccatccggaacaaaggtagttctacgaagctcactgccatctttagagaacaaacagagctgtcctctcaaattaaggacaactaacatctggtcatctaaccaggcaacaccaatagctgcactatcaagcttccattccttgtgtttaactatctttgatttaacaaattttgccacttgcacttggcggtcccatgcaagtgcaagccaagatagccgttcttcatctaatgatgatgaatcattcaaggatgatgtatacttccatgcagcatacgcgatggagccttctcgtgctccatctggtctagagaacgt

SEQ ID NO: 29119 - DNA, 365 bp, Setaria italica
  Peptide Sequence Number=SeqID_95093
ataatttttttagttccaccaacatagagttattattatgaataatttttagcccaccaacttgggatgtctaacattttttacccttagcaatactatgcctagtagtatctataaatatagaaaattaaaatgacatgcaatttgaaaaacggtttgagtatatcattcaagaaaactctaaccaacaactttgagatgatcttatacaaaacattgcataagcttattttattgggcagtctttcacacgcttgggattgtttgacttgtcacctccaccgcggaaggaccccctgttttcggagtagtttccgggaaacggttgcaagtgctaaaacgaagtcctccacgacgccttcccc

SEQ ID NO: 29120 - DNA, 636 bp, Setaria italica
  Peptide Sequence Number=SeqID_95094
gaggggaccttttagtaccaagtccaacaaccggcactaaaggttctttttctttctattttttctcatttcttttctatttctttattctatattagtatttcgtatttattcctttatatatactagttctaatacactaatatatataaagttgtatttgatctataatattacatttgagataatattatacatagacatattatgtatacacatatatgaataatattacattgtattaactctccaagttcaacattttggatcaactattctgaacccgagtcctgacggtgatgcagatttgatccatcattatggaactttcccgctggatttactacctcgtccagaagaaatctactgagttgttcttgaattgccctgattttttccatctggaggagtttttccttcatgtgcataatctgagtgatgttgatggaagcgagcccatgctccgttaagcatgtctatgagtcgatatattctcacagagtccagaatatagaccatgcttcaatcaaccatgataacaaggaggttcataacccgccaacagcatcttcatgacatctttccaaataacgaagtattgctctctcccacgtgctcttacgtttgttctttctt

SEQ ID NO: 29121 - DNA, 574 bp, Setaria italica
  misc_feature (564)..(564): n is a, c, g, or t
  Peptide Sequence Number=SeqID_95095
gctaagcagccatgtccacattcattgttgaacctggggctatgcatgcagcagcatgcaagtaccttgagtccttgacgtgctgaagaggcgatggaaaaggtcgctggtgaggtcacccacacgttccccagcaatgaaaatctcaaggaggccacctcaaagattaagacggtcaatgatgcgaccgaggaagatgctgagaaagccgaggctccgatccaaaagtgtgagggtgctggtcctgctgatggagacattgacgatgggaagtggcagcacaggaggttacaggaggttgccgctaggtactagcagcatgctagcacggagctctgccagggaagtaggctgatagttgagcgagagaaagattacatgaaaccggcaatgggaaaaatctgttatgtagtgttcaaatagctagttaggcattctattttcatggataatgatttgtacttctgtgttaaaacatagtgcatacttctattatacatgccattacacaaattttatacaataaaaatgaatggttaaaggaaaaaaaaaaaaaaaaaaaanaaaaaaaaaa

SEQ ID NO: 29122 - DNA, 482 bp, Setaria italica
  Peptide Sequence Number=SeqID_95096
ggaagaaaggaaaaaaaagaatgttcaggcaacgcaactccgagcataactcactcagtgggacttttacacgcttttcagtggatggatctaaatcattgtgcaaagggaacccaagttctgcagctgcaaacagcctcttgaaaatacataatgtacaaaaaggtccccggaaaaggatagcctgggacaatgaacttctgtacataccaaaggagggtattacagaaatgcttagaagcttcctggatcaatttttatctggagcatacaatatcctcatgcagtcagtttgtgatgatatcatgaatgagcaccattctattgagaaatccgatatatctacattcttcaaagttgctcgatttgtcttagctttccaacatgagaaggcttcaaatgaccagaaatctgttaaagggatccaaccatctgaggtttcgcctagcaatgaacatgatgataatctgccgttccattgg

SEQ ID NO: 29123 - DNA, 401 bp, Setaria italica
  misc_feature (5)..(5): n is a, c, g, or t
  Peptide Sequence Number=SeqID_95097
gaaanaaacggaggggatcagacacggatccacttgcctacaagctctgaatcaatcctaactaaaaaatgcacgaattttggaaaagctcgagcgcgacgcgattttgccctcacgcccgaaagtaacgcgccttattttacctgggcagtgttgttcgctcccggggcaccagctcaccgcaagccaagcgccatggcgtccctctcgcttcccgcctgcttcgccgcctctttaaatagccgcgttcctcgtcgttcgcttcctggcaagccgcatgcacgcccgcccgcagccactgcaatccctggcacacgtgcagataatagtggtgtgagcagaagagaaggctgctatgtgcatagtgtgattgggtgtggtggagtagtggagctgtgcag

SEQ ID NO: 29124 - DNA, 384 bp, Setaria italica
  Peptide Sequence Number=SeqID_95098
catatgaaatcgctgatgaagacagtaagtttgactatgacatcttggatgataaacaagaatgctcctctgtgtcagaagtagccagcaggagttgtgagacaaagcatgtcactactgctcaggaatgtattgaagattgtgaatcgacacaagtcactgaacgatgtcctaggggtcaagagagtaagagcatagattcaacagttacagatgttactgcacatggcacacatagttgttgtctaaataccatgaatgaattggcactcattaggaagcaacttcaagagatggaaaggaagcaagcaaatctttttgacttgttgcaggaattcatgtccacctctgtggagaacatgacggtgctaaatttgaaggcgc

SEQ ID NO: 29125 - DNA, 155 bp, Setaria italica
  misc_feature (109)..(109): n is a, c, g, or t
  Peptide Sequence Number=SeqID_95099
cccagatttctaatacaaaagctgccgcgtatttgtatcatagtatgctactccaactctacgtccttgcattacacaagccatatggacctgggagtcgatccccgtntcggccatctcctcatcctcctcctcctgaaactcctccgcctccc

SEQ ID NO: 29126 - DNA, 453 bp, Setaria italica
  Peptide Sequence Number=SeqID_95100
gcggcggcggagaagaggaggaagaagagctccaggagctcgcagggctcggaggggaagaaccggaggcggcagaaggcatccttcgcatacgattgaagaagattggaatcaaccctggtagtagcagatagcagtggcgggggcagtacatgcctgctggttttcagttgagcactcgtagtacgaagaaagggcagatcgagataaagtttaggtggtgagcgagattttagcgggaaatgctgcaggatcatggcatgtaacatcacctgtacgcatcttcatacgagtacttgactgtaatactagtagtagtagtctataggggtatgcgttttccctttgcctgaatgcatggctaggtacagaatgaagcaccttcactggattgcatgatttttgagctttgctcggcatctagtgaaaagaagaaaagctccagccaaaagc

SEQ ID NO: 29127 - DNA, 299 bp, Setaria italica
  Peptide Sequence Number=SeqID_95101
gatcccctagcaaggatagctcgataaggtttcatgattagagcaatgcataaacctcccttaagactgcaaagctaccataaagcagatcagcttgagggtcgggttatacattgtcactctccccttcttgcccttttggtaaagctacaatatactagcgtttctaattaatttgccaagccagagccatatagtcttatggttgcactgttttcctgggtggttctccatgttccaattaagcatggtgatcttgtattaatgaaaggtatagcataaataaaaacaagtttaat

SEQ ID NO: 29128 - DNA, 334 bp, Setaria italica
  Peptide Sequence Number=SeqID_95102
gaacgcgcggcggccgcggccaggtcgaggtaccggtgggacatggcgccggcggccgcaccccggcaggccaggagcgccggcctcgggcccggcagcgccgccccggccgcaatgcccatctccgacacgaccacgtcctggttcgtcatgcgcctcgcttcaccagcggccaaggcggcggcagactcgtgcgacgcgaagccggcgagacctcctcgaccgtctcgtcccaacgccaagcactgggacgggacgaacacacagacacctagctagcctcgcctgcctgaggacttggggagtgtgcgggctttgcttgtgagagcttgag

SEQ ID NO: 29129 - DNA, 495 bp, Setaria italica
  Peptide Sequence Number=SeqID_95103
gcagacaagaaaatggaacagaaatataaatgcaaatgagaaggggaatcaatactcccacaacatttgcacgactgaccccaaaaagaaaaacagaaattctttatctcaatgctcaactttgggttgtattatagaaacaactttttcctcaaagaaaatacagaggccaggctaaaccatcttctggtatgtaattcacagacctagatggaaaccaggctaaacaaaagatatataggttaccctaattatctccatttcaccccttattactcacattttccatgcactttaagaaaaccaagatccatattgaatagaacagacaccagtagtaaaagaaaatcatcccatactagatatgacaatgacatggcagcacaagaatgccaaatgcatccactgccaagcatcacgcacaaagtcaaagcagtgttgccattttcatgatcaagagaagacagctgcttatctattttcataaaaacttag

SEQ ID NO: 29130 - DNA, 483 bp, Setaria italica
  Peptide Sequence Number=SeqID_95104
taaaagaaaaagaaaaataaacgaaacaaaagaagaagaatcgcagggaaaccaggaatcagcgctgtctggggtgaaagggcaaagggactaagggcgtcagaagggtagaggccggctgactgagcttggtgacttctccaggctcctcccggagcttccatggatttgatcagcagaagggtggttttcaaggccctggtgttcctctgcttcatcagatcatctcaaggaagagatcatttcaccaaactgaatctccctaccttcctggaggcaagcaggttccccacatttcagtatgaggcatatgactacatcattgtcggcgggggcactgctggatgcccactggcagcgacgctgtcccagaagtacaaggtactcctgctggagagaggtgggtctccatacggcaaccgcaatatcaccttactggagaacttccatatttgcttggccgatgtttcgccagaatcacca

SEQ ID NO: 29131 - DNA, 684 bp, Setaria italica
  Peptide Sequence Number=SeqID_95105
cttgaaattaaagttgtattattagtaaagaaattcttcagaagcttttattcttgccagtgattttgctggacatattaattcaatttccagttctgatttttacccctgcgtgcagatctatgacctttggagaagatgacctatttcctcatgttgattaggagcatggcagagatgtgctagcatccatgccacgcactgctgctgtgacagttgagagcacggtgccctgtaaactggcaaaggattatatattttccatctacatggtttgaacctataggatgttcctattgggcgtgtgactctgctgctgaatccttgtctagcaagtatgctttcttctgaactaccatgatctgcctgcagctccaatattgcgtcagagtatgcttgacttttgtttgcactatggaggacattccaatatgcagacagatgatgaaggctcaaatacctggagggaagagtagaaaaaatcatgttagcttgatgtttcatgtctttctttgaaatccgtttgtttgcatgtaatgtggttcctcctaacccttattcatgcattgcaaagaaatcgtctgcttttctgatgtagaaggccactgtatgcatgtagtttctttgcttcagttatatgccaatcattggctagattgtagattgaagatctgtaaattggtt

SEQ ID NO: 29132 - DNA, 674 bp, Setaria italica
  Peptide Sequence Number=SeqID_95106
catgtagcaacatttgggtctggtgccgctgggctgccgagccacatgtggaggcagagggctaggcagcgtcatcacggggtgattgtttcgtcatgctggttcatatctttccgagacacccatccattaggtgttttacaaattgtgaatatgctcatgattctcactggttattgtcattggtatatatagagatccatttacttgactacaatttcagctctaagtttctatcgtggaaatcggtgtcagctttatttttttaattccatgtagctagtttgcactgtatagcgtaatgacaaattcagaaacctgtgtgatatcacacatacactttaaaattggttctttgacaagtggagtagctaatcctctcgtgttaatccatactgatttgtttaagttgagatttcagcatggttgaaggtcattactattactgaaattaaagttgtattattagtaaagaaattcttcagaagcttttattcttgccagtgattttgctggacatattaattcaatttccagttctgatttttacccctgcgtgcagatctatgacctttggagaagatgacctatttcctcatgttgattaggagcatggcagagatgtgctagcaataccaatagaccaacgacaactagactagactagtagaaca

SEQ ID NO: 29133 - DNA, 539 bp, Setaria italica
  misc_feature (252)..(252): n is a, c, g, or t
  Peptide Sequence Number=SeqID_95107
taattgtgtaagcttgcgagaaacttgagtagaagatatcttcccagtggagtctaaagcctcagctattagatgactgcatttacgatcatccttatatttttcataaagatctctgataagcttctcttgctcttcagtaaaaatagaatgacctcgtctttttggaacttctgagttcagtgaacctcttgatacatggttcctctcattttcctcagcttcactgtctgaaagtgacattaatctgcncctttttatacgtagtactactcttccgaaaatcatccccatgttcaccagctgataagtctccatcattgtcagcgtcatatggtgcctgcggtataaccagatcagcttcatcgtcaccaagcgaatctgctatatttattggacctctccatcccttacttgatccaattccaccattcttgtttccaacatcattcttaagctcattcagtagtgcatctgcatcgatgcaatggcactcctttgtcgcgttctttcctaaaaattaattattgttctaacta

SEQ ID NO: 29134 - DNA, 329 bp, Setaria italica
  Peptide Sequence Number=SeqID_95108
ctggcgacggacacgagcttcgccgacccgaaatcagagaccttgggtgtgaggttgtcgtcgaggaggatgttgccggacttgacatcgccatggacgtggttgtggccaccgtgcgagtgcatgtaggtaagagcttccgctgagccaatggcaatgtccaggcgcactggcaaggacagagggagcgtcttgccggcgccatggaggacgctgtgtaggctgcctctggggacaaactcgaagacaagcatgggaacgtctgtctcgaggcagcacccaacaaggcggacaaggtttgcatggctgatgcggaactggaaggtgat

SEQ ID NO: 29135 - DNA, 527 bp, Setaria italica
  Peptide Sequence Number=SeqID_95109
agcttgagcagtgttgcttggagccgtggttttaccatcttggtaagtcttattatacagttgcaatgcatgtgttcatttgattactgaattaggctgactttgaggccgtgctgtgcttttatatattgaatttaaattatgccaaatattgttgctattttccctaaagctatttgatttgacaaatgaatatgcacaacatggcatgggtggtcctaccattttatattaaatctaattcagtgagatgctctgttatcacaaagtgccttctcattttctaagtatatgttaccttttgtattctaaattttgtttgtcctaaacattggaaacaatatttatgctcctcacaaaataacaggagacaatatatgcactatattcttaaagccgaggcatttcatcaaggagattatccagaacgctagaaccacaaaagacattaataattagaaatgccgatgaaattatccttctgcgcacaatgacaataacagcacggatagaaaagtgaaattcga

SEQ ID NO: 29136 - DNA, 1300 bp, Setaria italica
  Peptide Sequence Number=SeqID_95110
atcattctcccagagagaaggccgtgatatcttagcttccagcttccaaggcttcgtctcgtgagtgactgcgcagccatagaggaaaccttgggtgctggcatgcatcggtgtcaaggataaagatctatcagatggccatggatggtccatcttgcagatccatctcgtggtttacatgttttgcagcttgtgttctcctggagtccattgtttctgctcattcatggtgcactccacatcccaggccaaggcaagaagcaaggttcaggcagaagacaaacaagttctgggagtaccaggaacagagtaatacctgggtcgaaataagcatgccgttcaacttgatgtcttgtatcaatggtacctgcacaaaggtaggatcaatcgcaaggaaaactggctctcctgttcatagtcaagaggaggaagatgcaaggcttgatggagaagatgaagaagacagaaatgacccagtcctgcccataaggaaaagaatttccttgacaagaatgtcggaatcatcagtatgggtgacaggccaaagtggatcgatctacgagaggttctggaatggggtgatgtgggtgattgctcctcacgaactccctacttcagctggctatgccacagcaactttcattgtgaatacaactattcttgctctgtcagaggcaggaatcctttaccagctacagctaaatgagcatgcccagcctatctggacagagatggcattcaactctgaccagcatttcacgaatcttggattaaaaacacaaagtcaaactatgcgtataagaaacgggattgtatccaatgatggaaggaagctttacctatctatcatgaatgggtccctacttgaggtcacagaaattcagcctctaaggtggaactttcatgggcgtcctccaggaggagatgtatcatacatatctgatgctggaaatttgcggccagggactttgttcacagtaagtgcagttccactggagacctgtacgagtttgacaaaggaacaaagccatcatggaaaaaacacatatggagtgaagaactggcaggaagtatttcattaagttcatcagctggctgtgctttgcatggtttgttagggtctaactcagtgtcccttttcctgatatccaaggtatgttataatttgttttatcatagtgaatcccagataacatagatgcaatatatttgagagcttgagagctcacccacaatataaactgaccacaaaagaaaattctctaatccatgtatattatgagttccaggcagatgattt

SEQ ID NO: 29137 - DNA, 438 bp, Setaria italica
  Peptide Sequence Number=SeqID_95111
agatgctgctgctgcgcggcgccagggcggcgtcggcggcatccaccgcggtggccgcaggcgccagcgcacgcaggtccatatccatgcggctcaccgccatggccgccatgtcctcgggcggtaggaggaggaagggccagcggcgaggcgaggccaagtccccacccccgtccccgccgccgccaccgccgcccctgcctcggcacggcgagaccccgagcagcaagaagaagtccggcgcgaggccatcggtcgaggccaagaagaaccgcccggcggaactggaggaagcgcgcggcccgcggaggccggagggcggcgaggcgaggaaggggggtgcgcagcagcggccgcaggagaaggcaaaggcgaagcgggcggtgcggtggaagtgcgcgagcgggtgcggcgcgtgctgcaagctggacaagggcc

SEQ ID NO: 29138 - DNA, 481 bp, Setaria italica
  Peptide Sequence Number=SeqID_95112
gaactgagcattctatatttactgctagtttcccttcaaagtcacgcttatagttctagaagaattactgggatttttcgatatcttggcactgctgcacattgttgaatacatatgtttactgaaaattgagcaagaacttgtccttgtcgtggaaaatgcatacgactgatggtcttaagtatagtacaaggcttgctttgatgtaaacagtcaagttcgttttaaactgtttgtacacccaaatcttatttgaacatctaccctgtgattttggctgcaaatcctgccatgttcgagcagggccgttgctggctcgaaacactgcaagttggggggaatgtggcagacacatagctacaaagggtgcaagctgcgggcggctcgactcatgagtagtggtgcggaatgtaagaggcatggatgccggtggagatgacgttgtgatatctcagggaacttgctctgcacctctgctcca

SEQ ID NO: 29139 - DNA, 160 bp, Setaria italica
  Peptide Sequence Number=SeqID_95113
tcgaccacaggagtagatcggccggcggatgctagggcccaccccgccggacacgacagctccgccggctgaaggcggcaagccgtggaaccaacggccgtgggaggaaacgagggattcgagaagaggggaggaggaggaaaagcagagaagccactca

SEQ ID NO: 29140 - DNA, 1094 bp, Setaria italica
  Peptide Sequence Number=SeqID_95114
cagctgcgtggccgggcggcgcctgccggagcggccgcgtactcggggcctgacgaccttggactcgccccactcccagaacttctggcgctcggccatgttgacgtcgcactcggggaagggcgccgggtaccggttggtgtcgtagcacaccgtgtagagcatctggcgctgccgccaccgccgcatctccatccgcttccgcggcgtcacgatggcgtagtccgccgtcatcagctcgaactccgcgccggcgcaccggtccctgttctccgcggcggcgccgagctgcagctgcagcgccgcggtgtcctcgtgcctcatcacggcggcggcggggcagccgcggaggaccaggtcggagaactcggcggtgaagggcccgcgcttgtagttcaccttgtagcggccgttgtcggtggcccaggtggagccgtcccagatggtggcgtacagcgccatgggcttggaagggtagtcgccgcccatggcgccggagcggggcacctcgcggaccgccacgccgtccacgtagaagatgaccacgcgggaggaccacaggatggagaagcggtgcgcctccgcggtggggtcgaagggcatcaggtaccgctcctcgcggccccggtcggtgctgccgttgccgtacacgttggtctgcagccgccactcgtgacgccgccggttgcccaggaactcgaagtcaagctcgtcgtggttcttctcgaacacgtcgccgttggacaggtagaaagcgacgacgacgccggccgtgtggtccttgggcaacctgatggcggcgctgaagaatccatggtggtagtagtgggaggagatgaagccggaacccgagtagcggttgagcgtgaggcggacggtgcggtcgtcgggagagcgctccatgttggcctccccgaacagcggcgtgaatccctcgtcgaaggcgatggtcggcacgtcggaaccggccgccggccgcgccatgatcatcatcgtcagcgccgccacgagcagggccaccggcacctggtagtggtgccagcaggccgccatcgcagccgccgccaagaagatgacgactggtctgggggagc

SEQ ID NO: 29141 - DNA, 543 bp, Setaria italica
  Peptide Sequence Number=SeqID_95115
gcagctgcaggacgaggcgcagcgggaggataaggcccagctcctaccgaattcgtgacgtcctcctcctcttgcgcgcgctcgcttccctgaattgttagaataacatagtgcaccagggcacaggaatccactctcttcagaagacataagatcgacatgtaccttttggtttgctgcgatcctttctgtttacaagaaaagcacactgctggagtgtaaggttgaggtcatttgtgtggaagtcaaatatgaatatgattcgatgcccatctgcacctactgctataaaaatgttgatctcatcaacaatatctgtgcaatgaaggaaggatcgaacaattgatggttttgtcctacccaacattttatcatgatccttttatcctgcctgcagttccatgtacctttctctttgaaaaaaaatctctcaggccaaattctttgctcctttttgtatgtcgccatctgaagcaacaagtgggtgtaaaaacaaaatatttcatcaaactaacatggatagcaatcttcaaatgtaaaaaa

SEQ ID NO: 29142 - DNA, 407 bp, Setaria italica
  Peptide Sequence Number=SeqID_95116
tgcaggtcagaggggtagtaaataatgagattggattttctgggctagatattctccaaagcatcaacgaggtccagctcagtgtttacattccctgggataaagaaaggataatagctgctaaagatcctaagaccagggaaaagatagaggaggaagaaagacaggaacaaaggcgcaagaaaggtgaactgaagaagaaagtccaggaacagcttgctcggaatagaaacgaaccaattctaacgtttgacaatatatacctggggtagtatagagtataggctatttttaatatggtaaattataattagcacgacatatattattcgctgctcactcgtctgaaggagctcgccgccggcagctatgaagaacaacgggaagaacagatactagaaagcagg

SEQ ID NO: 29143 - DNA, 643 bp, Setaria italica
  Peptide Sequence Number=SeqID_95117
ctagcagtgtagtagttccatatgcaaggcgtctgatctctcaccacatctgggattgggcaccggatcgggaagggaaccctgagcaacagtcaacagatgtgagaatctgatctcgccaaaggccctgagcaatggcgatgccaatgcacctaacaatgtctgctacaaaccgcctacatcgctggattacaaggtcatacagtgcccccatatttacaaagttgaaggacacggaaactacagctccgaagtcttaatctacatgatctgatctaaacctgcatctcatgcatcaggtcatgccgacgatgttctcaaacccgttttccttgacaagctcagtgaactggttgaggtagctgacaagcccaccgagtgatttgatgagctcgtcggccttttggcgggcggtcttcatggcatcaggtgaaactgaaccagcaagagcgtggttttggccagcatcttcatccgcctcttccttcagtatggtgtggatatgctgcgcgttctcttgtaacttgttggccagctcccatgcattgttttggcttttctctggttcgcttgtttgttcccactcatggccttccaagtcattcgaagcatcagcattgctgccatccacctgctatttccc

SEQ ID NO: 29144 - DNA, 488 bp, Setaria italica
  misc_feature (34)..(34): n is a, c, g, or t
  Peptide Sequence Number=SeqID_95118
gaaaatacaagtaggaaaaactacaagacatganaggtatgtatccatagatctcaacaagactcagtgcaagctgagcctggaatgctttcttcaagtgtaccgcgtttgtttgacactccaaaccaagttggcaatcctcaaaagaaatgccaacttgacattccaagcaattagcgaatttgaggaacgagtatcaaaacttatatgggaaaatcaaacaaacccgttccacattttgcagagcccaggtaacaagaatttcaaggaggtgagtgaattgttgctcccctagctcaagacatgccaatatattggctcaagcagtagagattctaatgtcatccaataagaaaactatatatggttgtgactatgtgccagctccaagagagatactaagatcctgaacataaaatttgggtaaacttgaagttttatgtatctagagtttgctttttgtcactatctccttttcttggtcaata

SEQ ID NO: 29145 - DNA, 522 bp, Setaria italica
  Peptide Sequence Number=SeqID_95119
ttttgtctacaccaatgattttgagtccacacttgcaacagttaaactaattaccaccgtaaaaaaagttggttgtattgagttgcatgcacattgttgatgtgtccttcagtttggaggtttctcagcttgtctgtctaaactccatccaaatacgcataatttgctgttgtgcttgtcagttttgtctgtggcttcaatatctattgttgttccccacttttttatttggttgttttgtctcattatccaataacaagctggagcatagactcatttgctggttgtcttctactgttttaagctataatgctatgttattttaaattcctgtattctagtttactgagatgattttattccaactggagaaaatgttgatatactggtggtttaatagttctgccatatgttgttttcgagttcactgatacattgttcctggtgtatttacaaagcatgcacaatattgtgtttattatcgttgcttgcaaatcaattatgaaactatcacttttgcca

SEQ ID NO: 29146 - DNA, 275 bp, Setaria italica
  Peptide Sequence Number=SeqID_95120
ctccttggacagtattagattatcttcttgagtctgatggagttctaatagacggtttcctgcaagggtcttagctgcatcaacagcatctttgaggtcttgccagctcatactttggtctgaagatttatcagtagaaataccaccattcacagcattcacaccggatgcatccatgacagaaccatgcttctgcaactggagcacaaccaacttccgtcgactttcctcaagctctgccatgctttcctctagctcaccttgtaaattgtcgt

SEQ ID NO: 29147 - DNA, 364 bp, Setaria italica
  Peptide Sequence Number=SeqID_95121
ttgggtcccttcggtttgcccctgatgacccaactctccctgcgccctggaaagcgctgatcgacggggcaacgctgtactactggaacccggagacgaatgtgacccagtacgagaagccgggtgctgcggcggcagcaccccccttgccggcgggtcctccgccaacgatccctgcgcaggttccggaacctgcaccaggggctttttcacagcctggcatgcagtttggccaagctggtcagggggtgcaccaggagcgaccaggccaggcaacttatcctcaggctggccagcttgggcagcagcagcagcagcagactcaacagccagcgcagcagcaaccttttcagacgtgcctcaa

SEQ ID NO: 29148 - DNA, 564 bp, Setaria italica
  misc_feature (1)..(23): n is a, c, g, or t
  Peptide Sequence Number=SeqID_95122
nnnnnnnnnnnnnnnnnnnnnnntttttttttttttttttttgtttagttgaaaacgcatcattcattcagtggagtgcttaaaactgctccatcattacatcaacctcacttccgtggctatcgaaacacaccgattagcagtaatcaacatggcctagggctactagtagggagtaaaaatagcagtaactagataattttacatggctcgctaatgctaataggaggaacagaaacacaaggaacagaaaattaagagttaaattccattatttttccactttcgattctctggcgcctgatagcagcctccggtgacgctgccggcgttgttgtacctggcctgatcagaagaccagcttccggcggggaagaggccggtccgcgtcggcgagctcgcggatcgtgtcggcgaccaggtccttgaacaccagccgctcgatctgcagcacggcctccgctgcctccgcctcccgagaccacccgccgcccctgctgcgtcggcgcccaccggccgccgtcaacggtaaggtcgcgccggatcgcgttgcaggtgacgtcg

SEQ ID NO: 29149 - DNA, 501 bp, Setaria italica
  Peptide Sequence Number=SeqID_95123
tttttctactacttttaaccacttaacgtttaggtttagtttgctttcgttcgttgttcgaaataatgaatataactttgcaaaatagagacttttctcaaggtgtcttgttccactgttgctagctccacttagtttatacaaaccgatatagcatacaaaaatatttgaatttggtatttttcaagattcatagactaaagatagcctcttgtttccgttttaacaaatttgtaaaacttagcttctgtgactactggggatctatataatgttagtaaagcatttgttttccagcaataatgttttctattatagttctgaattttttgcggcaaagctataaatagtagaatatagatggagaaaaaaatagtagataaatagccactacatcaatatgaacagcagcatgaaacatgttcagcataaatactgctgcttctacagtgacctgaaaacaacgggtcagctgctatctgaactgaaaaggatgaaatt

SEQ ID NO: 29150 - DNA, 920 bp, Setaria italica
  Peptide Sequence Number=SeqID_95124
aacgaagaagaacaaacaaaaagtatttgcagtaaacctgcagttccgcatgagcagaggcgatatgtgcacttcccaaagcctatgacttatgacaggggcgaatgcgcatgtaccccggtccgtttctttgttattgtgtctatgcagagatcaggaagtgggtggtttgagactctgttgaacagccatcctaatgtcagctcaaatggtgaaatcttctctgttagagatagaagagaaaatatctcaactattttgaggactcttgataaactgcatagcatggactggctcactagtgcagcaaaaaatgaatgcacatcagcatttggattgaagtggatgctaaatcagggactcatggagcaccatgaagacattattgattatttaaacagaaaaggggcgtatggtgatacttctcttcaggaggaatacattacggaggcttatctctgtgttggctaacaaccatgataggagaacaaagcagttgaatggcattcataaatcacacgtccactcaaaagaggaggctgagatactagcgagattcaagccaaagatggacgtgtcaactctaatcccaagcatcagaaacgctgaacattccatgagaacttgcttgggccacttcagcaagacacgccacatgatcctctactatgaggatgtgatcagcgacaaaaatgcactgtctcgagtgcaggaattcctcggagttccggtgacgaagctgtccagccagcatgtgaagatccacacccgccccctcccggacctcgtcgaaaactgggaggatgtgagcgacatgctgaacgggcgaagtacgctcggtttcttgatgatgcagactacgtcaagtgatggttctagttcagggccaaacgggtcatggatatagttccagttttaaa

SEQ ID NO: 29151 - DNA, 416 bp, Setaria italica
  Peptide Sequence Number=SeqID_95125
caaaaggtgaggtgtgctgccaatgaagacaagaggcatcggtttcttgctcacatgccacgcaaggagaacaggcagacagttgatctagcagatgctatcgcaagagagaatgagtgtttactcattaaaaggttcgaaaggtccagtgtttcctctccgatcaatcctcgtcttcttcattgcattatttggcttctacgtctgctacttctcctttaatcagtttaactttcgaaaatgaagaaaaaatgacaaacgaagaagaacaaacaaaaagtatttgcagtaaacctgcagttccgcatgagcagaggcgatatgtgcacttcccaaagcctatgacttatgacaggtaacttggtttgaagatagatggcttactccaatgttctatgtatataattcgtgcatgt

SEQ ID NO: 29152 - DNA, 597 bp, Setaria italica
  Peptide Sequence Number=SeqID_95126
aactttgcaaagctattaatgacgagctgacttggataacatgagcagacctcggctggtaaatatgtgtaaatacatggggatccaaccttttggtacagaccactacttgcgattcatgcttcggaagaagctacaagacattaagaatgatgacaagatgattcaagctgagggtgtggagtctctttctgaatatgagcttcgacaagcttgtcgtgaacgtggccaccttggtttgttgtcaacagaggagatgcgccaacagcttagagactggttggatctatcactcaatcattctgtgccgtcatctcttctaatactctcgagagcttttaccgtgtctgggagaatgaaacctgaggaggctgttgtagcaaccttatcttctctgccagatgaagttgtcgatacagttgggactgtactgccttctgaggattctgtttcagagaggaaaagaaaattagaatttctggagatgcaagaggaacttatcaaggaagaggagaaaaagaaagagaaagaagagaaggcaaaactggaggagccaaaggctattgaagaagatttggctctgaaggaaatgaccga

SEQ ID NO: 29153 - DNA, 339 bp, Setaria italica
  Peptide Sequence Number=SeqID_95127
acctgccatcctagagttttattggtgtgatggttttgatcggtttatatgttggattttctttagcctccatccggaagagccgaaagtgaaacctccgaaaaggacagcttacctgtcgaaacatagcctcttaactgtatggatgctcaccccaacattcgccaagtgtagagatgatatggtttatctttacaacagagtgtatccaaaaagcttaaagaaaagtgagacatggaacgccacttaggagtggcataacgtcagaatcacccaaaaagtaaccaagattaagctagactgttactggtaccacttataattactactccactaggg

SEQ ID NO: 29154 - DNA, 259 bp, Setaria italica
  Peptide Sequence Number=SeqID_95128
tcaagaaccaaggcgcgtgcggtgggtgctgggcgttctcggcggtggcggcaatggaggggatcaacaagatcgcgacgggtaagctggtatcgttgtcggagcaggagctgattgactgcgaccgcaagagccatggatgcaagggcgggcgcatggattacgccttccagttcgtgatcagcaatggcgggatcgacaccgaggccgactacccttacaccggacgtgacgggacttgtaacgaggccaagaaaaa

SEQ ID NO: 29155 - DNA, 286 bp, Setaria italica
  Peptide Sequence Number=SeqID_95129
ggcgcgtccacctactgtgccgtcaccgcgcacctctggcgcgccatgtgcgccgcccgcgggctcgccccgggggtcgacacccggctccgcgtgccggccaacgtccgccaccgcctccgcccgccgctgccgcggagctacttcgggaacgccatcgtgcgcgacctcgtcaccgcccgggtggaggacgtgctggcgcgcccgctcgggttcgtggcgcgggcgatcggggacgccgtgggacgcgtggacgacgcctacgcgcgctccgtggtggactact

SEQ ID NO: 29156 - DNA, 403 bp, Setaria italica
  Peptide Sequence Number=SeqID_95130
cccttccctcctgattaccctggttctcatatagtaaatcccattcccagctctctcccccctcgtcattctcacacacgtagtgacagggttgagtgagtacacatacacacacgtacagtgtgtgtgagagaggaagagagggacgtgtacagacgcgtacaaaaatacagaggggggcttagctagcctttctcttgcctcgcaagcccgcccgaccgacactcggctcgtgaattccccttgcccggcccatattttctatatatcccccacgtactttacttggcctcccacaccccgcgccaccttggcttccttccttctccccctctagagaagcggagagctcctctctccccttccctccaccaccaccatccccagaggccagagcacagag

SEQ ID NO: 29157 - DNA, 428 bp, Setaria italica
  Peptide Sequence Number=SeqID_95131
cggcgcgtcggtctgacgacgccgcggcgccggtggagttggcgccgctggaggagacgcgctcgcaggaggggcacatggtgagggtggtgggcggggacatgtgcatatagaggtgcggcgagacgagcttgagcgcgcggagctcctgcacctccttctgcagccgccggttctcctccgtcagtgtctcgcagcagcgcttcaggaactcgcagtccacctccgtttgcttcagcttcgtcctcgcgcgtctgttctggaaccacacctccacctgccggggccgcaggccgagctgctgcgccaaggctgccttctgacgagggttcagagtggggtgctcccggaagctgtcctcgagcacggccgactggtccttggaaagccggagcttcttcctggagccgtcgatgccgcagctgccg

SEQ ID NO: 29158 - DNA, 253 bp, Setaria italica
  Peptide Sequence Number=SeqID_95132
tgctaaaaatttggtgccatatctctcttctataggattctctacatgtatccagtatcccaaccgatccatgcacgtcccagctcttccgcgcgtagcaagcgcgggcgcggcaaggcgcgcctcgcgtcctagtcccattacaatttacaagaaattgacaccaaaattatgtacgcagggagcctatctacagcaatcatccatgacctctcttctaggaggaggaggaagaagaggaagacagcagatt

SEQ ID NO: 29159 - DNA, 2141 bp, Setaria italica
  Peptide Sequence Number=SeqID_95133
taccacaacacagcaagttcttgttattttgaaccctgtaaatgcacccaagcagctgccgaccatccaagacagataaaagaatcaaaataactgcgcttgtggatagatacaggtgggaatgaaaaatgaaaacgagctcgaatgcatgtgccgaaaacatcccaatcacagcccacagtgggcaacaaatttatacaggcgcgccctttcaaaggctcctctctacaaaatcccagatcctttcctccatgtagatccggtcactgagccgacgcggcatgtgcctctcgtcggggaagaggaggatctcgtacggcttgccctctgccatcagcgagttgatgagcctcgccgtgtgcctgaaatgaacgttctcatcgatcatcccatggatgagcagcagcttcccttttaggttcttcgtgtgatgcatgatggacccgtactcgtaagcgtcaggatgctcagaggggatacccatgaacttctcggtgtaaaaggtatcataaccatcccatgcagtcactggagcaccagacaccgcacagcagaatgtgtctggaaaccttgcaaggcacattgctgagaggaatccgccatagctccagccatagataccaatatggccaggttttgcaaggcctttatttattaaccactccgctccttctaattgatcttcggcatcaacacgaccaatgttatacttcagttgtccctcaaaatgtagtcctcgccttgccgatcctcgattatccatcttccaaactaatatacccttacttcgtaggtattgagctctcatgtcaactgtactcatccatgtatcactaacaagctggacaccagggccaccataaacgttaaccaatgttttgtagggaggtggcccgtatttcctctcgtcaggaaggtagagagtgccatataaagtggtcccatcctttgctgtaatttcaactatctccggagacagctgctggaactttttaagtgacggaactgtcgatggctgctcaaacaggggcataattactcttccatcaagcaaagagcacagtaagatcacaggtggagattttattgagtcatacacatcaataaacctcagcaactgatgttcaagaattactgaatgtcggccagttccatgagtcaaccttttgggaggttgcaagggaaggtcccaacctgcaaagagattggtttggtacagatttgtctccaatggtccatccagcgtgccagtgaaatatacaattccactgctctcattgacagctgcaatttgttcaaccatccaatcaccttgtgtgaggggtcctaagcacacaccattcttgtcatgaacatacaagtgtctgaatcctgtcttttcactggcccaaataaagccacctggatgtttactattcactcctttgtctagcggagtgaaacaatcatgcaatgtgatccatgtatcatgctgttcttctagtaagacttcccttttacccgtagtaatatcaaacttaagtaatttaagttttgtgtgagatctgttaagaacttgaacagcaagagcattattattcatccagttgactctagctagatattcttcgtcaccgtgggaaccatttggatctccacaaaggagatccatccaagttacttctcctccatgggaagaaacaacaccaagtcgcactttaacattagctgctcccgcaaacgggtatgcatggtcttcttgagcatctggaccaacagaacttttaccctgatgcataattctatacagtggaatctcagttgagtccacttcagtaaatgcaaggtgtttgctatcaggagaccaccagaatcccatcttcctttccatctcttcctgtgcaatatactcggcaagtccgtggatcttcctactttctcttgcaccgaaagttaattgtttattttccccattagagaaacccaaggtatgcagctcgtcatcctttacatatgcaatcatgttcccgtttggagatagaagagggtcaattattggggatgtgggagaacttttcagcttcaggactggttccgagccagacaaatcctggaagtaaaccccggacggtagcggcacgacaatgccagcgcgagaagag

SEQ ID NO: 29160 - DNA, 939 bp, Setaria italica
  misc_feature (1)..(69): n is a, c, g, or t
  Peptide Sequence Number=SeqID_95134
nnnnnnnnnnnnnnnnnnnnnnnnnnnnnnnnnnnnnnnnnnnnnnnnnnnnnnnnnnnnnnnnnnnnnccttagttggatcagcaaatgtactgagagttctttttgcggcgtcgaacgtaccaagacttacaaaagcatcattcatccatccattcctctgcagacgttttgacaaacaacctccttacaaaagcatcagagttcaaaacaacatcttcacaagcgtcacattacgccttggcaacacggcttatctacaggcttatttggcaaacactccaggacagcgccggaccaaaagagctggaagcttcccgcctgcccgggcaaggccatcaggacctctactcctcgtccatgccgtcctcgtcttcctcctccatgatccgcatcttcttcacggcctgcgcggcgtcggccctgacggcgccgttcgggacctggatcaggatgtccgacttctgtcccgtctcggcgttcaccagcccgccgctccggtccaccttgtaggccagctcgtccttggcggccgcggcgtcgatgtacaccgtgcagttctcgtcgatctcctcctggatcagcatcttcgacagctgcgtcaccaccctcttctcgatccacctcctgatgggccgcgcgccatagaccggatcataagaaagagacaggatgatgtccagcgcagcgtcggtgactgccagagcgatgcccctttcggcaagacggacggccacgtccttcatctgaaggcgagcgaccttcctcagctgctcgtgggacaggggatcgaagatcacgatctcgtcgagccggttcagcagctcagggcggaagtgcctcctcacctcctgcatgacgagatcgcgagcgaccttcatggagttcttgcccaccatcccggcaaggaggttgtttctagtctagttgaacgtcatg

SEQ ID NO: 29161 - DNA, 1204 bp, Setaria italica
  Peptide Sequence Number=SeqID_95135
ttaacatcaagagactaaagagccgtctccccaacacattgttcaacaagataatgctcataacttccctgtaagtggttcagtaatgctgctatttgttgcacattctgcacaaccttaagggttgcatgcacatatttctatgtatatacagtagccaaaacaaaattacaaagaagaatcatacctaatctattcgaccgtacaaaatgaagctaaacattcagacaagtataacaaaaacaatctaattgtttccatgactccagtataacacagcacacttcggtttgcagtttcagaacaaaccgaaccattttgattcttcctgctgctcctccgatgtttcatagtatgttgattcctctctttcatggcttgtataactatccgtgtattctgaaccatcttctgaagcatatgacggtgattcattctcaggttggatagactgaagcatatatttcaggccacttatgatatcataaatcatcagtccaattcttcctccaccccagcttcctagttggcttcccacaagatatccaagttttccaaacctctcctcaccatggaaaccacccgcataagttccaaacaaggtgccagtgccccggagaaaaccttccgtcatgcttccaccaaagtacattgcttcgaagaagtcccaaccagaagaaattattggccccaatatccgattggcttgacgagcagccacttttgccgcttttgcactaaccttctgagcttgcttggctgcttcggcaggtgttaggccttctgtcatggcatcggctaatgctttctccatggcatgctgccgcaccctttccaggtgtgcagttcgaaggttgttgacatacaacttgacaccctccttcgcagtgcatgcaaggctgccagagcccatgtcaaagcagttcatcaatgtgaactgaccactctttgatgcagcttcttttccaacaagttccctgaacttctcagctgtcatgctgagcgcaaggacgcccaagatgaggagcatcagccgcacgcgccgcttctgtatgtccaacatcttcgccccgccgccgtccggatcgaacgccgctgggatctcacctgcctagggaccaatttcccgttccctcttgccaccggaggcagatggaaggagggtgaaagcgaggaaggaggctgggcggagctcggggcttcg

SEQ ID NO: 29162 - DNA, 521 bp, Setaria italica
  Peptide Sequence Number=SeqID_95136
caactcggctagggccggcgcacccttttcccctcctccaccggcgtctcctccgtcgatcgctttcgccgccttcgcccgaacgccacaaaccgcgagctttcttcctcgcctgcaccgaccgactcggctgtactctccagggggtttctggaggaggggcgggcttcgccatgacgaaggacctggataatctgctcctgcaggccgccggccggacggggaagagccagtcccggccgagcaacccgcggtggaactccggggggagcggctccgacggcttcgacgacgactccgactcggacgccgcgccgagctactcgaggaagaagccgccgccgcaggtgccgctcaagaagcggcaccagccggagaagggcggccgacgggccggcgggtggcggggcgacggtgatgaggatgacgaggaggacgacgacgacgacgggaggcgcagcggcggcgaggactcggacagcgcgccgtccgtggggagcgacctgtacaaggacgaggaa

SEQ ID NO: 29163 - DNA, 300 bp, Setaria italica
  Peptide Sequence Number=SeqID_95137
tttttttttttttgttcaaattgtgtgggggtccgggttctgagtttataatgagaacagtctactgatcagtccacagcatcatgaaactctgaaaaaatacatcggcagcatacaggttcttcccattcttctgaacttctgaagtatcggcaatatcaacatgacatgtatgcactctgccactctgacactgtgtacatgttccactctgatgcaggtgcacggcacagaacaagacactgcgcaaaacctgccactccctggtcctgcaggctgcagatgacctgctactagtat

SEQ ID NO: 29164 - DNA, 1346 bp, Setaria italica
  misc_feature (1)..(17): n is a, c, g, or t
  Peptide Sequence Number=SeqID_95138
nnnnnnnnnnnnnnnnncctgtatgcactctgccactctgacacagcgtacaggttcttcccattcttctgaacttctgaagtatcggcaatatcaacatgacatgtatgcactctgccactctgacactgtgtacatgttccactctgatgcaggtgcacggcacagaacaagacactgcgcaaaacctgccactccctggtcctgcaggctgcagatgacctgctactagtatgctgctcctgttcatcatcatcccaaggagacaaacaccacctccccattcgctgcattctccattaccatcacaaccggaagaagaaacacaatccaatccaaaacagagatggaggacaccagtgaccagtcctatcccagcttctgggtgacgagcccctcgatggagccgacgagggcgaaggcgctgacgaggaggcagacgacgctgaaggtctgcaggacgacccaccgcgcggaccaccggggcacgttccgctggatgaagtacatctcgacggggaagtagatggccagcggccagaagttgagcgcgcccagcagggccagcacctcgttgaagtaggggaacgccacggccaccgccgtcgtggacgccacgtacaccgtccggaagcacacccgcagcaggttcacccgccacggcggcaggcacggcacccgcatcgtgtggaaatcgttcacgaacccgctgtccgggaaccgctccgcgaagaacctgtccgcgaactggaagatgggctggctgtacacctggtacccgcccagcaggtggagtatgatgcaggcgttggcgaagtcgatgagccagtagggctcgtagaagccgaagccggtgaggaggttgcccggcgcgtcgctcccgaaggcggcgtagccgaagcagccgcagcagaggtagaagaacgtcgtgacgaggatcgagatcatcgacgccctcttcatcgtcttgttctcggccggcggggacttcagggtgtcctgtatttccagtaggatcaaggagtatgggtatgcgaacgctatgtcgccgatggcctgcgagacgcgccaaatcttctgcataggcgtcctcatcggaacacctgttacgcttcctttgattctcccgttagagatggtggtggccatgccgaggccgaggccgatgaaggcgtaggagaaggacatgacggcagcgacgacggagagccacgccatgtcgtggaagtccggtatgaaggagaggaagagctgcgcggcgccgaagacgagcatgtagtagctgccgccatagtcgcagggcgcgtcgtggccgtggtcgtggtagcagttggccttgaggatcg

SEQ ID NO: 29165 - DNA, 903 bp, Setaria italica
  Peptide Sequence Number=SeqID_95139
cttctccacagccagagacgccttctccgtccggcctccggcgtccgtgctcaaagaacagctctctcttctctcctccgacgattcgtgcccgtcctggtgggtggtggtagacggccggcgacgaggtgaagatgcacttcaggtagatcaagctccaatctgatggattctgatgaaaagaagtttggaaaagggcctagggagctcactggtgctgttgatttaatcaaccactacaaactgctgccgcaccatgatttcttttgcaagaaacctttgccaccggcaatctcagatacacattatcttcacaatgttgtgggagacactgaaattcgcaaaggagaagggatggagctggatcaacttgttcagaatgcatatatgagggataagcctgcttttattcagccctttgatatggaaatactggggcaagcattccagcttcgagaaacagctccagtagatttgccctctgctgaaaagggtatacctactatttcgggtaaaccgaaaagtgagtccaaggacaaagagaagaaacataaaaagcacaaagacaaagaccgggataaagacaaggagcataagaagcataaacatcggcataaagatcggagtaaggacaaagataaagacaagaacaaggaaaagaagttagataaaagtgtgcatcatgattctgcaggcgatcattcaaagaaacatcatgataagaagaggaagcatgagggaaatgaggattcggcggatgtgcataagcacaagaagagcaagcacaagagttccaaaaccgatgaaatggggaatggacttagctaactacacttcctagttctagttgtcaatccttgtaatttgctgttaaaaggactccgatggttcctgtcataaaac

SEQ ID NO: 29166 - DNA, 325 bp, Setaria italica
  Peptide Sequence Number=SeqID_95140
ggcggccacgagcagggccgcccaccacgcgacgcgcctcatcgtcgccgccgctggtcacgccgggtcattgctcggctcggcgagcgcgggaggcgagcagggcaccgggctacccgcgcactcgcagcgtcccgcctattcgccgcgggagggagtggatcgggcggtggcgcgcgcaatccccgcacgaggatgcggcggcgggcggatcggtccggatcttgggagcgcggcgagagatctccagacccctagcgcccccgcgcgcgcacggcgaggcggatggatttgcgagaacggagagtggggaagcggagtgtgc

SEQ ID NO: 29167 - DNA, 460 bp, Setaria italica
  Peptide Sequence Number=SeqID_95141
tgttccggtatagattagattaactagtattttgtaactaaattaggtaaaacttccttaatttattcttgtaaaacttagtttcttttccctacttgtcttgtaactactacaacaggaattaacacaaagatgcttggtataagtagcacaaactccagagctgaacacgcagtaggtgttatagtaaataagatgcttgaagaatatgtaagggttggatatattaacaagttaaatagtagaaaaaaggtttggctcaaattttcaagtgcaactcagaatgaccaggtccaatctcaaatttgtttaatgaaagtgcacacttcaaactacaggtttatctgcaccattctagcccatttttaactgggaataattgcttcatagcttctttttcaccatcattatactgaacataagaaaaacaaatataatggtatgtagaaaaactgcatgg

SEQ ID NO: 29168 - DNA, 253 bp, Setaria italica
  Peptide Sequence Number=SeqID_95142
ccagtgcctggccgatgcggtaattccttccagctcagcgacgcgctcgtcggcggcgagctccgccgagaggacgccggcggtctcccatttcaccccagttccatcaccaggcacgcccgcgcccccgatctcctcgcccctagcggcagcctcgtcgcccgccgcaggctcctggcctcgcccttccttccctctcgtctagatccagccccactgggccgtcgaggcagcagccctgtgctctcggatt

SEQ ID NO: 29169 - DNA, 255 bp, Setaria italica
  Peptide Sequence Number=SeqID_95143
aaacaggagctactccacatcctcagtagcttgattagatatttagattacttaccccattttcgtccatcagaagattggcagttttcaaatcacgatgaataatattattctggtgtaagtagctcatgccttttgacacatccattgcaactccaactaaagcaggaagtttgaaaacacctttatgtttatggaggtaatcatacacactaccaccggacatatattctggaagagagggaaatatgatgg

SEQ ID NO: 29170 - DNA, 2080 bp, Setaria italica
  Peptide Sequence Number=SeqID_95144
tttttttttttaacgtatattattttattttaaaagaatcatgccacggcctggatctggcttattattttcatctacagcaagattacactctgttagagaaatcagactgttaatgtacagcccacaaatatcctctcctatgttacaccatgtaatgctgctactcaggagtaacaaggagaaagacggtacacgatagctgcagctaaaaattgccactttagtcaactgcagcaagtctatatttctgtgtactggcgctggagctcgaggaactggtgctggttgttgctcagatccttcaaaatggactggaaccatgtacatttcaacagcgtctcaatggccccgccccctcagagctgaaaagaaacctcccaataatttgtccttgtgcttcccctcatgctcatctccgacctcctctgatattctctggagagtttctaatatttcagagaagtctggtctttgagcagggtcctgctgccagcatttctgaagaagctcacaaagctttgcatgtgtatgttttggaattgtaggacgtaaacccttctgcaccaccccaacagctgcttgtagtggagtcaagtactcataaggaatcttccccgtgagtagttcccacaacaaaattccaaaactgaaaacatcagccttgtggtcatagggtttgtgctctatgacctctggggccatccaccggtaagtaccagtttctgcagtcataactccagattgagctttaacacgtgcaacaccaaaatcagcaactttaacagtcccattttcgtccatcagaagattggcagttttcaaatcacgatgaataatattattctggtgtaagtagctcatgccttttgacacatccattgcaactccaactaaagcaggaagtttgaaaacacctttatgtttatggaggtaatcatacacactaccaccggacatatattctgtgactatacatagatttgggggtttagtgcaagcaccaataaattgcacaacattcttgtgacggaccttcctcataatatatacttcctgagcaaattcccgctgcatgtccgcatttattctctcaggtttcagcactttaatagcaacatcttggctgcaatatgtaccccggtaaagatcaccatatgatcctgatgctactttattcccaaatttgagcagttttacatcaatttcccattcactagaaccatctgttggtatctcaacacgatcagctgctggattctcagcaatctgcatattttcgacgggggtagaccatgaatgagatgaagaccatgcttgtgtctcttcaatcctgccaatttccttctgtactgcttctactaaatcctctgtttcctcatcgtgccaaccaacaacaacaaagacgtcgagtgagtaaccatcatttgttgaaaatgcatgtgcttcttgaatgtttagaccaagttcaccaagcagagatgtcagctcactgagaagctttggcttgtcaatggtagaaaaggtgatttcatgcatgggcctgtacagagatcgaccattatcagaggtgctgtcatgatcttggccttgagacttgctaacttcaagagcaagggcctcaagatttgtagaagaaccgaaagcaggaggagggtgtatgctttgctgcctgttcaacaatcttgaagcaacttcctcccctgcagtgttcgaatcagcatcagtctgattcccatcaagaattggagatacctgcacggcccgcaccgcgaacgccgggcgctgcgccggatccctcgcctgctccagcagccgcctgtgcgtgagcacgtcctccgccctctccacgttcacatccatggcgtaacgggcggggaggcggttgaagtggttccagagctcgtcgtcgaacccgggcgcccgggcctcgggcaggccagactcgtggaggcggcggagcacctccgtgtacacctcgagcttgtggcgctgctgctgctgctgcttccgcgcctgcgccgccacggcggccgacgaggaggacgtcgctggccccgccgcccctccgccggacgcg

SEQ ID NO: 29171 - DNA, 1275 bp, Setaria italica
  Peptide Sequence Number=SeqID_95145
tgttttttgcacagttcacaatcatcaattacttccctccatcccaaattactattcgtattaacttatgtccagatacgtagcgaatgatgtgtacatagaaaagccaaaaggaatagtaatttaggacggacctatattataggtgacgcttggcacattggtatatcaaatgcacatcgatggagaagccactcttgcagaagacacagtcttggaacttcgggaatcaaggacaccaaaagtattttttaactactgagctgtaggacgtgccatcaggatactggaactttgcagcaaatgttgagcacatcatccaaaggtgcatggtcacctgtgccctcatctttccttgcatataacagttctttacctttaaatacaaacattcccccctgctgtaggacacctgccctatcatctggggtggcttcgattgtataattcttcaccgcctccttaagggagtcaaaccttgaaaacactttcgcactggctgggttgaagaatgtgcgcccaacaccaaaatatagacccaagagatcatacgccttccgttcaggatctgcatacaggtattctaatggaaagggcaaacgctcagcaagaatacgggctttatctggagtgccaacaccaatagcaatgagttttactccagccaaatcaaatctctcctttgtgtccctcaaaacagaggccaactcccagcagcaagggcacccaaaatgccttagcagcgcaacaacagccattccctcgttctggtcccacagatccctgaacaggacgggctcgccggtagccgcggagtagatttcgacgccgccaagggcctcgccgattcccgaccctggatccggagaagaggagggcacggatggggagctcgcggcggcagtccccaccggcgacggtgagcggcggagacggaggtggcggtggcggaggccagggagggagacgaggtccaggccgcgggaggaggcagcggtggggcgagcgggcggcgggagggagacgcgaggggctagcgaggtggccacgggcgcggccatgagtgcggcgggagacgcggcggtaccctagccgcggaggagaggggaggagaagagtggaggttgggtggcgtcggcggcggcggccgcgtgccgcgctacttcagcgacaaggcctccggcaggttgctcagcgaggaggagcgcgccgccgagaacgtctacatacagaagatggagcgggagaaactggagaagctgaggaggaaggcgg

SEQ ID NO: 29172 - DNA, 402 bp, Setaria italica
  Peptide Sequence Number=SeqID_95146
cacgcatgcttagtcgttcctctacagtttgctgaaatatcaggcaaaaccaccggccaccggccggtaagtcatcaggcctcgtcatgattaatggcgcttggacgccggaggccggtcgtgagggccggagcccaccgaatacagcagccgcgttggcaaacaagaaaccgtgaataaccccgcacctgcattcacgagtggaacagaagtaggggtatagaatctaggtgcggcatgtgatgtggggaacaaaggtacggtgttccttcacctcttctcgacaaatgccaagaagatgctccacatcgacaacggtgcgaaattcatccatgatccatgctccatggcgctgctgagactggggataacatgtttagtttctaattaagataaaccttg

SEQ ID NO: 29173 - DNA, 299 bp, Setaria italica
  Peptide Sequence Number=SeqID_95147
actgtgaaggagtgccacagtgaagattctcaatgtgcatttgttattgacaaaattattgaaactacgtctacttcagctgacagctgtaactttggcaacattgctgtcctgtaccgaagacagataactggaaaagcgttccaagtggcattccgcaacagaaaaattccctttaatgtccatggtgttgctttctacagaaagaaggtgatcaaagctatcatggcaatacttcgaaccacattacctggctgtgacgatggcccatggcgtcaagccttcaagggccccttttt

SEQ ID NO: 29174 - DNA, 474 bp, Setaria italica
  Peptide Sequence Number=SeqID_95148
tcctttacggtgatagtacaataagtaccaaaaagtataacagaggtcagcagaatgttaactaggacagagcttcccaaaaacaacgaacttccaaggatccagttcttcttgtcttccttccatttgttggaaccaacaagctcagcttgtgtactgttgttcttccgtaccttgacgaaaagtgtcctctccacattatctcccatcttgccatttgacaaaggcatcttcttcttccaacatgtattatcttggtcatggaagacagcaacggcacagaaacaatctgtcagacagagttgctggcactgatccttagttatggggctgtactcctcatagtcagctagaggccaatccacactgttcatcggtatcaacttaaactgcatactggcagctgcttcatccaagtcacaactttgtggctggaagtcaggtttgcagcctttatacttcctctcctcatca

SEQ ID NO: 29175 - DNA, 265 bp, Setaria italica
  Peptide Sequence Number=SeqID_95149
taattttgacacggtacattctgatctgacctcctaaacggaatactctttctaccagtatcctcttcggtccacttattagaagtcgagttgttgagaggtgtcgctcctatgttgggagcgcctaatctttgtgcatcagcaccagacatatctcttaagaattgatcagacacgttacgtaagacagcagaagtaccgggcaaaccatcatcactactgcatggatactccaaatatgcatgccgccgtgagagacggcgat

SEQ ID NO: 29176 - DNA, 654 bp, Setaria italica
  Peptide Sequence Number=SeqID_95150
agaacttagaatgaatttacttacgaaccaacaaagtggaggagcgtcgtcttgccatcagcgcccttcacatcgactagcttgaggagtgcatcgagcttgaaggcgtgtgcgttcccacggttcgtgcctgtgttcatgcggttgccagtcttcaggaccgcgtctaagatcttgtggaacagcctgctgccccttagttcttcacatgctgcctcaagagtcttgaaggaggtcttgaggtagtcaacctctgaatcgaagttggtgatgtagagcattgcttccactctcttgaaagcgaatggtatcgcaagcactgccttgaggaagctctcggcagggccaagcttacacagagcatcctccctgaattctttcagtttgatctcctcctctctagtaggcgccatcttcagcagcatctccaagagctcagttccaaggctctctgcttgcccatccaagagagccttgcacacttcttcttttgttgcatttagcgcccttagcattatcgcgatgttctgcgatttcttcgggtcgaggaccttgttctcctggctgcacaaactggaatttggcccctgactccactcttagacgatctccttgttgaatttgagacaaacaatgtttcgatcatctcttcgt

SEQ ID NO: 29177 - DNA, 633 bp, Setaria italica
  Peptide Sequence Number=SeqID_95151
ttaaaagtaaaagtaataataagaagtatatgccctgagagtgatgaagatgatatgactctctggagtggcagtgaagatgacgacgacgatgatattccctctgaggcacatcccagtgaacgcagtgattcatatattgataaggtgtttgaatttgacgagtcaccaaagtaccgcacaatctcagagctgttgaaagcggagaatgaaccaccagagctatctccaggaaagcaagcaagaaaacttgccgtagaaaatgctctcaagaagttgaagaaaggccctgatggacgctacattaacgtatttgatgttgtcactgatatagatatcctgattggtgcatttgagaacattgtttcaggaccagaatatgcagagctgcgggagggtggaccaaaaaagctcaatatacagttctttaaggatatacaagcacgcatgagggacccgaatttcaagttttctccagagttgaagttaaagccaaagagtaagttagtgtctaggaaaaagtggcagaaagcaaaagcaaggaagaggaaaaatgacagacgttgagctgatgtcatacattgtgatgcattcatcttcttttctcctctcatcaggatgctttcttcagat

SEQ ID NO: 29178 - DNA, 214 bp, Setaria italica
  Peptide Sequence Number=SeqID_95152
ggacaatagaaattttacatctataggcatcagttatgagacgatgatgcaattagcaaagtcctcctggatcttgcaccttagttgcaacaaacgacgagtggcgccaattgctgcactgctatctgcaatattgcaccctgctatcttttgtaaattggaaatgcaccagacaaatgaagaagggccaggccctttaaaatggtttattgag

SEQ ID NO: 29179 - DNA, 391 bp, Setaria italica
  Peptide Sequence Number=SeqID_95153
atgatttcttagataaacactatgcttcagaacattatcaattaatttgctccatctattttcaaatacttgattaaatgcatataactattaactaggcagtcattccttgtataaaatgtgaccagaaaatccgtaaattaacaaaatattgggcggacaatagaggaatgaaagagttaagagggccattttgagacaattctcagaaattgcaagtcaccgaatatcatgaacatagcttttagtcacaagtgtcctagcattgttatctctcataatgagtagcaagcatagttttggcttcttatgatggttttgcaggtcccatctggtgccaccacagaagaccggggcgaccgaacggagggattggatagtgatgttggtc

SEQ ID NO: 29180 - DNA, 507 bp, Setaria italica
  Peptide Sequence Number=SeqID_95154
tttaaattttttgtttacgggtttattttctttactttaattttcttacctacgttcctcaattttactttgactcaatcacaatatttttccataatgtgctaaaccctcctgaagtgcctgaggatcattatttcatgacaccacatggcagccttggtcagggtcattgggatacagagcatgacatagaatataggttcgctcagtcacccacaggaacagcccatgcaactacgacagaagatgccattgcgcagctgcgttctagaaggctcatgagtagaatggaggtcccatctggtgccaccacagaagaccgggggcgaccgaacggaggtacttcttggtgcttctttgtttcacttcttttgttctgttgcactgaagtttcctacttgatcatagccttccgaactgcgacactgtggtacaaaagcaaatctcccttaagtcaatcctagagaaactgcaatttgaaaaacaagtataacatggttaattgca

SEQ ID NO: 29181 - DNA, 734 bp, Setaria italica
  Peptide Sequence Number=SeqID_95155
gccagccggaggaggcgaacgggggcgggggggaaagtcggaagcgatcagagcgagagcagcaagcttgcttgcttcgtctaccagaatccctaatccccatccccctccctctctccccgccgatggaccagctggtcaatttcatcatccgcccgcccagagctgactacagtccaaatgacgatctattagagcaggagtttatgctgaaggggagatggttccagaggaaggacttggaggtcaaaaatgatctgggcaagaaattgcagtgtagtcactatatgccggttgtgattcctgaaggaaaagctctcccctgtgtcatatactgtcatggtaacagtgggtgcagagctgatgctagtgaagccgctattattcttctaccaacaaacattacagtctttacactggacttttcagggtctggactctctgaaggagaacatgtcaccttaggctggaatgagaaagaagatctgaaagctgttgttaactatttgcgtacagatgggaatgtatcttgcatagctttgtggggtcgctcaatgggtgctgtcacaagtctaatgtatggagcggaggatccatcaattgctggaatggttcttgatagtccattctccaacttggttgacttgatgatggagctagtggacacgtacaaatatccactgccaaaattcacggtcaaacttgcaatacagcacatgcgaaagattgtcaag

SEQ ID NO: 29182 - DNA, 1781 bp, Setaria italica
  misc_feature (1757)..(1781): n is a, c, g, or t
  Peptide Sequence Number=SeqID_95156
ttaatttaggttaatttgttattctttgtctattagtctttgtggggttcgctcaatgggtgctgtcacaagtctaatgtatggagcggaggatccatcaattgctggaatggttcttgatagtccattctccaacttggttgacttgatgatggagctagtggacacgtacaaatatccactgccaaaattcacggtcaaacttgcaatacagcacatgcgaaagattgtcaagaggaaagctaattttgacatcatggatcttgatactattcaggtagcaaaacgttgtttcgttcctgccttgtttggacatgcaactgaggatgattttatacttccccaccattcagacaagatatatgaatcatatattggcgacaaaaacatcataaaatttgacggggatcacaattcaccacgtcctcaattttactttgactcaatcacaatatttttccataatgtgctaaaccctcctgaagtgcctgaggatcattatttcatgacaccacatggcagccttggtcagggtcattgggatacagagcatgacatagaatataggttcgctcagtcacccacaggaacagcccatgcaactacgacagaagatgccattgcgcagctgcgttctagaaggctcatgagtagaatggaggtcccatctggtgccaccacagaagaccggggcgaccgaacggagggattggatagtgatgttggtccctcctcatctagcgtatcaacagcaactcctcccaatggccgcaacggaaggctgctcactccaacctctgatgatggcgagtatgtggagtactcatttgatagcttatcagatatgccttacaccatggaagatgaagatagaatgctgatgcgagcaattatggaatcgctgaaggactatgaacagtcaagtacaaaaaatgcgcaatcagtttcatcagatgctgcatccaaagagaacaatactgtaaaagactgcaacggtgtggctggtgcagcattggagccagatgcatccttggtgcccactgatgctcctggcaagcatactgctgtctgcaacagtggagcaaaagcgggtgaagtacaaagtgtggatacccaagctgtaaacaacactgcttcagctaatgcttctggctcttcagagcccctggcgtcaacacagatcaccaacgggaagctggtctcagcggaatcccagaaaacgacacagaacgtcagtggagaggacggcacgagagcaactctggtagttcaaaagagccggaccggtggcctaatagatggcctgacacaaaaatggggttccttcttcaagaacaatgactgagacgagcacagtacacaaataactcccttgacaatacatgttccggtgtgttaatagtcatagagttgctgttggctgatgtccagcttgattcgttttacgtgtaaaatggaaaggaaacagatggtttcaggatgtttgtgtatatatagaactaggaaattgtagcgcccccattggttgtgtatcatgtctcacactcgcaactttggttctggtgaattggctcatgggttgtaacataattggaaagctcattatcttgtagttgtatttgtgattttttttaaatttcttcatttaagggtagaccggtagagtgggcgcatcgcaatgtggattcgaattgtgttgcccgtgtcatattaaacttttgtactcctccatatttgtcgctgttgactttttcgtnnnnnnnnnnnnnnnnnnnnnnnnn

SEQ ID NO: 29183 - DNA, 489 bp, Setaria italica
  Peptide Sequence Number=SeqID_95157
gttcagaagaatgattacgatgctgcccttgtcgctgcttttaggagggagcaagagaaggaagcacaattgaaggcaacaatagctgcaaaacagattgctgaacagctggtctgtagttaataatcaaagaaaaaatgtgcacaggtagtcatgtattttctaacttaatgtttttgtttccgcacaggcagctcaaaagcagaagaggtaagaagtttcaagatgaggcttaagtttcgtgaagatcggatcaaaagattggagcaggttgcttcaggaaaattatctgctgaggcgcttcttttgcaagagagggaaagccttgtgaaggagttagaggtcctgcggagtcaattagatcacaatccagaaatcacgaaatttgcaatggagaacctacaactaaaagaagagctgcgaaggttgcagtcatttgttgatgaaagtgaacgggaaatgatgcatgatcaaataattattttacaa
